United States Patent Application Publication US 2011/0183924 A1 - sequence listing, part 285

SEQ ID NO: 891989 - protein, 344 aa, Homo sapiens
HHSLISSSQDTKHCGRRQGPLPRKARSSGTMEDKRNIQIIEWEHLDKKKFYVFGVAMTMMIRVSVYPFTLIRTRLQVQKGKSLYHGTFDAFIKILRADGITGLYRGFLVNTFTLISGQCYVTTYELTRKFVADYSQSNTVKSLVAGGSASLVAQSITVPIDVVSQHLMMQRKGEKMGRFQVRGNPEGQGVVAFGQTKDIIRQILQADGLRGFYRGYVASLLTYIPNSAVWWPFYHFYAEQLSYLCPKECPHIVFQAVSGPLAAATASILTNPMDVIRTRVQVEGKNSIILTFRQLMAEEGPWGLMKGLSARIISATPSTIVIVVGYESLKKLSLRPELVDSRHW

SEQ ID NO: 891990 - protein, 143 aa, Homo sapiens
MRPADGIRWERRIDWGLRPRGPGLEFASDAASIEAMWLHCLPISQTVLSGGPSITSMQVEGKNSIILTFRQLMAEEGPWGLMKGLSARIISATPSTIVIVVGYESLKKLSLRPELVDSRHGSSSWAFSPDSKQLLSTLSPFIS

SEQ ID NO: 891991 - protein, 700 aa, Homo sapiens
MSISSVTSPPSLSKTEVVVYMLRVESMGSNVFCTLEFPRLFQGNYLALRWFFSVFLRASYLITEEDSALWPVPDFLTPFAGGRGGVRGVPCGVKAPLALSSILSSNADGRKYHKCSDCGSGEPERPAQETRNKMSQFVGGDQRHPAEGARPQVMPPQEAQEHQNGNSPFQPSGASQMSLSDVPFTCLKALLLPGSWFVHSILSSAWVSQTKRMIPGQSSDTRAQTEAESPDRRSCEAGVGSRGGHGARGIIEVRDNFWRRETEKEGLAKDQEGDSILIYERRLKWGLTEPDWVESSFGQVSVQEMRAENGPSEPSQKGKAQSSTLLLHIPPYCSNPRSSGTMEDKRNIQIIEWEHLDKKKFYVFGVAMTMMIRVSVYPFTLIRTRLQVQKGKSLYHGTFDAFIKILRADGITGLYRGFLVNTFTLISGQCYVTTYELTRKFVADYSQSNTVKSLVAGGSASLVAQSITVPIDVVSQHLMMQRKGEKMGRFQVRGNPEGQGVVAFGQTKDIIRQILQADGLRGFYRGYVASLLTYIPNSAVWWPFYHFYAEQLSYLCPKECPHIVFQAVSGPLAAATASILTNPMDVIRTRVQVEGKNSIILTFRQLMAEEGPWGLMKGLSARIISATPSTIVIVVGYESLKKLSLRPELVDSRHWYQWWGEKPAVFHTTVGQGQSGEDSTLSRCSHHTPSPALGQVAYLG

SEQ ID NO: 891992 - protein, 209 aa, Homo sapiens
MEDKRNIQIIEWEHLDKKKFYVFGVAMTMMIRVSVYPFTLIRTRLQVQKGKSLYHGTFDAFIKILRADGITGLYRGFLVNTFTLISGQCYVTTYELTRKFVADYSQSNTVKSLVAGGSASLVAQSITVPIDVVSQHLMMQRKGEKMGRFQVRGNPEGQGVVAFGQTKDIIRQILQADGLRGFYRGYVASLLTYIPNSAVWWPFYHFYAG

SEQ ID NO: 891993 - protein, 136 aa, Homo sapiens
WESHLVEAASTVRADRWCFVSLAIVFPWIPEQLSYLCPKECPHIVFQAVSGPLAAATASILTNPMDVIRTRVQVEGKNSIILTFRQLMAEEGPWGLMKGLSARIISATPSTIVIVVGYESLKKLSLRPELVDSRHW

SEQ ID NO: 891994 - protein, 237 aa, Homo sapiens
MEDKRNIQIIEWEHLDKKKFYVFGVAMTMMIRVSVYPFTLIRTRLQVQKGKSLYHGTFDAFIKILRADGITGLYRGFLVNTFTLISGQCYVTTYELTRKFVADYSQSNTVKSLVAGGSASLVAQSITVPIDVVSQHLMMQRKGEKMGRFQVRGNPEGQGVVAFGQTKDIIRQILQADGLRGFYRGYVASLLTYIPNSAVWWPFYHFYAGKQGPGQWGRKVGFLMGLRYCCFVHVRVE

SEQ ID NO: 891995 - protein, 118 aa, Homo sapiens
SLGGGTYKDWKLFLAPSLTPSSSPLSFSLGKQSWGLENEALIVRCPRQGKPSYTVDWYYSQTNKSIPTQERNRVFASGQLLKFLPAAVADSGIYTCIVRRYYAEGSHLLSPCSPFFSG

SEQ ID NO: 891996 - protein, 328 aa, Homo sapiens
MGFWILAILTILMYSTAAKFSKQSWGLENEALIVRCPRQGKPSYTVDWYYSQTNKSIPTQERNRVFASGQLLKFLPAAVADSGIYTCIVRSPTFNRTGYANVTIYKKQSDCNVPDYLMYSTVSGSEKNSKIYCPTIDLYNWTAPLEWFKNCQALQGSRYRAHKSFLVIDNVMTEDAGDYTCKFIHNENGANYSVTATRSFTVKDEQGFSLFPVIGAPAQNEIKEVEIGKNANLTCSACFGKGTQFLAAVLWQLNGTKITDFGEPRIQQEEGQNQSFSNGLACLDMVLRIADVKEEDLLLQYDCLALNLHGLRRHTVRLSRKNPSKECF

SEQ ID NO: 891997 - protein, 385 aa, Homo sapiens
MGFWILAILTILMYSTAAKFSKQSWGLENEALIVRCPRQGKPSYTVDWYYSQTNKSIPTQERNRVFASGQLLKFLPAAVADSGIYTCIVRSPTFNRTGYANVTIYKKQSDCNVPDYLMYSTVSGSEKNSKIYCPTIDLYNWTAPLEWFKNCQALQGSRYRAHKSFLVIDNVMTEDAGDYTCKFIHNENGANYSVTATRSFTVKVWCQSFCKLKKSLIFSNTHWIQSLMRGFVMVYYGVHKCCRVVFNLCLQYFSTSSMALNEQGFSLFPVIGAPAQNEIKEVEIGKNANLTCSACFGKGTQFLAAVLWQLNGTKITDFGEPRIQQEEGQNQSFSNGLACLDMVLRIADVKEEDLLLQYDCLALNLHGLRRHTVRLSRKNPSKECF

SEQ ID NO: 891998 - protein, 209 aa, Homo sapiens
MGFWILAILTILMYSTAAKFSKQSWGLENEALIVRCPRQGKPSYTVDWYYSQTNKSIPTQERNRVFASGQLLKFLPAAVADSGIYTCIVRSPTFNRTGYANVTIYKKQSDCNVPDYLMYSTVSGSEKNSKIYCPTIDLYNWTAPLEWFKNCQALQGSRYRAHKSFLVIDNVMTEDAGDYTCKFIHNENGANYSVTATRSFTVKDEQGKF

SEQ ID NO: 891999 - protein, 556 aa, Homo sapiens
MGFWILAILTILMYSTAAKFSKQSWGLENEALIVRCPRQGKPSYTVDWYYSQTNKSIPTQERNRVFASGQLLKFLPAAVADSGIYTCIVRSPTFNRTGYANVTIYKKQSDCNVPDYLMYSTVSGSEKNSKIYCPTIDLYNWTAPLEWFKNCQALQGSRYRAHKSFLVIDNVMTEDAGDYTCKFIHNENGANYSVTATRSFTVKDEQGFSLFPVIGAPAQNEIKEVEIGKNANLTCSACFGKGTQFLAAVLWQLNGTKITDFGEPRIQQEEGQNQSFSNGLACLDMVLRIADVKEEDLLLQYDCLALNLHGLRRHTVRLSRKNPIDHHSIYCIIAVCSVFLMLINVLVIILKMFWIEATLLWRDIAKPYKTRNDGKLYDAYVVYPRNYKSSTDGASRVEHFVHQILPDVLENKCGYTLCIYGRDMLPGEDVVTAVETNIRKSRRHIFILTPQITHNKEFAYEQEVALHCALIQNDAKVILIEMEALSELDMLQAEALQDSLQHLMKVQGTIKWREDHIANKRSLNSKFWKHVRYQMPVPSKIPRKASSLTPLAAQKQ

SEQ ID NO: 892000 - protein, 328 aa, Homo sapiens; identical to SEQ ID NO: 891996

SEQ ID NO: 892001 - protein, 556 aa, Homo sapiens; identical to SEQ ID NO: 891999

SEQ ID NO: 892002 - protein, 55 aa, Homo sapiens
RAHKSFLVIDNVMTEDAGDYTCKFIHNENGANYSVTATRSFTVKGKLLTLMRQNT

SEQ ID NO: 892003 - protein, 78 aa, Homo sapiens
MLGPNPVHKDLAAEPHTQEKVDKWATKGFLQARGGAGPPFLGQVWGGGSPERRLGKPGGREGNRGPGAAGGGTPPWGP

SEQ ID NO: 892004 - protein, 117 aa, Homo sapiens
MTVLEAVLEIQAITGSRLLSMVPGPARPPGSCWDPTQCTRTWLLSHTPRRRWISGLPRASCRLGEEPPPLPYCDQAYGEELSIRHRETWAWLSRTDTAWPGAPGVKQARILGELLLV

SEQ ID NO: 892005 - protein, 117 aa, Homo sapiens; identical to SEQ ID NO: 892004

SEQ ID NO: 892006 - protein, 117 aa, Homo sapiens; identical to SEQ ID NO: 892004

SEQ ID NO: 892007 - protein, 117 aa, Homo sapiens; identical to SEQ ID NO: 892004

SEQ ID NO: 892008 - protein, 117 aa, Homo sapiens; identical to SEQ ID NO: 892004

SEQ ID NO: 892009 - protein, 78 aa, Homo sapiens; identical to SEQ ID NO: 892003

SEQ ID NO: 892010 - protein, 120 aa, Homo sapiens
MTVLEAVLEIQAITGSRLLSMVPGPARPPGSCWDPTQCTRTWLLSHTPRRRWISGLPRASCRLGEERPIGQLWGVCTPGDLAVSENVAGPVGANGRPVGQKRGWGNSPWVAGPIGMARGR

SEQ ID NO: 892011 - protein, 117 aa, Homo sapiens; identical to SEQ ID NO: 892004

SEQ ID NO: 892012 - protein, 117 aa, Homo sapiens; identical to SEQ ID NO: 892004

SEQ ID NO: 892013 - protein, 117 aa, Homo sapiens; identical to SEQ ID NO: 892004

SEQ ID NO: 892014 - protein, 117 aa, Homo sapiens; identical to SEQ ID NO: 892004

SEQ ID NO: 892015 - protein, 117 aa, Homo sapiens; identical to SEQ ID NO: 892004

SEQ ID NO: 892016 - protein, 117 aa, Homo sapiens; identical to SEQ ID NO: 892004

SEQ ID NO: 892017 - protein, 120 aa, Homo sapiens; identical to SEQ ID NO: 892010

SEQ ID NO: 892018 - protein, 117 aa, Homo sapiens; identical to SEQ ID NO: 892004

SEQ ID NO: 892019 - protein, 117 aa, Homo sapiens; identical to SEQ ID NO: 892004

SEQ ID NO: 892020 - protein, 117 aa, Homo sapiens; identical to SEQ ID NO: 892004

SEQ ID NO: 892021 - protein, 117 aa, Homo sapiens; identical to SEQ ID NO: 892004

SEQ ID NO: 892022 - protein, 318 aa, Homo sapiens
MERGDQPKRTRNENIFNCLYKNPEATFKLICFPWMGGGSTHFAKWGQDTHDLLEETASHHVAKAGLKLRRSSDPPASAYPCAGVSHRRREPPCLAKILGLFWILIFFMHSLRLPGRESRVEEPLENDISQLVDEVVCALQPVIQDKPFAFFGHSMGSYIAFRTALGLKENNQPEPLHLFLSSATPVHSKAWHRIPKDDELSEEQISHYLMEFGGTPKHFAEAKEFVKQCSPIIRADLNIVRSCTSNVPSKAVLSCDLTCFVGSEDIAKDMEAWKDVTSGNAKIYQLPGGHFYLLDPANEKLIKNYIIKCLEVSSISNF

SEQ ID NO: 892023 - protein, 265 aa, Homo sapiens
MERGDQPKRTRNENIFNCLYKNPEATFKLICFPWMGGGSTHFAKWGQDTHDLLEVHSLRLPGRESRVEEPLENDISQLVDEVVCALQPVIQDKPFAFFGHSMGSYIAFRTALGLKENNQPEPLHLFLSSATPVHSKAWHRIPKDDELSEEQISHYLMEFGGTPKHFAEAKEFVKQCSPIIRADLNIVRSCTSNVPSKAVLSCDLTCFVGSEDIAKDMEAWKDVTSGNAKIYQLPGGHFYLLDPANEKLIKNYIIKCLEVSSISNF

SEQ ID NO: 892024 - protein, 265 aa, Homo sapiens; identical to SEQ ID NO: 892023

SEQ ID NO: 892025 - protein, 318 aa, Homo sapiens; identical to SEQ ID NO: 892022

SEQ ID NO: 892026 - protein, 160 aa, Homo sapiens
MERGDQPKRTRNENIFNCLYKNPEATFKLICFPWMGGGSTHFAKWGQDTHDLLEVHSLRLPGRESRVEEPLENDISQLVDEVVCALQPVIQDKPFAFFGHSMGSYIAFRTALGLKENNQPEPLHLFLSSATPVHACVVVHVSSQRPGIAFPKMMNCQKNK

SEQ ID NO: 892027 - protein, 116 aa, Homo sapiens
MERGDQPKRTRNENIFNCLYKNPEATFKLICFPWMGGGSTHFAKWGQDTHDLLEVHSLRLPGRESRVEEPLENDISQLVDEVVCALQPVIQDKPFAFFGHRYLISVLKDFRGVSSI

SEQ ID NO: 892028 - protein, 265 aa, Homo sapiens; identical to SEQ ID NO: 892023

SEQ ID NO: 892029 - protein, 286 aa, Homo sapiens
MERGDQPKRTRQATPCATRLFLHPRGSDTLPLNENIFNCLYKNPEATFKLICFPWMGGGSTHFAKWGQDTHDLLEVHSLRLPGRESRVEEPLENDISQLVDEVVCALQPVIQDKPFAFFGHSMGSYIAFRTALGLKENNQPEPLHLFLSSATPVHSKAWHRIPKDDELSEEQISHYLMEFGGTPKHFAEAKEFVKQCSPIIRADLNIVRSCTSNVPSKAVLSCDLTCFVGSEDIAKDMEAWKDVTSGNAKIYQLPGGHFYLLDPANEKLIKNYIIKCLEVSSISNF

SEQ ID NO: 892030 - protein, 196 aa, Homo sapiens
MERGDQPKRTRNENIFNCLYKNPEATFKLICFPWMGGGSTHFAKWGQDTHDLLEVHSLRLPGRESRVEEPLENDISQLVDEVVCALQPVIQDKPFAFFGHSMGSYIAFRTALGLKENNQPEPLHLFLSSATPVHSKAWHRIPKDDELSEEQISHYLMEFGGTPKHFAEAKEFVKQCSPIIRADLNIVRSCTVNNFL

SEQ ID NO: 892031 - protein, 237 aa, Homo sapiens
RAHPEVGAGQPARPGAMAAAATAAEGVPSRGPPGEVIHLNVGGKRFSTSRQTLTWIPDSFFSSLLSGRISTLKDETGAIFIDRDPTVFAPILNFLRTKELDPRGVHGSSLLHEAQFYGLTPLVRRLQLREELDRSSCGNVLFNGYLPPPVFPVKAGGTRAAGLGWGALKTDLREGNRGQGPPVGPGTGEAKTNRNWPTPDNLLWPQMARCLPGGAEIGLVHEERNPLHPSSPSRDES

SEQ ID NO: 892032 - protein, 118 aa, Homo sapiens
RAHPEVGAGQPARPGAMAAAATAAEGVPSRGPPGEVIHLNVGGKRFSTSRQTLTWIPDSFFSSLLSGRISTLKDETGAIFIDRDPTVFAPILNFLRTKELDPRLAWKKGRESLTVFSP

SEQ ID NO: 892033 - protein, 762 aa, Homo sapiens
RAHPEVGAGQPARPGAMAAAATAAEGVPSRGPPGEVIHLNVGGKRFSTSRQTLTWIPDSFFSSLLSGRISTLKDETGAVSRTRTEMGWGGRGLVGRGAGPHSVLPLTPSILCPPFPQIFIDRDPTVFAPILNFLRTKELDPRGVHGSSLLHEAQFYGLTPLVRRLQLREELDRSSCGNVLFNGYLPPPVFPVKRRNRHSLVGPQQLGGRPAPVRRSNTMPPNLGNAGLLGRMLDEKTPPSPSGQPEEPGMVRLVCGHHNWIAVAYTQFLVCYRLKEASGWQLVFSSPRLDWPIERLALTARVHGGALGEHDKMVAAATGSEILLWALQAEGGGSEIGVFHLGVPVEALFFVGNQLIATSHTGRIGVWNAVTKHWQVQEVQPITSYDAAGSFLLLGCNNGSIYYVDVQKFPLRMKDNDLLVSELYRDPAEDGVTALSVYLTPKTSDSGNWIEIAYGTSSGGVRVIVQHPETVGSGPQLFQTFTVHRSPVTKIMLSEKHLISVCADNNHVRTWSVTRFRGMISTQPGSTPLASFKILALESADGHGGCSAGNDIGPYGERDDQQVFIQKVVPSASQLFVRLSSTGQRVCSVRSVDGSPTTAFTVLECEGSRRLGSRPRRYLLTGQANGSLAMWDLTTAMDGLGQAPAGGLTEQELMEQLEHCELAPPAPSAPSWGCLPSPSPRISLTSLHSASSNTSLSGHRGSPSPPQAEARRRGGGSFVERCQELVRSGPDLRRPPTPAPWPSSGLGTPLTPPKMKLNETSF

SEQ ID NO: 892034 - protein, 734 aa, Homo sapiens
RAHPEVGAGQPARPGAMAAAATAAEGVPSRGPPGEVIHLNVGGKRFSTSRQTLTWIPDSFFSSLLSGRISTLKDETGAIFIDRDPTVFAPILNFLRTKELDPSTLTSSQFYYPGGVHGSSLLHEAQFYGLTPLVRRLQLREELDRSSCGNVLFNGYLPPPVFPVKRRNRHSLVGPQQLGGRPAPVRRSNTMPPNLGNAGLLGRMLDEKTPPSPSGQPEEPGMVRLVCGHHNWIAVAYTQFLVCYRLKEASGWQLVFSSPRLDWPIERLALTARVHGGALGEHDKMVAAATGSEILLWALQAEGGGSEIGVFHLGVPVEALFFVGNQLIATSHTGRIGVWNAVTKHWQVQEVQPITSYDAAGSFLLLGCNNGSIYYVDVQKFPLRMKDNDLLVSELYRDPAEDGVTALSVYLTPKTSDSGNWIEIAYGTSSGGVRVIVQHPETVGSGPQLFQTFTVHRSPVTKIMLSEKHLISVCADNNHVRTWSVTRFRGMISTQPGSTPLASFKILALESADGHGGCSAGNDIGPYGERDDQQVFIQKVVPSASQLFVRLSSTGQRVCSVRSVDGSPTTAFTVLECEGSRRLGSRPRRYLLTGQANGSLAMWDLTTAMDGLGQAPAGGLTEQELMEQLEHCELAPPAPSAPSWGCLPSPSPRISLTSLHSASSNTSLSGHRGSPSPPQAEARRRGGGSFVERCQELVRSGPDLRRPPTPAPWPSSGLGTPLTPPKMKLNETSF

SEQ ID NO: 892035 - protein, 723 aa, Homo sapiens
RAHPEVGAGQPARPGAMAAAATAAEGVPSRGPPGEVIHLNVGGKRFSTSRQTLTWIPDSFFSSLLSGRISTLKDETGAIFIDRDPTVFAPILNFLRTKELDPRGVHGSSLLHEAQFYGLTPLVRRLQLREELDRSSCGNVLFNGYLPPPVFPVKRRNRHSLVGPQQLGGRPAPVRRSNTMPPNLGNAGLLGRMLDEKTPPSPSGQPEEPGMVRLVCGHHNWIAVAYTQFLVCYRLKEASGWQLVFSSPRLDWPIERLALTARVHGGALGEHDKMVAAATGSEILLWALQAEGGGSEIGVFHLGVPVEALFFVGNQLIATSHTGRIGVWNAVTKHWQVQEVQPITSYDAAGSFLLLGCNNGSIYYVDVQKFPLRMKDNDLLVSELYRDPAEDGVTALSVYLTPKTSDSGNWIEIAYGTSSGGVRVIVQHPETVGSGPQLFQTFTVHRSPVTKIMLSEKHLISVCADNNHVRTWSVTRFRGMISTQPGSTPLASFKILALESADGHGGCSAGNDIGPYGERDDQQVFIQKVVPSASQLFVRLSSTGQRVCSVRSVDGSPTTAFTVLECEGSRRLGSRPRRYLLTGQANGSLAMWDLTTAMDGLGQAPAGGLTEQELMEQLEHCELAPPAPSAPSWGCLPSPSPRISLTSLHSASSNTSLSGHRGSPSPPQAEARRRGGGSFVERCQELVRSGPDLRRPPTPAPWPSSGLGTPLTPPKMKLNETSF

SEQ ID NO: 892036 - protein, 631 aa, Homo sapiens
RAHPEVGAGQPARPGAMAAAATAAEGVPSRGPPGEVIHLNVGGKRFSTSRQTLTWIPDSFFSSLLSGRISTLKDETGAIFIDRDPTVFAPILNFLRTKELDPRGVHGSSLLHEAQFYGLTPLVRRLQLREELDRSSCGNVLFNGYLPPPVFPVKRRNRHSLVGPQQLGGRPAPVRRSNTMPPNLGNAGLLGRMLDEKTPPSPSGQPEEPGMVRLVCGHHNWIAVAYTQFLVCYRLKEASGWQLVFSSPRLDWPIERLALTARVHGGALGEHDKMVAAATGSEILLWALQAEGGGSEIGVFHLGVPVEALFFVGNQLIATSHTGRIGVWNAVTKHWQVQEVQPITSYDAAGSFLLLGCNNGSIYYVDVQKFPLRMKDNDLLVSELYRDPAEDGVTALSVYLTPKTSDSGNWIEIAYGTSSGGVRVIVQHPETVGSGPQLFQTFTVHRSPVTKIMLSEKHLISVCADNNHVRTWSVTRFRGMISTQPGSTPLASFKILALESADGHGGCSAGNDIAGGLTEQELMEQLEHCELAPPAPSAPSWGCLPSPSPRISLTSLHSASSNTSLSGHRGSPSPPQAEARRRGGGSFVERCQELVRSGPDLRRPPTPAPWPSSGLGTPLTPPKMKLNETSF

SEQ ID NO: 892037 - protein, 400 aa, Homo sapiens
RSVIQPRLECNGAISAHYNLCLLGSSNSPDSASQVAGITGACHHAQLIFVFLVEAGFATLAKQVLNSWDSPLVVSQSAGITGDSGNWIEIAYGTSSGGVRVIVQHPETVGSGPQLFQTFTVHRSPVTKIMLSEKHLISVCADNNHVRTWSVTRFRGMISTQPGSTPLASFKILALESADGHGGCSAGNDIGPYGERDDQQVFIQKVVPSASQLFVRLSSTGQRVCSVRSVDGSPTTAFTVLECEGSRRLGSRPRRYLLTGQANGSLAMWDLTTAMDGLGQAPAGGLTEQELMEQLEHCELAPPAPSAPSWGCLPSPSPRISLTSLHSASSNTSLSGHRGSPSPPQAEARRRGGGSFVERCQELVRSGPDLRRPPTPAPWPSSGLGTPLTPPKMKLNETSF

SEQ ID NO: 892038 - protein, 352 aa, Homo sapiens
RAHPEVGAGQPARPGAMAAAATAAEGVPSRGPPGEVIHLNVGGKRFSTSRQTLTWIPDSFFSSLLSGRISTLKDETGAIFIDRDPTVFAPILNFLRTKELDPRGVHGSSLLHEAQFYGLTPLVRRLQLREELDRSSCGNVLFNGYLPPPVFPVKRRNRHSLVGPQQLGGRPAPVRRSNTMPPNLGNAGLLGRMLDEKTPPSPSGQPEEPGMVRLVCGHHNWIAVAYTQFLVCYRLKEASGWQLVFSSPRLDWPIERLALTARVHGGALGEHDKMVAAATGSEILLWALQAEGGGSEIGVFHLGVPVEALFFVGNQLIATSHTGRIGVWNAVTKHWQVRVLASLAAPFPVFQT

SEQ ID NO: 892039 - protein, 189 aa, Homo sapiens
ARVTTSPTAPPRVCSVRSVDGSPTTAFTVLECEGSRRLGSRPRRYLLTGQANGSLAMWDLTTAMDGLGQAPAGGLTEQELMEQLEHCELAPPAPSAPSWGCLPSPSPRISLTSLHSASSNTSLSGHRGSPSPPQAEARRRGGGSFVERCQELVRSGPDLRRPPTPAPWPSSGLGTPLTPPKMKLNETSF

SEQ ID NO: 892040 - protein, 52 aa, Homo sapiens
GPGSARRVECRHQALAVQEVQPITSYDAAGSFLLLGCNNGSIYYVDVQKFPL

SEQ ID NO: 892041 - protein, 723 aa, Homo sapiens; identical to SEQ ID NO: 892035

SEQ ID NO: 892042 - protein, 608 aa, Homo sapiens
CPTHGEINHRHILSACCVTATITMTVTLPLILTVVFPVKRRNRHSLVGPQQLGGRPAPVRRSNTMPPNLGNAGLLGRMLDEKTPPSPSGQPEEPGMVRLVCGHHNWIAVAYTQFLVCYRLKEASGWQLVFSSPRLDWPIERLALTARVHGGALGEHDKMVAAATGSEILLWALQAEGGGSEIGVFHLGVPVEALFFVGNQLIATSHTGRIGVWNAVTKHWQVQEVQPITSYDAAGSFLLLGCNNGSIYYVDVQKFPLRMKDNDLLVSELYRDPAEDGVTALSVYLTPKTSDSGNWIEIAYGTSSGGVRVIVQHPETVGSGPQLFQTFTVHRSPVTKIMLSEKHLISVCADNNHVRTWSVTRFRGMISTQPGSTPLASFKILALESADGHGGCSAGNDIGPYGERDDQQVFIQKVVPSASQLFVRLSSTGQRVCSVRSVDGSPTTAFTVLECEGSRRLGSRPRRYLLTGQANGSLAMWDLTTAMDGLGQAPAGGLTEQELMEQLEHCELAPPAPSAPSWGCLPSPSPRISLTSLHSASSNTSLSGHRGSPSPPQAEARRRGGGSFVERCQELVRSGPDLRRPPTPAPWPSSGLGTPLTPPKMKLNETSF

SEQ ID NO: 892043 - protein, 666 aa, Homo sapiens
RAHPEVGAGQPARPGAMAAAATAAEGVPSRGPPGEVIHLNVGGKRFSTSRQTLTWIPDSFFSSLLSGRISTLKDETGAIFIDRDPTVFAPILNFLRTKELDPRGVHGSSLLHEAQFYGLTPLVRRLQLREELDRSSCGNVLFNGYLPPPVFPVKRRNRHSLVGPQQLGGRPAPVRRSNTMPPNLGNAGLLGRMLDEKTPPSPSGQPEEPGMVRLVCGHHNWIAVAYTQFLVCYRLKEASGWQLVFSSPRLDWPIERLALTARVHGGALGEHDKMVAAATGSEILLWALQAEGGGSEIGVFHLGVPVEALFFVGNQLIATSHTGRIGVWNAVTKHWQVQEVQPITSYDAAGSFLLLGCNNGSIYYVDVQKFPLRMKDNDLLVSELYRDPAEDGVTALSVYLTPKTICADNNHVRTWSVTRFRGMISTQPGSTPLASFKILALESADGHGGCSAGNDIGPYGERDDQQVFIQKVVPSASQLFVRLSSTGQRVCSVRSVDGSPTTAFTVLECEGSRRLGSRPRRYLLTGQANGSLAMWDLTTAMDGLGQAPAGGLTEQELMEQLEHCELAPPAPSAPSWGCLPSPSPRISLTSLHSASSNTSLSGHRGSPSPPQAEARRRGGGSFVERCQELVRSGPDLRRPPTPAPWPSSGLGTPLTPPKMKLNETSF

SEQ ID NO: 892044 - protein, 524 aa, Homo sapiens
RAHPEVGAGQPARPGAMAAAATAAEGVPSRGPPGEVIHLNVGGKRFSTSRQTLTWIPDSFFSSLLSGRISTLKDETGAIFIDRDPTVFAPILNFLRTKELDPRGVHGSSLLHEAQFYGLTPLVRRLQLREELDRSSCGNVLFNGYLPPPVFPVKRRNRHSLVGPQQLGGRPAPVRRSNTMPPNLGNAGLLGRMLDEKTPPSPSGQPEEPGMVRLVCGHHNWIAVAYTQFLVCYRLKEASGWQLVFSSPRLDWPIERLALTARVHGGALGEHDKMVAAATGSEILLWALQAEGGGSEIGVFHLGVPVEALFFVGNQLIATSHTGRIGVWNAVTKHWQVQEVQPITSYDAAGSFLLLGCNNGSIYYVDVQKFPLRMKDNDLLVSELYRDPAEDGVTALSVYLTPKTSDSGNWIEIAYGTSSGGVRVIVQHPETVGSGPQLFQTFTVHRSPVTKIMLSEKHLISVCADNNHVRTWSVTRFRGMISTQPGSTPLASFKILALESADGHGGCSAGNDIGAYWLLAFPPH

SEQ ID NO: 892045 - protein, 130 aa, Homo sapiens
MLVAHTFGARRPEYCSSEQLVIVASLYHQVVSPCPYYELRILGPNNIQSARSATEAVLEITPPDSEFLMVIYWYLSSMDVQVEHHIKFIALVPMYICIHMRVAAQGFVVGAMTVGMGYSMYREFWAKPKP

SEQ ID NO: 892046 - protein, 78 aa, Homo sapiens
GIAGFAAIVAYGLYKLKSRGNTKMSIHLIHMRVAAQGFVVGAMTVGMGYSMYREFWAKPAIPTGTNGASLAFRMSFDP

SEQ ID NO: 892047 - protein, 109 aa, Homo sapiens
MSYTDSSVCPFLQYERTSGIHDSIPKSSRVHLSRLARLGDMLSANREATLSRHYCVLILTVARAKSRGNTKMSIHLIHMRVAAQGFVVGAMTVGMGYSMYREFWAKPKP

SEQ ID NO: 892048 - protein, 261 aa, Homo sapiens
PAHKPLQGAGPGGARSRSGRRPACSMSAPSATPIFAPGENCSPAWGAAPAAYDAADTHLRILGKPVMERWETPYMHALAAAASSKGGRVLEVGFGMAIAASKVQEAPIDEHWIIECNDGVFQRLRDWAPRQTHKVIPLKGLWEDVAPTLPDGHFDGILYDTYPLSEETWHTHQFNFIKNHAFRLLKPGGVLTYCNLTSWGELMKSKYSDITIMFEETQVPALLEAGFRRENIRTEVMALVPPADCRYYAFPQMITPLVTKG

SEQ ID NO: 892049 - protein, 236 aa, Homo sapiens
MSAPSATPIFAPGENCSPAWGAAPAAYDAADTHLRILGKPVMERWETPYMHALAAAASSKGGRVLEVGFGMAIAASKVQEAPIDEHWIIECNDGVFQRLRDWAPRQTHKVIPLKGLWEDVAPTLPDGHFDGILYDTYPLSEETWHTHQFNFIKNHAFRLLKPGGVLTYCNLTSWGELMKSKYSDITIMFEETQVPALLEAGFRRENIRTEVMALVPPADCRYYAFPQMITPLVTKG

SEQ ID NO: 892050 - protein, 261 aa, Homo sapiens; identical to SEQ ID NO: 892048

SEQ ID NO: 892051 - protein, 261 aa, Homo sapiens; identical to SEQ ID NO: 892048

SEQ ID NO: 892052 - protein, 269 aa, Homo sapiens
MSAPSATPIFAPGENCSPAWGAAPAAYDAADTHLRILGKPVMERWETPYMHALAAAASSKGGRVLEVGFGMAIAASKVQEAPIDEHWIIECNDGVFQRLRDWAPRQTHKVIPLKGLWEDVAPTLPDGHFDGILYDTYPLSEETWHTHQFNFIKNHAFRLLKPGGVLTYCNLTSWGELMKSKYSDITIMFEVRPPEVPHGSPGSDLGWGWEGAAGATLLPGEGPFLTPWVGWTVLVHLEIKVLCLAQWLPGAVAQVYNPSTVEGRGGQIA

SEQ ID NO: 892053 - protein, 121 aa, Homo sapiens
MSAPSATPIFAPGENCSPAWGAAPAAYDAADTHLRILGKPVMERWETPYMHALAAAASSKGGRVLEVGFGMAIAASKVQEAPIDEHWIIECNDGVFQRLRDWAPRQTQSSLKGLWRMCTTC

SEQ ID NO: 892054 - protein, 132 aa, Homo sapiens
MCSAGELLRGGDGGERDEDGDALAEREAAGTEWDPGASPRRRGQRPKESEQDVEDSQNHTGEPVGDDYKKMGTLFGELNKNLINMGFTRMYFGERIVEPVIVIFFWVMLWFLGLQALGLVAVLCLVIIYVQQ

SEQ ID NO: 892055 - protein, 205 aa, Homo sapiens
RVRLRPDGRGLGEPVTGGAGLVLQAPRPAGRAPAAPVSGGCGGSQAAFGRRRCLVRRGVVLRRLSGAVGVGCGMCSAGELLRGGDGGERDEDGDALAEREAAGTEWDPGASPRRRGQRPKESEQDVEDSQNHTGEPVGDDYKKMGTLFGELNKNLINMGFTRMYFGERIVEPVIVIFFWVMLWFLGLQALGLVAVLCLVIIYVQQ

SEQ ID NO: 892056 - protein, 198 aa, Homo sapiens
  misc_feature (8)..(8): Xaa can be any naturally occurring amino acid
TASTPRGXVARPGWYFRRPGRRGALRRLLSAAGAADPRAAFGRRRCLVRRGVVLRRLSGAVGVGCGMCSAGELLRGGDGGERDEDGDALAEREAAGTEWDPGASPRRRGQRPKESEQDVEDSQNHTGEPVGDDYKKMGTLFGELNKNLINMGFTRMYFGERIVEPVIVIFFWVMLWFLGLQALGLVAVLCLVIIYVQQ

SEQ ID NO: 892057 - protein, 205 aa, Homo sapiens; identical to SEQ ID NO: 892055

SEQ ID NO: 892058 - protein, 81 aa, Homo sapiens
AGAAPPRRPGVGRASDRRGRAGTSGAQAGGARSGGSCQRRVRRIPGQPSGGGAAWMLKTHRTTLVSRLEMTTRKWEHFLVN

SEQ ID NO: 892059 - protein, 162 aa, Homo sapiens
MGVCPGESQKRAGAAKGHQVKCQRQTCSASISPLPAPWLPHLHRPEALLTATGADGEAAGHRHAAAPPKAYSEQQGVQWPGWARVGGPAGQWRPPHDPIPLPRLPVTTELNSRAVWSHCCCWGHVGWQLLQVVLTREQQPGRPGTRSPTLGCGGGWALRGQI

SEQ ID NO: 892060 - protein, 284 aa, Homo sapiens
MGWGFVRVSPRRGLALLRDTKSSAKDRRAPPPSPLFLPPGCHTSTGLRPSSLPQELMERLQGIVTRPHHLRPIQSSKIASDHRAEFARCLEPLLLLGPRRVAAAASGANTLAGGLGPKALTGPHCPSPVGKMSGSPVQKPTLHRSISTKVLLAEGENTPFAEHCRHYEDSYRHLQAEMQSLKDQVQELHRDLTKHHSLIKAEIMGDVLHKSLQLDVQIASEHASLEGMRVVFQELFSFRFGRKPISEWLMSRRFMKVPDSWLLSEPSVPELTHILAEEEVRVGH

SEQ ID NO: 892061 - protein, 153 aa, Homo sapiens
MSGSPVQKPTLHRSISTKVLLAEGENTPFAEHCRHYEDSYRHLQAEMQSLKDQVQELHRDLTKHHSLIKAEIMGDVLHKSLQLDVQIASEHASLEGMRVVFQELFSFRFGRKPISEWLMSRRFMKVPDSWLLSEPSVPELTHILAEEEVRVGH

SEQ ID NO: 892062 - protein, 228 aa, Homo sapiens
MSGSPVQKPTLHRSISTKVLLAEGENTPFAEHCRHYEDSYRHLQAEMQSLKDQVQELHRDLTKHHSLIKAEIMGDVLHKSLQLDVQIASEHASLEGMRVVFQEAFLFQIWEEAYQRVANEQEIYEAQLHDLLQLRQENAYLTTITKQITPYVRSIAKVKERLEPRFQAPVDEQSESLQNTHDDSRNNAASARNNPGSVPEKREKTSEPKGNSWAPNGLSEEPLLKNMD

SEQ ID NO: 892063 - protein, 153 aa, Homo sapiens; identical to SEQ ID NO: 892061

SEQ ID NO: 892064 - protein, 288 aa, Homo sapiens
CVSRGPKTKRDWAHTSSVQHRSEHTTHSVLAPAAFRRTCSWPHILEPTPGTLKNRCGCPGEALPQPFQISWWLCCAPGGGEGCEIPEQSRGLPWEAGGGADFPTPCIHTGSLPRLAGGLGPKALTGPHCPSPVGKMSGSPVQKPTLHRSISTKVLLAEGENTPFAEHCRHYEDSYRHLQAEMQSLKDQVQELHRDLTKHHSLIKAEIMGDVLHKSLQLDVQIASEHASLEGMRVVFQELFSFRFGRKPISEWLMSRRFMKVPDSWLLSEPSVPELTHILAEEEVRVGH

SEQ ID NO: 892065 - protein, 39 aa, Homo sapiens
KASLSTGECARDVASEANRTTKETPGFSPLAPALGPWLG

SEQ ID NO: 892066 - protein, 150 aa, Homo sapiens
PPKAYSEQQGVQWPGWARVGGPAGQWRPPHDPIPLPRLPVTTELNSRAVWSHCCCWGHVGWQLLQVVLTREQQPGRPGTRSPTLGCGGGWALRGQIASKKPGATIPSSVLSSPPSQQGVWAQGMARASPLSRGTGSPGPEVHGRPGSELG

SEQ ID NO: 892067 - protein, 149 aa, Homo sapiens
AAAPPKAYSEQQGVQWPGWARVGGPAGQWRPPHDPIPLPRLPVTTELNSRAVWSHCCCWGHVGWQLLQVVLTREQQPGRPGTRSPTLGCGGGWALRGQIASKKPGATIPSSVLSSPPSQQGVWAQGMARASPLSRGTGSPGPEVHGRPG

SEQ ID NO: 892068 - protein, 579 aa, Homo sapiens
MNKLYIGNLSENAAPSDLESIFKDAKIPVSGPFLVKTGYAFVDCPDESWALKAIEALSGKIELHGKPIEVEHSVPKRQRIRKLQIRNIPPHLQWEVLDSLLVQYGVVESCEQVNTDSETAVVNVTYSSKDQARQALDKLNGFQLENFTLKVAYIPDEMAAQQNPLQQPRGRRGLGQRGSSRQGSPGSVSKQKPCDLPLRLLVPTQFVGAIIGKEGATIRNITKQTQSKIDVHRKENAGAAEKSITILSTPEGTSAACKSILEIMHKEAQDIKFTEEIPLKILAHNNFVGRLIGKEGRNLKKIEQDTDTKITISPLQELTLYNPERTITVKGNVETCAKAEEEIMKKIRESYENDIASMNLQAHLIPGLNLNALGLFPPTSGMPPPTSGPPSAMTPPYPQFEQSETETVHLFIPALSVGAIIGKQGQHIKQLSRFAGASIKIAPAEAPDAKVRMVIITGPPEAQFKAQGRIYGKIKEENFVSPKEEVKLEAHIRVPSFAAGRVIGKGGKTVNELQNLSSAEVVVPRDQTPDENDQVVVKITGHFYACQVAQRKIQEILTQVKQHQQQKALQSGPPQSRRK

SEQ ID NO: 892069 - protein, 134 aa, Homo sapiens [sequence omitted]

SEQ ID NO: 892070 - protein, 504 aa, Homo sapiens
MQYKCAKVLQVYVTFADHIQVLDSLLVQYGVVESCEQVNTDSETAVVNVTYSSKDQARQALDKLNGFQLENFTLKVAYIPDEMAAQQNPLQQPRGRRGLGQRGSSRQGSPGSVSKQKPCDLPLRLLVPTQFVGAIIGKEGATIRNITKQTQSKIDVHRKENAGAAEKSITILSTPEGTSAACKSILEIMHKEAQDIKFTEEIPLKILAHNNFVGRLIGKEGRNLKKIEQDTDTKITISPLQELTLYNPERTITVKGNVETCAKAEEEIMKKIRESYENDIASMNLQAHLIPGLNLNALGLFPPTSGMPPPTSGPPSAMTPPYPQFEQSETETVHLFIPALSVGAIIGKQGQHIKQLSRFAGASIKIAPAEAPDAKVRMVIITGPPEAQFKAQGRIYGKIKEENFVSPKEEVKLEAHIRVPSFAAGRVIGKGGKTVNELQNLSSAEVVVPRDQTPDENDQVVVKITGHFYACQVAQRKIQEILTQVKQHQQQKALQSGPPQSRRK

SEQ ID NO: 892071 - protein, 363 aa, Homo sapiens
MNKLYIGNLSENAAPSDLESIFKDAKIPVSGPFLVKTGYAFVDCPDESWALKAIEALSGKIELHGKPIEVEHSVPKRQRIRKLQIRNIPPHLQWEVLDSLLVQYGVVESCEQVNTDSETAVVNVTYSSKDQARQALDKLNGFQLENFTLKVAYIPDEMAAQQNPLQQPRGRRGLGQRGSSRQGSPGSVSKQKPCDLPLRLLVPTQFVGAIIGKEGATIRNITKQTQSKIDVHRKENAGAAEKSITILSTPEGTSAACKSILEIMHKEAQDIKFTEEIPLKILAHNNFVGRLIGKEGRNLKKIEQDTDTKITISPNQKRRLFICLSQLYQSVPSSASRASTSSSFLALLELQLRLLQRKHQMLK

SEQ ID NO: 892072 - protein, 491 aa, Homo sapiens
MNKLYIGNLSENAAPSDLESIFKDAKIPVSGPFLVKTGYAFVDCPDESWALKAIEALSGKIELHGKPIEVEHSVPKRQRIRKLQIRNIPPHLQWEVLDSLLVQYGVVESCEQVNTDSETAVVNVTYSSKDQARQALDKLNGFQLENFTLKVAYIPDEMAAQQNPLQQPRGRRGLGQRGSSRQGSPGSVSKQKPCDLPLRLLVPTQFVGAIIGKEGATIRNITKQTQSKIDVHRKENAGAAEKSITILSTPEGTSAACKSILEIMHKEAQDIKFTEEIPLKILAHNNFVGRLIGKEGRNLKKIEQDTDTKITISPLQELTLYNPERTITVKGNVETCAKAEEEIMKKIRESYENDIASMNLQAHLIPGLNLNALGLFPPTSGMPPPTSGPPSAMTPPYPQFEQSETETVHLFIPALSVGAIIGKQGQHIKQLSRFAGASIKIAPAEAPDAKVRMVIITGPPEAQFKQEILTQVKQHQQQKALQSGPPQSRRK

SEQ ID NO: 892073 - protein, 579 aa, Homo sapiens; identical to SEQ ID NO: 892068

SEQ ID NO: 892074 - protein, 144 aa, Homo sapiens
MNKLYIGNLSENAAPSDLESIFKDAKIPVSGPFLVKTGYAFVDCPDESWALKAIEALSGKIELHGKPIEVEHSVPKRQRIRKLQIRNIPPHLQWEEDGAALRSDLELCPSSTTFSLCDLVMGSLNRQGPADAVMPTDGRDLRMQ

SEQ ID NO: 892075 - protein, 579 aa, Homo sapiens; identical to SEQ ID NO: 892068

SEQ ID NO: 892076 - protein, 236 aa, Homo sapiens
MKKIRESYENDIASMNLQAHLIPGLNLNALGLFPPTSGMPPPTSGPPSAMTPPYPQFEQSETETVHLFIPALSVGAIIGKQGQHIKQLSRFAGASIKIAPAEAPDAKVRMVIITGPPEAQFKAQGRIYGKIKEENFVSPKEEVKLEAHIRVPSFAAGRVIGKGGKTVNELQNLSSAEVVVPRDQTPDENDQVVVKITGHFYACQVAQRKIQEILTQVKQHQQQKALQSGPPQSRRK

SEQ ID NO: 892077 - protein, 579 aa, Homo sapiens; identical to SEQ ID NO: 892068

SEQ ID NO: 892078 - protein, 101 aa, Homo sapiens
VWLFLHLSEPGFACPFHSTPSAPSALSWDCLLSVRPAPSPCPQNPRYSGLPSLPCSGLAPRPEQARPGLLRSWLAPYCLWQILQPAPMKHLPHAGSFRNKE

SEQ ID NO: 892079 - protein, 559 aa, Homo sapiens
MGSRIKQNPETTFEVYVEVAYPRTGGTLSDPEVQRQFPEDYSDQEVLQTLTKFCFPFYVDSLTVSQVGQNFTFVLTDIDSKQRFGFCRLSSGAKSCFCILSYLPWFEVFYKLLNILADYTTKRQENQWNELLETLHKLPIPDPGVSVHLSVHSYFTVPDTRELPSIPENRNLTEYFVAVDVNNMLHLYASMLYERRILIICSKLSTLTACIHGSAAMLYPMYWQHVYIPVLPPHLLDYCCAPMPYLIGIHLSLMEKVRNMALDDVVILNVDTNTLETPFDDLQSLPNDVISSLKNRLKKVSTTTGDGVARAFLKAQAAFFGSYRNALKIEPEEPITFCEEAFVSHYRSGAMRQFLQNATQLQLFKQFIDGRLDLLNSGEGFSDVFEEEINMGEYAGSDKLYHQWLSTVRKGSGAILNTVKTKANPAMKTVYKFAKDHAKMGIKEVKNRLKQKDIAENGCAPTPEEQLPKTAPSPLVEAKDPKLREDRRPITVHFGQVRPPRPHVVKRPKSNIAVEGRRTSVPSPEQNTIATPATLHILQKSITHFAAKFPTRGWTSSSH

SEQ ID NO: 892080 - protein, 227 aa, Homo sapiens
PGRSPKCPLIMFSDLPPWRICRFLFGLLWTLYPPPHPTLEEPITFCEEAFVSHYRSGAMRQFLQNATQLQLFKQFIDGRLDLLNSGEGFSDVFEEEINMGEYAGSDKLYHQWLSTVRKGSGAILNTVKTKANPAMKTVYKFAKDHAKMGIKEVKNRLKQKDIAENGCAPTPEEQLPKTAPSPLVEAKDPKLREDRRPITVHFGQTPWYLFCCLHHIPLRKGPLAPFY

SEQ ID NO: 892081 - protein, 1037 aa, Homo sapiens
MGSRIKQNPETTFEVYVEVAYPRTGGTLSDPEVQRQFPEDYSDQEVLQTLTKFCFPFYVDSLTVSQVGQNFTFVLTDIDSKQRFGFCRLSSGAKSCFCILSYLPWFEVFYKLLNILADYTTKRQENQWNELLETLHKLPIPDPGVSVHLSVHSYFTVPDTRELPSIPENRNLTEYFVAVDVNNMLHLYASMLYERRILIICSKLSTLTACIHGSAAMLYPMYWQHVYIPVLPPHLLDYCCAPMPYLIGIHLSLMEKVRNMALDDVVILNVDTNTLETPFDDLQSLPNDVISSLKNRLKKVSTTTGDGVARAFLKAQAAFFGSYRNALKIEPEEPITFCEEAFVSHYRSGAMRQFLQNATQLQLFKQFIDGRLDLLNSGEGFSDVFEEEINMGEYAGFLLRLNQSTEERFVQSSRTVPGMGTVCSSDKLYHQWLSTVRKGSGAILNTVKTKANPAMKTVYKFAKDHAKMGIKEVKNRLKQKDIAENGCAPTPEEQLPKTAPSPLVEAKDPKLREDRRPITVHFGQVRPPRPHVVKRPKSNIAVEGRRTSVPSPEQPQPYRTLRESDSAEGDEAESPEQQVRKSTGPVPAPPDRAASIDLLEDVFSNLDMEAALQPLGQAKSLEDLRAPKDLREQPGTFDYQRLDLGGSERSRGVTVALKLTHPYNKLWSLGQDDMAIPSKPPAASPEKPSALLGNSLALPRRPQNRDSILNPSDKEEVPTPTLGSITIPRPQGRKTPELGIVPPPPIPRPAKLQAAGAALGDVSERLQTDRDRRAALSPGLLPGVVPQGPTELLQPLSPGPGAAGTSSDALLALLDPLSTAWSGSTLPSRPATPNVATPFTPQFSFPPAGTPTPFPQPPLNPFVPSMPAAPPTLPLVSTPAGPFGAPPASLGPAFASGLLLSSAGFCAPHRSQPNLSALSMPNLFGQMPMGTHTSPLQPLGPPAVAPSRIRTLPLARSSARAAETKQGLALRPGDPPLLPPRPPQGLEPTLQPSAPQQARDPFEDLLQKTKQDVSPSPALAPAPDSVEQLRKQWETFE

SEQ ID NO: 892082 - protein, 1099 aa, Homo sapiens
RRAPGTRAGDHGVRRAGASTLTPGGGGGGEGASLERAGPSLREGRKGRGERQREAGRPRAGGQRSAERGPRAHEEAWGPWAPGSSRIQRPHLKYMLKWPIPGQVALFQLLQIQIQLCSAFMCSLTVSQVGQNFTFVLTDIDSKQRFGFCRLSSGAKSCFCILSYLPWFEVFYKLLNILADYTTKRQENQWNELLETLHKLPIPDPGVSVHLSVHSYFTVPDTRELPSIPENRNLTEYFVAVDVNNMLHLYASMLYERRILIICSKLSTLTACIHGSAAMLYPMYWQHVYIPVLPPHLLDYCCAPMPYLIGIHLSLMEKVRNMALDDVVILNVDTNTLETPFDDLQSLPNDVISSLKNRLKKVSTTTGDGVARAFLKAQAAFFGSYRNALKIEPEEPITFCEEAFVSHYRSGAMRQFLQNATQLQLFKQFIDGRLDLLNSGEGFSDVFEEEINMGEYAGFLLRLNQSTEERFVQSSRTVPGMGTVCSSDKLYHQWLSTVRKGSGAILNTVKTKANPAMKTVYKFAKDHAKMGIKEVKNRLKQKDIAENGCAPTPEEQLPKTAPSPLVEAKDPKLREDRRPITVHFGQVRPPRPHVVKRPKSNIAVEGRRTSVPSPEQPQPYRTLRESDSAEGDEAESPEQQVRKSTGPVPAPPDRAASIDLLEDVFSNLDMEAALQPLGQAKSLEDLRAPKDLREQPGTFDYQRLDLGGSERSRGVTVALKLTHPYNKLWSLGQDDMAIPSKPPAASPEKPSALLGNSLALPRRPQNRDSILNPSDKEEVPTPTLGSITIPRPQGRKTPELGIVPPPPIPRPAKLQAAGAALGDVSERLQTDRDRRAALSPGLLPGVVPQGPTELLQPLSPGPGAAGTSSDALLALLDPLSTAWSGSTLPSRPATPNVATPFTPQFSFPPAGTPTPFPQPPLNPFVPSMPAAPPTLPLVSTPAGPFGAPPASLGPAFASGLLLSSAGFCAPHRSQPNLSALSMPNLFGQMPMGTHTSPLQPLGPPAVAPSRIRTLPLARSSARAAETKQGLALRPGDPPLLPPRPPQGLEPTLQPSAPQQARDPFEDLLQKTKQDVSPSPALAPAPDSVEQLRKQWETFE

SEQ ID NO: 892083 - protein, 1059 aa, Homo sapiens
RRAPGTRAGDHGVRRAGASTLTPGGGGGGEGASLERAGPSLREGRKGRGERQREAGRPRAGGQRSAERGPRAHEEAWGPWAPGSSRIQRPHLKYMLKWPIPGQVALFQILRCRGNSRRTTVTSYLPWFEVFYKLLNILADYTTKRQENQWNELLETLHKLPIPDPGVSVHLSVHSYFTVPDTRELPSIPENRNLTEYFVAVDVNNMLHLYASMLYERRILIICSKLSTLTACIHGSAAMLYPMYWQHVYIPVLPPHLLDYCCAPMPYLIGIHLSLMEKVRNMALDDVVILNVDTNTLETPFDDLQSLPNDVISSLKNRLKKVSTTTGDGVARAFLKAQAAFFGSYRNALKIEPEEPITFCEEAFVSHYRSGAMRQFLQNATQLQLFKQFIDGRLDLLNSGEGFSDVFEEEINMGEYAGFLLRLNQSTEERFVQSSRTVPGMGTVCSSDKLYHQWLSTVRKGSGAILNTVKTKANPAMKTVYKFAKDHAKMGIKEVKNRLKQKDIAENGCAPTPEEQLPKTAPSPLVEAKDPKLREDRRPITVHFGQVRPPRPHVVKRPKSNIAVEGRRTSVPSPEQPQPYRTLRESDSAEGDEAESPEQQVRKSTGPVPAPPDRAASIDLLEDVFSNLDMEAALQPLGQAKSLEDLRAPKDLREQPGTFDYQRLDLGGSERSRGVTVALKLTHPYNKLWSLGQDDMAIPSKPPAASPEKPSALLGNSLALPRRPQNRDSILNPSDKEEVPTPTLGSITIPRPQGRKTPELGIVPPPPIPRPAKLQAAGAALGDVSERLQTDRDRRAALSPGLLPGVVPQGPTELLQPLSPGPGAAGTSSDALLALLDPLSTAWSGSTLPSRPATPNVATPFTPQFSFPPAGTPTPFPQPPLNPFVPSMPAAPPTLPLVSTPAGPFGAPPASLGPAFASGLLLSSAGFCAPHRSQPNLSALSMPNLFGQMPMGTHTSPLQPLGPPAVAPSRIRTLPLARSSARAAETKQGLALRPGDPPLLPPRPPQGLEPTLQPSAPQQARDPFEDLLQKTKQDVSPSPALAPAPDSVEQLRKQWETFE

SEQ ID NO: 892084 - protein, 1037 aa, Homo sapiens; identical to SEQ ID NO: 892081

SEQ ID NO: 892085 - protein, 888 aa, Homo sapiens
MGSRIKQNPETTFEVYVEVAYPRTGGTLSDPEVQRQFPEDYSDQEVLQTLTKFCFPFYVDSLTVSQVGQNFTFVLTDIDSKQRFGFCRLSSGAKSCFCILSYLPWFEVFYKLLNILADYTTKRQENQWNELLETLHKLPIPDPGVSVHLSVHSYFTVPDTRELPSIPENRNLTEYFVAVDVNNMLHLYASMLYERRILIICSKLSTLTACIHGSAAMLYPMYWQHVYIPVLPPHLLDYCCAPMPYLIGIHLSLMEKVRNMALDDVVILNVDTNTLETPFDDLQSLPNDVISSLKNRLKKVSTTTGDGVARAFLKAQAAFFGSYRNALKIEPEEPITFCEEAFVSHYRSGAMRQFLQNATQLQLFKQFIDGRLDLLNSGEGFSDVFEEEINMGEYAGFLLRLNQSTEERFVQSSRTVPGMGTVCSSDKLYHQWLSTVRKGSGAILNTVKTKANPAMKTVYKFAKDHAKMGIKEVKNRLKQKDIAENGCAPTPEEQLPKTAPSPLVEAKDPKLREDRRPITVHFGQVRPPRPHVVKRPKSNIAVEGRRTSVPSPEQPQPYRTLRESDSAEGDEAESPEQQVRKSTGPVPAPPDRAASIDLLEDVFSNLDMEAALQPLGQAKSLEDLRAPKDLREQPGTFDYQRLDLGGSERSRGVTVALKLTHPYNKLWSLGQDDMAIPSKPPAASPEKPSALLGNSLALPRRPQNRDSILNPSDKEEVPTPTLGSITIPRPQGRKTPELGIVPPPPIPRPAKLQAAGAALGDVSERLQTDRDRRAALSPGLLPGVVPQGPTELLQPLSPGPGAAGTSSDALLALLDPLSTAWSGSTLPSRPATPNVATPFTPQFSFPPAGTPTPFPQPPLNPFVPSMPAAPPTLPLAVLRGWGERSMFT

SEQ ID NO: 892086 - protein, 888 aa, Homo sapiens; identical to SEQ ID NO: 892085

SEQ ID NO: 892087 - protein, 530 aa, Homo sapiens
MGSRIKQNPETTFEVYVEVAYPRTGGTLSDPEVQRQFPEDYSDQEVLQTLTKFCFPFYVDSLTVSQVGQNFTFVLTDIDSKQRFGFCRLSSGAKSCFCILSYLPWFEVFYKLLNILADYTTKRQENQWNELLETLHKLPIPDPGVSVHLSVHSYFTVPDTRELPSIPENRNLTEYFVAVDVNNMLHLYASMLYERRILIICSKLSTLTACIHGSAAMLYPMYWQHVYIPVLPPHLLDYCCAPMPYLIGIHLSLMEKVRNMALDDVVILNVDTNTLETPFDDLQSLPNDVISSLKNRLKKVSTTTGDGVARAFLKAQAAFFGSYRNALKIEPEEPITFCEEAFVSHYRSGAMRQFLQNATQLQLFKQFIDGRLDLLNSGEGFSDVFEEEINMGEYAGFLLRLNQSTEERFVQSSRTVPGMGTVCSSDKLYHQWLSTVRKGSGAILNTVKTKANPAMKTVYKFAKDHAKMGIKEVKNRLKQKDIAENGCAPTPEEQLPKTAPSPLVEAKDPKLREDRRPITVHFGQANFQKF

SEQ ID NO: 892088 - protein, 483 aa, Homo sapiens
MGSRIKQNPETTFEVYVEVAYPRTGGTLSDPEVQRQFPEDYSDQEVLQTLTKFCFPFYVDSLTVSQVGQNFTFVLTDIDSKQRFGFCRLSSGAKSCFCILSYLPWFEVFYKLLNILADYTTKRQENQWNELLETLHKLPIPDPGVSVHLSVHSYFTVPDTRELPSIPENRNLTEYFVAVDVNNMLHLYASMLYERRILIICSKLSTLTACIHGSAAMLYPMYWQHVYIPVLPPHLLDYCCAPMPYLIGIHLSLMEKVRNMALDDVVILNVDTNTLETPFDDLQSLPNDVISSLKNRLKKVSTTTGDGVARAFLKAQAAFFGSYRNALKIEPEEPITFCEEAFVSHYRSGAMRQFLQNATQLQLFKQFIDGRLDLLNSGEGFSDVFEEEINMGEYAGSDKLYHQWLSTVRKGSGAILNTVKTKANPAMKTVYKFDIAENGCAPTPEEQLPKTAPSPLVEAKDPKLREDRRPITVHFGQANFQKF

SEQ ID NO: 892089 - protein, 296 aa, Homo sapiens
MGSRIKQNPETTFEVYVEVAYPRTGGTLSDPEVQRQFPEDYSDQEVLQTLTKFCFPFYVDSLTVSQVGQNFTFVLTDIDSKQRFGFCRLSSGAKSCFCILSYLPWFEVFYKLLNILADYTTKRQENQWNELLETLHKLPIPDPGVSVHLSVHSYFTVPDTRELPSIPENRNLTEYFVAVDVNNMLHLYASMLYERRILIICSKLSTLTACIHGSAAMLYPMYWQHVYIPVLPPHLLDYCCAPMPYLIGIHLSLMEKVRNMALDDVVILNVDTNTLETPFDDLQSLPNDVEESIVIQ

SEQ ID NO: 892090 - protein, 633 aa, Homo sapiens
SSSSPGSTSNENHQGEYAEKMTKCTIRWLSTVRKGSGAILNTVKTKANPAMKTVYKFAKDHAKMGIKEVKNRLKQKDIAENGCAPTPEEQLPKTAPSPLVEAKDPKLREDRRPITVHFGQVRPPRPHVVKRPKSNIAVEGRRTSVPSPEQPQPYRTLRESDSAEGDEAESPEQQVRKSTGPVPAPPDRAASIDLLEDVFSNLDMEAALQPLGQAKSLEDLRAPKDLREQPGTFDYQRLDLGGSERSRGVTVALKLTHPYNKLWSLGQDDMAIPSKPPAASPEKPSALLGNSLALPRRPQNRDSILNPSDKEEVPTPTLGSITIPRPQGRKTPELGIVPPPPIPRPAKLQAAGAALGDVSERLQTDRDRRAALSPGLLPGVVPQGPTELLQPLSPGPGAAGTSSDALLALLDPLSTAWSGSTLPSRPATPNVATPFTPQFSFPPAGTPTPFPQPPLNPFVPSMPAAPPTLPLVSTPAGPFGAPPASLGPAFASGLLLSSAGFCAPHRSQPNLSALSMPNLFGQMPMGTHTSPLQPLGPPAVAPSRIRTLPLARSSARAAETKQGLALRPGDPPLLPPRPPQGLEPTLQPSAPQQARDPFEDLLQKTKQDVSPSPALAPAPDSVEQLRKQWETFE

SEQ ID NO: 892091 - protein, 1037 aa, Homo sapiens; identical to SEQ ID NO: 892081

SEQ ID NO: 892092 - protein, 854 aa, Homo sapiens
MLHLYASMLYERRILIICSKLSTLTACIHGSAAMLYPMYWQHVYIPVLPPHLLDYCCAPMPYLIGIHLSLMEKVRNMALDDVVILNVDTNTLETPFDDLQSLPNDVISSLKNRLKKVSTTTGDGVARAFLKAQAAFFGSYRNALKIEPEEPITFCEEAFVSHYRSGAMRQFLQNATQLQLFKQFIDGRLDLLNSGEGFSDVFEEEINMGEYAGFLLRLNQSTEERFVQSSRTVPGMGTVCSSDKLYHQWLSTVRKGSGAILNTVKTKANPAMKTVYKFAKDHAKMGIKEVKNRLKQKDIAENGCAPTPEEQLPKTAPSPLVEAKDPKLREDRRPITVHFGQVRPPRPHVVKRPKSNIAVEGRRTSVPSPEQPQPYRTLRESDSAEGDEAESPEQQVRKSTGPVPAPPDRAASIDLLEDVFSNLDMEAALQPLGQAKSLEDLRAPKDLREQPGTFDYQRLDLGGSERSRGVTVALKLTHPYNKLWSLGQDDMAIPSKPPAASPEKPSALLGNSLALPRRPQNRDSILNPSDKEEVPTPTLGSITIPRPQGRKTPELGIVPPPPIPRPAKLQAAGAALGDVSERLQTDRDRRAALSPGLLPGVVPQGPTELLQPLSPGPGAAGTSSDALLALLDPLSTAWSGSTLPSRPATPNVATPFTPQFSFPPAGTPTPFPQPPLNPFVPSMPAAPPTLPLVSTPAGPFGAPPASLGPAFASGLLLSSAGFCAPHRSQPNLSALSMPNLFGQMPMGTHTSPLQPLGPPAVAPSRIRTLPLARSSARAAETKQGLALRPGDPPLLPPRPPQGLEPTLQPSAPQQARDPFEDLLQKTKQDVSPSPALAPAPDSVEQLRKQWETFE

SEQ ID NO: 892093 - protein, 1037 aa, Homo sapiens; identical to SEQ ID NO: 892081

SEQ ID NO: 892094 - protein, 1037 aa, Homo sapiens; identical to SEQ ID NO: 892081

SEQ ID NO: 892095 - protein, 559 aa, Homo sapiens; identical to SEQ ID NO: 892079

SEQ ID NO: 892096 - protein, 855 aa, Homo sapiens
MGSRIKQNPETTFEVYVEVAYPRTGGTLSDPEVQRQFPEDYSDQEVLQTLTKFCFPFYVDSLTVSQVGQNFTFVLTDIDSKQRFGFCRLSSGAKSCFCILSYLPWFEVFYKLLNILADYTTKRQENQWNELLETLHKLPIPDPGVSVHLSVHSYFTVPDTRELPSIPENRNLTEYFVAVDVNNMLHLYASMLYERRILIICSKLSTLTACIHGSAAMLYPMYWQHVYIPVLPPHLLDYCCAPMPYLIGIHLSLMEKVRNMALDDVVILNVDTNTLETPFDDLQSLPNDVISSLKNRLKKVSTTTGDGVARAFLKAQAAFFGSYRNALKIEPEEPITFCEEAFVSHYRSGAMRQFLQNATQLQLFKQFIDGRLDLLNSGEGFSDVFEEEINMGEYAGFLLRLNQSTEERFVQSSRTVPGMGTVCSSDKLYHQWLSTVRKGSGAILNTVKTKANPAMKTVYKFAKDHAKMGIKEVKNRLKQKDIAENGCAPTPEEQLPKTAPSPLVEAKDPKLREDRRPITVHFGQVRPPRPHVVKRPKSNIAVEGRRTSVPSPEQPQPYRTLRESDSAEGDEAESPEQQVRKSTGPVPAPPDRAASIDLLEDVFSNLDMEAALQPLGQAKSLEDLRAPKDLREQPGTFDYQRLDLGGSERSRGVTVALKLTHPYNKLWSLGQDDMAIPSKPPAASPEKPSALLGNSLALPRRPQNRDSILNPSDKEEVPTPTLGSITIPRPQGRKTPELGIVPPPPIPRPAKLQAAGAALGDVSERLQTDRDRRAALSPGLLPGVVPQGPTELLQPLSPGPGAAGTSSDALLALLDPLSTAWSGSTLPVRGWAILIGSSRYIFVSRFDVLCVFLTF

SEQ ID NO: 892097 - protein, 525 aa, Homo sapiens
MGSRIKQNPETTFEVYVEVAYPRTGGTLSDPEVQRQFPEDYSDQEVLQTLTKFCFPFYVDSLTVSQVGQNFTFVLTDIDSKQRFGFCRLSSGAKSCFCILSYLPWFEVFYKLLNILADYTTKRQENQWNELLETLHKLPIPDPGVSVHLSVHSYFTVPDTRELPSIPENRNLTEYFVAVDVNNMLHLYASMLYERRILIICSKLSTLTACIHGSAAMLYPMYWQHVYIPVLPPHLLDYCCAPMPYLIGIHLSLMEKVRNMALDDVVILNVDTNTLETPFDDLQSLPNDVISSLKNRLKKVSTTTGDGVARAFLKAQAAFFGSYRNALKIEPEEPITFCEEAFVSHYRSGAMRQFLQNATQLQLFKQFIDGRLDLLNSGEGFSDVFEEEINMGEYAGSDKLYHQWLSTVRKGSGAILNTVKTKANPAMKTVYKFAKDHAKMGIKEVKNRLKQKDIAENGCAPTPEEQLPKTAPSPLVEAKDPKLREDRRPITVHFGQLQRLRPPNAPRYSARAVRHSSPVVETKSN

SEQ ID NO: 892098 - protein, 240 aa, Homo sapiens
MGSRIKQNPETTFEVYVEVAYPRTGGTLSDPEVQRQFPEDYSDQEVLQTLTKFCFPFYVDSLTVSQVGQNFTFVLTDIDSKQRFGFCRLSSGAKSCFCILSYLPWFEVFYKLLNILADYTTKRQENQWNELLETLHKLPIPDPGVSVHLSVHSYFTVPDTRELPSIPENRNLTEYFVAVDVNNMLHLYASMLYERRILIICSKLSTLTACIHGSAAMLYPMYWQHVYIPVLPPHLLDYCW

SEQ ID NO: 892099 - protein, 970 aa, Homo sapiens
MLCFLDDGAGMDPSDAASVIQFGKSAKRTPESTQIGQYGNGLKSGSMRIGKDFILFTKKEDTMTCLFLSRTFHEEEGIDEVIVPLPTWNARTREPVTDNVEKFAIETELIYKYSPFRTEEEVMTQFMKIPGDSGTLVIIFNLKLMDNGEPELDIISNPRDIQMAETSPEGTKPERRSFRAYAAVLYIDPRMRIFIHGHKVQTKRLSCCLYKPRMYKYTSSRFKTRAEQEVKKAEHVARIAEEKAREAESKARTLEVRLGGDLTRDSRVMLRQVQNRAITLRREADVKKRIKEAKQRALKEPKELNFVFGVNIEHRDLDGMFIYNCSRLIKMYEKVGPQLEGGMACGGVVGVVDVPYLVLEPTHNKQDFADAKEYRHLLRAMGEHLAQYWKDIAIAQRGIIKFWDEFGYLSANWNQPPSSELRYKRRRAMEIPTTIQCDLCLKWRTLPFQLSSVEKDYPDTWVCSMNPDPEQDRCEASEQKQKVPLGTFRKDMKTQEEKQKQLTEKIRQQQEKLEALQKTTPIRSQADLKKLPLEVTTRPSTEEPVRRPQRPRSPPLPAVIRNAPSRPPSLPTPRPASQPRKAPVISSTPKLPALAAREEASTSRLLQPPEAPRKPANTLVKTASRPAPLVQQLSPSLLPNSKSPREVPSPKVIKTPVVKKTESPIKLSPATPSRKRSVAVSDEEEVEEEAERRKERCKRGRFVVKEEKKDSNELSDSAGEEDSADLKRAQKDKGLHVEVRVNREWYTGRVTAVEVGKHVVRWKVKFDYVPTDTTPRDRWVEKGSEDVRLMKPPSPEHQSLDTQQEGGEEEVGPVAQQAIAVAEPSTSECLRIEPDTTALSTNHETIDLLVQILRNCLRYFLPPSFPISKKQLSAMNSDELISFPLKEYFKQYEVGLQNLCNSYQSRADSRAKASEESLRTSERKLRETEEKLQKLRTNIVALLQKVQEDIDINTDDELDAYIEDLITKGD

SEQ ID NO: 892100 - protein, 123 aa, Homo sapiens
PQEKVFHDSEFNPLTIGNLPSRAKNWAKGLVRVNIFSLKEYFKQYEVGLQNLCNSYQSRADSRAKASEESLRTSERKLRETEEKLQKLRTNIVALLQKVQEDIDINTDDELDAYIEDLITKGD

SEQ ID NO: 892101 - protein, 124 aa, Homo sapiens
RGSPIKLSPATPSQTRHQEDRWVEKGSEDVRLMKPPSPEHQSLDTQQEGGEEEVGPVAQQAIAVAEPSTSECLRIEPDTTALSTNHETIDLLVQILRNCLRYFLPPSFPISKKAAPLPTCPSTL

SEQ ID NO: 892102 - protein, 994 aa, Homo sapiens
MQEMLDATRIDIYAERREDLRGGFMLCFLDDGAGMDPSDAASVIQFGKSAKRTPESTQIGQYGNGLKSGSMRIGKDFILFTKKEDTMTCLFLSRTFHEEEGIDEVIVPLPTWNARTREPVTDNVEKFAIETELIYKYSPFRTEEEVMTQFMKIPGDSGTLVIIFNLKLMDNGEPELDIISNPRDIQMAETSPEGTKPERRSFRAYAAVLYIDPRMRIFIHGHKVQTKRLSCCLYKPRMYKYTSSRFKTRAEQEVKKAEHVARIAEEKAREAESKARTLEVRLGGDLTRDSRVMLRQVQNRAITLRREADVKKRIKEAKQRALKEPKELNFVFGVNIEHRDLDGMFIYNCSRLIKMYEKVGPQLEGGMACGGVVGVVDVPYLVLEPTHNKQDFADAKEYRHLLRAMGEHLAQYWKDIAIAQRGIIKFWDEFGYLSANWNQPPSSELRYKRRRAMEIPTTIQCDLCLKWRTLPFQLSSVEKDYPDTWVCSMNPDPEQDRCEASEQKQKVPLGTFRKDMKTQEEKQKQLTEKIRQQQEKLEALQKTTPIRSQADLKKLPLEVTTRPSTEEPVRRPQRPRSPPLPAVIRNAPSRPPSLPTPRPASQPRKAPVISSTPKLPALAAREEASTSRLLQPPEAPRKPANTLVKTASRPAPLVQQLSPSLLPNSKSPREVPSPKVIKTPVVKKTESPIKLSPATPSRKRSVAVSDEEEVEEEAERRKERCKRGRFVVKEEKKDSNELSDSAGEEDSADLKRAQKDKGLHVEVRVNREWYTGRVTAVEVGKHVVRWKVKFDYVPTDTTPRDRWVEKGSEDVRLMKPPSPEHQSLDTQQEGGEEEVGPVAQQAIAVAEPSTSECLRIEPDTTALSTNHETIDLLVQILRNCLRYFLPPSFPISKKQLSAMNSDELISFPLKEYFKQYEVGLQNLCNSYQSRADSRAKASEESLRTSERKLRETEEKLQKLRTNIVALLQKVQEDIDINTDDELDAYIEDLITKGD

SEQ ID NO: 892103 - protein, 485 aa, Homo sapiens
ACAAPEQAGKVTGLEALFRALEELAVREAMSAKTTPIRSQADLKKLPLEVTTRPSTEEPVRRPQRPRSPPLPAVIRNAPSRPPSLPTPRPASQPRKAPVISSTPKLPALAAREEASTSRLLQPPEAPRKPANTLVKTASRPAPLVQQLSPSLLPNSKSPREVPSPKVIKTPVVKKTESPIKLSPATPSRKRSVAVSDEEEVEEEAERRKERCKRGRFVVKEEKKDSNELSDSAGEEDSADLKRAQKDKGLHVEVRVNREWYTGRVTAVEVGKHVVRWKVKFDYVPTDTTPRDRWVEKGSEDVRLMKPPSPEHQSLDTQQEGGEEEVGPVAQQAIAVAEPSTSECLRIEPDTTALSTNHETIDLLVQILRNCLRYFLPPSFPISKKQLSAMNSDELISFPLKEYFKQYEVGLQNLCNSYQSRADSRAKASEESLRTSERKLRETEEKLQKLRTNIVALLQKVQEDIDINTDDELDAYIEDLITKGD

SEQ ID NO: 892104 - protein, 970 aa, Homo sapiens; identical to SEQ ID NO: 892099

SEQ ID NO: 892105 - protein, 972 aa, Homo sapiens
MDPSDAASVIQFGKSAKRTPESTQIGQYGNGLKSGSMRIGKDFILFTKKEDTMTCLFLSRTFHEEEGIDEVIVPLPTWNARTREPVTDNVEKFAIETELIYKYSPFRTEEEVMTQFMKIPGDSGTLVIIFNLKLMDNGEPELDIISNPRDIQMAETSPEGTKPERRSFRAYAAVLYIDPRMRIFIHGHKVQTKRLSCCLYKPRMYKYTSSRFKTRAEQEVKKAEHVARIAEEKAREAESKARTLEVRLGGDLTRDSRVMLRQVQNRAITLRREADVKKRIKEAKQRALKEPKELNFVFGVNIEHRDLDGMFIYNCSRLIKMYEKVGPQLEGGMACGGVVGVVDVPYLVLEPTHNKQDFADAKEYRHLLRAMGEHLAQYWKDIAIAQRGIIKFWDEFGYLSANWNQPPSSELRYKRRRAMEIPTTIQCDLCLKWRTLPFQLSSVEKDYPDTWVCSMNPDPEQDRCEASEQKQKVPLGTFRKDMKTQEEKQKQLTEKIRQQQEKLEALQKTTPIRSQADLKKLPLEVTTRPSTEEPVRRPQRPRSPPLPAVIRNAPSRPPSLPTPRPASQPRKAPVISSTPKLPALAAREEASTSRLLQPPEAPRKPANTLVKTASRPAPLVQQLSPSLLPNSKSPREVPSPKVIKTPVVKKTESPIKLSPATPSRKRSVAVSDEEEVEEEAERRKERCKRGRFVVKEEKKDSNELSDSAGEEDSADLKRAQKDKGLHVEVRVNREWYTGRVTAVEVGKHVVRWKVKFDYVPTDTTPRDRWVEKGSEDVRLMKPPSPEHQSLDTQQEGGEEEVGPVAQQAIAVAEPSTSECLRIEPDTTALSTNHETIDLLVQILRNCLRYFLPPSFPISKKQLSAMNSDELISFPLKEYFKQYEVGLQNLCNSYQSRADSRAKASEESLRTSERKLRETEEKLQKLRTNIVALLQKVQEVQEVSPAAFLLQLDHLVSQGGGPGPCSCSHKNLS

SEQ ID NO: 892106 - protein, 130 aa, Homo sapiens
TGPQLIICVDVYVLLHLFAGVPPSFPISKKQLSAMNSDELISFPLKEYFKQYEVGLQNLCNSYQSRADSRAKASEESLRTSERKLRETEEKLQKLRTNIVALLQKVQEDIDINTDDELDAYIEDLITKGD

SEQ ID NO: 892107 - protein, 57 aa, Homo sapiens
HVLFWVSAEEKAREAESKARTLEVRLGGDLTRDSRVRSRPRRLFSSVSGTRSPCPMS

SEQ ID NO: 892108 - protein, 322 aa, Homo sapiens
MPVTVTRTTITTTTTSSSGLGSPMIVGSPRALTQPLGLLRLLQLVSTCVAFSLVASVGAWTGSMGNWSMFTWCFCFSVTLIILIVELCGLQARFPLSWRNFPITFACYAALFCLSASIIYPTTYVQFLSHGRSRDHAIAATFFSCIACVAYATEVAWTRARPGEITGYMATVPGLLKVLETFVACIIFAFISDPNLYQHQPALEWCVAVYAICFILAAIAILLNLGECTNVLPIPFPSFLSGLALLSVLLYATALVLWPLYQFDEKYGGQPRRSRDVSCSRSHAYYVCAWDRRLAVAILTAINLLAYVADLVHSAHLVFVKV

SEQ ID NO: 892109 - protein, 322 aa, Homo sapiens; identical to SEQ ID NO: 892108

SEQ ID NO: 892110 - protein, 322 aa, Homo sapiens; identical to SEQ ID NO: 892108

SEQ ID NO: 892111 - protein, 322 aa, Homo sapiens; identical to SEQ ID NO: 892108

SEQ ID NO: 892112 - protein, 322 aa, Homo sapiens; identical to SEQ ID NO: 892108

SEQ ID NO: 892113 - protein, 322 aa, Homo sapiens; identical to SEQ ID NO: 892108

SEQ ID NO: 892114 - protein, 322 aa, Homo sapiens; identical to SEQ ID NO: 892108

SEQ ID NO: 892115 - protein, 322 aa, Homo sapiens; identical to SEQ ID NO: 892108

SEQ ID NO: 892116 - protein, 322 aa, Homo sapiens; identical to SEQ ID NO: 892108

SEQ ID NO: 892117 - protein, 322 aa, Homo sapiens; identical to SEQ ID NO: 892108

SEQ ID NO: 892118 - protein, 322 aa, Homo sapiens; identical to SEQ ID NO: 892108

SEQ ID NO: 892119 - protein, 322 aa, Homo sapiens; identical to SEQ ID NO: 892108

SEQ ID NO: 892120 - protein, 322 aa, Homo sapiens; identical to SEQ ID NO: 892108

SEQ ID NO: 892121 - protein, 322 aa, Homo sapiens; identical to SEQ ID NO: 892108

SEQ ID NO: 892122 - protein, 322 aa, Homo sapiens; identical to SEQ ID NO: 892108

SEQ ID NO: 892123 - protein, 322 aa, Homo sapiens; identical to SEQ ID NO: 892108

SEQ ID NO: 892124 - protein, 75 aa, Homo sapiens
ARYPDDAENPLIAGCCEISHITSRYQSFCKGPRSCHSSPVTSTVTSSSVSHSWALIIFFCCGKWPAPGILCLFHP

SEQ ID NO: 892125 - protein, 322 aa, Homo sapiens; identical to SEQ ID NO: 892108

SEQ ID NO: 892126 - protein, 93 aa, Homo sapiens
EFELRFPNRSAIRLTVSLANMVKACLYVNIPKLARAWWRAPVIPSSWEDRCELPHPACFSFSTLLFSHLFSGLPVGFLICLFCKHLLLCPWEP

SEQ ID NO: 892127 - protein, 106 aa, Homo sapiens
MHTDSKKSRGPRTHKKRQKGRSAERRTTGSTQTRRDGDTEGDSQETRAREQADAQHTSDHGEPKSRPTKPGRAGVADERRSNHKTEHNTSLSETTKTPLSIKRNAI

SEQ ID NO: 892128 - protein, 272 aa, Homo sapiens
MPVTVTRTTITTTTTSSSGLGSPMIVGSPRALTQPLGLLRLLQLVSTCVAFSLVASVGAWTGSMGNWSMFTWCFCFSVTLIILIVELCGLQARFPLSWRNFPITFACYAALFCLSASIIYPTTYVQFLSHGRSRDHAIAATFFSCIACVAYATEVAWTRARPGEITGYMATVPGLLKVLETFVACIIFAFISDPNLYQHQPALEWCVAVYAICFILAAIAILLNLGECTNVLPIPFPSFLSGLALLSVLLYATALVLWPLYQFDEKYGGPGI

SEQ ID NO: 892129 - protein, 311 aa, Homo sapiens
RFYCGGRLMLAGHGGVFALTLLLILTTTGLFFVFDCPYLARKLTLAIPIIAAILFFFVMSCLLQTSFTDPGILPRATVCEAAALEKQIDNTGSSTYRPPPRTREVLINGQMVKLKYCFTCKMFRPPRTSHCSVCDNCVERFDHHCPWVGNCVGRRNYRFFYAFILSLSFLTAFIFACVVTHLTLRAQGSNFLSTLKETPASVLELVICFFSIWSILGLSGFHTYLVASNLTTNEDIKGSWSSKRGGEASVNPYSHKSIITNCCAVLCGPLPPSLIDRRGFVQSDTVLPSPIRSDEPACRAKPDASMVGGHP

SEQ ID NO: 892130 - protein, 311 aa, Homo sapiens; identical to SEQ ID NO: 892129

SEQ ID NO: 892131 - protein, 311 aa, Homo sapiens; identical to SEQ ID NO: 892129

SEQ ID NO: 892132 - protein, 273 aa, Homo sapiens
RFYCGGRLMLAGHGGVFALTLLLILTTTGLFFVFDCPYLARKLTLAIPIIAAILFFFVMSCLLQTSFTDPGILPRATVCEAAALEKQIDNTGSSTYRPPPRTREVLINGQMVKLKYCFTCKMFRPPRTSHCSVCDNCVERFDHHCPWVGNCVGRRNYRFFYAFILSLSFLTAFIFACVVTHLTLRAQGSNFLSTLKETPASVLELVICFFSIWSILGLSGFHTYLVASNLTTNEDIKGSWSSKRGGEASVNPYSHKSIITNCCAVLCGPLPPR

SEQ ID NO: 892133 - protein, 311 aa, Homo sapiens; identical to SEQ ID NO: 892129

SEQ ID NO: 892134 - protein, 337 aa, Homo sapiens
RFYCGGRLMLAGHGGVFALTLLLILTTTGLFFVFDCPYLARKLTLAIPIIAAILFFFVMSCLLQTSFTDPGILPRATVCEAAALEKQIDNTGSSTYRPPPRTREVLINGQMVKLKYCFTCKMFRPPRTSHCSVCDNCVERFDHHCPWVGNCVGRRNYRFFYAFILSLSFLTAFIFACVVTHLTLRAQGSNFLSTLKETPASVLELVICFFSIWSILGLSGFHTYLVASNLTTNEDIKGSWSSKRGGEASVNPYSHKSIITNCCAVLCGPLPPSLIDRRGFVQSDTVLPSPIRSDEPACRAKPDASMEDTCQDFAISWHSLRGANRPLCRGLAVCAGA

SEQ ID NO: 892135 - protein, 291 aa, Homo sapiens
RFYCGGRLMLAGHGGVFALTLLLILTTTGLFFVFDCPYLARKLTLAIPIIAAILFFFVMSCLLQTSFTDPGILPRATVCEAAALEKQIDNTGSSTYRPPPRTREVLINGQMVKLKYCFTCKMFRPPRTSHCSVCDNCVERFDHHCPWVGNCVGRRNYRFFYAFILSLSFLTAFIFACVVTHLTLRAQGSNFLSTLKETPASVLELVICFFSIWSILGLSGFHTYLVASNLTTNEDIKGSWSSKRGGEASVNPYSHKSIITNCCAVLCGPLPPSLMPEGICAVRFRTPTRSR

SEQ ID NO: 892136 - protein, 605 aa, Homo sapiens
MLEALKALSTFFVENSLRTRRNLRGDIERKSLAINEEFVSIFKEVKEELESISEDVQAMSNCCQDMTSRLQAAKEQTQDLIVKTTKLQSESQKLEIRAQVADAFLSKFQLTSDEMSLLRGTREGPITEDFFKALGRVKQIHNDVKVLLRTNQQTAGLEIMEQMALLQETAYERLYRWAQSECRTLTQESCDVSPVLTQAMEALQDRPVLYKYTLDEFGTARRSTVVRGFIDALTRGGPGGTPRPIEMHSHDPLRYVGDMLAWLHQATASEKEHLEALLKHVTTQGVEENIQEVVGHITEGVCRPLKVRIEQVIVAEPGAVLLYKISNLLKFYHHTISGIVGNSATALLTTIEEMHLLSKKIFFNSLSLHASKLMDKVELPPPDLGPSSALNQTLMLLREVLASHDSSVVPLDARQADFVQVLSCVLDPLLQMCTVSASNLGTADMATFMVNSLYMMKTTLALFEFTDRRLEMLQFQIEAHLDTLINEQASYVLTRVGLSYIYNTVQQHKPEQGSLANMPNLDSVTLKAAMVQFDRYLSAPDNLLIPQLNFLLSATVKEQIVKQSTELVCRAYGEVYAAVMNPINEYKDPENILHRSPQQVQTLLS

SEQ ID NO: 892137 - protein, 638 aa, Homo sapiens
QYSRCLRGPCLAEVAAGGGTRSAMAEGSGEVVAVSATGAANGLNNGAGGTSATTCNPLSRKLHKILETRLDNDKEMLEALKALSTFFVENSLRTRRNLRGDIERKSLAINEEFVSIFKEVKEELESISEDVQAMSNCCQDMTSRLQAAKEQTQDLIVKTTKLQSESQKLEIRAQVADAFLSKFQLTSDEMSLLRGTREGPITEDFFKALGRVKQIHNDVKVLLRTNQQTAGLEIMEQMALLQETAYERLYRWAQSECRTLTQESCDVSPVLTQAMEALQDRPVLYKYTLDEFGTARRSTVVRGFIDALTRGGPGGTPRPIEMHSHDPLRYVGDMLAWLHQATASEKEHLEALLKHVTTQGVEENIQEVVGHITEGVCRPLKVRIEQVIVAEPGAVLLYKISNLLKFYHHTISGIVGNSATALLTTIEEMHLLSKKIFFNSLSLHASKLMDKVELPPPDLGPSSALNQTLMLLREVLASHDSSVVPLDARQADFVQVLSCVLDPLLQMCTVSASNLGTADMATFMVNSLYMMKTTLALFEFTDRRLEMLQFQIEAHLDTLINEQASYVLTRVGLSYIYNTVQQHKPEQGSLANMPNLDSVTLKAAMVQFDRYLSAPDNLLIPQLNFLLSATVKRPPNGP

SEQ ID NO: 892138 - protein, 680 aa, Homo sapiens
QYSRCLRGPCLAEVAAGGGTRSAMAEGSGEVVAVSATGAANGLNNGAGGTSATTCNPLSRKLHKILETRLDNDKEMLEALKALSTFFVENSLRTRRNLRGDIERKSLAINEEFVSIFKEVKEELESISEDVQAMSNCCQDMTSRLQAAKEQTQDLIVKTTKLQSESQKLEIRAQVADAFLSKFQLTSDEMSLLRGTREGPITEDFFKALGRVKQIHNDVKVLLRTNQQTAGLEIMEQMALLQETAYERLYRWAQSECRTLTQESCDVSPVLTQAMEALQDRPVLYKYTLDEFGTARRSTVVRGFIDALTRGGPGGTPRPIEMHSHDPLRYVGDMLAWLHQATASEKEHLEALLKHVTTQGVEENIQEVVGHITEGVCRPLKVRIEQVIVAEPGAVLLYKISNLLKFYHHTISGIVGNSATALLTTIEEMHLLSKKIFFNSLSLHASKLMDKVELPPPDLGPSSALNQTLMLLREVLASHDSSVVPLDARQADFVQVLSCVLDPLLQMCTVSASNLGTADMATFMVNSLYMMKTTLALFEFTDRRLEMLQFQIEAHLDTLINEQASYVLTRVGLSYIYNTVQQHKPEQGSLANMPNLDSVTLKAAMVQFDRYLSAPDNLLIPQLNFLLSATVKEQIVKQSTELVCRAYGEVYAAVMNPINEYKDPENILHRSPQQVQTLLS

SEQ ID NO: 892139 - protein, 705 aa, Homo sapiens
QYSRCLRGPCLAEVAAGGGTRSAMAEGSGEVVAVSATGAANGLNNGAGGTSATTCNPLSRKLHKILETRLDNDKEMLEALKALSTFFVENSLRTRRNLRGDIERKSLAINEEFVSIFKEVKEELESISEDVQAMSNCCQDMTSRLQAAKEQTQDLIVKTTKLQSESQKLEIRAQVADAFLSKFQLTSDEMSLLRGTREGPITEDFFKALGRVKQIHNDVKVLLRTNQQTAGLEIMEQMALLQETAYERLYRWAQSECRTLTQESCDVSPVLTQAMEALQDRPVLYKYTLDEFGTARRSTVVRGFIDALTRGGPGGTPRPIEMHSHDPLRYSNQTAEEELMFFQRKSSLTFIFIRYVGDMLAWLHQATASEKEHLEALLKHVTTQGVEENIQEVVGHITEGVCRPLKVRIEQVIVAEPGAVLLYKISNLLKFYHHTISGIVGNSATALLTTIEEMHLLSKKIFFNSLSLHASKLMDKVELPPPDLGPSSALNQTLMLLREVLASHDSSVVPLDARQADFVQVLSCVLDPLLQMCTVSASNLGTADMATFMVNSLYMMKTTLALFEFTDRRLEMLQFQIEAHLDTLINEQASYVLTRVGLSYIYNTVQQHKPEQGSLANMPNLDSVTLKAAMVQFDRYLSAPDNLLIPQLNFLLSATVKEQIVKQSTELVCRAYGEVYAAVMNPINEYKDPENILHRSPQQVQTLLS

SEQ ID NO: 892140 - protein, 714 aa, Homo sapiens
  misc_feature (404)..(404): Xaa can be any naturally occurring amino acid
  misc_feature (435)..(436): Xaa can be any naturally occurring amino acid
  misc_feature (449)..(449): Xaa can be any naturally occurring amino acid
  misc_feature (470)..(470): Xaa can be any naturally occurring amino acid
  misc_feature (474)..(475): Xaa can be any naturally occurring amino acid
QYSRCLRGPCLAEVAAGGGTRSAMAEGSGEVVAVSATGAANGLNNGAGGTSATTCNPLSRKLHKILETRLDNDKEMLEALKALSTFFVENSLRTRRNLRGDIERKSLAINEEFVSIFKEVKEELESISEDVQAMSNCCQDMTSRLQAAKEQTQDLIVKTTKLQSESQKLEIRAQVADAFLSKFQLTSDEMSLLRGTREGPITEDFFKALGRVKQIHNDVKVLLRTNQQTAGLEIMEQMALLQETAYERLYRWAQSECRTLTQESCDVSPVLTQAMEALQDRPVLYKYTLDEFGTARRSTVVRGFIDALTRGGPGGTPRPIEMHSHDPLRYVGDMLAWLHQATASEKEHLEALLKHVTTQGVEENIQEVVGHITATRCCQQEALLKQGVRKLRRQSLSTLGFEPXGAKFYFTKHFYISSNFITIQSVVLLDTYVQXXHSLELTIAQTMAXLALSHNITLISCQVRRLQASXPIGXXLTDSQLGKQEVELPPPDLGPSSALNQTLMLLREVLASHDSSVVPLDARQADFVQVLSCVLDPLLQMCTVSASNLGTADMATFMVNSLYMMKTTLALFEFTDRRLEMLQFQIEAHLDTLINEQASYVLTRVGLSYIYNTVQQHKPEQGSLANMPNLDSVTLKAAMVQFDRYLSAPDNLLIPQLNFLLSATVKEQIVKQSTELVCRAYGEVYAAVMNPINEYKDPENILHRSPQQVQTLLS

SEQ ID NO: 892141 - protein, 213 aa, Homo sapiens
QYSRCLRGPCLAEVAAGGGTRSAMAEGSGEVVAVSATGAANGLNNGAGGTSATTCNPLSRKLHKILETRLDNDKEMLEALKALSTFFVENSLRTRRNLRGDIERELESISEDVQAMSNCCQDMTSRLQAAKEQTQDLIVKTTKLQSESQKLEIRAQVADAFLSKFQLTSDEMSLLRGTREGPITEDFFKALGRVKQIHNDVKVLLRTNQQTAG

SEQ ID NO: 892142 - protein, 680 aa, Homo sapiens; identical to SEQ ID NO: 892138

SEQ ID NO: 892143 - protein, 231 aa, Homo sapiens
QYSRCLRGPCLAEVAAGGGTRSAMAEGSGEVVAVSATGAANGLNNGAGGTSATTCNPLSRKLHKILETRLDNDKEMLEALKALSTFFVENSLRTRRNLRGDIERKSLAINEEFVSIFKEVKEELESISEDVQAMSNCCQDMTSRLQAAKEQTQDLIVKTTKLQSESQKLEIRAQVADAFLSKFQLTSDEMSLLRGTREGPITEDFFKALGRVKQIHNDVKVLLRTNQQTAG

SEQ ID NO: 892144 - protein, 680 aa, Homo sapiens; identical to SEQ ID NO: 892138

SEQ ID NO: 892145 - protein, 680 aa, Homo sapiens; identical to SEQ ID NO: 892138

SEQ ID NO: 892146 - protein, 265 aa, Homo sapiens
GEEVAPEMAVSERRGLGRGSPAEWGQRLLLVLLLGGCSGRIHRLALTGEKRADIQLNSFGFYTNGSLEVELSVLRLGLREAEEKSLLVGFSLSRVRSGRVRSYSTRDFQDCPLQKNSSSFLVLFLINTKDLQVQVRKYGEQKTLFIFPGLLPEAPSKPGLPKPQATVPRKVDGGGTSAASKPKSTPAVIQGPSGKDKDLVLGLSHLNNSYNFSFHVVIGSQAEEGQYSLNFHNCNNSVPGKEHPFDITVMIREKNPRVPLAGRCL

SEQ ID NO: 892147 - protein, 550 aa, Homo sapiens
GEEVAPEMAVSERRGLGRGSPAEWGQRLLLVLLLGGCSGRIHRLALTGEKRADIQLNSFGFYTNGSLEVELSVLRLGLREAEEKSLLVGFSLSRVRSGRVRSYSTRDFQDCPLQKNSSSFLVLFLINTKDLQVQVRKYGEQKTLFIFPGLLPEAPSKPGLPKPQATVPRKVDGGGTSAASKPKSTPAVIQGPSGKDKDLVLGLSHLNNSYNFSFHVVIGSQAEEGQYSLNFHNCNNSVPGKEHPFDITVMIREKNPDGFLSAAEMPLFKLYMVMSACFLAAGIFWVSILCRNTYSVFKIHWLMAALAFTKSISLLFHSINYYFINSQGHPIEGLAVMYYIAHLLKGALLFITIALIGSGWAFIKYVLSDKEKKVFGIVIPMQVLANVAYIIIESREEGASDYVLWKEILFLVDLICCGAILFPVVWSIRHLQDASGTDGKVAVNLAKLKLFRHYYVMVICYVYFTRIIAILLQVAVPFQWQWLYQLLVEGSTLAFFVLTGYKFQPTGNNPYLQLPQEDEEDVQMEQVMTDSGFREGLSKVNKTASGRELL

SEQ ID NO: 892148 - protein, 550 aa, Homo sapiens; identical to SEQ ID NO: 892147

SEQ ID NO: 892149 - protein, 682 aa, Homo sapiens
GEEVAPEMAVSERRGLGRGSPAEWGQRLLLVLLLGGCSGRIHRLALTGEKRADIQLNSFGFYTNGSLEVELSVLRLGLREAEEKSLLVGFSLSRVRSGRVRSYSTRDFQDCPLQKNSSSFLVLFLINTKDLQVQVRKYGEQKTLFIFPGLLPEAPSKPGLPKPQATVPRKVDGGGTSAASKPKSTPAVIQGPSGKDKDLVLGLSHLNNSYNFSFHVVIGSQAEEGQYSLNFHNCNNSVPGKEHPFDITVMIREKNPDGFLSAAEMPLFKLYMVMSACFLAAGIFWVSILCRNTYSVFKIHWLMAALAFTKSISLLFHSINYYFINSQGHPIEGLAVMYYIAHLLKGALLFITIALIGSGWAFIKYVLSDKEKKVFGIVIPMQVLANVAYIIIESREEGASDYVLWKEILFLVDLICCGAILFPVVCGSEPGQAEAVPALLCHGHLLRLLHPHHRHPAAGGCALSVAVAVPALGGGLHPGLLRAHGLQVPAHREQPVPAAAPGGRGGCSDGASNDGLWVPGRPLQSQQNSQRAGTVMITSTSQTKGSSSPSISHSCPSSTAYVGRWRGSMWTRRPAPRDPGSRTSPFGRRVPSSPQILGSPVLTPGPPLPSSYVYNNDQSVWLKKKNKKQKQNTREKQTEVCGQTGSNGPGIKWYRTHVLETGKFRGTHEESNIANPGTRIET

SEQ ID NO: 892150 - protein, 582 aa, Homo sapiens
GEEVAPEMAVSERRGLGRGSPAEWGQRLLLVLLLGGCSGRIHRLALTGEKRADIQLNSFGFYTNGSLEVELSVLRLGLREAEEKSLLVGFSLSRVRSGRVRSYSTRDFQDCPLQKNSSSFLVLFLINTKDLQVQVRKYGEQKTLFIFPGLLPEAPSKPGLPKPQATVPRKVDGGGTSAASKPKSTPAVIQGPSGKDKDLVLGLSHLNNSYNFSFHVVIGSQAEEGQYSLNFHNCNNSVPGKEHPFDITVMIREKNPDGFLSAAEMPLFKLYMVMSACFLAAGIFWVSILCRNTYSVFKIHWLMAALAFTKSISLLFHSINYYFINSQGHPIEGLAVMYYIAHLLKGALLFITIALIGSGWAFIKYVLSDKEKKVFGIVIPMQVLANVAYIIIESREEGASDYVLWKEILFLVDLICCGAILFPVVWSIRHLQDASGTDGKVAVNLAKLKLFRHYYVMVICYVYFTRIIAILLQVAVPFQWQWLYQLLVEGSTLAFFVLTGYKFQPTGNNPYLQLPQEDEEDVQMEQVVCGEVEGVHVDQAPSSPGPRFPDKPIWKKSPFLPPNIGQPCPYPGTTPPFQLCVQ

SEQ ID NO: 892151 - protein, 531 aa, Homo sapiens
GEEVAPEMAVSERRGLGRGSPAEWGQRLLLVLLLGGCSGRIHRLALTGEKRADIQLNSFGFYTNGSLEVELSVLRLGLREAEEKSLLVGFSLSRVRSGRVRSYSTRDFQDCPLQKNSSSFLVLFLINTKDLQVQVRKYGEQKTLFIFPGLLPEAPSKPGLPKPQATVPRKVDGGGTSAASKPKSTPAVIQGPSGKDKDLVLGLSHLNNSYNFSFHVVIGSQAEEGQYSLNFHNCNNSVPGKEHPFDITVMIREKNPDGFLSAAEMPLFKLYMVMSACFLAAGIFWVSILCRNTYSVFKIHWLMAALAFTKSISLLFHSINYYFINSQGHPIEGLAVMYYIAHLLKGALLFITIALIGSGWAFIKYVLSDKEKKVFGIVIPMQVLANVAYIIIESREEGASDYVLWKEILFLVDLICCGAILFPVVWSIRHLQDASGTDGKVAVNLAKLKLFRHYYVMVICYVYFTRIIAILLQVAVPFQWQWLYQPTGNNPYLQLPQEDEEDVQMEQVMTDSGFREGLSKVNKTASGRELL

SEQ ID NO: 892152 - protein, 534 aa, Homo sapiens
GEEVAPEMAVSERRGLGRGSPAEWGQRLLLVLLLGGCSGRIHRLALTGEKRADIQLNSFGFYTNGSLEVELSVLRLGLREAEEKSLLVGFSLSRVRSGRVRSYSTRDFQDCPLQKNSSSFLVLFLINTKDLQVQVRKYGEQKTLFIFPGLLPEAPSKPGLPKPQATVPRKVDGGGTSAASKPKSTPAVIQGPSGKDKDLVLGLSHLNNSYNFSFHVVIGSQAEEGQYSLNFHNCNNSVPGKEHPFDITVMIREKNPDGFLSAAEMPLFKLYMVMSACFLAAGIFWVSILCRNTYSVFKIHWLMAALAFTKSISLLFHSINYYFINSQGHPIEGLAVMYYIAHLLKGALLFITIALIGSGWAFIKYVLSDKEKKVFGIVIPMQVLANVAYIIIESREEGASDYVLWKEILFLVDLICCGAILFPVVWSIRHLQDASGTDGKVAVNLAKLKLFRHYYVMVAVPFQWQWLYQLLVEGSTLAFFVLTGYKFQPTGNNPYLQLPQEDEEDVQMEQVMTDSGFREGLSKVNKTASGRELL

SEQ ID NO: 892153 - protein, 527 aa, Homo sapiens
SCQTPGAGQAERGLNCLCLLGLRQGEKRADIQLNSFGFYTNGSLEVELSVLRLGLREAEEKSLLVGFSLSRVRSGRVRSYSTRDFQDCPLQKNSSSFLVLFLINTKDLQVQVRKYGEQKTLFIFPGLLPEAPSKPGLPKPQATVPRKVDGGGTSAASKPKSTPAVIQGPSGKDKDLVLGLSHLNNSYNFSFHVVIGSQAEEGQYSLNFHNCNNSVPGKEHPFDITVMIREKNPDGFLSAAEMPLFKLYMVMSACFLAAGIFWVSILCRNTYSVFKIHWLMAALAFTKSISLLFHSINYYFINSQGHPIEGLAVMYYIAHLLKGALLFITIALIGSGWAFIKYVLSDKEKKVFGIVIPMQVLANVAYIIIESREEGASDYVLWKEILFLVDLICCGAILFPVVWSIRHLQDASGTDGKVAVNLAKLKLFRHYYVMVICYVYFTRIIAILLQVAVPFQWQWLYQLLVEGSTLAFFVLTGYKFQPTGNNPYLQLPQEDEEDVQMEQVMTDSGFREGLSKVNKTASGRELL

SEQ ID NO: 892154 - protein, 306 aa, Homo sapiens
CPSLIVQLFTPSAVTVPSIFSAPITSFESHPPSSLFNFLTTHLMVTVRVPNPPPPPSASHPSVRLTVRLSIHPQINYYFINSQGHPIEGLAVMYYIAHLLKGALLFITIALIGSGWAFIKYVLSDKEKKVFGIVIPMQVLANVAYIIIESREEGASDYVLWKEILFLVDLICCGAILFPVVWSIRHLQDASGTDGKVAVNLAKLKLFRHYYVMVICYVYFTRIIAILLQVAVPFQWQWLYQLLVEGSTLAFFVLTGYKFQPTGNNPYLQLPQEDEEDVQMEQVMTDSGFREGLSKVNKTASGRELL

SEQ ID NO: 892155 - protein, 255 aa, Homo sapiens
GEEVAPEMAVSERRGLGRGSPAEWGQRLLLVLLLGGCSGRIHRLALTGEKRADIQLNSFGFYTNGSLEVELSVLRLGLREAEEKSLLVGFSLSRVRSGRVRSYSTRDFQDCPLQKNSSSFLVLFLINTKDLQVQVRKYGEQKTLFIFPGLLPEAPSKPGLPKPQATVPRKVDGGGTSAASKPKSTPAVIQGPSGKDKDLVLGLSHLNNSYNFSFHVVIGSQAEEGQYSLNFHNCNNSVPGKEHPFDITVSGVEGS

SEQ ID NO: 892156 - protein, 132 aa, Homo sapiens
GEEVAPEMAVSERRGLGRGSPAEWGQRLLLVLLLGGCSGRIHRLALTGEKRADIQLNSFGFYTNGSLEVELSVLRLGLREAEEKSLLVGFSLSRVRSGRVRSYSTRDFQDCPLQKNSSSFLVLFLINTKDLQ

SEQ ID NO: 892157 - protein, 135 aa, Homo sapiens
MITSTSQTKGSSSPSISHSCPSSTAYVGRWRGSMWTRRPAPRDPGSRTSPFGRRVPSSPQILGSPVLTPGPPLPSSYVYNNDQSVWLYAVVLPFWGLGSTRRLCLQCRNLFSLCVAGARAQGPCLCIFNKYSFSK

SEQ ID NO: 892158 - protein, 670 aa, Homo sapiens
GEEVAPEMAVSERRGLGRGSPAEWGQRLLLVLLLGGCSGRIHRLALTGEKRADIQLNSFGFYTNGSLEVELSVLRLGLREAEEKSLLVGFSLSRVRSGRVRSYSTRDFQDCPLQKNSSSFLVLFLINTKDLQVQVRKYGEQKTLFIFPGLLPEAPSKPGLPKPQATVPRKVDGGGTSAASKPKSTPAVIQGPSGKDKDLVLGLSHLNNSYNFSFHVVIGSQAEEGQYSLNFHNCNNSVPGKEHPFDITVMIREKNPDGFLSAAEMPLFKLYMVMSACFLAAGIFWVSILCRNTYSVFKIHWLMAALAFTKSISLLFHSINYYFINSQGHPIEGLAVMYYIAHLLKGALLFITIALIGSGWAFIKYVLSDKEKKVFGIVIPMQVLANVAYIIIESREEGASDYVLWKEILFLVDLICCGAILFPVVCGSEPGQAEAVPALLCHGHLLRLLHPHHRHPAAGGCALSVAVAVPALGGGLHPGLLRAHGLQVPAHREQPVPAAAPGGRGGCSDGASNDGLWVPGRPLQSQQNSQRAGTVMITSTSQTKGSSSPSISHSCPSSTAYVGRWRGSMWTRRPAPRDPGSRTSPFGRRVPSSPQILGSPVLTPGPPLPSSYVYNNDQSVWLYAVVLPFWGLGSTRRLCLQCRNLFSLCVAGARAQGPCLCIFNKYSFSK

SEQ ID NO: 892159 - protein, 531 aa, Homo sapiens; identical to SEQ ID NO: 892151

SEQ ID NO: 892160 - protein, 531 aa, Homo sapiens; identical to SEQ ID NO: 892151

SEQ ID NO: 892161 - protein, 525 aa, Homo sapiens
MLLGAQLECKSSSGKVKVRHAEGEKRADIQLNSFGFYTNGSLEVELSVLRLGLREAEEKSLLVGFSLSRVRSGRVRSYSTRDFQDCPLQKNSSSFLVLFLINTKDLQVQVRKYGEQKTLFIFPGLLPEAPSKPGLPKPQATVPRKVDGGGTSAASKPKSTPAVIQGPSGKDKDLVLGLSHLNNSYNFSFHVVIGSQAEEGQYSLNFHNCNNSVPGKEHPFDITVMIREKNPDGFLSAAEMPLFKLYMVMSACFLAAGIFWVSILCRNTYSVFKIHWLMAALAFTKSISLLFHSINYYFINSQGHPIEGLAVMYYIAHLLKGALLFITIALIGSGWAFIKYVLSDKEKKVFGIVIPMQVLANVAYIIIESREEGASDYVLWKEILFLVDLICCGAILFPVVWSIRHLQDASGTDGKVAVNLAKLKLFRHYYVMVICYVYFTRIIAILLQVAVPFQWQWLYQLLVEGSTLAFFVLTGYKFQPTGNNPYLQLPQEDEEDVQMEQVMTDSGFREGLSKVNKTASGRELL

SEQ ID NO: 892162 - protein, 301 aa, Homo sapiens
MIREKNPDGFLSAAEMPLFKLYMVMSACFLAAGIFWVSILCRNTYSVFKIHWLMAALAFTKSISLLFHSINYYFINSQGHPIEGLAVMYYIAHLLKGALLFITIALIGSGWAFIKYVLSDKEKKVFGIVIPMQVLANVAYIIIESREEGASDYVLWKEILFLVDLICCGAILFPVVWSIRHLQDASGTDGKVAVNLAKLKLFRHYYVMVICYVYFTRIIAILLQVAVPFQWQWLYQLLVEGSTLAFFVLTGYKFQPTGNNPYLQLPQEDEEDVQMEQVMTDSGFREGLSKVNKTASGRELL

SEQ ID NO: 892163 - protein, 214 aa, Homo sapiens [sequence omitted]

SEQ ID NO: 892164 - protein, 63 aa, Homo sapiens
MGDVRADRTLCPPLVPGPSGISRMRLAQTGRVRPCACRPSAHGPIPPPGPSFCPLDAPPGLSA

SEQ ID NO: 892165 - protein, 1499 aa, Homo sapiens
MKPLAIPANHGVMGQQEKHSLPADFTKLHLTDSLHPQVTHVSSSHSGCSITSDSGSSSLSDIYQATESEAGDMDLSGLPETAVDSEDDDDEEDIERASDPLMSRDIVRDCLEKDPIDRTDDDIEQLLEFMHQLPAFANMTMSVRRELCAVMVFAVVERAGTIVLNDGEELDSWSVILNGSVEVTYPDGKAEILCMGNSFGVSPTMDKEYMKGVMRTKVDDCQFVCIAQQDYCRILNQVEKNMQKVEEEGEIVMVKEHRELDRTGTRKGHIVIKGTSERLTMHLVEEHSVVDPTFIEDFLLTYRTFLSSPMEVGKKLLEWFNDPSLRDKVTRVVLLWVNNHFNDFEGDPAMTRFLEEFENNLEREKMGGHLRLLNIACAAKAKRRLMTLTKPSREAPLPFILLGGSEKGFGIFVDSVDSGSKATEAGLKRGDQILEVNGQNFENIQLSKAMEILRNNTHLSITVKTNLFVFKELLTRLSEEKRNGAPHLPKIGDIKKASRYSIPDLAVDVEQVIGLEKVNKKSKANTVGGRNKLKKILDKTRISILPQKPYNDIGIGQSQDDSIVGLRQTKHIPTALPVSGTLSSSNPDLLQSHHRILDFSATPDLPDQVLRVFKADQQSRYIMISKDTTAKEVVIQAIREFAVTATPDQYSLCEVSVTPEGVIKQRRLPDQLSKLADRIQLSGRYYLKNNMETETLCSDEDAQELLRESQISLLQLSTVEVATQLSMRNFELFRNIEPTEYIDDLFKLRSKTSCANLKRFEEVINQETFWVASEILRETNQLKRMKIIKHFIKIALHCRECKNFNSMFAIISGLNLAPVARLRTTWEKLPNKYEKLFQDLQDLFDPSRNMAKYRNVLNSQNLQPPIIPLFPVIKKDLTFLHEGNDSKVDGLVNFEKLRMIAKEIRHVGRMASVNMDPALMFRTRKKKWRSLGSLSQGSTNATVLDVAQTGGHKKRVRRSSFLNAKKLYEDAQMARKVKQYLSNLELEMDEESLQTLSLQCEPATNTLPKNPGDKKPVKSETSPVAPRAGSQQKAQSLPQPQQQPPPAHKINQGLQVPAVSLYPSRKKVPVKDLPPFGINSPQALKKILSLSEEGSLERHKKQAEDTISNASSQLSSPPTSPQSSPRKGYTLAPSGTVDNFSDSGHSEISSRSSIVSNSSFDSVPVSLHDERRQRHSVSIVETNLGMGRMERRTMIEPDQYSLGSYAPMSEGRGLYATATVISSPSTEELSQDQGDRASLDAADSGRGSWTSCSSGSHDNIQTIQHQRSWETLPFGHTHFDYSGDPAGLWASSSHMDQIMFSDHSTKYNRQNQSRESLEQAQSRASWASSTGYWGEDSEGDTGTIKRRGGKDVSIEAESSSLTSVTTEETKPVPMPAHIAVASSTTKGLIARKEGRYREPPPTPPGYIGIPITDFPEGHSHPARKPPDYNVALQRSRMVARSSDTAGPSSVQQPHGHPTSSRPVNKPQWHKPNESDPRLAPYQSQGFSTEEDEDEQVSAV

SEQ ID NO: 892166 - protein, 395 aa, Homo sapiens
SGNQLRSFGSGQLDLTSSSSSLGSYTLAPSGTVDNFSDSGHSEISSRSSIVSNSSFDSVPVSLHDERRQRHSVSIVETNLGMGRMERRTMIEPDQYSLGSYAPMSEGRGLYATATVISSPSTEELSQDQGDRASLDAADSGRGSWTSCSSGSHDNIQTIQHQRSWETLPFGHTHFDYSGDPAGLWASSSHMDQIMFSDHSTKYNRQNQSRESLEQAQSRASWASSTGYWGEDSEGDTGTIKRRGGKDVSIEAESSSLTSVTTEETKPVPMPAHIAVASSTTKGLIARKEGRYREPPPTPPGYIGIPITDFPEGHSHPARKPPDYNVALQRSRMVARSSDTAGPSSVQQPHGHPTSSRPVNKPQWHKPNESDPRLAPYQSQGFSTEEDEDEQVSAV

SEQ ID NO: 892167 - protein, 1499 aa, Homo sapiens; identical to SEQ ID NO: 892165

SEQ ID NO: 892168 - protein, 337 aa, Homo sapiens
MKPLAIPANHGVMGQQEKHSLPADFTKLHLTDSLHPQVTHVSSSHSGCSITSDSGSSSLSDIYQATESEAGDMDLSGLPETAVDSEDDDDEEDIERASDPLMSRDIVRDCLEKDPIDRTDDDIEQLLEFMHQLPAFANMTMSVRRELCAVMVFAVVERAGTIVLNDGEELDSWSVILNGSVEVTYPDGKAEILCMGNSFGVSPTMDKEYMKGVMRTKVDDCQFVCIAQQDYCRILNQVEKNMQKVEEEGEIVMVKEHRELDRTGTRKGHIVIKGTSERLTMHLVEEHSVVDPTFIEDFLLTYRTFLSSPMEVGKKLLEWFNDPSLRDKVGNIFYFVS

SEQ ID NO: 892169 - protein, 709 aa, Homo sapiens
MDLSGLPETAVDSEDDDDEEDIERASDPLMSRDIVRDCLEKDPIDRTDDDIGKLEQENESTKVNIKAEGFHLCLKKHRINAMGFPFPPLSISGNDSKVDGLVNFEKLRMIAKEIRHVGRMASVNMDPALMFRTRKKKWRSLGSLSQGSTNATVLDVAQTGGHKKRVRRSSFLNAKKLYEDAQMARKVKQYLSNLELEMDEESLQTLSLQCEPATNTLPKNPGDKKPVKSETSPVAPRAGSQQKAQSLPQPQQQPPPAHKINQGLQVPAVSLYPSRKKVPVKDLPPFGINSPQALKKILSLSEEGSLERHKKQAEDTISNASSQLSSPPTSPQSSPRKGYTLAPSGTVDNFSDSGHSEISSRSSIVSNSSFDSVPVSLHDERRQRHSVSIVETNLGMGRMERRTMIEPDQYSLGSYAPMSEGRGLYATATVISSPSTEELSQDQGDRASLDAADSGRGSWTSCSSGSHDNIQTIQHQRSWETLPFGHTHFDYSGDPAGLWASSSHMDQIMFSDHSTKYNRQNQSRESLEQAQSRASWASSTGYWGEDSEGDTGTIKRRGGKDVSIEAESSSLTSVTTEETKPVPMPAHIAVASSTTKGLIARKEGRYREPPPTPPGYIGIPITDFPEGHSHPARKPPDYNVALQRSRMVARSSDTAGPSSVQQPHGHPTSSRPVNKPQWHKPNESDPRLAPYQSQGFSTEEDEDEQVSAV

SEQ ID NO: 892170 - protein, 1499 aa, Homo sapiens; identical to SEQ ID NO: 892165

SEQ ID NO: 892171 - protein, 218 aa, Homo sapiens
MGSAALEILGLVLCLVGWGGLILACGLPMWQVTAFLDHNIVTAQTTWKGLWMSCVVQSTGHMQCKVYDSVLALSTEVQAARALTVSAVLLAFVALFVTLAGAQCTTCVAPGPAKARVALTGGVLYLFCGLLALVPLCWFANIVVREFYDPSVPVSQKYELGAALYIGWAATALLMVGGCLLCCGAWVCTGRPDLSFPVKYSAPRRPTATGDYDKKNYV

SEQ ID NO: 892172 - protein, 218 aa, Homo sapiens; identical to SEQ ID NO: 892171

SEQ ID NO: 892173 - protein, 217 aa, Homo sapiens
QSRLLGLGPPLPLGATPSVLGHWELPEVVSPELGPQGWGAGSTAGRGAAPVKIESCQRLCDWLRHDDPRTDWLLRAGGPGPGDRIRPRTFKEVPPGRSGADLGGATDPRGKRTGAKSRERGRKGTRARPGRRAARPWGFCGPSGARLASSHGVRSVGDPGPGAVPGGLGGSDPGVRAAHVAGDRLPGPQHRDGADHPTGRCVQLVFTPSAGPEPRDQ

SEQ ID NO: 892174 - protein, 90 aa, Homo sapiens
ARVLFCARRCFHRQSGCQTEDFASPPRRWGSWLLPYFPEAASHACEALDKPGEPRMDRGFRRVARRAGSSERPALRPDAAPGSAPACARS

SEQ ID NO: 892175 - protein, 218 aa, Homo sapiens; identical to SEQ ID NO: 892171

SEQ ID NO: 892176 - protein, 450 aa, Homo sapiens
MGETMSKRLKLHLGGEAEMEERAFVNPFPDYEAAAGALLASGAAEETGCVRPPATTDEPGLPFHQDGKIIHNFIRRIQTKIKDLLQQMEEGLKTADPHDCSAYTGWTGIALLYLQLYRVTCDQTYLLRSLDYVKRTLRNLNGRRVTFLCGDAGPLAVGAVIYHKLRSDCESQECVTKLLQLQRSVVCQESDLPDELLYGRAGYLYALLYLNTEIGPGTVCESAIKEVVNAIIESGKTLSREERKTERCPLLYQWHRKQYVGAAHGMAGIYYMLMQPAAKVDQETLTEMVKPSIDYVRHKKFRSGNYPSSLSNETDRLVHWCHGAPGVIHMLMQAYKVFKEEKYLKEAMECSDVIWQRGLLRKGYGICHGTAGNGYSFLSLYRLTQDKKYLYRACKFAEWCLDYGAHGCRIPDRPYSLFEGMAGAIHFLSDVLGPETSRFPAFELDSSKRD

SEQ ID NO: 892177 - protein, 185 aa, Homo sapiens [sequence omitted]

SEQ ID NO: 892178 - protein, 97 aa, Homo sapiens
VLSRAAPLRRGGTGCSQVSSEQPQRWPRMRVSPQVSLSTPLRKEKKECQFRRKASFLLVWLCVGLAPEMCDIQLLNDAWRVCLLQTPLLLSHYFLSC

SEQ ID NO: 892179 - protein, 450 aa, Homo sapiens; identical to SEQ ID NO: 892176

SEQ ID NO: 892180 - protein, 450 aa, Homo sapiens; identical to SEQ ID NO: 892176

SEQ ID NO: 892181 - protein, 232 aa, Homo sapiens
MGETMSKRLKLHLGGEAEMEERAFVNPFPDYEAAAGALLASGAAEETGCVRPPATTDEPGLPFHQDGKIIHNFIRRIQTKIKDLLQQMEEGLKTADPHDCSAYTGWTGIALLYLQLYRVTCDQTYLLRSLDYVKRTLRNLNGRRVTFLCGDAGPLAVGAVIYHKLRSDCESQECVTKLLQLQRSVVCQESDLPDELLYGRAGYLYALLYLNTEIGPGQRTNVEAAVNLVVVD

SEQ ID NO: 892182 - protein, 786 aa, Homo sapiens [sequence omitted]

SEQ ID NO: 892183 - protein, 786 aa, Homo sapiens [sequence omitted]

SEQ ID NO: 892184 - protein, 742 aa, Homo sapiens [sequence omitted]

SEQ ID NO: 892185 - protein, 711 aa, Homo sapiens
MPHPAGSRYPWGQEAFDKARKENKPIFLSVGYSTCHWCHMMEEESFQNEEIGRLLSEDFVSVKVDREERPDVDKVYMTFVQATSSGGGWPMNVWLTPNLQPFVGGTYFPPEDGLTRVGFRTVLLRIREQWKQNKNTLLENSQRVTTALLARSEISVGDRQLPPSAATVNNRCFQQLDEGYDEEYGGFAEAPKFPTPVILSFLFSYWLSHRLTQDGSRAQQMALHTLKMMANGGIRDHVGQGFHRYSTDRQWHVPHFEKMLYDQAQLAVAYSQAFQLSGDEFYSDVAKGILQYVARSLSHRSGGFYSAEDADSPPERGQRPKEGAYYVWTVKEVQQLLPEPVLGATEPLTSGQLLMKHYGLTEAGNISPSQDPKGELQGQNVLTVRYSLELTAARFGLDVEAVRTLLNSGLEKLFQARKHRPKPHLDSKMLAAWNGLMVSGYAVTGAVLGQDRLINYATNGAKFLKRHMFDVASGRLMRTCYTGPGGTVEHSNPPCWGFLEDYAFVVRGLLDLYEASQESAWLEWALRLQDTQDRLFWDSQGGGYFCSEAELGAGLPLRLKDDQDGAEPSANSVSAHNLLRLHGFTGHKDWMDKCVCLLTAFSERMRRVPVALPEMVRALSAQQQTLKQIVICGDRQAKDTKALVQCVHSVYIPNKVLILADGDPSSFLSRQLPFLSTLRRLEDQATAYVCENQACSVPITDPCELRKLLHP

SEQ ID NO: 892186 - protein, 909 aa, Homo sapiens
MLGARAWLGRVLLLPRAGAGLAASRRCPGVWPRTWPHRSPSRGSSSRDKDRSATVSSSVPMPAGGKGSHPSSTPQRVPNRLIHEKSPYLLQHAYNPVDWYPWGQEAFDKARKENKPIFLSVGYSTCHWCHMMEEESFQNEEIGRLLSEDFVSVKVDREERPDVDKVYMTFVQATSSGGGWPMNVWLTPNLQPFVGGTYFPPEDGLTRVGFRTVLLRIREQWKQNKNTLLENSQRVTTALLARSEISVGDRQLPPSAATVNNRCFQQLDEGYDEEYGGFAEAPKFPTPVILSFLFSYWLSHRLTQDGSRAQQMALHTLKMMANGGIRDHVGQGFHRYSTDRQWHVPHFEKMLYDQAQLAVAYSQAFQLSGDEFYSDVAKGILQYVARSLSHRSGGFYSAEDADSPPERGQRPKEGAYYVWTVKEVQQLLPEPVLGATEPLTSGQLLMKHYGLTEAGNISPSQDPKGELQGQNVLTVRYSLELTAARFGLDVEAVRTLLNSGLEKLFQARKHRPKPHLDSKMLAAWNVGQQHLRPSLSVGSPFTKPLSFRQRLNAHSPLISVIILSLQKRLKELEYPAQGHAQGLGTPPCLALEPKILGITHGSREVLGPKVIEVDMPGGSWPASYHYLSLLAPGLMVSGYAVTGAVLGQDRLINYATNGAKFLKRHMFDVASGRLMRTCYTGPGGTVEHSNPPCWGFLEDYAFVVRGLLDLYEASQESAWLEWALRLQDTQDRLFWDSQGGGYFCSEAELGAGLPLRLKDDQDGAEPSANSVSAHNLLRLHGFTGHKDWMDKCVCLLTAFSERMRRVPVALPEMVRALSAQQQTLKQIVICGDRQAKDTKALVQCVHSVYIPNKVLILADGDPSSFLSRQLPFLSTLRRLEDQATAYVCENQACSVPITDPCELRKLLHP

SEQ ID NO: 892187 - protein, 802 aa, Homo sapiens [sequence omitted]

SEQ ID NO: 892188 - protein, 530 aa, Homo sapiens
MLGARAWLGRVLLLPRAGAGLAASRRCPGVWPRTWPHRSPSRGSSSRDKDRSATVSSSVPMPAGGKGSHPSSTPQRVPNRLIHEKSPYLLQHAYNPVDWYPWGQEAFDKARKENKPIFLSVGYSTCHWCHMMEEESFQNEEIGRLLSEDFVSVKVDREERPDVDKVYMTFVQATSSGGGWPMNVWLTPNLQPFVGGTYFPPEDGLTRVGFRTVLLRIREQWKQNKNTLLENSQRVTTALLARSEISVGDRQLPPSAATVNNRCFQQLDEGYDEEYGGFAEAPKFPTPVILSFLFSYWLSHRLTQDGSRAQQMALHTLKMMANGGIRDHVGQGFHRYSTDRQWHVPHFEKMLYDQAQLAVAYSQAFQLSGDEFYSDVAKGILQYVARSLSHRSGGFYSAEDADSPPERGQRPKEGAYYVWTVKEVQQLLPEPVLGATEPLTSGQLLMKHYGLTEAGNISPSQDPKGELQGQNVLTVRYSLELTAARFGLDVEAVRTLLNSGLEKLFQARKHRPKPHLDSKMLAAWNVGQHT

SEQ ID NO: 892189 - protein, 605 aa, Homo sapiens
QRTVLGQRTVLGQRTVLLRIREQWKQNKNTLLENSQRVTTALLARSEISVGDRQLPPSAATVNNRCFQQLDEGYDEEYGGFAEAPKFPTPVILSFLFSYWLSHRLTQDGSRAQQMALHTLKMMANGGIRDHVGQGFHRYSTDRQWHVPHFEKMLYDQAQLAVAYSQAFQLSGDEFYSDVAKGILQYVARSLSHRSGGFYSAEDADSPPERGQRPKEGAYYVWTVKEVQQLLPEPVLGATEPLTSGQLLMKHYGLTEAGNISPSQDPKGELQGQNVLTVRYSLELTAARFGLDVEAVRTLLNSGLEKLFQARKHRPKPHLDSKMLAAWNGLMVSGYAVTGAVLGQDRLINYATNGAKFLKRHMFDVASGRLMRTCYTGPGGTVEHSNPPCWGFLEDYAFVVRGLLDLYEASQESAWLEWALRLQDTQDRLFWDSQGGGYFCSEAELGAGLPLRLKDDQDGAEPSANSVSAHNLLRLHGFTGHKDWMDKCVCLLTAFSERMRRVPVALPEMVRALSAQQQTLKQIVICGDRQAKDTKALVQCVHSVYIPNKVLILADGDPSSFLSRQLPFLSTLRRLEDQATAYVCENQACSVPITDPCELRKLLHP

SEQ ID NO: 892190 - protein, 674 aa, Homo sapiens
MLGARAWLGRVLLLPRAGAGLAASRRCPGVWPRTWPHRSPSRGSSSRDKDRSATVSSSVPMPAGGKGSHPSSTPQRVPNRLIHEKSPYLLQHAYNPVDWYPWGQEAFDKARKENKPIFLSVGYSTCHWCHMMEEESFQNEEIGRLLSEDFVSVKVDREERPDVDKVYMTFVQATSSGGGWPMNVWLTPNLQPFVGGTYFPPEDGLTRVGFRTVLLRIREQWKQNKNTLLENSQRVTTALLARSEISVGDRQLPPSAATVNNRCFQQLDEGYDEEYGGFAEAPKFPTPVILSFLFSYWLSHRLTQDGSRAQQMALHTLKMMANGGIRDHVGQGFHRYSTDRQWHVPHFEKMLYDQAQLAVAYSQAFQLSGDEFYSDVAKGILQYVARSLSHRSGGFYSAEDADSPPERGQRPKEGAYYVWTVKEVQQLLPEPVLGATEPLTSGQLLMKHYGLTEAGNISPSQDPKGELQGQNVLTVRYSLELTAARFGLDVEAVRTLLNSGLEKLFQARKHRPKPHLDSKMLAAWNGLMVSGYAVTGAVLGQDRLINYATNGAKFLKRHMFDVASGRLMRTCYTGPGGTVEHSNPPCWGFLEDYAFVVRGLLDLYEASQESAWLEWALRLQDTQDRLFWDSQGGGYFCSEAELGAGLPLRLKDDQDGAEPSANSVSAHNLLSAHH

SEQ ID NO: 892191 - protein, 406 aa, Homo sapiens
MLGARAWLGRVLLLPRAGAGLAASRRCPGVWPRTWPHRSPSRGSSSRDKDRSATVSSSVPMPAGGKGSHPSSTPQRVPNRLIHEKSPYLLQHAYNPVDWYPWGQEAFDKARKENKPIFLSVGYSTCHWCHMMEEESFQNEEIGRLLSEDFVSVKVDREERPDVDKVYMTFVQATSSGGGWPMNVWLTPNLQPFVGGTYFPPEDGLTRVGFRTVLLRIREQWKQNKNTLLENSQRVTTALLARSEISVGDRQLPPSAATVNNRCFQQLDEGYDEEYGGFAEAPKFPTPVILSFLFSYWLSHRLTQDGSRAQQMALHTLKMMANGGIRDHVGQGFHRYSTDRQWHVPHFEKMLYDQAQLAVAYSQAFQLSGDEFYSDVAKGILQYVARSLSHRVCVHGGRQAWLWEGL

SEQ ID NO: 892192 - protein, 80 aa, Homo sapiens
RAWLGRVLLLPRAGAGLAASRRYGRASGPLGHSLRLPAGPVEGLPDTGPQCQSGPPLHAWPFPHPHLRSAPETWLWLEGP

SEQ ID NO: 892193 - protein, 93 aa, Homo sapiens
THSPWNKLNSVPWGAVSMAKDTKALVQCVHSVYIPNKVLILADGDPSSFLSRQLPFLSTLRRLEDQATAYVCENQACSVPITDPCELRKLLHP

SEQ ID NO: 892194 - protein, 802 aa, Homo sapiens [sequence omitted]

SEQ ID NO: 892195 - protein, 786 aa, Homo sapiens [sequence omitted]

SEQ ID NO: 892196 - protein, 802 aa, Homo sapiens [sequence omitted]

SEQ ID NO: 892197 - protein, 899 aa, Homo sapiens
MLGARAWLGRVLLLPRAGAGLAASRRCPGVWPRTWPHRSPSRGSSSRDKDRSATVSSSVPMPAGGKGSHPSSTPQRVPNRLIHEKSPYLLQHAYNPVDWYPWGQEAFDKARKENKPIFLSVGYSTCHWCHMMEEESFQNEEIGRLLSEDFVSVKVDREERPDVDKVYMTFVQATSSGGGWPMNVWLTPNLQPFVGGTYFPPEDGLTRVGFRTVLLRIREQWKQNKNTLLENSQRVTTALLARSEISVGDRQLPPSAATVNNRCFQQLDEGYDEEYGGFAEAPKFPTPVILSFLFSYWLSHRLTQDGSRAQQMALHTLKMMANGGIRDHVGQGFHRYSTDRQWHVPHFEKMLYDQAQLAVAYSQAFQLSGDEFYSDVAKGILQYVARSLSHRSGGFYSAEDADSPPERGQRPKEGAYYVWTVKEVQQLLPEPVLGATEPLTSGQLLMKHYGLTEAGNISPSQDPKGELQGQNVLTVRYSLELTAARFGLDVEAVRTLLNSGLEKLFQARKHRPKPHLDSKMLAAWNGLMVSGYAVTGAVLGQDRLINYATNGAKFLKRHMFDVASGRLMRTCYTGPGGTVEHRSGGWVDREGPSPQRCPQPTSALLLPSMWTPVLALPGACCEFVASLGPFTHLGSGLMAPAQEGSSGGLSEQMRERASSGKGPLSWGSPQPLPYCLSPSNPPCWGFLEDYAFVVRGLLDLYEASQESAWLEWALRLQDTQDRLFWDSQGGGYFCSEAELGAGLPLRLKDDQDGAEPSANSVSAHNLLRLHGFTGHKDWMDKCVCLLTAFSERMRRVPVALPEMVRALSAQQQTLKQIVICGDRQAKDTKALVQCVHSVYIPNKVLILADGDPSSFLSRQLPFLSTLRRLEDQATAYVCENQACSVPITDPCELRKLLHP

SEQ ID NO: 892198 - protein, 802 aa, Homo sapiens [sequence omitted]

SEQ ID NO: 892199 - protein, 553 aa, Homo sapiens
MLGARAWLGRVLLLPRAGAGLAASRRCPGVWPRTWPHRSPSRGSSSRDKDRSATVSSSVPMPAGGKGSHPSSTPQRVPNRLIHEKSPYLLQHAYNPVDWYPWGQEAFDKARKENKPIFLSVGYSTCHWCHMMEEESFQNEEIGRLLSEDFVSVKVDREERPDVDKVYMTFVQATSSGGGWPMNVWLTPNLQPFVGGTYFPPEDGLTRVGFRTVLLRIREQWKQNKNTLLENSQRVTTALLARSEISVGDRQLPPSAATVNNRCFQQLDEGYDEEYGGFAEAPKFPTPVILSFLFSYWLSHRLTQDGSRAQQMALHTLKMMANGGIRDHVGQGFHRYSTDRQWHVPHFEKMLYDQAQLAVAYSQAFQLSGDEFYSDVAKGILQYVARSLSHRSGGFYSAEDADSPPERGQRPKEGAYYVWTVKEVQQLLPEPVLGATEPLTSGQLLMKHYGLTEAGNISPSQDPKGELQGQNVLTVRYSLELTAARFGLDVEAVRTLLNSGLEKLFQARKHRPKPHLDSKMLAAWNDRTGSFGTPRVAATSAVRLSWGLACPCV

SEQ ID NO: 892200 - protein, 404 aa, Homo sapiens
MLGARAWLGRVLLLPRAGAGLAASRRCPGVWPRTWPHRSPSRGSSSRDKDRSATVSSSVPMPAGGKGSHPSSTPQRVPNRLIHEKSPYLLQHAYNPVDWYPWGQEAFDKARKENKPIFLSVGYSTCHWCHMMEEESFQNEEIGRLLSEDFVSVKVDREERPDVDKVYMTFVQATSSGGGWPMNVWLTPNLQPFVGGTYFPPEDGLTRVGFRTVLLRIREQWKQNKNTLLENSQRVTTALLARSEISVGDRQLPPSAATVNNRCFQQLDEGYDEEYGGFAEAPKFPTPVILSFLFSYWLSHRLTQDGSRAQQMALHTLKMMANGGIRDHVGQGFHRYSTDRQWHVPHFEKMLYDQAQLAVAYSQAFQLSGDEFYSDVAKGILQYVARSLSHRSGGFYSAEDAEAL

SEQ ID NO: 892201 - protein, 97 aa, Homo sapiens
LPRDTVKFILGGVGAQGGAVSMAKDTKALVQCVHSVYIPNKVLILADGDPSSFLSRQLPFLSTLRRLEDQATAYVCENQACSVPITDPCELRKLLHP

SEQ ID NO: 892202 - protein, 600 aa, Homo sapiens
MAALAPVGSPASRGPRLAAGLRLLPMLGLLQLLAEPGLGRVHHLALKDDVRHKVHLNTFGFFKDGYMVVNVSSLSLNEPEDKDVTIGFSLDRTKNDGFSSYLDEDVNYCILKKQSVSVTLLILDISRSEVRVKSPPEAGTQLPKIIFSRDEKVLGQSQEPNVNPASAGNQTQKTQDGGKSKRSTVDSKAMGEKSFSVHNNGGAVSFQFFFNISTDDQEGLYSLYFHKCLGKELPSDKFTFSLDIEITEKNPDSYLSAGEIPLPKLYISMAFFFFLSGTIWIHILRKRRNDVFKIHWLMAALPFTKSLSLVFHAIDYHYISSQGFPIEGWAVVYYITHLLKGALLFITIALIGTGWAFIKHILSDKDKKIFMIVIPLQVLANVAYIIIESTEEGTTEYGLWKDSLFLVDLLCCGAILFPVVWSIRHLQEASATDGKGDSMGPLQQRANLRAGSRIESHHFAQADLELLASSCPPASVSQRAGITAAINLAKLKLFRHYYVLIVCYIYFTRIIAFLLKLAVPFQWKWLYQLLDETATLVFFVLTGYKFRPASDNPYLQLSQEEEDLEMESVVTTSGVMESMKKVKKVTNGSVEPQGEWEGAV

SEQ ID NO: 892203 - protein, 600 aa, Homo sapiens; identical to SEQ ID NO: 892202

SEQ ID NO: 892204 - protein, 552 aa, Homo sapiens
MAALAPVGSPASRGPRLAAGLRLLPMLGLLQLLAEPGLGRVHHLALKDDVRHKVHLNTFGFFKDGYMVVNVSSLSLNEPEDKDVTIGFSLDRTKNDGFSSYLDEDVNYCILKKQSVSVTLLILDISRSEVRVKSPPEAGTQLPKIIFSRDEKVLGQSQEPNVNPASAGNQTQKTQDGGKSKRSTVDSKAMGEKSFSVHNNGGAVSFQFFFNISTDDQEGLYSLYFHKCLGKELPSDKFTFSLDIEITEKNPDSYLSAGEIPLPKLYISMAFFFFLSGTIWIHILRKRRNDVFKIHWLMAALPFTKSLSLVFHAIDYHYISSQGFPIEGWAVVYYITHLLKGALLFITIALIGTGWAFIKHILSDKDKKIFMIVIPLQVLANVAYIIIESTEEGTTEYGLWKDSLFLVDLLCCGAILFPVVWSIRHLQEASATDGKAAINLAKLKLFRHYYVLIVCYIYFTRIIAFLLKLAVPFQWKWLYQLLDETATLVFFVLTGYKFRPASDNPYLQLSQEEEDLEMESVVTTSGVMESMKKVKKVTNGSVEPQGEWEGAV

SEQ ID NO: 892205 - protein, 571 aa, Homo sapiens
MAALAPVGSPASRGPRLAAGLRLLPMLGLLQLLAEPGLGRVHHLALKDDVRHKVHLNTFGFFKDGYMVVNVSSLSLNEPEDKDVTIGFSLDRTKNDGFSSYLDEDVNYCILKKQSVSVTLLILDISRSEVRVKSPPEAGTQLPKIIFSRDEKVLGQSQEPNVNPASAGNQTQKTQDGGKSKRSTVDSKAMGEKSFSVHNNGGAVSFQFFFNISTDDQEGLYSLYFHKCLGKELPSDKFTFSLDIEITEKNPDSYLSAGEIPLPKLYISMAFFFFLSGTIWIHILRKRRNDVFKIHWLMAALPFTKSLSLVFHAIDYHYISSQGFPIEGWAVVYYITHLLKGALLFITIALIGTGWAFIKHILSDKDKKIFMIVIPLQVLANVAYIIIESTEEGTTEYGLWKDSLFLVDLLCCGAILFPVVWSIRHLQEASATDGKGDSMGPLQQRANLRAGSRIAAINLAKLKLFRHYYVLIVCYIYFTRIIAFLLKLAVPFQWKWLYQLLDETATLVFFVLTGYKFRPASDNPYLQLSQEEEDLEMESVVTTSGVMESMKKVKKVTNGSVEPQGEWEGAV

SEQ ID NO: 892206 - protein, 463 aa, Homo sapiens
MNKMMYNWLFLSQDEDVNYCILKKQSVSVTLLILDISRSEVRVKSPPEAGTQLPKIIFSRDEKVLGQSQEPNVNPASAGNQTQKTQDGGKSKRSTVDSKAMGEKSFSVHNNGGAVSFQFFFNISTDDQEGLYSLYFHKCLGKELPSDKFTFSLDIEITEKNPDSYLSAGEIPLPKLYISMAFFFFLSGTIWIHILRKRRNDVFKIHWLMAALPFTKSLSLVFHAIDYHYISSQGFPIEGWAVVYYITHLLKGALLFITIALIGTGWAFIKHILSDKDKKIFMIVIPLQVLANVAYIIIESTEEGTTEYGLWKDSLFLVDLLCCGAILFPVVWSIRHLQEASATDGKAAINLAKLKLFRHYYVLIVCYIYFTRIIAFLLKLAVPFQWKWLYQLLDETATLVFFVLTGYKFRPASDNPYLQLSQEEEDLEMESVVTTSGVMESMKKVKKVTNGSVEPQGEWEGAV

SEQ ID NO: 892207 - protein, 453 aa, Homo sapiens
MSLAQGLHAACSVARSTALTFFPSVLFECRVRVKSPPEAGTQLPKIIFSRDEKVLGQSQEPNVNPASAGNQTQKTQDGGKSKRSTVDSKAMGEKSFSVHNNGGAVSFQFFFNISTDDQEGLYSLYFHKCLGKELPSDKFTFSLDIEITEKNPDSYLSAGEIPLPKLYISMAFFFFLSGTIWIHILRKRRNDVFKIHWLMAALPFTKSLSLVFHAIDYHYISSQGFPIEGWAVVYYITHLLKGALLFITIALIGTGWAFIKHILSDKDKKIFMIVIPLQVLANVAYIIIESTEEGTTEYGLWKDSLFLVDLLCCGAILFPVVWSIRHLQEASATDGKAAINLAKLKLFRHYYVLIVCYIYFTRIIAFLLKLAVPFQWKWLYQLLDETATLVFFVLTGYKFRPASDNPYLQLSQEEEDLEMESVVTTSGVMESMKKVKKVTNGSVEPQGEWEGAV

SEQ ID NO: 892208 - protein, 382 aa, Homo sapiens
MFLLLDGGKSKRSTVDSKAMGEKSFSVHNNGGAVSFQFFFNISTDDQEGLYSLYFHKCLGKELPSDKFTFSLDIEITEKNPDSYLSAGEIPLPKLYISMAFFFFLSGTIWIHILRKRRNDVFKIHWLMAALPFTKSLSLVFHAIDYHYISSQGFPIEGWAVVYYITHLLKGALLFITIALIGTGWAFIKHILSDKDKKIFMIVIPLQVLANVAYIIIESTEEGTTEYGLWKDSLFLVDLLCCGAILFPVVWSIRHLQEASATDGKAAINLAKLKLFRHYYVLIVCYIYFTRIIAFLLKLAVPFQWKWLYQLLDETATLVFFVLTGYKFRPASDNPYLQLSQEEEDLEMESVVTTSGVMESMKKVKKVTNGSVEPQGEWEGAV

SEQ ID NO: 892209 - protein, 275 aa, Homo sapiens
QRSPEVLSPSLLPWVHAIDYHYISSQGFPIEGWAVVYYITHLLKGALLFITIALIGTGWAFIKHILSDKDKKIFMIVIPLQVLANVAYIIIESTEEGTTEYGLWKDSLFLVDLLCCGAILFPVVWSIRHLQEASATDGKGDSMGPLQQRANLRAGSRIAAINLAKLKLFRHYYVLIVCYIYFTRIIAFLLKLAVPFQWKWLYQLLDETATLVFFVLTGYKFRPASDNPYLQLSQEEEDLEMESVVTTSGVMESMKKVKKVTNGSVEPQGEWEGAV

SEQ ID NO: 892210 - protein, 102 aa, Homo sapiens [sequence omitted]

SEQ ID NO: 892211 - protein, 138 aa, Homo sapiens [sequence omitted]

SEQ ID NO: 892212 - protein, 103 aa, Homo sapiens
MDLIVCYIYFTRIIAFLLKLAVPFQWKWLYQLLDETATLVFFVLTGYKFRPASDNPYLQLSQEEEDLEMESVVTTSGVMESMKKVKKVTNGSVEPQGEWEGAV

SEQ ID NO: 892213 - protein, 114 aa, Homo sapiens
TFHPGSWESHFHWKWNSECDNIWGDGKYEESQEGDQRLRGAPGRVGRRRVTEPTLRMALSKETVNLFIVLLDSRSSSYSELLAPPTVTPGHMAGAQCRGNLILYSLLWKRSVAV

SEQ ID NO: 892214 - protein, 165 aa, Homo sapiens
MGIFLTLCFPVQKHNTSFRRNVSQSVTTKALLSPSLRGTHLLFLPQADVVDEAIDSLARTKGVMKPPCSEGSPWRCPHFTCWVLQARKPGSGGTRERQACVWTSAGAAALRLARERQRWVFRFHAYVWAHSQHGRVSAVLVLTLPEQQWTDEIRLFQKQRWPQPS

SEQ ID NO: 892215 - protein, 552 aa, Homo sapiens; identical to SEQ ID NO: 892204

SEQ ID NO: 892216 - protein, 552 aa, Homo sapiens; identical to SEQ ID NO: 892204

SEQ ID NO: 892217 - protein, 552 aa, Homo sapiens; identical to SEQ ID NO: 892204

SEQ ID NO: 892218 - protein, 552 aa, Homo sapiens; identical to SEQ ID NO: 892204

SEQ ID NO: 892219 - protein, 296 aa, Homo sapiens
MAALAPVGSPASRGPRLAAGLRLLPMLGLLQLLAEPGLGRVHHLALKDDVRHKVHLNTFGFFKDGYMVVNVSSLSLNEPEDKDVTIGFSLDRTKNDGFSSYLDEDVNYCILKKQSVSVTLLILDISRSEVRVKSPPEAGTQLPKIIFSRDEKVLGQSQEPNVNPASAGNQTQKTQDGGKSKRSTVDSKAMGEKSFSVHNNGGAVSFQFFFNISTDDQEGLYSLYFHKCLGKELPSDKFTFSLDIEITEKNPDSYLSAGEIPLPKLYISMAFFFFLSGTIWIHILRKRRHWHWLGFH

SEQ ID NO: 892220 - protein, 450 aa, Homo sapiens
MAALAPVGSPASRGPRLAAGLRLLPMLGLLQLLAEPGLGRVHHLALKDDVRHKVHLNTFGFFKDGYMVVNVSSLSLNEPEDKDVTIGFSLDRTKNDGFSSYLDEDVNYCILKKQSVSVTLLILDISRSEVRVKSPPEAGTQLPKIIFSRDEKVLGQSQEPNVNPASAGNQTQKTQDGGKSKRSTVDSKAMGEKSFSVHNNGGAVSFQFFFNISTDDQEGLYSLYFHKCLGKELPSDKFTFSLDIEITEKNPDSYLSAGEIPLPKLYISMAFFFFLSGTIWIHILRKRRNDVFKIHWLMAALPFTKSLSLVFHAIDYHYISSQGFPIEGWAVVYYITHLLKGALLFITIALIGTGWAFIKHILSDKDKKIFMIVIPLQVLANVAYIIIESTEEGTTEYGLWKDSLFLVDLLCCGAILFPVVWSIRHLQEASATDGKEGKFSRAHFVLLSLL

SEQ ID NO: 892221 - protein, 552 aa, Homo sapiens; identical to SEQ ID NO: 892204

SEQ ID NO: 892222 - protein, 521 aa, Homo sapiens
MAALAPVGSPASRGPRLAAGLRLLPMLGLLQLLAEPGLGRVHHLALKDDVRHKVHLNTFGFFKDGYMVVNVSSLSLNEPEDKDVTIGFSLDRTKNDGFSSYLDEDVNYCILKKQSVSVTLLILDISRSEVRVKSPPEAGTQLPKIIFSRDEKVLGQSQEPNVNPASAGNQTQKTQDGGKSKRSTVDSKAMGEKSFSVHNNGGAVSFQFFFNISTDDQEGLYSLYFHKCLGKELPSDKFTFSLDIEITEKNPDSYLSAGEIPLPKLYISMAFFFFLSGTIWIHILRKRRNDVFKIHWLMAALPFTKSLSLVFHAIDYHYISSQGFPIEGWAVVYYITHLLKGALLFITIALIGTGWAFIKHILSDKDKKIFMIVIPLQVLANVAYIIIESTEEGTTEYGLWKDSLFLVDLLCCGAILFPVVWSIRHLQEASATDGKAAINLAKLKLFRHYYVLIVCYIYFTRIIAFLLKLAVPFQWKWLYQLLDETATLVFFVLTGYKFRPASDNPYLQLSQEEEDLEMESV

SEQ ID NO: 892223 - protein, 488 aa, Homo sapiens
MAALAPVGSPASRGPRLAAGLRLLPMLGLLQLLAEPGLGRVHHLALKDDVRHKVHLNTFGFFKDGYMVVNVSSLSLNEPEDKDVTIGFSLDRTKNDGFSSYLDEDVNYCILKKQSVSVTLLILDISRSEVRVKSPPEAGTQLPKIIFSRDEKVLGQSQEPNVNPASAGNQTQKTQDGGKSKRSTVDSKAMGEKSFSVHNNGGAVSFQFFFNISTDDQEGLYSLYFHKCLGKELPSDKFTFSLDIEITEKNPDSYLSAGEIPLPKLYISMAFFFFLSGTIWIHILRKRRNDVFKIHWLMAALPFTKSLSLVFHAIDYHYISSQGFPIEGWAVVYYITHLLKGALLFITIALIGTGWAFIKHILSDKDKKIFMIVIPLQVLANVAYIIIESTEEGTTEYGLWKDSLFLVDLLCCGAILFPVVWSIRHLQEASATDGKGDSMGPLQQRANLRAGSRIAAINLAKLKLFRHYYVLIVCYIYFTRIIAFLLKP

SEQ ID NO: 892224 - protein, 374 aa, Homo sapiens
MAALAPVGSPASRGPRLAAGLRLLPMLGLLQLLAEPGLGRVHHLALKDDVRHKVHLNTFGFFKDGYMVVNVSSLSLNEPEDKDVTIGFSLDRTKNDGFSSYLDEDVNYCILKKQSVSVTLLILDISRSEVRVKSPPEAGTQLPKIIFSRDEKVLGQSQEPNVNPASAGNQTQKTQDGGKSKRSTVDSKAMGEKSFSVHNNGGAVSFQFFFNISTDDQEGLYSLYFHKCLGKELPSDKFTFSLDIEITEKNPDSYLSAGEIPLPKLYISMAFFFFLSGTIWIHILRKRRNDVFKIHWLMAALPFTKSLSLVFHAIDYHYISSQGFPIEGWAVVYYITHLLKGALLFITIALIGTGWAFIKHILSDKDKKIQMLRG

SEQ ID NO: 892225 - protein, 101 aa, Homo sapiens
  misc_feature (33)..(33): Xaa can be any naturally occurring amino acid
  misc_feature (65)..(65): Xaa can be any naturally occurring amino acid
  misc_feature (70)..(70): Xaa can be any naturally occurring amino acid
QRREPLGLLRYHGRRRGKRQQNHRGIGRLFRSXGQVYSARGFGWRPDSFHLKPENIGPHKVLLMXQTNFXDMENMFDLLKKGDRSEGPSWSRALPLSEGPY

SEQ ID NO: 892226 - protein, 72 aa, Homo sapiens
MSSKTASTNNIAQARRTVQQLRLEASIERIKVSKASADLMSYCEEHARSDPLLIGIPTSENPFKDKKTCIIL

SEQ ID NO: 892227 - protein, 72 aa, Homo sapiens; identical to SEQ ID NO: 892226

SEQ ID NO: 892228 - protein, 82 aa, Homo sapiens
SFGYNRNGASLRQRAIDHLIFNVSLNIYNVAVFQNIFMKNYFYYTIMCMLLVAGIVYYLVLKHALLPNSKQVCFDIYLLICL

SEQ ID NO: 892229 - protein, 72 aa, Homo sapiens; identical to SEQ ID NO: 892226

SEQ ID NO: 892230 - protein, 72 aa, Homo sapiens; identical to SEQ ID NO: 892226

SEQ ID NO: 892231 - protein, 581 aa, Homo sapiens
LYDRRDCFVAVSFPRGLSLWLHFYLWWLCYGGAEMRQKRKGDLSPAELMMLTIGDVIKQLIEAHEQGKDIDLNKVKTKTAAKYGLSAQPRLVDIIAAVPPQYRKVLMPKLKAKPIRTASGIAVVAVMCKPHRCPHISFTGNICVYCPGGPDSDFEYSTQSYTGYEPTSMRAIRARYDPFLQTRHRIEQLKQLGHSVDKVEFIVMGGTFMALPEEYRDYFIRNLHDALSGHTSNNIYEAVKYSERSLTKCIGITIETRPDYCMKRHLSDMLTYGCTRLEIGVQSVYEDVARDTNRGHTVKAVCESFHLAKDSGFKVVAHMMPDLPNVGLERDIEQFTEFFENPAFRPDGLKLYPTLVIRGTGLYELWKSGRYKSYSPSDLVELVARILALVPPWTRVYRVQRDIPMPLVSSGVEHGNLRELALARMKDLGIQCRDVRTREVGIQEIHHKVRPYQVELVRRDYVANGGWETFLSYEDPDQDILIGLLRLRKCSEETFRFELGGGVSIVRELHVYGSVVPVSSRDPTKFQHQGFGMLLMEEAERIAREEHGSGKIAVISGVGTRNYYRKIGYRLQGPYMVKMLK

SEQ ID NO: 892232 - protein, 533 aa, Homo sapiens
LYDRRDCFVAVSFPRGLSLWLHFYLWWLCYGGAEMRQKRKGDLSPAELMMLTIGDVIKQLIEAHEQGKDIDLNKVKTKTAAKYGLSAQPRLVDIIAAVPPQYRKVLMPKLKAKPIRTASGIAVVAVMCKPHRCPHISFTGNICVYCPGGPDSDFEYSTQSYTGYEPTSMRAIRARYDPFLQTRHRIEQLKQLGHSVDKVEFIVMGGTFMALPEEYRDYFIRNLHDALSGHTSNNIYEAVKYSERSLTKCIGITIETRPDYCMKRHLSDMLTYGCTRLEIGVQSVYEDVARDTNRGHTVKAVCESFHLAKDSGFKVVAHMMPDLPNVGLERDIEQFTEFFENPAFRPDGLKLYPTLVIRGTGLYELWKSGRYKSYSPSDLVELVARILALVPPWTRVYRVQRDIPMPLVSSGVEHGNLRELALARMKDLGIQCRDVRTREVGIQEIHHKVRPYQVELVRRDYVANGGWETFLSYEDPDQDILIGLLRLRKCSERIAREEHGSGKIAVISGVGTRNYYRKIGYRLQGPYMVKMLK

SEQ ID NO: 892233 - protein, 581 aa, Homo sapiens; identical to SEQ ID NO: 892231

SEQ ID NO: 892234 - protein, 581 aa, Homo sapiens; identical to SEQ ID NO: 892231

SEQ ID NO: 892235 - protein, 532 aa, Homo sapiens [sequence omitted]

SEQ ID NO: 892236 - protein, 548 aa, Homo sapiens
TLRQAGLFCGCQLSPWSEFVAAFLSLVALLRRRRNEAEAERVKTKTAAKYGLSAQPRLVDIIAAVPPQYRKVLMPKLKAKPIRTASGIAVVAVMCKPHRCPHISFTGNICVYCPGGPDSDFEYSTQSYTGYEPTSMRAIRARYDPFLQTRHRIEQLKQLGHSVDKVEFIVMGGTFMALPEEYRDYFIRNLHDALSGHTSNNIYEAVKYSERSLTKCIGITIETRPDYCMKRHLSDMLTYGCTRLEIGVQSVYEDVARDTNRGHTVKAVCESFHLAKDSGFKVVAHMMPDLPNVGLERDIEQFTEFFENPAFRPDGLKLYPTLVIRGTGLYELWKSGRYKSYSPSDLVELVARILALVPPWTRVYRVQRDIPMPLVSSGVEHGNLRELALARMKDLGIQCRDVRTREVGIQEIHHKVRPYQVELVRRDYVANGGWETFLSYEDPDQDILIGLLRLRKCSEETFRFELGGGVSIVRELHVYGSVVPVSSRDPTKFQHQGFGMLLMEEAERIAREEHGSGKIAVISGVGTRNYYRKIGYRLQGPYMVKMLK

SEQ ID NO: 892237 - protein, 537 aa, Homo sapiens
DLSSSVQGGVANSGAQAVASWSGGESSIVWVKTKTAAKYGLSAQPRLVDIIAAVPPQYRKVLMPKLKAKPIRTASGIAVVAVMCKPHRCPHISFTGNICVYCPGGPDSDFEYSTQSYTGYEPTSMRAIRARYDPFLQTRHRIEQLKQLGHSVDKVEFIVMGGTFMALPEEYRDYFIRNLHDALSGHTSNNIYEAVKYSERSLTKCIGITIETRPDYCMKRHLSDMLTYGCTRLEIGVQSVYEDVARDTNRGHTVKAVCESFHLAKDSGFKVVAHMMPDLPNVGLERDIEQFTEFFENPAFRPDGLKLYPTLVIRGTGLYELWKSGRYKSYSPSDLVELVARILALVPPWTRVYRVQRDIPMPLVSSGVEHGNLRELALARMKDLGIQCRDVRTREVGIQEIHHKVRPYQVELVRRDYVANGGWETFLSYEDPDQDILIGLLRLRKCSEETFRFELGGGVSIVRELHVYGSVVPVSSRDPTKFQHQGFGMLLMEEAERIAREEHGSGKIAVISGVGTRNYYRKIGYRLQGPYMVKMLK

SEQ ID NO: 892238 - protein, 320 aa, Homo sapiens [sequence omitted]

SEQ ID NO: 892239 - protein, 320 aa, Homo sapiens [sequence omitted]

SEQ ID NO: 892240 - protein, 564 aa, Homo sapiens
LYDRRDCFVAVSFPRGLSLWLHFYLWWLCYGGAEMRQKRKGDLSPAELMMLTIGDVIKQLIEAHEQGKDIDLNKVKTKTAAKYGLSAQPRLVDIIAAVPPQYRKVLMPKLKAKPIRTASGIAVVAVMCKPHRCPHISFTGNICVYCPGGPDSDFEYSTQSYTGYEPTSMRAIRARYDPFLQTRHRIEQLKQLGHSVDKVEFIVMGGTFMALPEEYRDYFIRNLHDALSGHTSNNIYEAVKYSERSLTKCIGITIETRPDYCMKRHLSDMLTYGCTRLEIGVQSVYEDVARDTNRGHTVKAVCESFHLAKDSGFKVVAHMMPDLPNVGLERDIEQFTEFFENPAFRPDGLKLYPTLVIRGTGLYELWKSGRYKSYSPSDLVELVARILALVPPWTRVYRVQRDIPMPLVSSGVEHGNLRELALARMKDLGIQCRDVRTREVGIQEIHHKVRPYQVELVRRDYVANGGWETFLSYEDPDQDILIGLLRLRKCSEETFRFELGGGVSIVRELHVYGSVVPVSSRDPTKFQHQGFGMLLMEEAERIAREEHGSGKIAVISGVGTQEII

SEQ ID NO: 892241 - protein, 574 aa, Homo sapiens
LYDRRDCFVAVSFPRGLSLWLHFYLWWLCYGGAEMRQKRKGDLSPAELMMLTIGDVIKQLIEAHEQGKDIDLNKVKTKTAAKYGLSAQPRLVDIIAAVPPQYRKVLMPKLKAKPIRTASGIAVVAVMCKPHRCPHISFTGNICVYCPGGPDSDFEYSTQSYTGYEPTSMRAIRARYDPFLQTRHRIEQLKQLGHSVDKVEFIVMGGTFMALPEEYRDYFIRNLHDALSGHTSNNIYEAVKYSERSLTKCIGITIETRPDYCMKRHLSDMLTYGCTRLEIGVQSVYEDVARDTNRGHTVKAVCESFHLAKDSGFKVVAHMMPDLPNVGLERDIEQFTEFFENPAFRPDGLKLYPTLVIRGTGLYELWKSGRYKSYSPSDLVELVARILALVPPWTRVYRVQRDIPMPLVSSGVEHGNLRELALARMKDLGIQCRDVRTREVGIQEIHHKVRPYQVELVRRDYVANGGWETFLSYEDPDQDILIGLLRLRKCSEETFRFELGGGVSIVRELHVYGSVVPVSSRDPTKFQHQGFGMLLMEEAERIAREEHGSGKIAVISGVDVLGQRQRGGHHRSCS

SEQ ID NO: 892242 - protein, 556 aa, Homo sapiens
LYDRRDCFVAVSFPRGLSLWLHFYLWWLCYGGAEMRQKRKGDLSPAELMMLTIGDVIKQLIEAHEQGKDIDLNKVKTKTAAKYGLSAQPRLVDIIAAVPPQYRKVLMPKLKAKPIRTASGIAVVAVMCKPHRCPHISFTGNICVYCPGGPDSDFEYSTQSYTGYEPTSMRAIRARYDPFLQTRHRIEQLKQLGHSVDKVEFIVMGGTFMALPEEYRDYFIRNLHDALSGHTSNNIYEAVKYSERSLTKCIGITIETRPDYCMKRHLSDMLTYGCTRLEIGVQSVYEDVARDTNRGHTVKAVCESFHLAKDSGFKVVAHMMPDLPNVGLERDIEQFTEFFENPAFRPDGLKLYPTLVIRGTGLYELWKSGRYKSYSPSDLVELVARILALVPPWTRVYRVQRDIPMPLVSSGVEHGNLRELALARMKDLGIQCRDVRTREVGIQEIHHKVRPYQVELVRRDYVANGGWETFLSYEDPDQDILIGLLRLRKCSEETFRFELGGGVSIVRELHVYGSVVPVSSRDPTKFQHQGFGMLLIEEQKIVVKVLKAQAQSQKAK

SEQ ID NO: 892243 - protein, 208 aa, Homo sapiens
LYDRRDCFVAVSFPRGLSLWLHFYLWWLCYGGAEMRQKRKGDLSPAELMMLTIGDVIKQLIEAHEQGKDIDLNKVKTKTAAKYGLSAQPRLVDIIAAVPPQYRKVLMPKLKAKPIRTASGIAVVAVMCKPHRCPHISFTGNICVYCPGGPDSDFEYSTQSYTGYEPTSMRAIRARYDPFLQTRHRIEQKADLKCLLCLESSINFRLLS

SEQ ID NO: 892244 - protein, 734 aa, Homo sapiens
MSWESGAGPGLGSQGMDLVWSAWYGKCVKGKGSLPLSAHGIVVAWLSRAEWDQVTVYLFCDDHKLQRYALNRITVWRSRSGNELPLAVASTADLIRCKLLDVTGGLGTDELRLLYGMALVRFVNLISERKTKFAKVPLKCLAQEVNIPDWIVDLRHELTHKKMPHINDCRRGCYFVLDWLQKTYWCRQLENSLRETWELEEFREGIEEEDQEEDKNIVVDDITEQKPEPQDDGKSTESDVKADGDSKGSEEVDSHCKKALSHKELYERARELLVSYEEEQFTVLEKFRYLPKAIKAWNNPSPRVECVLAELKGVTCENREAVLDAFLDDGFLVPTFEQLAALQIEYEDGQTEVQRGEGTDPKSHKNVDLNDVLVPKPFSQFWQPLLRGLHSQNFTQALLERMLSELPALGISGIRPTYILRWTVELIVANTKTGRNARRFSAGQWEARRGWRLFNCSASLDWPRMVESCLGSPCWASPQLLRIIFKAMGQGLPDEEQEKLLRICSIYTQSGENSLVQEGSEASPIGKSPYTLDSLYWSVKPASSSFGSEAKAQQQEEQGSVNDVKEEEKEEKEVLPDQVEEEEENDDQEEEEEDEDDEDDEEEDRMEVGPFSTGQESPTAENARLLAQKRGALQGSAWQVSSEDVRWDTFPLGRMPGQTEDPAELMLENYDTMYLLDQPVLEQRLEPSTCKTDTLGLSCGVGSGNCSNSSSSNFEGLLWSQGQLHGLKTGLQLF

SEQ ID NO: 892245 - protein, 154 aa, Homo sapiens
PKQLCFNLVYLLGLCIKLHLKSSCLLPSLPQLRRGPSQPWGPHEVVSRICSSLFVKPGRRVGPSHRYTHVKHSWPLQSLKLPPSLTDLPLSPQHLGPELWCRQWQLQQQQQQQLRGPSLEPGAAAWAQNWPAALLMAIPGASVHPAVPGQQPTP

SEQ ID NO: 892246 - protein, 248 aa, Homo sapiens
TARYEAWCYKNIVVDDITEQKPEPQDDGKSTESDVKADGDSKGSEEVDSHCKKALSHKELYERARELLVSYEEEQFTVLEKFRYLPKAIKAWNNPSPRVECVLAELKGVTCENREAVLDAFLDDGFLVPTFEQLAALQIEYEDGQTEVQRGEGTDPKSHKNVDLNDVLVPKPFSQFWQPLLRGLHSQNFTQALLERMLSELPALGISGIRPTYILRWTVELIVANTKTGRNVAISEAVCARGVGLSLS

SEQ ID NO: 892247 - protein, 717 aa, Homo sapiens
MSWESGAGPGLGSQGMDLVWSAWYGKCVKGKGSLPLSAHGIVVAWLSRAEWDQVTVYLFCDDHKLQRYALNRITVWRSRSGNELPLAVASTADLIRCKLLDVTGGLGTDELRLLYGMALVRFVNLISERKTKFAKVPLKCLAQEVNIPDWIVDLRHELTHKKMPHINDCRRGCYFVLDWLQKTYWCRQLENSLRETWELEEFREGIEEEDQEEDKNIVVDDITEQKPEPQDDGKSTESDVKADGDSKGSEEVDSHCKKALSHKELYERARELLVSYEEEQFTVLEKFRYLPKAIKAWNNPSPRVECVLAELKGVTCENREAVLDAFLDDGFLVPTFEQLAALQIEYEENVDLNDVLVPKPFSQFWQPLLRGLHSQNFTQALLERMLSELPALGISGIRPTYILRWTVELIVANTKTGRNARRFSAGQWEARRGWRLFNCSASLDWPRMVESCLGSPCWASPQLLRIIFKAMGQGLPDEEQEKLLRICSIYTQSGENSLVQEGSEASPIGKSPYTLDSLYWSVKPASSSFGSEAKAQQQEEQGSVNDVKEEEKEEKEVLPDQVEEEEENDDQEEEEEDEDDEDDEEEDRMEVGPFSTGQESPTAENARLLAQKRGALQGSAWQVSSEDVRWDTFPLGRMPGQTEDPAELMLENYDTMYLLDQPVLEQRLEPSTCKTDTLGLSCGVGSGNCSNSSSSNFEGLLWSQGQLHGLKTGLQLF

SEQ ID NO: 892248 - protein, 415 aa, Homo sapiens
MKEPENCWYHTKRSSLREAVLDAFLDDGFLVPTFEQLAALQIEYEENVDLNDVLVPKPFSQFWQPLLRGLHSQNFTQALLERMLSELPALGISGIRPTYILRWTVELIVANTKTGRNARRFSAGQWEARRGWRLFNCSASLDWPRMVESCLGSPCWASPQLLRIIFKAMGQGLPDEEQEKLLRICSIYTQSGENSLVQEGSEASPIGKSPYTLDSLYWSVKPASSSFGSEAKAQQQEEQGSVNDVKEEEKEEKEVLPDQVEEEEENDDQEEEEEDEDDEDDEEEDRMEVGPFSTGQESPTAENARLLAQKRGALQGSAWQVSSEDVRWDTFPLGRMPGQTEDPAELMLENYDTMYLLDQPVLEQRLEPSTCKTDTLGLSCGVGSGNCSNSSSSNFEGLLWSQGQLHGLKTGLQLF

SEQ ID NO: 892249 - protein, 687 aa, Homo sapiens
MSWESGAGPGLGSQGMDLVWSAWYGKCVKGKGSLPLSAHGIVVAWLSRAEWDQVTVYLFCDDHKLQRYALNRITVWRSRSGNELPLAVASTADLIRCKLLDVTGGLGTDELRLLYGMALVRFVNLISERKTKFAKVPLKCLAQEVNIPDWIVDLRHELTHKKMPHINDCRRGCYFVLDWLQKTYWCRQLENSLRETWELEEFREGIEEEDQEEDKNIVVDDITEQKPEPQDDGKSTESDVKADGDSKGSEEVDSHCKKALSHKELYERARELLVSYEEEQFTVLEKFRYLPKAIKAWNNPSPRVECVLAELKGVTCENREAVLDAFLDDGFLVPTFEQLAALQIEYEENVDLNDVLVPKPFSQFWQPLLRGLHSQNFTQALLERMLSELPALGISGIRPTYILRWTVELIVANTKTGRNARRFSAGQWEARRGWRLFNCSASLDWPRMVESCLGSPCWASPQLLRIIFKAMGQGLPDEEQEKLLRICSIYTQSGENSLVQEGSEASPIGKSPYTLDSLYWSVKPASSSFGSEAKAQQQEEQGSVNDVKEEEKEEKEVLPDQVEEEEENDDQEEEEEDEDDEDDEEEDRMEVGPFSTGQESPTAENARLLAQKRGALQGSAWQVSSEDVRWDTFPLGRMPGQTEDPAELMLENYDTMYLLDQPVLEQRLEPSTCKTDHLILGPACWSA

SEQ ID NO: 892250 - protein, 699 aa, Homo sapiens
MSWESGAGPGLGSQGMDLVWSAWYGKCVKGKGSLPLSAHGIVVAWLSRAEWDQVTVYLFCDDHKLQRYALNRITVWRSRSGNELPLAVASTADLIRCKLLDVTGGLGTDELRLLYGMALVRFVNLISERKTKFAKVPLKCLAQEVNIPDWIVDLRHELTHKKMPHINDCRRGCYFVLDWLQKTYWCRQLENSLRETWELEEFREGIEEEDQEEDKNIVVDDITEQKPEPQDDGKSTESDVKADGDSKGSEEVDSHCKKALSHKELYERARELLVSYEEEQFTVLEKFRYLPKAIKAWNNPSPRVECVLAELKGVTCENREAVLDAFLDDGFLVPTFEQLAALQIEYEENVDLNDVLVPKPFSQFWQPLLRGLHSQNFTQALLERMLSELPALGISGIRPTYILRWTVELIVANTKTGRNARRFSAGQWEARRGWRLFNCSASLDWPRMVESCLGSPCWASPQLLRIIFKAMGQGLPDEEQEKLLRICSIYTQSGENSLVQEGSEASPIGKSPYTLDSLYWSVKPASSSFGSEAKAQQQEEQGSVNDVKEEEKEEKEVLPDQVEEEEENDDQEEEEEDEDDEDDEEEDRMEVGPFSTGQESPTAENARLLAQKRGALQGSAWQVSSEDVRWDTFPLGRMPGQDQPVLEQRLEPSTCKTDTLGLSCGVGSGNCSNSSSSNFEGLLWSQGQLHGLKTGLQLF

SEQ ID NO: 892251 - protein, 548 aa, Homo sapiens
ENGARTIYRANRKGQTVGTGENSLRETWELEEFREGIEEEDQEEDKNIVVDDITEQKPEPQDDGKSTESDVKADGDSKGSEEVDSHCKKALSHKELYERARELLVSYEEEQFTVLEKFRYLPKAIKAWNNPSPRVECVLAELKGVTCENREAVLDAFLDDGFLVPTFEQLAALQIEYEENVDLNDVLVPKPFSQFWQPLLRGLHSQNFTQALLERMLSELPALGISGIRPTYILRWTVELIVANTKTGRNARRFSAGQWEARRGWRLFNCSASLDWPRMVESCLGSPCWASPQLLRIIFKAMGQGLPDEEQEKLLRICSIYTQSGENSLVQEGSEASPIGKSPYTLDSLYWSVKPASSSFGSEAKAQQQEEQGSVNDVKEEEKEEKEVLPDQVEEEEENDDQEEEEEDEDDEDDEEEDRMEVGPFSTGQESPTAENARLLAQKRGALQGSAWQVSSEDVRWDTFPLGRMPGQTEDPAELMLENYDTMYLLDQPVLEQRLEPSTCKTDTLGLSCGVGSGNCSNSSSSNFEGLLWSQGQLHGLKTGLQLF

SEQ ID NO: 892252 - protein, 472 aa, Homo sapiens
MSWESGAGPGLGSQGMDLVWSAWYGKCVKGKGSLPLSAHGIVVAWLSRAEWDQVTVYLFCDDHKLQRYALNRITVWRSRSGNELPLAVASTADLIRCKLLDVTGGLGTDELRLLYGMALVRFVNLISERKTKFAKVPLKCLAQEVNIPDWIVDLRHELTHKKMPHINDCRRGCYFVLDWLQKTYWCRQLENSLRETWELEEFREGIEEEDQEEDKNIVVDDITEQKPEPQDDGKSTESDVKADGDSKGSEEVDSHCKKALSHKELYERARELLVSYEEEQFTVLEKFRYLPKAIKAWNNPSPRVECVLAELKGVTCENREAVLDAFLDDGFLVPTFEQLAALQIEYEENVDLNDVLVPKPFSQFWQPLLRGLHSQNFTQALLERMLSELPALGISGIRPTYILRWTVELIVANTKTGRNARRFSAGQWEARRGWRLFNCSASLDWPRMVESCLGSPCWASPQLLRIAVLGGS

SEQ ID NO: 892253 - protein, 529 aa, Homo sapiens
TARYEAWCYKNIVVDDITEQKPEPQDDGKSTESDVKADGDSKGSEEVDSHCKKALSHKELYERARELLVSYEEEQFTVLEKFRYLPKAIKAWNNPSPRVECVLAELKGVTCENREAVLDAFLDDGFLVPTFEQLAALQIEYEDGQTEVQRGEGTDPKSHKNVDLNDVLVPKPFSQFWQPLLRGLHSQNFTQALLERMLSELPALGISGIRPTYILRWTVELIVANTKTGRNARRFSAGQWEARRGWRLFNCSASLDWPRMVESCLGSPCWASPQLLRIIFKAMGQGLPDEEQEKLLRICSIYTQSGENSLVQEGSEASPIGKSPYTLDSLYWSVKPASSSFGSEAKAQQQEEQGSVNDVKEEEKEEKEVLPDQVEEEEENDDQEEEEEDEDDEDDEEEDRMEVGPFSTGQESPTAENARLLAQKRGALQGSAWQVSSEDVRWDTFPLGRMPGQTEDPAELMLENYDTMYLLDQPVLEQRLEPSTCKTDTLGLSCGVGSGNCSNSSSSNFEGLLWSQGQLHGLKTGLQLF

SEQ ID NO: 892254 - protein, 270 aa, Homo sapiens
MVESCLGSPCWASPQLLRIIFKAMGQGLPDEEQEKLLRICSIYTQSGENSLVQEGSEASPIGKSPYTLDSLYWSVKPASSSFGSEAKAQQQEEQGSVNDVKEEEKEEKEVLPDQVEEEEENDDQEEEEEDEDDEDDEEEDRMEVGPFSTGQESPTAENARLLAQKRGALQGSAWQVSSEDVRWDTFPLGRMPGQTEDPAELMLENYDTMYLLDQPVLEQRLEPSTCKTDTLGLSCGVGSGNCSNSSSSNFEGLLWSQGQLHGLKTGLQLF

SEQ ID NO: 892255 - protein, 308 aa, Homo sapiens
MSWESGAGPGLGSQGMDLVWSAWYGKCVKGKGSLPLSAHGIVVAWLSRAEWDQVTVYLFCDDHKLQRYALNRITVWRSRSGNELPLAVASTADLIRCKLLDVTGGLGTDELRLLYGMALVRFVNLISERKTKFAKVPLKCLAQEVNIPDWIVDLRHELTHKKMPHINDCRRGCYFVLDWLQKTYWCRQLENSLRETWELEEFREGIEEEDQEEDKNIVVDDITEQKPEPQDDGKSTESDVKADGDSKGSEEVDSHCKKALSHKELYERARELLVSYEEEQFTVLEKFRYLPKAIKAWNNPPPSTTDAP

SEQ ID NO: 892256 - protein, 305 aa, Homo sapiens
MSWESGAGPGLGSQGMDLVWSAWYGKCVKGKGSLPLSAHGIVVAWLSRAEWDQVTVYLFCDDHKLQRYALNRITVWRSRSGNELPLAVASTADLIRCKLLDVTGGLGTDELRLLYGMALVRFVNLISERKTKFAKVPLKCLAQEVNIPDWIVDLRHELTHKKMPHINDCRRGCYFVLDWLQKTYWCRQLENSLRETWELEEFREGIEEEDQEEDKNIVVDDITEQKPEPQDDGKSTESDVKADGDSKGSEEVDSHCKKALSHKELYERARELLVSYEEEQFTVRKCPGLGVLSSAPAISSLLPAT

SEQ ID NO: 892257 - protein, 717 aa, Homo sapiens; identical to SEQ ID NO: 892247

SEQ ID NO: 892258 - protein, 699 aa, Homo sapiens; identical to SEQ ID NO: 892250

SEQ ID NO: 892259 - protein, 720 aa, Homo sapiens
  misc_feature (719)..(719): Xaa can be any naturally occurring amino acid
MSWESGAGPGLGSQGMDLVWSAWYGKCVKGKGSLPLSAHGIVVAWLSRAEWDQVTVYLFCDDHKLQRYALNRITVWRSRSGNELPLAVASTADLIRCKLLDVTGGLGTDELRLLYGMALVRFVNLISERKTKFAKVPLKCLAQEVNIPDWIVDLRHELTHKKMPHINDCRRGCYFVLDWLQKTYWCRQLENSLRETWELEEFREGIEEEDQEEDKNIVVDDITEQKPEPQDDGKSTESDVKADGDSKGSEEVDSHCKKALSHKELYERARELLVSYEEEQFTVLEKFRYLPKAIKAWNNPSPRVECVLAELKGVTCENREAVLDAFLDDGFLVPTFEQLAALQIEYEENVDLNDVLVPKPFSQFWQPLLRGLHSQNFTQALLERMLSELPALGISGIRPTYILRWTVELIVANTKTGRNARRFSAGQWEARRGWRLFNCSASLDWPRMVESCLGSPCWASPQLLRIIFKAMGQGLPDEEQEKLLRICSIYTQSGENSLVQEGSEASPIGKSPYTLDSLYWSVKPASSSFGSEAKAQQQEEQGSVNDVKEEEKEEKEVLPDQVEEEEENDDQEEEEEDEDDEDDEEEDRMEVGPFSTGQESPTAENARLLAQKRGALQGSAWQVSSEDVRWDTFPLGRMPGQTEDPAELMLENYDTMYLLDQPVLEQRLEPSTCKTDTLGLKGVLSNRQCQTQPQSPSLQAFMLETPGGCPIRCGRPARXS

SEQ ID NO: 892260 - protein, 714 aa, Homo sapiens
SGVKYIQHYVEEEASRIDEDKTSIGYGQANVARVCRGVRTEVPLNLRDGSEATPSGMTGRRGQLASIKVHRFYETRIKTDHLSLGVDIIDLVNESDWEGLIPCQMAVMGMTVRDGSELDYGVIRVRKTKFAKVPLKCLAQEVNIPDWIVDLRHELTHKKMPHINDCRRGCYFVLDWLQKTYWCRQLENSLRETWELEEFREGIEEEDQEEDKNIVVDDITEQKPEPQDDGKSTESDVKADGDSKGSEEVDSHCKKALSHKELYERARELLVSYEEEQFTVLEKFRYLPKAIKAWNNPSPRVECVLAELKGVTCENREAVLDAFLDDGFLVPTFEQLAALQIEYEENVDLNDVLVPKPFSQFWQPLLRGLHSQNFTQALLERMLSELPALGISGIRPTYILRWTVELIVANTKTGRNARRFSAGQWEARRGWRLFNCSASLDWPRMVESCLGSPCWASPQLLRIIFKAMGQGLPDEEQEKLLRICSIYTQSGENSLVQEGSEASPIGKSPYTLDSLYWSVKPASSSFGSEAKAQQQEEQGSVNDVKEEEKEEKEVLPDQVEEEEENDDQEEEEEDEDDEDDEEEDRMEVGPFSTGQESPTAENARLLAQKRGALQGSAWQVSSEDVRWDTFPLGRMPGQTEDPAELMLENYDTMYLLDQPVLEQRLEPSTCKTDTLGLSCGVGSGNCSNSSSSNFEGLLWSQGQLHGLKTGLQLF

SEQ ID NO: 892261 - protein, 472 aa, Homo sapiens; identical to SEQ ID NO: 892252

SEQ ID NO: 892262 - protein, 415 aa, Homo sapiens
MVFCQHHFAKLVSSCSREAVLDAFLDDGFLVPTFEQLAALQIEYEENVDLNDVLVPKPFSQFWQPLLRGLHSQNFTQALLERMLSELPALGISGIRPTYILRWTVELIVANTKTGRNARRFSAGQWEARRGWRLFNCSASLDWPRMVESCLGSPCWASPQLLRIIFKAMGQGLPDEEQEKLLRICSIYTQSGENSLVQEGSEASPIGKSPYTLDSLYWSVKPASSSFGSEAKAQQQEEQGSVNDVKEEEKEEKEVLPDQVEEEEENDDQEEEEEDEDDEDDEEEDRMEVGPFSTGQESPTAENARLLAQKRGALQGSAWQVSSEDVRWDTFPLGRMPGQTEDPAELMLENYDTMYLLDQPVLEQRLEPSTCKTDTLGLSCGVGSGNCSNSSSSNFEGLLWSQGQLHGLKTGLQLF

SEQ ID NO: 892263 - protein, 359 aa, Homo sapiens
SYAQHQQVRQIRKKMMEIMTREVQTNDLKEVVNKLIPDSIGKDIEKACQSIYPLHDVFVRKVKMLKKPKFELGKLMELMVKAVVLDWPRMVESCLGSPCWASPQLLRIIFKAMGQGLPDEEQEKLLRICSIYTQSGENSLVQEGSEASPIGKSPYTLDSLYWSVKPASSSFGSEAKAQQQEEQGSVNDVKEEEKEEKEVLPDQVEEEEENDDQEEEEEDEDDEDDEEEDRMEVGPFSTGQESPTAENARLLAQKRGALQGSAWQVSSEDVRWDTFPLGRMPGQTEDPAELMLENYDTMYLLDQPVLEQRLEPSTCKTDTLGLSCGVGSGNCSNSSSSNFEGLLWSQGQLHGLKTGLQLF

SEQ ID NO: 892264 - protein, 243 aa, Homo sapiens
MSWESGAGPGLGSQGMDLVWSAWYGKCVKGKGSLPLSAHGIVVAWLSRAEWDQVTVYLFCDDHKLQRYALNRITVWRSRSGNELPLAVASTADLIRCKLLDVTGGLGTDELRLLYGMALVRFVNLISERKTKFAKVPLKCLAQEVNIPDWIVDLRHELTHKKMPHINDCRRGCYFVLDWLQKTYWCRQLENSLRETWELEEFREGIEEEDQEEDKNIVVDDITEQKPEPGSATSTQLSTTGEF

SEQ ID NO: 892265 - protein, 268 aa, Homo sapiens
MQQIRPPFIRGPPHHASNPNSPLSNPMLPGIGPPPGGPRNLGPTSSPMHRPMLSPHIHPPSTPTMPGNPPGLLPPPPPGAPLPSLPFPPVSMMPNGPMPVPQMMNFGLPSLAPLVPPPTLLVPYPVIVPLPVPIPIPIPIPHVSDSKPPKKLLSPEEPAVSELESVKENNCASNCHLDGEAAKKLMGEEALAGGDKSDPNLNNPADEDHAYALRMLPKTGCVIQPVPKPAEKAAMAPCIISSPMLSAGPEDLEPPLKRRCLRIRNQNK

SEQ ID NO: 892266 - protein, 268 aa, Homo sapiens; identical to SEQ ID NO: 892265

SEQ ID NO: 892267 - protein, 295 aa, Homo sapiens
GHSLSPRDSKQGSSKSADSPPGCSGQALSLAPTPAEHGRSEVVDLTRRAGSPPGPPGAGGQLGFPGVLQGPQDGVIDLTVGHRARLHNVIHRALHAHVKAEREPGAAERRTCGGCRDGHCSPPAAGDPGPGAPAGPEAAAACNVIVNGTRGAAAEGAKSAEPPPEQPPPPPPPAPPKKLLSPEEPAVSELESVKENNCASNCHLDGEAAKKLMGEEALAGGDKSDPNLNNPADEDHAYALRMLPKTGCVIQPVPKPAEKAAMAPCIISSPMLSAGPEDLEPPLKRRCLRIRNQNK

SEQ ID NO: 892268 - protein, 317 aa, Homo sapiens
MAEMEKEGRPPENKRSRKPAHPVKREINEEMKNFAENTMNELLGWYGYDKVELKDGEDIEFRSYPTDGESRQHISVLKENSLPKPKLPEDSVISPYNISTGYSGLATGNGLSDSPAGSKDHGSVPIIVPLIPPPFIKPPAEDDVSNVQIMCAWCQKVGIKRYSLSMGSEVKSFCSEKCFAACRRAYFKRNKARDEDGHAENFPQQHYAKETPRLAFKNNSNYLNVHSQGTLMERGRRANHVTPSNDTSWSAHHPLWLKLKQIKPLPVIKHLRGSSPPSMASSPEKPAHLGPTKQAQPSCCHHLCFSPEELRDFTPGF

SEQ ID NO: 892269 - protein, 207 aa, Homo sapiens
MAEMEKEGRPPENKRSRKPAHPVKREINEEMKNFAENTMNELLGWYGYDKVELKDGEDIEFRSYPTDGESRQHISVLKENSLPKPKLPEDSVISPYNISTGYSGLATGNGLSDSPAGSKDHGSVPIIVPLIPPPFIKPPAEDDVSNVQIMCAWCQKVGIKRYSLSMGSEVKSFCSEKCFAACRRAYFKRNKVILVCVIQLFPFYQGG

SEQ ID NO: 892270 - protein, 355 aa, Homo sapiens
MAEMEKEGRPPENKRSRKPAHPVKREINEEMKNFAENTMNELLGWYGYDKVELKDGEDIEFRSYPTDGESRQHISVLKENSLPKPKLPEDSVISPYNISTGYSGLATGNGLSDSPAGSKDHGSVPIIVPLIPPPFIKPPAEDDVSNVQIMCAWCQKVGIKRYSLSMGSEVKSFCSEKCFAACRRAYFKRNKARDEDGHAENFPQQHYAKETPRLAFKNNCELLVCDWCKHIRHTKEYLDFGDGERRLQFCSAKCLNQYKMDIFYKETQANLPAGLCSTLHPPMENKAEGTGVQLLTPDSWNIPLTDARRKAPSPVATAGQSQGPGPSASTTVSPSDTANCSVTKIPTPVPKSIPI

SEQ ID NO: 892271 - protein, 291 aa, Homo sapiens
VWVGESWGQTWGEYLGGARWLGWLDLRQSWALSISEEVVKKRDFLFHFLNFLCMLVEDMLLHKLRTLEFLATERTQPLILAQFLRVEVTNFSTSCSGSLRPIFWASSSESDSSAAARAAAASWEGEEAGEEPTSPVTQYLQPRSPEECKMFACAKLACTPSLIRAGSRVAYRPISASVLSRPEASRTGEGSTVFNGAQNGVSQLIQREFQTSAISRDIDTAAKFIGAGAATVGVAGSGAGIGTVFGSLIIGYARNPSLKQQLFSYAILGFALSEAMGLFCLMVAFLILFAM

SEQ ID NO: 892272 - protein, 142 aa, Homo sapiens
MFACAKLACTPSLIRAGSRVAYRPISASVLSRPEASRTGEGSTVFNGAQNGVSQLIQREFQTSAISRDIDTAAKFIGAGAATVGVAGSGAGIGTVFGSLIIGYARNPSLKQQLFSYAILGFALSEAMGLFCLMVAFLILFAM

SEQ ID NO: 892273 - protein, 203 aa, Homo sapiens
YPPGAISRDIDTTAIFHESPTPSTSAAARAAAASWEGEEAGEEPTSPVTQYLQPRSPEECKMFACAKLACTPSLIRAGSRVAYRPISASVLSRPEASRTGEGSTVFNGAQNGVSQLIQREFQTSAISRDIDTAAKFIGAGAATVGVAGSGAGIGTVFGSLIIGYARNPSLKQQLFSYAILGFALSEAMGLFCLMVAFLILFAM

SEQ ID NO: 892274 - protein, 142 aa, Homo sapiens; identical to SEQ ID NO: 892272

SEQ ID NO: 892275 - protein, 105 aa, Homo sapiens
MFACAKLACTPSLIRAGSRVAYRPISASVLSRPEASRTGEGSTVFNGAQNGVSQLIQREFQTSAISRDIDTAAKFIGAGAATVGVAGSGAGIGTVFGSLIIGYAR

SEQ ID NO: 892276 - protein, 163 aa, Homo sapiens
YPPGAISRDIDTTAIFHESPTPSTSAAARAAAASWEGEEAGEEPTSPVTQYLQPRSPEECKMFACAKLACTPSLIRAGSRVAYRPISASVLSRPEASRTGEGSTVFNGAQNGVSQLIQREFQTSAINPSLKQQLFSYAILGFALSEAMGLFCLMVAFLILFAM

SEQ ID NO: 892277 - protein, 142 aa, Homo sapiens; identical to SEQ ID NO: 892272

SEQ ID NO: 892278 - protein, 291 aa, Homo sapiens; identical to SEQ ID NO: 892271

SEQ ID NO: 892279 - protein, 263 aa, Homo sapiens
MTTPDDHTNTHEEANNETNDNAADTPKEEQGRRTVPTQSRERASAGTSRPRPRDARPATSARTHTDDAPTPPMTSNQLASTARRLPRQRHCIEEADQHRRHRKTRQAQLPSRSKQPQQKEPYCDQSADGARPTRREIDGTSSQPSETTSRLDRSSTGHGTCTPHTQAAGRKRETTPKAHGEHEQTANNARRANEQTADQNAPADTKRRRQKKKAPERRKRQAQPDPADSSAQNGARRAAPRDQGTRARTPQMDASRGEDNDVH

SEQ ID NO: 892280 - protein, 105 aa, Homo sapiens; identical to SEQ ID NO: 892275

SEQ ID NO: 892281 - protein, 177 aa, Homo sapiens
RSGAVRRQCGAGGRAGGARRSAGGRRNSKGGPRQGAIGLGLREPETAAAAAAAAAGGAQGTPPLPVLCLGPSLLPRAQCGLASVKCHTMSDRKAVIKNADMSEDMQQDAVDCATQAMEKYNIEKDIAAYIKKEFDKKYNPTWHCIVGRNFGSYVTHETKHFIYFYLGQVAILLFKSG

SEQ ID NO: 892282 - protein, 177 aa, Homo sapiens; identical to SEQ ID NO: 892281

SEQ ID NO: 892283 - protein, 111 aa, Homo sapiens
MFTAQSKELSALPLCSFCECHTMSDRKAVIKNADMSEDMQQDAVDCATQAMEKYNIEKDIAAYIKKEFDKKYNPTWHCIVGRNFGSYVTHETKHFIYFYLGQVAILLFKSG

SEQ ID NO: 892284 - protein, 177 aa, Homo sapiens; identical to SEQ ID NO: 892281

SEQ ID NO: 892285 - protein, 177 aa, Homo sapiens; identical to SEQ ID NO: 892281

SEQ ID NO: 892286 - protein, 177 aa, Homo sapiens; identical to SEQ ID NO: 892281

SEQ ID NO: 892287 - protein, 312 aa, Homo sapiens
MSAFSEAALEKKLSELSNSQQSVQTLSLWLIHHRKHSRPIVTVWERELRKAKPNRKLTFLYLANDVIQNSKRKGPEFTKDFAPVIVEAFKHVSSETDESCKKHLGRVLSIWEERSVYENDVLEQLKQALYGDKKPRKRTYEQIKVDENENCSSLGSPSEPPQTLDLVRALQDLENAASGDAAVHQRIASLPVEVQEVSLLDKITDKESGERLSKMVEDACMLLADYNGRLAAEIDDRKQLTRMLADFLRCQKEALAEKEHKLEEYKRKLARVSLVRKELRSRIQSLPDLSRLPNVTGSHMHLPFAGDIYSED

SEQ ID NO: 892288 - protein, 276 aa, Homo sapiens
MRNSNWRFCQTGIYSKPNRKLTFLYLANDVIQNSKRKGPEFTKDFAPVIVEAFKHVSSETDESCKKHLGRVLSIWEERSVYENDVLEQLKQALYGDKKPRKRTYEQIKVDENENCSSLGSPSEPPQTLDLVRALQDLENAASGDAAVHQRIASLPVEVQEVSLLDKITDKESGERLSKMVEDACMLLADYNGRLAAEIDDRKQLTRMLADFLRCQKEALAEKEHKLEEYKRKLARVSLVRKELRSRIQSLPDLSRLPNVTGSHMHLPFAGDIYSED

SEQ ID NO: 892289 - protein, 312 aa, Homo sapiens; identical to SEQ ID NO: 892287

SEQ ID NO: 892290 - protein, 276 aa, Homo sapiens; identical to SEQ ID NO: 892288

SEQ ID NO: 892291 - protein, 270 aa, Homo sapiens
MSAFSEAALEKKLSELSNSQQSVQTLSLWLIHHRKHSRPIVTVWERELRKAKPNRKLTFLYLANDVIQNSKRKGPEFTKDFAPVIVEAFKHVSSETDESCKKHLGRVLSIWEERSVYENDVLEQLKQALYGDKKPRKRTYEQIKVDENENCSSLGSPSEPPQTLDLVRALQDLENAASGDAAVHQRIASLPVEVQEVSLLDKITDKESGERLSKMVEDACMLLADYNGRLAAEIDDRKQLTRMLADFLRCQKEALAEKEHKLEVRNLFLL

SEQ ID NO: 892292 - protein, 312 aa, Homo sapiens; identical to SEQ ID NO: 892287

SEQ ID NO: 892293 - protein, 312 aa, Homo sapiens; identical to SEQ ID NO: 892287

SEQ ID NO: 892294 - protein, 68 aa, Homo sapiens
SSIRKSNTDRCYGSALRAQEYKRKLARVSLVRKELRSRIQSLPDLSRLPNVTGSHMHLPFAGDIYSED

SEQ ID NO: 892295 - protein, 312 aa, Homo sapiens; identical to SEQ ID NO: 892287

SEQ ID NO: 892296 - protein, 75 aa, Homo sapiens
TFQKEHKTLLRTSYTVIRYSQRRTGKQTGKVHLPMCYCHLRTDSCVDGWNNSWHPRVRKWKKKIQPSGEVTDAQL

SEQ ID NO: 892297 - protein, 289 aa, Homo sapiens
MSAFSEAALEKKLSELSNSQQSVQTLSLWLIHHRKHSRPIVTVWERELRKAKPNRKLTFLYLANDVIQNSKRKGPEFTKDFAPVIVEAFKHVSSETDESCKKHLGRVLSIWEERSVYENDVLEQLKQALYGDKKPRKRTYEQIKVDENENCSSLGSPSEPPQTLDLVRALQDLENAASGDAAVHQRIASLPVEVQEVSLLDKITDKESGERLSKMVEDACMLLADYNGRLAAEIDDRKQLTRMLADFLRCQKEALAEKEHKLEILDMGVSSNDVVTISIFFLLKINIKP

SEQ ID NO: 892298 - protein, 164 aa, Homo sapiens
MEASWGSFNAERGWYVSVQQPEEAEAEELSPLLSNELHRQRSPGVSFGLSVFNLMNAIMGSGILGLAYVMANTGVFGFSFLLLTVALLASYSVHLLLSMCIQTAVTSYEDLGLFAFGLPGKLVVAGTIIIQNIGAMSSYLLIIKTELPAAIAEFLTGDYSRHIK

SEQ ID NO: 892299 - protein, 183 aa, Homo sapiens
MSSYLLIIKTELPAAIAEFLTGDYSRYWYLDGQTLLIIICVGIVFPLALLPKIGFLGYTSSLSFFFMMFFALVVIIKKWSIPCPLTLNYVEKGFQISNVTDDCKPKLFHFSKESAYALPTMAFSFLCHTSILPIYCELQSPSKKRMQNVTNTAIALSFLIYFISALFGYLTFYDEQLKPREVK

SEQ ID NO: 892300 - protein, 456 aa, Homo sapiens
MEASWGSFNAERGWYVSVQQPEEAEAEELSPLLSNELHRQRSPGVSFGLSVFNLMNAIMGSGILGLAYVMANTGVFGFSFLLLTVALLASYSVHLLLSMCIQTAVTSYEDLGLFAFGLPGKLVVAGTIIIQNIGAMSSYLLIIKTELPAAIAEFLTGDYSRYWYLDGQTLLIIICVGIVFPLALLPKIGFLGYTSSLSFFFMMFFALVVIIKKWSIPCPLTLNYVEKGFQISNVTDDCKPKLFHFSKESAYALPTMAFSFLCHTSILPIYCELQSPSKKRMQNVTNTAIALSFLIYFISALFGYLTFYDKVESELLKGYSKYLSHDVVVMTVKLCILFAVLLTVPLIHFPARKAVTMMFFSNFPFSWIRHFLITLALNIIIVLLAIYVPDIRNVFGVVGASTSTCLIFIFPGLFYLKLSREDFLSWKKLGAFVLLIFGILVGNFSLALIIFDWINK

SEQ ID NO: 892301 - protein, 456 aa, Homo sapiens; identical to SEQ ID NO: 892300

SEQ ID NO: 892302 - protein, 459 aa, Homo sapiens
MEASWGSFNAERGWYVSVQQPEEAEAEELSPLLSNELHRQRSPGVSFGLSVFNLMNAIMGSGILGLAYVMANTGVFGFSFLLLTVALLASYSVHLLLSMCIQTAVTSYEDLGLFAFGLPGKLVVAGTIIIQNIGAMSSYLLIIKTELPAAIAEFLTGDYSRYWYLDGQTLLIIICVGIVFPLALLPKIGFLGYTSSLSFFFMMFFALVVIIKKWSIPCPLTLNYVEKGFQISNVTDDCKPKLFHFSKESAYALPTMAFSFLCHTSILPIYCELQSPSKKRMQNVTNTAIALSFLIYFISALFGYLTFYDKVESELLKGYSKYLSHDVVVMTVKLCILFAVLLTVPLIHFPARKAVTMMFFSNFPFSWIRHFLITLALNIIIVLLAIYVPDIRNVFGVVGASTSTCLIFIFPGLFYLKLSREDFLSWKKLGVGVQWCDLSSLQPLPPGLKQSSHLSLQSS

SEQ ID NO: 892303 - protein, 443 aa, Homo sapiens
MEASWGSFNAERGWYVSVQQPEEAEAEELSPLLSNELHRQRSPGVSFGLSVFNLMNAIMGSGILGLAYVMANTGVFGFSFLLLTVALLASYSVHLLLSMCIQTAVTSYEDLGLFAFGLPGKLVVAGTIIIQNIGAMSSYLLIIKTELPAAIAEFLTGDYSRYWYLDGQTLLIIICVGIVFPLALLPKIGFLGYTSSLSFFFMMFFALVVIIKKWSIPCPLTLNYVEKGFQISNVTDDCKPKLFHFSKESAYALPTMAFSFLCHTSILPIYCELQSPSKKRMQNVTNTAIALSFLIYFISALFGYLTFYDKVESELLKGYSKYLSHDVVVMTVKLCILFAVLLTVPLIHFPARKAVTMMFFSNFPFSWIRHFLITLALNIIIVLLAIYVPDIRNVFGVVGASTSTCLIFIFPGLFYLKLSREDFLSWKKLGVGCFCFFLSRLLF

SEQ ID NO: 892304 - protein, 314 aa, Homo sapiens [sequence omitted]

SEQ ID NO: 892305 - protein, 441 aa, Homo sapiens
MEASWGSFNAERGWYVSVQQPEEAEAEELSPLLSNELHRQRSPGVSFGLSVFNLMNAIMGSGILGLAYVMANTGVFGFSFLLLTVALLASYSVHLLLSMCIQTAVTSYEDLGLFAFGLPGKLVVAGTIIIQNIGAMSSYLLIIKTELPAAIAEFLTGDYSRYWYLDGQTLLIIICVGIVFPLALLPKIGFLGYTSSLSFFFMMFFALVVIIKKWSIPCPLTLNYVEKGFQSAYALPTMAFSFLCHTSILPIYCELQSPSKKRMQNVTNTAIALSFLIYFISALFGYLTFYDKVESELLKGYSKYLSHDVVVMTVKLCILFAVLLTVPLIHFPARKAVTMMFFSNFPFSWIRHFLITLALNIIIVLLAIYVPDIRNVFGVVGASTSTCLIFIFPGLFYLKLSREDFLSWKKLGVGVQWCDLSSLQPLPPGLKQSSHLSLQSS

SEQ ID NO: 892306 - protein, 348 aa, Homo sapiens
MEASWGSFNAERGWYVSVQQPEEAEAEELSPLLSNELHRQRSPGVSFGLSVFNLMNAIMGSGILGLAYVMANTGVFGFSFLLLTVALLASYSVHLLLSMCIQTAVTSYEDLGLFAFGLPGKLVVAGTIIIQNIGAMSSYLLIIKTELPAAIAEFLTGDYSRYWYLDGQTLLIIICVGIVFPLALLPKIGFLGYTSSLSFFFMMFFALVVIIKKWSIPCPLTLNYVEKGFQISNVTDDCKPKLFHFSKESAYALPTMAFSFLCHTSILPIYCELQRLACSGVISAHCNLCLPDSSNPPTSASRVAETTEKEEIPWRCAPRGKATQGHSKKATVYKPREEASGEPNVSTP

SEQ ID NO: 892307 - protein, 373 aa, Homo sapiens
  misc_feature (262)..(262): Xaa can be any naturally occurring amino acid
MEASWGSFNAERGWYVSVQQPEEAEAEELSPLLSNELHRQRSPGVSFGLSVFNLMNAIMGSGILGLAYVMANTGVFGFSFLLLTVALLASYSVHLLLSMCIQTAVTSYEDLGLFAFGLPGKLVVAGTIIIQNIGAMSSYLLIIKTELPAAIAEFLTGDYSRYWYLDGQTLLIIICVGIVFPLALLPKIGFLGYTSSLSFFFMMFFALVVIIKKWSIPCPLTLNYVEKGFQISNVTDDCKPKLFHFSKEQWAGLIICLPTHGXFFLPPQIFLPPPFFPPFFWGGPPPPPQNNPFFLNTNAPPPPPCVFFFSPPPATTRPNHTPPAVLLSPTTKPTVSSFARPLAGGGGAPPPTHPQPPPTRPSEPATHAAPLVY

SEQ ID NO: 892308 - protein, 125 aa, Homo sapiens [sequence omitted]

SEQ ID NO: 892309 - protein, 164 aa, Homo sapiens; identical to SEQ ID NO: 892298

SEQ ID NO: 892310 - protein, 402 aa, Homo sapiens
MNAIMGSGILGLAYVMANTGVFGFSFLLLTVALLASYSVHLLLSMCIQTAVTSYEDLGLFAFGLPGKLVVAGTIIIQNIGAMSSYLLIIKTELPAAIAEFLTGDYSRYWYLDGQTLLIIICVGIVFPLALLPKIGFLGYTSSLSFFFMMFFALVVIIKKWSIPCPLTLNYVEKGFQISNVTDDCKPKLFHFSKESAYALPTMAFSFLCHTSILPIYCELQSPSKKRMQNVTNTAIALSFLIYFISALFGYLTFYDKVESELLKGYSKYLSHDVVVMTVKLCILFAVLLTVPLIHFPARKAVTMMFFSNFPFSWIRHFLITLALNIIIVLLAIYVPDIRNVFGVVGASTSTCLIFIFPGLFYLKLSREDFLSWKKLGAFVLLIFGILVGNFSLALIIFDWINK

SEQ ID NO: 892311 - protein, 164 aa, Homo sapiens; identical to SEQ ID NO: 892298

SEQ ID NO: 892312 - protein, 227 aa, Homo sapiens
MNAIMGSGILGLAYVMANTGVFGFSFLLLTVALLASYSVHLLLSMCIQTDFWKESFLKKERKREKNQIDAIKNDKGVITTDPTEIQTTIREYYKHLYANKLENLEEMDKFLDTYTLPTLNQEEVESLNRPITGSEIVAIINSLPTKKNPGPDGFAAEFYQRYKEELVPFLLKLFQSIEKEGILPNSLYEASIILIPKPGRDTTKKENFRPISLMNMDAKILNKILAN

SEQ ID NO: 892313 - protein, 126 aa, Homo sapiens
MASASTQPAALSAEQAKVVLAEVIQAFSAPENAVRMDEARDNACNDMGKMLQFVLPVATQIQQEVIKAYGFSCDGEGVLKFARLVKSYEAQDPEIASLSGKLKALFLPPMTLPPHGPAAGGSVAAS

SEQ ID NO: 892314 - protein, 126 aa, Homo sapiens; identical to SEQ ID NO: 892313

SEQ ID NO: 892315 - protein, 141 aa, Homo sapiens
MASASTQPAALSAEQAKGENRPSQGIGCWPGVVKAWAAGLGRMRAEDVGDKPGYVRRENGVGDAGYRPSKWGACPQDLGSYWVTYSLNPLIPCALRWARCLFSDAYPGRLPGMLLARSGPRGGDPGVLRPGECSAHGRGSG

SEQ ID NO: 892316 - protein, 103 aa, Homo sapiens
MASASTQPAALSAEQAKVVLAEVIQAFSAPENAVRMDEARDNACNDMGKMLQFVLPVATQIQQEVIKAYGFSCDGEGGSDAGRRVRRGKAGVGSGEGAGSVGP

SEQ ID NO: 892317 - protein, 113 aa, Homo sapiens
MNDLMVLAEVIQAFSAPENAVRMDEARDNACNDMGKMLQFVLPVATQIQQEVIKAYGFSCDGEGVLKFARLVKSYEAQDPEIASLSGKLKALFLPPMTLPPHGPAAGGSVAAS

SEQ ID NO: 892318 - protein, 126 aa, Homo sapiens; identical to SEQ ID NO: 892313

SEQ ID NO: 892319 - protein, 126 aa, Homo sapiens; identical to SEQ ID NO: 892313

SEQ ID NO: 892320 - protein, 76 aa, Homo sapiens
  misc_feature (16)..(16): Xaa can be any naturally occurring amino acid
MRENAGYPRSVVSDKXPRDTQQRRHNQRDTQRKKATTRRYKEQHTSNNTGDTDSSHTTHNTKNTKPTHIETQHSED

SEQ ID NO: 892321 - protein, 133 aa, Homo sapiens
MASASTQPAALSAEQAKGENRPSQVVLAEVIQAFSAPENAVRMDEARDNACNDMGKMLQFVLPVATQIQQEVIKAYGFSCDGEGVLKFARLVKSYEAQDPEIASLSGKLKALFLPPMTLPPHGPAAGGSVAAS

SEQ ID NO: 892322 - protein, 79 aa, Homo sapiens
MHEVVRKHCMDYLMKNADYFSNYVTEDFTTYINRKRKNNCHGNHIEMQAMAEMYNRPVEVYQYSTEPINTFHGTRHRAL

SEQ ID NO: 892323 - protein, 566 aa, Homo sapiens
MTILPKKKPPPPDADPANEPPPPGPMPPAPRRGGGVGVGGGGTGVGGGDRDRDSGVVGARPRASPPPQGPLPGPPGALHRWALAVPPGAVAGPRPQQASPPPCGGPGGPGGGPGDALGAAAAGVGAAGVVVGVGGAVGVGGCCSGPGHSKRRRQAPGVGAVGGGSPEREEVGAGYNSEDEYEAAAARIEAMDPATVEQQEHWFEKALRDKKGFIIKQMKEDGACLFRAVADQVYGDQDMHEVVRKHCMDYLMKNADYFSNYVTEDFTTYINRKRKNNCHGNHIEMQAMAEMYNRPVEVYQYSTEPINTFHGIHQNEDEPIRVSYHRNIHYNSVVNPNKATIGVGLGLPSFKPGFAEQSLMKNAIKTSEESWIEQQMLEDKKRATDWEATNEAIEEQVARESYLQWLRDQEKQARQVRGPSQPRKASATCSSATAAASSGLEEWTSRSPRQRSSASSPEHPELHAELGMKPPSPGTVLALAKPPSPCAPGTSSQFSAGADRATSPLVSLYPALECRALIQQMSPSAFGLNDWDDDEILASVLAVSQQEYLDSMKKNKVHRDPPPDKS

SEQ ID NO: 892324 - protein, 542 aa, Homo sapiens
MTILPKKKPPPPDADPGGTGVGGGDRDRDSGVVGARPRASPPPQGPLPGPPGALHRWALAVPPGAVAGPRPQQASPPPCGGPGGPGGGPGDALGAAAAGVGAAGVVVGVGGAVGVGGCCSGPGHSKRRRQAPGVGAVGGGSPEREEVGAGYNSEDEYEAAAARIEAMDPATVEQQEHWFEKALRDKKGFIIKQMKEDGACLFRAVADQVYGDQDMHEVVRKHCMDYLMKNADYFSNYVTEDFTTYINRKRKNNCHGNHIEMQAMAEMYNRPVEVYQYSTEPINTFHGIHQNEDEPIRVSYHRNIHYNSVVNPNKATIGVGLGLPSFKPGFAEQSLMKNAIKTSEESWIEQQMLEDKKRATDWEATNEAIEEQVARESYLQWLRDQEKQARQVRGPSQPRKASATCSSATAAASSGLEEWTSRSPRQRSSASSPEHPELHAELGMKPPSPGTVLALAKPPSPCAPGTSSQFSAGADRATSPLVSLYPALECRALIQQMSPSAFGLNDWDDDEILASVLAVSQQEYLDSMKKNKVHRDPPPDKS

SEQ ID NO: 892325 - protein, 566 aa, Homo sapiens; identical to SEQ ID NO: 892323

SEQ ID NO: 892326 - protein, 566 aa, Homo sapiens; identical to SEQ ID NO: 892323

SEQ ID NO: 892327 - protein, 407 aa, Homo sapiens
DVFQSFRLTAFKLESWRGGVFPVVRGTGHAVRPQYRRLQQEHWFEKALRDKKGFIIKQMKEDGACLFRAVADQVYGDQDMHEVVRKHCMDYLMKNADYFSNYVTEDFTTYINRKRKNNCHGNHIEMQAMAEMYNRPVEVYQYSTEPINTFHGIHQNEDEPIRVSYHRNIHYNSVVNPNKATIGVGLGLPSFKPGFAEQSLMKNAIKTSEESWIEQQMLEDKKRATDWEATNEAIEEQVARESYLQWLRDQEKQARQVRGPSQPRKASATCSSATAAASSGLEEWTSRSPRQRSSASSPEHPELHAELGMKPPSPGTVLALAKPPSPCAPGTSSQFSAGADRATSPLVSLYPALECRALIQQMSPSAFGLNDWDDDEILASVLAVSQQEYLDSMKKNKVHRDPPPDKS

SEQ ID NO: 892328 - protein, 328 aa, Homo sapiens
MHEVVRKHCMDYLMKNADYFSNYVTEDFTTYINRKRKNNCHGNHIEMQAMAEMYNRPVEVYQYSTEPINTFHGIHQNEDEPIRVSYHRNIHYNSVVNPNKATIGVGLGLPSFKPGFAEQSLMKNAIKTSEESWIEQQMLEDKKRATDWEATNEAIEEQVARESYLQWLRDQEKQARQVRGPSQPRKASATCSSATAAASSGLEEWTSRSPRQRSSASSPEHPELHAELGMKPPSPGTVLALAKPPSPCAPGTSSQFSAGADRATSPLVSLYPALECRALIQQMSPSAFGLNDWDDDEILASVLAVSQQEYLDSMKKNKVHRDPPPDKS

SEQ ID NO: 892329 - protein, 328 aa, Homo sapiens; identical to SEQ ID NO: 892328

SEQ ID NO: 892330 - protein, 566 aa, Homo sapiens; identical to SEQ ID NO: 892323

SEQ ID NO: 892331 - protein, 566 aa, Homo sapiens; identical to SEQ ID NO: 892323

SEQ ID NO: 892332 - protein, 566 aa, Homo sapiens; identical to SEQ ID NO: 892323

SEQ ID NO: 892333 - protein, 566 aa, Homo sapiens; identical to SEQ ID NO: 892323

SEQ ID NO: 892334 - protein, 566 aa, Homo sapiens; identical to SEQ ID NO: 892323

SEQ ID NO: 892335 - protein, 566 aa, Homo sapiens; identical to SEQ ID NO: 892323

SEQ ID NO: 892336 - protein, 566 aa, Homo sapiens; identical to SEQ ID NO: 892323

SEQ ID NO: 892337 - protein, 602 aa, Homo sapiens
MTILPKKKPPPPDADPANEPPPPGPMPPAPRRGGGVGVGGGGTGVGGGDRDRDSGVVGARPRASPPPQGPLPGPPGALHRWALAVPPGAVAGPRPQQASPPPCGGPGGPGGGPGDALGAAAAGVGAAGVVVGVGGAVGVGGCCSGPGHSKRRRQAPGVGAVGGGSPEREEVGAGYNSEDEYEAAAARIEAMDPATVEQQEHWFEKALRDKKGFIIKQMKEDGACLFRAVADQVYGDQDMHEVVRKHCMDYLMKNADYFSNYVTEDFTTYINRKRKNNCHGNHIEMQAMAEMYNRPVEVYQYSTEPINTFHGIHQNEDEPIRVSYHRNIHYNSVVNPNKATIGVGLGLPSFKPGFAEQSLMKNAIKTSEESWIEQQMLEDKKRATDWEATNEAIEEQVARESYLQWLRDQEKQARQVRGPSQPRKASATCSSATAAASSGLEEWTSRSPRQRSSASSPEHPELHAELGMKPPSPGTVLALAKPPSPCAPGTSSQFSAGADRATSPLVSLYPALECRALIQQMSPSAFGKPPLSGGMEAARSWERLEEVASPERGFLEPLAISPRKEGRGTGGDFSDPRNLPQKGLGSKWGFTGLADPSVLRKE

SEQ ID NO: 892338 - protein, 566 aa, Homo sapiens; identical to SEQ ID NO: 892323

SEQ ID NO: 892339 - protein, 588 aa, Homo sapiens
MTILPKKKPPPPDADPANEPPPPGPMPPAPRRGGGVGVGGGGTGVGGGDRDRDSGVVGARPRASPPPQGPLPGPPGALHRWALAVPPGAVAGPRPQQASPPPCGGPGGPGGGPGDALGAAAAGVGAAGVVVGVGGAVGVGGCCSGPGHSKRRRQAPGVGAVGGGSPEREEVGAGYNSEDEYEAAAARIEAMDPATVEQQEHWFEKALRDKKGFIIKQMKEDGACLFRAVADQVYGDQDMHEVVRKHCMDYLMKNADYFSNYVTEDFTTYINRKRKNNCHGNHIEMQAMAEMYNRPVEVYQYSTEPINTFHGIHQNEDEPIRVSYHRNIHYNSVVNPNKATIGVGLGLPSFKPGFAEQSLMKNAIKTSEESWIEQQMLEDKKRATDWEATNEAIEEQVARESYLQWLRDQEKQARQVRGPSQPRKASATCSSATAAASSGLEEWTSRSPRQRSSASSPEHPELHAELGMKPPSPGTVLALAKPPSPCAPGTSSQFSAGADRATSPLVSLYPALECRALIQQMSPSAFGLNDWDDDEILASVLAVSQQEYLDSMKKNKVHRDPPPERVWDPVGLPPYLFRGHFGSPALFG

SEQ ID NO: 892340 - protein, 401 aa, Homo sapiens
MTILPKKKPPPPDADPANEPPPPGPMPPAPRRGGGVGVGGGGTGVGGGDRDRDSGVVGARPRASPPPQGPLPGPPGALHRWALAVPPGAVAGPRPQQASPPPCGGPGGPGGGPGDALGAAAAGVGAAGVVVGVGGAVGVGGCCSGPGHSKRRRQAPGVGAVGGGSPEREEVGAGYNSEDEYEAAAARIEAMDPATVEQQEHWFEKALRDKKGFIIKQMKEDGACLFRAVADQVYGDQDMHEVVRKHCMDYLMKNADYFSNYVTEDFTTYINRKRKNNCHGNHIEMQAMAEMYNRPVEVYQYSTEPINTFHGIHQNEDEPIRVSYHRNIHYNSVVNPNKATIGVGLGLPSFKPGFAEQSLMKNVQAVSSRQGPTGQLPPLCPSTLLWSAGPSFSRCPPLPLV

SEQ ID NO: 892341 - protein, 605 aa, Homo sapiens
MTILPKKKPPPPDADPANEPPPPGPMPPAPRRGGGVGVGGGGTGVGGGDRDRDSGVVGARPRASPPPQGPLPGPPGALHRWALAVPPGAVAGPRPQQASPPPCGGPGGPGGGPGDALGAAAAGVGAAGVVVGVGGAVGVGGCCSGPGHSKRRRQAPGVGAVGGGSPEREEVGAGYNSEDEYEAAAARIEAMDPATVEQQEHWFEKALRDKKGFIIKQMKEDGACLFRAVADQVYGDQDMHEVVRKHCMDYLMKNADYFSNYVTEDFTTYINRKRKNNCHGNHIEMQAMAEMYNRPVEVYQYSTEPINTFHGIHQNEDEPIRVSYHRNIHYNSVVNPNKATIGVGLGLPSFKPGFAEQSLMKNAIKTSEESWIEQQMLEDKKRATDWEATNEAIEEQVARESYLQWLRDQEKQARQVRGPSQPRKASATCSSATAAASSGLEEWTSRSPRQRSSASSPEHPELHAELGMKPPSPGTVLALAKPPSPCAPGTSSQFSAGADRATSPLVSLYPALECRALIQQMSPSAFGTRARVPKIDKRHTETDQLAARQPQRRETFRQRKVSLPLIPSKMRKTCRHPPTLMPGRWEEEVGNFPSQYPQERLSLQC

SEQ ID NO: 892342 - protein, 721 aa, Homo sapiens
MTILPKKKPPPPDADPANEPPPPGPMPPAPRRGGGVGVGGGGTGVGGGDRDRDSGVVGARPRASPPPQGPLPGPPGALHRWALAVPPGAVAGPRPQQASPPPCGGPGGPGGGPGDALGAAAAGVGAAGVVVGVGGAVGVGGCCSGPGHSKRRRQAPGVGAVGGGSPEREEVGAGYNSEDEYEAAAARIEAMDPATVEQQEHWFEKALRDKKGFIIKQMKEDGACLFRAVADQVYGDQDMHEVVRKHCMDYLMKNADYFSNYVTEDFTTYINRKRKNNCHGNHIEMQAMAEMYNRPVEVYQYSTEPINTFHGIHQNEDEPIRVSYHRNIHYNSVVNPNKATIGVGLGLPSFKPGFAEQSLMKNAIKTSEESWIEQQMLEDKKRATDWEATNEAIEEQVARESYLQWLRDQEKQARQVRGPSQPRKASATCSSATAAASSGLEEWTSRSPRQRSSASSPEHPELHAELGMKPPSPGTVLALAKPPSPCAPGTSSQFSAGADRATSPLVSLYPALECRALIQQMSPSAFGKPPLSGGMEAARSWERLEEVASPERGFLEPLAISPRKEGRGTGGDFSDPRNLPQKGLGSKWGFTGLADPSVLRKEEKGPMGFLQSPRCRHRVRRRQAESAPSSFSSSSRPAGLNDWDDDEILASVLAVSQQEYLDSMKKNKISFHSPMSIYLRPITFYIPKQYPIRLPIKNYFITLHINKVIKFPKRESAVRPT

SEQ ID NO: 892343 - protein, 182 aa, Homo sapiens
LLFGSTCFPVSFFFWGLWAYLAEPVLALGQVQCVIAHPCSSPSLQFAEQSLMKNAIKTSEESWIEQQMLEDKKRATDWEATNEAIEEQVARESYLQWLRDQEKQARQVRGPSQPRKASATCSSATAAASSGLEEWTSRSPRQRSSASSPEHPELHAELGMKPPSPGTVLALAKPPSPCAPGQ

SEQ ID NO: 892344 - protein, 167 aa, Homo sapiens [sequence omitted]

SEQ ID NO: 892345 - protein, 308 aa, Homo sapiens
MTILPKKKPPPPDADPANEPPPPGPMPPAPRRGGGVGVGGGGTGVGGGDRDRDSGVVGARPRASPPPQGPLPGPPGALHRWALAVPPGAVAGPRPQQASPPPCGGPGGPGGGPGDALGAAAAGVGAAGVVVGVGGAVGVGGCCSGPGHSKRRRQAPGVGAVGGGSPEREEVGAGYNSEDEYEAAAARIEAMDPATVEQQEHWFEKALRDKKGFIIKQMKEDGACLFRAVADQVYGDQDMHEVVRKHCMDYLMKNADYFSNYVTEDFTTYINRKRKNNCHGNHIEMQAMAEMYNRPVEVYQYSTDFCSG

SEQ ID NO: 892346 - protein, 1237 aa, Homo sapiens
MQKSVRYNEGHALYLAFLARKEGTKRGFLSKKTAEASRWHEKWFALYQNVLFYFEGEQSCRPAGMYLLEGCSCERTPAPPRAGAGQGGVRDALDKQYYFTVLFGHEGQKPLELRCEEEQDGKEWMEAIHQASYADILIEREVLMQKYIHLVQIVETEKIAANQLRHQLEDQDTEIERLKSEIIALNKTKERMRPYQSNQEDEDPDIKKIKKVQSFMRGWLCRRKWKTIVQDYICSPHAESMRKRNQIVFTMVEAESEYVHQLYILVNGFLRPLRMAASSKKPPISHDDVSSIFLNSETIMFLHEIFHQGLKARIANWPTLILADLFDILLPMLNIYQEFVRNHQYSLQVLANCKQNRDFDKLLKQYEANPACEGRMLETFLTYPMFQIPRYIITLHELLAHTPHEHVERKSLEFAKSKLEELSRVMHDEVSDTENIRKNLAIERMIVEGCDILLDTSQTFIRQGSLIQVPSVERGKLSKVRLGSLSLKKEGERQCFLFTKHFLICTRSSGGKLHLLKTGGVLSLIDCTLIEEPDASDDDSKGSGQVFGHLDFKIVVEPPDAAAFTVVLLAPSRQEKAAWMSDISQCVDNIRCNGLMTIVFEENSKVTVPHMIKSDARLHKDDTDICFSKTLNSCKVPQIRYASVERLLERLTDLRFLSIDFLNTFLHTYRIFTTAAVVLGKLSDIYKRPFTSIPVRSLELFFATSQNNRGEHLVDGKSPRLCRKFSSPPPLAVSRTSSPVRARKLSLTSPLNSKIGALDLTTSSSPTTTTQSPAASPPPHTGQIPLDLSRGLSSPEQSPGTVEENVDNPRVDLCNKLKRSIQKAVLESAPADRAGVESSPAADTTELSPCRSPSTPRHLRYRQPGGQTADNAHCSVSPASAFAIATAAAGHGSPPGFNNTERTCDKEFIIRRTATNRVLNVLRHWVSKHAQDFELNNELKMNVLNLLEEVLRDPDLLPQERKAAANILRALSQDDQDDIHLKLEDIIQMTDCMKAECFESLSAMELAEQITLLDHVIFRSIPYEEFLGQGWMKLDKNERTPYIMKTSQHFNDMSNLVASQIMNYADVSSRANAIEKWVAVADICRCLHNYNGVLEITSALNRSAIYRLKKTWAKVSKQTKALMDKLQKTVSSEGRFKNLRETLKNCNPPAVPYLGMYLTDLAFIEEGTPNFTEEGLVNFSKMRMISHIIREIRQFQQTSYRIDHQPKVAQYLLDKDLIIDEDTLYELSLKIEPRLPA

SEQ ID NO: 892347 - protein, 1151 aa, Homo sapiens
MQKSVRYNEGHALYLAFLARKEGTKRGFLSKKTAEASRWHEKWFALYQNVLFYFEGEQSCRPAGMYLLEGCSCERTPAPPRAGAGQGGVRDALDKQYYFTVLFGHEGQKPLELRCEEEQDGKEWMEAIHQASYADILIEREVLMQKYIHLVQIVETEKIAANQLRHQLEDQDTEIERLKSEIIALNKTKERMRPYQSNQEDEDPDIKKIKKVQSFMRGWLCRRKWKTIVQDYICSPHAESMRKRNQIVFTMVEAESEYVHQLYILVNGFLRPLRMAASSKKPPISHDDVSSIFLNSETIMFLHEIFHQGLKARIANWPTLILADLFDILLPMLNIYQEFVRNHQYSLQVLANCKQNRDFDKLLKQYEANPACEGRMLETFLTYPMFQIPRYIITLHELLAHTPHEHVERKSLEFAKSKLEELSRVMHDEVSDTENIRKNLAIERMIVEGCDILLDTSQTFIRQGSLIQVPSVERGKLSKVRLGSLSLKKEGERQCFLFTKHFLICTRSSGGKLHLLKTGGVLSLIDCTLIEEPDASDDDSKGSGQVFGHLDFKIVVEPPDAAAFTVVLLAPSRQEKAAWMSDISQCVDNIRCNGLMTIVFEENSKVTVPHMIKSDARLHKDDTDICFSKTLNSCKVPQIRYASVERLLERLTDLRFLSIDFLNTFLHTYRIFTTAAVVLGKLSDIYKRPFTSIPVRSLELFFATSQNNRGEHLVDGKSPRLCRKFSSPPPLAVSRTSSPVRARKLSLTSPLNSKIGALDLTTSSSPTTTTQSPAASPPPHTGQIPLDLSRGLSSPEQSPGTVEENVDNPRVDLCNKLKRSIQKAVLESAPADRAGVESSPAADTTELSPCRSPSTPRHLRYRQPGGQTADNAHCSVSPASAFAIATAAAGHGSPPGFNNTERTCDKEFIIRRTATNRVLNVLRHWVSKHAQDFELNNELKMNVLNLLEEVLRDPDLLPQERKAAANILRALSQDDQDDIHLKLEDIIQMTDCMKAECFESLSAMELAEQITLLDHVIFRSIPYEEFLGQGWMKLDKNERTPYIMKTSQHFNDMSNLVASQIMNYADVSSRANAIEKWVAVADICRCLHNYNGVLEITSALNRSAIYRLKKTWAKVSKQTKALMDKLQKTVSSEGRFKNLRETLKKYVYLNY

SEQ ID NO: 892348 - protein, 564 aa, Homo sapiens
MQKSVRYNEGHALYLAFLARKEGTKRGFLSKKTAEASRWHEKWFALYQNVLFYFEGEQSCRPAGMYLLEGCSCERTPAPPRAGAGQGGVRDALDKQYYFTVLFGHEGQKPLELRCEEEQDGKEWMEAIHQASYADILIEREVLMQKYIHLVQIVETEKIAANQLRHQLEDQDTEIERLKSEIIALNKTKERMRPYQSNQEDEDPDIKKIKKVQSFMRGWLCRRKWKTIVQDYICSPHAESMRKRNQIVFTMVEAESEYVHQLYILVNGFLRPLRMAASSKKPPISHDDVSSIFLNSETIMFLHEIFHQGLKARIANWPTLILADLFDILLPMLNIYQEFVRNHQYSLQVLANCKQNRDFDKLLKQYEANPACEGRMLETFLTYPMFQIPRYIITLHELLAHTPHEHVERKSLEFAKSKLEELSRVMHDEVSDTENIRKNLAIERMIVEGCDILLDTSQTFIRQGTMKNSNTIIVKHEWGRQLHSDWTLLLSGPDILCSSKEDRSAWPTAVAVPSADDTQAKAQEKLALLKALSHKTGDHVRSENSCLLFPFFISTSGSAPHDII

SEQ ID NO: 892349 - protein, 610 aa, Homo sapiens
MQKSVRYNEGHALYLAFLARKEGTKRGFLSKKTAEASRWHEKWFALYQNVLFYFEGEQSCRPAGMYLLEGCSCERTPAPPRAGAGQGGVRDALDKQYYFTVLFGHEGQKPLELRCEEEQDGKEWMEAIHQASYADILIEREVLMQKYIHLVQIVETEKIAANQLRHQLEDQDTEIERLKSEIIALNKTKERMRPYQSNQEDEDPDIKKIKKVQSFMRGWLCRRKWKTIVQDYICSPHAESMRKRNQIVFTMVEAESEYVHQLYILVNGFLRPLRMAASSKKPPISHDDVSSIFLNSETIMFLHEIFHQGLKARIANWPTLILADLFDILLPMLNIYQEFVRNHQYSLQVLANCKQNRDFDKLLKQYEANPACEGRMLETFLTYPMFQIPRYIITLHELLAHTPHEHVERKSLEFAKSKLEELSRVMHDEVSDTENIRKNLAIERMIVEGCDILLDTSQTFIRQGSLIQVPSVERGKLSKVRLGSLSLKKEGERQCFLFTKHFLICTRSSGGKLHLLKTGGVLSLIDCTLIEEPDASDDDSKGSGQVFGHLDFKIVVEPPDAAAFTVVLLAPSRQEKAAWMSDISQRSKHPLQECLMLDFYLYTLRMASMA

SEQ ID NO: 892350 - protein, 249 aa, Homo sapiens [sequence omitted]

SEQ ID NO: 892351 - protein, 186 aa, Homo sapiens
MQKSVRYNEGHALYLAFLARKEGTKRGFLSKKTAEASRWHEKWFALYQNVLFYFEGEQSCRPAGMYLLEGCSCERTPAPPRAGAGQGGVRDALDKQYYFTVLFGHEGQKPLELRCEEEQDGKEWMEAIHQASYADILIEREVLMQKYIHLVQIVETEKIAANQLRHQLEDQDTEIERLKSEVFPSQ

SEQ ID NO: 892352 - protein, 184 aa, Homo sapiens
MQVPQDGEDLAGQPWYHGLLSRQKAEALLQQNGDFLVRASGSRGGNPVISCRWRGSALHFEVFRVALRPRPGRPTALFQLEDEQFPSIPALVHSYMTGRRPLSQATGAVVSRPVTWQGPLRRSFSEDTLMDGPARIEPLRARKWSNSQPADLAHMGRSREDPAGMGKCLLEWPVAQGLALPLTT

SEQ ID NO: 892353 - protein, 592 aa, Homo sapiens
MQVPQDGEDLAGQPWYHGLLSRQKAEALLQQNGDFLVRASGSRGGNPVISCRWRGSALHFEVFRVALRPRPGRPTALFQLEDEQFPSIPALVHSYMTGRRPLSQATGAVVSRPVTWQGPLRRSFSEDTLMDGPARIEPLRARKWSNSQPADLAHMGRSREDPAGMEASTMPISALPRTSSDPVLLKAPAPLGTVADSLRASDGQLQAKAPTKPPRTPSFELPDASERPPTYCELVPRVPSVQGTSPSQSCPEPEAPWWEAEEDEEEENRCFTRPQAEISFCPHDAPSCLLGPQNRPLEPQVLHTLRGLFLEHHPGSTALHLLLVDCQATGLLGVTRDQRGNMGVSSGLELLTLPHGHHLRLELLERHQTLALAGALAVLGCSGPLEERAAALRGLVELALALRPGAAGDLPGLAAVMGALLMPQVSRLEHTWRQLRRSHTEAALAFEQELKPLMRALDEGAGPCDPGEVALPHVAPMVRLLEGEEVAGPLDESCERLLRTLHGARHMVRDAPKFRKVAAQRLRGERSLCAGLQTSEHPAGFRPNPELREALTTGFVRRLLWGSRGAGAPRAERFEKFQRVLGVLSQRLEPDR

SEQ ID NO: 892354 - protein, 481 aa, Homo sapiens
MTGRRPLSQATGAVVSRPVTWQGPLRRSFSEDTLMDGPARIEPLRARKWSNSQPADLAHMGRSREDPAGMEASTMPISALPRTSSDPVLLKAPAPLGTVADSLRASDGQLQAKAPTKPPRTPSFELPDASERPPTYCELVPRVPSVQGTSPSQSCPEPEAPWWEAEEDEEEENRCFTRPQAEISFCPHDAPSCLLGPQNRPLEPQVLHTLRGLFLEHHPGSTALHLLLVDCQATGLLGVTRDQRGNMGVSSGLELLTLPHGHHLRLELLERHQTLALAGALAVLGCSGPLEERAAALRGLVELALALRPGAAGDLPGLAAVMGALLMPQVSRLEHTWRQLRRSHTEAALAFEQELKPLMRALDEGAGPCDPGEVALPHVAPMVRLLEGEEVAGPLDESCERLLRTLHGARHMVRDAPKFRKVAAQRLRGFRPNPELREALTTGFVRRLLWGSRGAGAPRAERFEKFQRVLGVLSQRLEPDR

SEQ ID NO: 892355 - protein, 140 aa, Homo sapiens [sequence omitted]

SEQ ID NO: 892356 - protein, 576 aa, Homo sapiens
MQVPQDGEDLAGQPWYHGLLSRQKAEALLQQNGDFLVRASGSRGGNPVISCRWRGSALHFEVFRVALRPRPGRPTALFQLEDEQFPSIPALVHSYMTGRRPLSQATGAVVSRPVTWQGPLRRSFSEDTLMDGPARIEPLRARKWSNSQPADLAHMGRSREDPAGMEASTMPISALPRTSSDPVLLKAPAPLGTVADSLRASDGQLQAKAPTKPPRTPSFELPDASERPPTYCELVPRVPSVQGTSPSQSCPEPEAPWWEAEEDEEEENRCFTRPQAEISFCPHDAPSCLLGPQNRPLEPQVLHTLRGLFLEHHPGSTALHLLLVDCQATGLLGVTRDQRGNMGVSSGLELLTLPHGHHLRLELLERHQTLALAGALAVLGCSGPLEERAAALRGLVELALALRPGAAGDLPGLAAVMGALLMPQVSRLEHTWRQLRRSHTEAALAFEQELKPLMRALDEGAGPCDPGEVALPHVAPMVRLLEGEEVAGPLDESCERLLRTLHGARHMVRDAPKFRKVAAQRLRGFRPNPELREALTTGFVRRLLWGSRGAGAPRAERFEKFQRVLGVLSQRLEPDR

SEQ ID NO: 892357 - protein, 456 aa, Homo sapiens
MQVPQDGEDLAGQPWYHGLLSRQKAEALLQQNGDFLVRASGSRGGNPVISCRWRGSALHFEVFRVALRPRPGRPTALFQLEDEQFPSIPALVHSYMTGRRPLSQATGAVVSRPVTWQGPLRRSFSEDTLMDGPARIEPLRARKWSNSQPADLAHMGRSREDPAGMESAPGTPSPAYPPWPVPGAPSWEHRPSPAIGRLPGHRPPGSDQRSAGQHGSLIWPGAAHSSPWTPLEVGTAGETLALHLCRHQTLALAGALAVLGCSGPLEERAAALRGLVELALALRPGAAGDLPGLAAVMGALLMPQVSRLEHTWRQLRRSHTEAALAFEQELKPLMRALDEGAGPCDPGEVALPHVAPMVRLLEGEEVAGPLDESCERLLRTLHGARHMVRDAPKFRKVAAQRLRGFRPNPELREALTTGFVRRLLWGSRGAGAPRAERFEKFQRVLGVLSQRLEPDR

SEQ ID NO: 892358 - protein, 407 aa, Homo sapiens [sequence omitted]

SEQ ID NO: 892359 - protein, 142 aa, Homo sapiens
MSSLIRRVISTAKAPGAIGPYSQAVLVDRTIYISGQIGMDPSSGQLVSGGVAEEAKQALKNMGEILKAAGCDFTNVVKTTVLLADINDFNTVNEIYKQLVYKQYFKSNFPARAAYQVAALPKGSRIEIEAVAIQGPLTTASL

SEQ ID NO: 892360 - protein, 142 aa, Homo sapiens; identical to SEQ ID NO: 892359

SEQ ID NO: 892361 - protein, 142 aa, Homo sapiens; identical to SEQ ID NO: 892359

SEQ ID NO: 892362 - protein, 119 aa, Homo sapiens
MSSLIRRVISTAKAPGAIGPYSQAVLVDRTIYISGQIGMDPSSGQLVSGGVAEEAKQALKNMGEILKAAGCDFTNVVYKQYFKSNFPARAAYQVAALPKGSRIEIEAVAIQGPLTTASL

SEQ ID NO: 892363 - protein, 104 aa, Homo sapiens
MDPSSGQLVSGGVAEEAKQALKNMGEILKAAGCDFTNVVKTTVLLADINDFNTVNEIYKQLVYKQYFKSNFPARAAYQVAALPKGSRIEIEAVAIQGPLTTASL

SEQ ID NO: 892364 - protein, 143 aa, Homo sapiens
ELWGRGAAVVGQSSKKPAGLVLGLLLLKGLQEGRLSHVVLDQKGDQHRESPRGHWTLQALKNMGEILKAAGCDFTNVVKTTVLLADINDFNTVNEIYKQLVYKQYFKSNFPARAAYQVAALPKGSRIEIEAVAIQGPLTTASL

SEQ ID NO: 892365 - protein, 91 aa, Homo sapiens
ELWGRGAAVVGQSSKKPAGLVLGLLLLKGLQEGRLSHVVLDQKGDQHRESPRGHWTLQSSCISRQDHLHFRTDRHGPFKWTACVRRGSRRS

SEQ ID NO: 892366 - protein, 261 aa, Homo sapiens
KSRAVTVAGVRPSSPHGLVGAVSVGGAGVMAVETLSPDWEFDRVDDGSQKIHAEVQLKNYGKFLEEYTSQLRRIEDALDDSIGDVWDFNLDPIALKLLPYEQSSLLELIKTENKVLNKVITVYAALCCEIKKLKYEAETKFYNGLLFYGEGATDASMVEGDCQIQMGRFISFLQELSCFVTRCYEVVMNVVHQLAALYISNKIAPKIIETTGVHFQTMYEHLGELLTVLLTLDEIIDNHITLKDHWTMYKSAGFVITIFKL

SEQ ID NO: 892367 - protein, 1202 aa, Homo sapiens
KSRAVTVAGVRPSSPHGLVGAVSVGGAGVMAVETLSPDWEFDRVDDGSQKIHAEVQLKNYGKFLEEYTSQLRRIEDALDDSIGDVWDFNLDPIALKLLPYEQSSLLELIKTENKVLNKVITVYAALCCEIKKLKYEAETKFYNGLLFYGEGATDASMVEGDCQIQMGRFISFLQELSCFVTRCYEVVMNVVHQLAALYISNKIAPKIIETTGVHFQTMYEHLGELLTVLLTLDEIIDNHITLKDHWTMYKRLLKSVHHNPSKFGIQEEKLKPFEKFLLKLEGQLLDGMIFQACIEQQFDSLNGGVSVSKNSTFAEEFAHSIRSIFANVEAKLGEPSEIDQRDKYVGICGLFVLHFQIFRTIDKKFYKSLLDICKKVPAITLTANIIWFPDNFLIQKIPAAAKLLDRKSLQAIKIHRDTFLQQKAQSLTKDVQSYYVFVSSWMMKMESILSKEQRMDKFAEDLTNRCNVFIQGFLYAYSISTIIKTTMNLYMSMQKPMTKTSVKALCRLVELLKAIEHMFYRRSMVVADSVSHITQHLQHQALHSISVAKKRVISDKKYSEQRLDVLSALVLAENTLNGPSTKQRRLIVSLALSVGTQMKTFKDEELFPLQVVMKKLDLISELRERVQTQCDCCFLYWHRAVFPIYLDDVYENAVDAARLHYMFSALRDCVPAMMHARHLESYEILLDCYDKEIMEILNEHLLDKLCKEIEKDLRLSVHTHLKLDDRNPFKVGMKDLALFFSLNPIRFFNRFIDIRAYVTHYLDKTFYNLTTVALHDWATYSEMRNLATQRYGLVMTEAHLPSQTLEQGLDVLEIMRNIHIFVSRYLYNLNNQIFIERTSNNKHLNTINIRHIANSIRTHGTGIMNTTVNFTYQFLKKKFYIFSQFMYDEHIKSRLIKDIRFFREIKDQNDHKYPFDRAEKFNRGIRKLGITPEGQSYLDQFRQLISQIGNAMGYVRMIRSGGLHCSSNAIRFVPDLEDIVNFEELVKEEGLAEETLKAARHLDSVLSDHTRNSAEGTEYFKMLVDVFAPEFRRPKNIHLRNFYIIVPPLTLNFVEHSISCKEKLNKKNKIGAAFTDDGFAMGVAYILKLLDQYREFDSLHWFQSVREKYLKEIRAVAKQQNVQSASQDEKLLQTMNLTQKRLDVYLQEFELLYFSLSSARIFFRADKTAAEENQEKKEKEEETKTSNGDLSDSTVSADPVVK

SEQ ID NO: 892368 - protein, 1202 aa, Homo sapiens; identical to SEQ ID NO: 892367

SEQ ID NO: 892369 - protein, 1046 aa, Homo sapiens [sequence omitted]

SEQ ID NO: 892370 - protein, 1159 aa, Homo sapiens
KSRAVTVAGVRPSSPHGLVGAVSVGGAGVMAVETLSPDWEFDRVDDGSQKIHAEVQLKNYGKFLEEYTSQLRRIEDALDDSIGDVWDFNLDPIALKLLPYEQSSLLELIKTENKVLNKVITVYAALCCEIKKLKYEAETKFYNGLLFYGEGATDASMVEGDCQIQMGRFISFLQELSCFVTRCYEVVMNVVHQLAALYISNKIAPKIIETTGVHFQTMYEHLGELLTVLLTLDEIIDNHITLKDHWTMYKRLLKSVHHNPSKFGIQEEKLKPFEKFLLKLEGQLLDGMIFQACIEQQFDSLNGGVSVSKNSTFAEEFAHSIRSIFANVEAKLGEPSEIDQRDKYVGICGLFVLHFQIFRTIDKKFYKSLLDICKKVPAITLTANIIWFPDNFLIQKIPAAAKLLDRKSLQAIKIHRDTFLQQKAQSLTKDVQSYYVFVSSWMMKMESILSKEQRMDKFAEDLTNRCNVFIQGFLYAYSISTIIKTTMNLYMSMQKPMTKTSVKALCRLVELLKAIEHMFYRRSMVVADSVSHITQHLQHQALHSISVAKKRVISDKKYSEQRLDVLSALVLAENTLNGPSTKQRRLIVSLALSVGTQMKTFKDEELFPLQVVMKKLDLISELRERVQTQCDCCFLYWHRAVFPIYLDDVYENAVDAARLHYMFSALRDCVPAMMHARHLESYEILLDCYDKEIMEILNEHLLDKLCKEIEKDLRLSVHTHLKLDDRNPFKVGMKDLALFFSLNPIRFFNRFIDIRAYVTHYLDKTFYNLTTVALHDWATYSEMRNLATQRYGLVMTEAHLPSQTLEQGLDVLEIMRNIHIFVSRYLYNLNNQIFIERTSNNKHLNTINIRHIANSIRTHGTGIMNTTVNFTYQFLKKKFYIFSQFMYDEHIKSRLIKDIRFFREIKDQNDHKYPFDRAEKFNRGIRKLGITPEGQSYLDQFRQLISQIGNAMGYVRMIRSGGLHCSSNAIRFVPDLEDIVNFEELVKEEGLAEETLKAARHLDSVLSDHTRNSAEGTEYFKMLVDVFAPEFRRPKNIHLRNFYIIVPPLTLNFVEHSISCKEKLNKKNKIGAAFTDDGFAMGVAYILKLLDQYREFDSLHWFQSVREKYLKEIRAVAKQQNVQSASQDEKLLQTMNLTQKRLDVYLQCKNFLQSRQDCG

SEQ ID NO: 892371 - protein, 1202 aa, Homo sapiens; identical to SEQ ID NO: 892367

SEQ ID NO: 892372 - protein, 1202 aa, Homo sapiens; identical to SEQ ID NO: 892367

SEQ ID NO: 892373 - protein, 1235 aa, Homo sapiens
KSRAVTVAGVRPSSPHGLVGAVSVGGAGVMAVETLSPDWEFDRVDDGSQKIHAEVQLKNYGKFLEEYTSQLRRIEDALDDSIGDVWDFNLDPIALKLLPYEQSSLLELIKTENKVLNKVITVYAALCCEIKKLKYEAETKFYNGLLFYGEGATDASMVEGDCQIQMGRFISFLQELSCFVTRCYEVVMNVVHQLAALYISNKIAPKIIETTGVHFQTMYEHLGELLTVLLTLDEIIDNHITLKDHWTMYKRLLKSVHHNPSKFGIQEEKLKPFEKFLLKLEGQLLDGMIFQACIEQQFDSLNGGVSVSKNSTFAEEFAHSIRSIFANVEAKLGEPSEIDQRDKYVGICGLFVLHFQIFRTIDKKFYKSLLDICKKVPAITLTANIIWFPDNFLIQKIPAAAKLLDRKSLQAIKIHRDTFLQQKAQSLTKDVQSYYVFVSSWMMKMESILSKEQRMDKFAEDLTNRCNVFIQGFLYAYSISTIIKTTMNLYMSMQKPMTKTSVKALCRLVELLKAIEHMFYRRSMVVADSVSHITQHLQHQALHSISVAKKRVISDKKYSEQRLDVLSALVLAENTLNGPSTKQRRLIVSLALSVGTQMKTFKDEELFPLQVVMKKLDLISELRERVQTQCDCCFLYWHRAVFPIYLDDVYENAVDAARLHYMFSALRDCVPAMMHARHLESYEILLDCYDKEIMEILNEHLLDKLCKEIEKDLRLSVHTHLKLDDRNPFKVGMKDLALFFSLNPIRFFNRFIDIRAYVTHYLDKTFYNLTTVALHDWATYSEMRNLATQRYGLVMTEAHLPSQTLEQGLDVLEIMRNIHIFVSRYLYNLNNQIFIERTSNNKHLNTINIRHIANSIRTHGTGIMNTTVNFTYQFLKKKFYIFSQFMYDEHIKSRLIKDIRFFREIKDQNDHKYPFDRAEKFNRGIRKLGITPEGQSYLDQFRQLISQIGHVGSRDGAVKKTKAVLMDLELKVGEDADRKIHSNAMGYVRMIRSGGLHCSSNAIRFVPDLEDIVNFEELVKEEGLAEETLKAARHLDSVLSDHTRNSAEGTEYFKMLVDVFAPEFRRPKNIHLRNFYIIVPPLTLNFVEHSISCKEKLNKKNKIGAAFTDDGFAMGVAYILKLLDQYREFDSLHWFQSVREKYLKEIRAVAKQQNVQSASQDEKLLQTMNLTQKRLDVYLQEFELLYFSLSSARIFFRADKTAAEENQEKKEKEEETKTSNGDLSDSTVSADPVVK

SEQ ID NO: 892374 - protein, 251 aa, Homo sapiens [sequence omitted]

SEQ ID NO: 892375 - protein, 880 aa, Homo sapiens
KSRAVTVAGVRPSSPHGLVGAVSVGGAGVMAVETLSPDWEFDRVDDGSQKIHAEVQLKNYGKFLEEYTSQLRRIEDALDDSIGDVWDFNLDPIALKLLPYEQSSLLELIKTENKVLNKVITVYAALCCEIKKLKYEAETKFYNGLLFYGEGATDASMVEGDCQIQMGRFISFLQELSCFVTRCYEVVMNVVHQLAALYISNKIAPKIIETTGVHFQTMYEHLGELLTVLLTLDEIIDNHITLKDHWTMYKRLLKSVHHNPSKFGIQEEKLKPFEKFLLKLEGQLLDGMIFQACIEQQFDSLNGGVSVSKNSTFAEEFAHSIRSIFANVEAKLGEPSEIDQRDKYVGICGLFVLHFQIFRTIDKKFYKSLLDICKKVPAITLTANIIWFPDNFLIQKIPAAAKLLDRKSLQAIKIHRDTFLQQKAQSLTKDVQSYYVFVSSWMMKMESILSKEQRMDKFAEDLTNRCNVFIQGFLYAYSISTIIKTTMNLYMSMQKPMTKTSVKALCRLVELLKAIEHMFYRRSMVVADSVSHITQHLQHQALHSISVAKKRVISDKKYSEQRLDVLSALVLAENTLNGPSTKQRRLIVSLALSVGTQMKTFKDEELFPLQVVMKKLDLISELRERVQTQCDCCFLYWHRAVFPIYLDDVYENAVDAARLHYMFSALRDCVPAMMHARHLESYEILLDCYDKEIMEILNEHLLDKLCKEIEKDLRLSVHTHLKLDDRNPFKVGMKDLALFFSLNPIRFFNRFIDIRAYVTHYLDKTFYNLTTVALHDWATYSEMRNLATQRYGLVMTEAHLPSQTLEQGLDVLEIMRNIHIFVSRYLYNLNNQIFIERTSNNKHLNTINIRHIANSIRTHGTGIMNTTKWAFTAWRGGPRL

SEQ ID NO: 892376 - protein, 877 aa, Homo sapiens
KSRAVTVAGVRPSSPHGLVGAVSVGGAGVMAVETLSPDWEFDRVDDGSQKIHAEVQLKNYGKFLEEYTSQLRRIEDALDDSIGDVWDFNLDPIALKLLPYEQSSLLELIKTENKVLNKVITVYAALCCEIKKLKYEAETKFYNGLLFYGEGATDASMVEGDCQIQMGRFISFLQELSCFVTRCYEVVMNVVHQLAALYISNKIAPKIIETTGVHFQTMYEHLGELLTVLLTLDEIIDNHITLKDHWTMYKRLLKSVHHNPSKFGIQEEKLKPFEKFLLKLEGQLLDGMIFQACIEQQFDSLNGGVSVSKNSTFAEEFAHSIRSIFANVEAKLGEPSEIDQRDKYVGICGLFVLHFQIFRTIDKKFYKSLLDICKKVPAITLTANIIWFPDNFLIQKIPAAAKLLDRKSLQAIKIHRDTFLQQKAQSLTKDVQSYYVFVSSWMMKMESILSKEQRMDKFAEDLTNRCNVFIQGFLYAYSISTIIKTTMNLYMSMQKPMTKTSVKALCRLVELLKAIEHMFYRRSMVVADSVSHITQHLQHQALHSISVAKKRVISDKKYSEQRLDVLSALVLAENTLNGPSTKQRRLIVSLALSVGTQMKTFKDEELFPLQVVMKKLDLISELRERVQTQCDCCFLYWHRAVFPIYLDDVYENAVDAARLHYMFSALRDCVPAMMHARHLESYEILLDCYDKEIMEILNEHLLDKLCKEIEKDLRLSVHTHLKLDDRNPFKVGMKDLALFFSLNPIRFFNRFIDIRAYVTHYLDKTFYNLTTVALHDWATYSEMRNLATQRYGLVMTEAHLPSQTLEQGLDVLEIMRNIHIFVSRYLYNLNNQIFIERTSNNKHLNTINIRHIANSIRTHGTGIMNTTVRTFLWGLSG

SEQ ID NO: 892377 - protein, 150 aa, Homo sapiens
QKLARAQERWGKRVRGGQMNSTVRQLRVPSHVPLRDPSWESLRNVPKLKKSRGMQGEQGRRLFRLLLNDLPGRDRLPCSYPQPHVEQASTSASPRLLAVNIPEDTLLSYPESSLPLQRHCAFHRFSKVLSELCPRCLPSTPCAIPFFFAW

SEQ ID NO: 892378 - protein, 168 aa, Homo sapiens
QKLARAQERWGKRVRGGQMNSTVRQLRVPSHVPLRDPSWESLRNVPKLKKSRGMQGEQGRRLFRLLLNDLPGRDRLPCSYPQPHVEQASTSASPRLLAVNIPEDTLLSYPESSLPLQRHCAFHRFSKVLSELCPRCLPSTPCAIPFFLASPFCLSHGLPQTVLSVFAW

SEQ ID NO: 892379 - protein, 1025 aa, Homo sapiens
RRSPLEGLHNLTLESRMDMFSLDMIISDPAAEASRAGKKQLRGVQNPCPSARARPRHKSLNIKDKISEWEGKKEVPTPAPSRRADGQEDYLPSSTVERRSSDGVRTQVTEAKNGMRPGTESTEKERNKGAVNVGGQDPEPGQDLSQPEREVDPSWGRGREPRLGKLRFQNDHLSVLKQVKKLEQALKDGSAGLDPQLPGTCYSPHCPPDKAEAGSTLPENLGGGSGSEVSQRVHPSDLEGREPTPELVEDRKGSCRRPWDRSLENVYRGSEGSPTKPFINPLPKPRRTFKHAGEGDKDGKPGIGFRKEKRNLPPLPSLPPPPLPSSPPPSSVNRRLWTGRQKSSADHRKSYEFEDLLQSSSESSRVDWYAQTKLGLTRTLSEENVYEDILDPPMKENPYEDIELHGRCLGKKCVLNFPASPTSSIPDTLTKQSLSKPAFFRQNSERRNFKLLDTRKLSRDGTGSPSKISPPSTPSSPDDIFFNLGDPQNGRKKRKIPKLVLRINAIYEVRRGKKRVKRLSQSMESNSGKVTDENSESDSDTEEKLKAHSQRLVNVKSRLKQAPRYPSLARELIEYQERQLFEYFVVVSLHKKQAGAAYVPELTQQFPLKLERSFKFMREAEDQLKAIPQFCFPDAKDWVPVQQFTSETFSFVLTGEDGSRRFGYCRRLLPGGKGKRLPEVYCIVSRLGCFSLFSRILDEVEKRRGISPALVQPLMRSVMEAPFPALGKTILVKNFLPGSGTEVIELCRPLDSRLEHVDFESLFSSLSVRHLVCVFASLLLERRVIFIADKLSILSKCCHAMVALIYPFAWQHTYIPVLPPAMVDIVCSPTPFLIGLLSSSLPLLRELPLEEVLVVDLVNSRFLRQMDDEDSILPRKLQVALEHILEQRNELACEQDEGPLDGRHGPESSPLNEVVSEAFVRFFVEIVGHYSLFLTSGEREERTLQREAFRKAVSSKSLRHFLEVFMETQMFRGFIQERELRRQDAKGLFEVRAQEYLETLPSGEHSGVNKFLKGLGNKMKFLHKK

SEQ ID NO: 892380 - protein, 217 aa, Homo sapiens
  misc_feature (7)..(7): Xaa can be any naturally occurring amino acid
  misc_feature (14)..(14): Xaa can be any naturally occurring amino acid
  misc_feature (205)..(205): Xaa can be any naturally occurring amino acid
  misc_feature (211)..(211): Xaa can be any naturally occurring amino acid
LIPFDYXYYAARRXQKGGYCRRLLPGGKGKRLPEVYCIVSRLGCFSLFSRILDEVEKRRGISPALVQPLMRSVMEAPFPALGKTILVKNFLPGSGTEVIELCRPLDSRLEHVDFESLFSSLSVRHLVCVFASLLLERRVIFIADKLSTPTSRCCHPPWSTSCARRRPSSSGCSPARCHCSGSCRWKSPCGLTLVKQPVSLDRMDXLRTSIXCPPEKL

SEQ ID NO: 892381 - protein, 1025 aa, Homo sapiens; identical to SEQ ID NO: 892379

SEQ ID NO: 892382 - protein, 242 aa, Homo sapiens
SPCSLPGCSILSKCCHAMVALIYPFAWQHTYIPVLPPAMVDIVCSPTPFLIGLLSSSLPLLRELPLEEVLVVDLVNSRFLRQMDDEDSILPRKLQVALEHILEQRNELACEQDEGPLDGRHGPESSPLNEVVSEAFVRFFVEIVGHYSLFLTSGEREERTLQREAFRKAVSSKSLRHFLEVFMETQMFRGFIQERELRRQDAKGLFEVRAQEYLETLPSGEHSGVNKFLKGLGNKMKFLHKK

SEQ ID NO: 892383 - protein, 361 aa, Homo sapiens
  misc_feature (7)..(7): Xaa can be any naturally occurring amino acid
  misc_feature (14)..(14): Xaa can be any naturally occurring amino acid
LIPFDYXYYAARRXQKGGYCRRLLPGGKGKRLPEVYCIVSRLGCFSLFSRILDEVEKRRGISPALVQPLMRSVMEAPFPALGKTILVKNFLPGSGTEVIELCRPLDSRLEHVDFESLFSSLSVRHLVCVFAFPASGEEGHLHCRQAQHTYIPVLPPAMVDIVCSPTPFLIGLLSSSLPLLRELPLEEVLVVDLVNSRFLRQMDDEDSILPRKLQVALEHILEQRNELACEQDEGPLDGRHGPESSPLNEVVSEAFVRFFVEIVGHYSLFLTSGEREERTLQREAFRKAVSSKSLRHFLEVFMETQMFRGFIQERELRRQDAKGLFEVRAQEYLETLPSGEHSGVNKFLKGLGNKMKFLHKK

SEQ ID NO: 892384 - protein, 811 aa, Homo sapiens
RRSPLEGLHNLTLESRMDMFSLDMIISDPAAEASRAGKKQLRGVQNPCPSARARPRHKSLNIKDKISEWEGKKEVPTPAPSRRADGQEDYLPSSTVERRSSDGVRTQVTEAKNGMRPGTESTEKERNKGAVNVGGQDPEPGQDLSQPEREVDPSWGRGREPRLGKLRFQNDHLSVLKQVKKLEQALKDGSAGLDPQLPGTCYSPHCPPDKAEAGSTLPENLGGGSGSEVSQRVHPSDLEGREPTPELVEDRKGSCRRPWDRSLENVYRGSEGSPTKPFINPLPKPRRTFKHAGEGDKDGKPGIGFRKEKRNLPPLPSLPPPPLPSSPPPSSVNRRLWTGRQKSSADHRKSYEFEDLLQSSSESSRVDWYAQTKLGLTRTLSEENVYEDILDPPMKENPYEDIELHGRCLGKKCVLNFPASPTSSIPDTLTKQSLSKPAFFRQNSERRNFKLLDTRKLSRDGTGSPSKISPPSTPSSPDDIFFNLGDPQNGRKKRKIPKLVLRINAIYEVRRGKKRVKRLSQSMESNSGKVTDENSESDSDTEEKLKAHSQRLVNVKSRLKQAPRYPSLARELIEYQERQLFEYFVVVSLHKKQAGAAYVPELTQQFPLKLERSFKFMREAEDQLKAIPQFCFPDAKDWVPVQQFTSETFSFVLTGEDGSRRFGYCRRLLPGGKGKRLPEVYCIVSRLGCFSLFSRILDEVEKRRGISPALVQPLMRSVMEAPFPALGKTILVKNFLPGSGTEVIELCRPLDSRLEHVDFESLFSSLSVRHLVCVFASLLLERRVIFIADKLRYPPWLLLLKRLNDSRSWTL

SEQ ID NO: 892385 - protein, 349 aa, Homo sapiens
MQRKFSEPNTYIDGLPSQDRQEELYDDVDLSELTAAVEPTEEATPVADDPNERESDRVYLDLTPVKSFLHGPSSAQAQASSPTLSCLDNATEALPADSGPGPTPDEPCIKCPENLGEQQLESLEPEDPSLRITTVKIQTEQQRISFPPSCPDAVVATPPGASPPVKDRLRVTSAEIKLGKNRTEAEVKRYTEEKERLEKKKEEIRGHLAQLRKEKRELKETLLKCTDKEVLASLEQKLKEIDEECRGEESRRVDLELSIMEVKDNLKKAEAGPVTLGTTVDTTHLENVSPRPKAVTPASAPDCTPVNSATTLKNRPLSVVVTGKGTVLQKAKVSSHSQPPLGPAEMSLR

SEQ ID NO: 892386 - protein, 911 aa, Homo sapiens
ASGAAGAHRLKSRLSASAGRSSPALGQGRWDRGAGGEPWRGPGPRTLGAAAPPGGPAASVTSRGGASAAAWALSRAPGEQRKAEPRGAHSVAPMERYKALEQLLTELDDFLKILDQENLSSTALVKKSCLAELLRLYTKSSSSDEEYIYMNKVTINKQQNAESQGKAPEEQGLLPNGEPSQHSSAPQKSLPDLPPPKMIPERKQLAIPKTESPEGYYEEAEPYDTSLNEDGEAVSSSYESYDEEDGSKGKSAPYQWPSPEAGIELMRDARICAFLWRKKWLGQWAKQLCVIKDNRLLCYKSSKDHSPQLDVNLLGSSVIHKEKQVRKKEHKLKITPMNADVIVLGLQSKDQAEQWLRVIQEVSGLPSEGASEGNQYTPDAQRFNCQKPDIAEKYLSASEYGSSVDGHPEVPETKDVKKKCSAGLKLSNLMNLGRKKSTSLEPVERSLETSSYLNVLVNSQWKSRWCSVRDNHLHFYQDRNRSKVAQQPLSLVGCEVVPDPSPDHLYSFRILHKGEELAKLEAKSSEEMGHWLGLLLSESGSKTDPEEFTYDYVDADRVSCIVSAAKNSLLLMQRKFSEPNTYIDGLPSQDRQEELYDDVDLSELTAAVEPTEEATPVADDPNERESDRVYLDLTPVKSFLHGPSSAQAQASSPTLSCLDNATEALPADSGPGPTPDEPCIKCPENLGEQQLESLEPEDPSLRITTVKIQTEQQRISFPPSCPDAVVATPPGASPPVKDRLRVTSAEIKLGKNRTEAEVKRYTEEKERLEKKKEEIRGHLAQLRKEKRELKETLLKCTDKEVLASLEQKLKEIDEECRGEESRRVDLELSIMEVKDNLKKAEAGPVTLGTTVDTTHLENVSPRPKAVTPASAPDCTPVNSATTLKNRPLSVVVTGKGTVLQKAKEWEKKGAS

SEQ ID NO: 892387 - protein, 528 aa, Homo sapiens
ASPPAARSPPASASPPGAQSPLASASASPPAAPPPPASVCPPEAPPPPASASPPAALSPPASALPPAGYLNVLVNSQWKSRWCSVRDNHLHFYQDRNRSKVAQQPLSLVGCEVVPDPSPDHLYSFRILHKGEELAKLEAKSSEEMGHWLGLLLSESGSKTDPEEFTYDYVDADRVSCIVSAAKNSLLLMQRKFSEPNTYIDGLPSQDRQEELYDDVDLSELTAAVEPTEEATPVADDPNERESDRVYLDLTPVKSFLHGPSSAQAQASSPTLSCLDNATEALPADSGPGPTPDEPCIKCPENLGEQQLESLEPEDPSLRITTVKIQTEQQRISFPPSCPDAVVATPPGASPPVKDRLRVTSAEIKLGKNRTEAEVKRYTEEKERLEKKKEEIRGHLAQLRKEKRELKETLLKCTDKEVLASLEQKLKEIDEECRGEESRRVDLELSIMEVKDNLKKAEAGPVTLGTTVDTTHLENVSPRPKAVTPASAPDCTPVNSATTLKNRPLSVVVTGKGTVLQKAKEWEKKGAS

SEQ ID NO: 892388 - protein, 493 aa, Homo sapiens
MVLLSHQGPSALGSRVVLPKVGEPMTRDSSAPQTRLPDSPRQPRMIPERKQLAIPKTESPEGYYEEAEPYDTSLNEDGEAVSSSYESYDEEDGSKGKSAPYQWPSPEAGIELMRDARICAFLWRKKWLGQWAKQLCVIKDNRLLCYKSSKDHSPQLDVNLLGSSVIHKEKQVRKKEHKLKITPMNADVIVLGLQSKDQAEQWLRVIQEVSGLPSEGASEGNQYTPDAQRFNCQKPDIAEKYLSASEYGSSVDGHPEVPETKDVKKKCSAGLKLSNLMNLGRKKSTSLEPVERSLETSSYLNVLVNSQWKSRWCSVRDNHLHFYQDRNRSKVAQQPLSLVGCEVVPDPSPDHLYSFRILHKGEELAKLEAKSSEEMGHWLGLLLSESGSKTDPEEFTYDYVDADRVSCIVSAAKNSLLLMQRKFSEPNTYIDGPSSAQAQASSPTLSCLDNATEALPADSGPGPTPDEPCMTTWTCQSSQLRWEPTEGSHPCCR

SEQ ID NO: 892389 - protein, 77 aa, Homo sapiens
GTVMAWWGGAGTRQHCLALLMSLLASFQAKSSEEMGHWLGLLLSESGSKTDPEEFTYDYVDADRVSCIVSAAKNSLL

SEQ ID NO: 892390 - protein, 911 aa, Homo sapiens; identical to SEQ ID NO: 892386

SEQ ID NO: 892391 - protein, 758 aa, Homo sapiens
MVLLSHQGPSALGSRVVLPKVGEPMTRDSSAPQTRLPDSPRQPRMIPERKQLAIPKTESPEGYYEEAEPYDTSLNEDGEAVSSSYESYDEEDGSKGKSAPYQWPSPEAGIELMRDARICAFLWRKKWLGQWAKQLCVIKDNRLLCYKSSKDHSPQLDVNLLGSSVIHKEKQVRKKEHKLKITPMNADVIVLGLQSKDQAEQWLRVIQEVSGLPSEGASEGNQYTPDAQRFNCQKPDIAEKYLSASEYGSSVDGHPEVPETKDVKKKCSAGLKLSNLMNLGRKKSTSLEPVERSLETSSYLNVLVNSQWKSRWCSVRDNHLHFYQDRNRSKVAQQPLSLVGCEVVPDPSPDHLYSFRILHKGEELAKLEAKSSEEMGHWLGLLLSESGSKTDPEEFTYDYVDADRVSCIVSAAKNSLLLMQRKFSEPNTYIDGLPSQDRQEELYDDVDLSELTAAVEPTEEATPVADDPNERESDRVYLDLTPVKSFLHGPSSAQAQASSPTLSCLDNATEALPADSGPGPTPDEPCIKCPENLGEQQLESLEPEDPSLRITTVKIQTEQQRISFPPSCPDAVVATPPGASPPVKDRLRVTSAEIKLGKNRTEAEVKRYTEEKERLEKKKEEIRGHLAQLRKEKRELKETLLKCTDKEVLASLEQKLKEIDEECRGEESRRVDLELSIMEVKDNLKKAEAGPVTLGTTVDTTHLENVSPRPKAVTPASAPDCTPVNSATTLKNRPLSVVVTGKGTVLQKAKEWEKKGAS

SEQ ID NO: 892392 - protein, 927 aa, Homo sapiens
ASGAAGAHRLKSRLSASAGRSSPALGQGRWDRGAGGEPWRGPGPRTLGAAAPPGGPAASVTSRGGASAAAWALSRAPGEQRKAEPRGAHSVAPMERYKALEQLLTELDDFLKILDQENLSSTALVKKSCLAELLRLYTKSSSSDEEYIYMNKVTINKQQNAESQGKAPEEQGLLPNGEPSQHSSAPQKSLPDLPPPKMIPERKQLAIPKTESPEGYYEEAEPYDTSLNEDGEAVSSSYESYDEEDGSKGKSAPYQWPSPEAGIELMRDARICAFLWRKKWLGQWAKQLCVIKDNRLLCYKSSKDHSPQLDVNLLGSSVIHKEKQVRKKEHKLKITPMNADVIVLGLQSKDQAEQWLRVIQEVSGLPSEGASEGNQYTPDAQRFNCQKPDIAEKYLSASEYGSSVDGHPEVPETKDVKKKCSAGLKLSNLMNLGRKKSTSLEPVERSLETSSYLNVLVNSQWKSRWCSVRDNHLHFYQDRNRSKVAQQPLSLVGCEVVPDPSPDHLYSFRILHKGEELAKLEAKSSEEMGHWLGLLLSESGSKTDPEEFTYDYVDADRVSCIVSAAKNSLLLMQRKFSEPNTYIDGLPSQDRQEELYDDVDLSELTAAVEPTEEATPVADDPNERESDRVYLDLTPVKSFLHGPSSAQAQASSPTLSCLDNATEALPADSGPGPTPDEPCIKCPENLGEQQLESLEPEDPSLRITTVKIQTEQQRISFPPSCPDAVVATPPGASPPVKDRLRVTSAEIKLGKNRTEAEVKRYTEEKERLEKKKEEIRGHLAQLRKEKRELKETLLKCTDKEVLASLEQKLKEIDEECRGEESRRVDLELSIMEVKDNLKKAEAGPVTLGTTVDTTHLENVSPRPKAVTPASAPDCTPVNSATTLKNRPLSVVVTGKGTVLQKAKVETFHLLSLPHFWRVVYQFSNTCS

SEQ ID NO: 892393 - protein, 113 aa, Homo sapiens
MPQTHSLLQVEPTEEATPVADDPNERESDRVYLDLTPVKSFLHGPSSAQAQASSPTLSCLDNATEALPADSGPGPTPDEPCIKCPENLGEQVQASPAGQQDHLPAPLQPAESG

SEQ ID NO: 892394 - protein, 152 aa, Homo sapiens
MGFAEAFLEHLWKNLQDPSNPAIIRQAAGNYIGSFLARAKFISLITVKPCLDLLVNWLHIYLNNQDSGTKAFCDVALHGPFYSACQAVFYTFVFRHKQLLSGNLKEGLQYPQSLNFERIVMSQLNPLKICLPSVVNFFAAITKMKTCGYGWW

SEQ ID NO: 892395 - protein, 480 aa, Homo sapiens
MIVADSECRAELKDYLRFAPGGVGDSGPGEEQRESRARRGPRGPSAFIPVEEVLREGAESLEQHLGLEALMSSGRVDNLAVVMGLHPDYFTSFWRLHYLLLHTDGPLASSWRHYIAIMAAARHQCSYLVGSHMAEFLQTGGDPEWLLGLHRAPEKLRKLSEINKLLAHRPWLITKEHIQALLKTGEHTWSLAELIQALVLLTHCHSLSSFVFGCGILPEGDADGSPAPQAPTPPSEQSSPPSRDPLNNSGGFESARDVEALMERMQQLQESLLRDEGTSQEEMESRFELEKSESLLVTPSADILEPSPHPDMLCFVEDPTFGYEDFTRRGAQAPPTFRAQDYTWEDHGYSLIQRLYPEGGQLLDEKFQAAYSLTYNTIAMHSGVDTSVLRRAIWNYIHCVFGIRYDDYDYGEVNQLLERNLKVYIKTVACYPEKTTRRMYNLFWRHFRHSEKVHVNLLLLEARMQAALLYALRAITRYMT

SEQ ID NO: 892396 - protein, 469 aa, Homo sapiens
MIVADSECRAELKDYLRFAPGGVGDSGPGEEQRESRARRGPRGPSAFIPVEEVLREGAESLEQHLGLEALMSSGRVDNLAVVMGLHPDYFTSFWRLHYLLLHTDGPLASSWRHYIAIMAAARHQCSYLVGSHMAEFLQTGGDPEWLLGLHRAPEKLRKLSEINKLLAHRPWLITKEHIQALLKTGEHTWSLAELIQALVLLTHCHSLSSFVFGCGILPEGDADGSPAPQAPTPPSEQSSPPSRDPLNNSGGFESARDVEALMERMQQLQEEMESRFELEKSESLLVTPSADILEPSPHPDMLCFVEDPTFGYEDFTRRGAQAPPTFRAQDYTWEDHGYSLIQRLYPEGGQLLDEKFQAAYSLTYNTIAMHSGVDTSVLRRAIWNYIHCVFGIRYDDYDYGEVNQLLERNLKVYIKTVACYPEKTTRRMYNLFWRHFRHSEKVHVNLLLLEARMQAALLYALRAITRYMT

SEQ ID NO: 892397 - protein, 97 aa, Homo sapiens
GEVNQLLIIIVIISDAKDSSGYDDYDYGEVNQLLERNLKVYIKTVACYPEKTTRRMYNLFWRHFRHSEKVHVNLLLLEARMQAALLYALRAITRYMT

SEQ ID NO: 892398 - protein, 124 aa, Homo sapiens
  misc_feature (92)..(92): Xaa can be any naturally occurring amino acid
  misc_feature (102)..(102): Xaa can be any naturally occurring amino acid
  misc_feature (122)..(122): Xaa can be any naturally occurring amino acid
MIVADSECRAELKDYLRFAPGGVGDSGPGEEQRESRARRGPRGPSAFIPVEEVLREGAESLEQHLGLEALMSSGRVDNLAVVMGLHPDYFLXMLSWAALHLXLLACTTGIGPLWPKLPWAPXYI

SEQ ID NO: 892399 - protein, 480 aa, Homo sapiens; identical to SEQ ID NO: 892395

SEQ ID NO: 892400 - protein, 491 aa, Homo sapiens
MIVADSECRAELKDYLRFAPGGVGDSGPGEEQRESRARRGPRGPSAFIPVEEVLREGAESLEQHLGLEALMSSGRVDNLAVVMGLHPDYFTSFWRLHYLLLHTDGPLASSWRHYIAIMAAARHQCSYLVGSHMAEFLQTGGDPEWLLGLHRAPEKLRKLSEINKLLAHRPWLITKEHIQALLKTGEHTWSLAELIQALVLLTHCHSLSSFVFGCGILPEGDADGSPAPQAPTPPSEQSSPPSRDPLNNSGGFESARDVEALMERMQQLQESLLRDEGTSQEEMESRFELEKSESLLVTPSADILEPSPHPDMLCFVEDPTFGYEDSLSGDSPRPFCVPCPPSPRCSGLVCDVQSRSHTLPFPHWNGQFIALTLGSQPCSWELEEHLEILRDHTLPPSPAHRGRGHRKEAGPSSELMCHKCCGLPELGSPWLAPGGEGQMPPGLTLQAALPSLPCHFQISLPPTCHSPINVKVRVTAGLCVQFPKSLFCWAA

SEQ ID NO: 892401 - protein, 74 aa, Homo sapiens
HLGLEALMSSGRVDNLAVVMGLHPDYFTSFWRLHYLLLHTDGPLASSWRHYIAIMVSLSGPDTWRGGFVVGSVL

SEQ ID NO: 892402 - protein, 174 aa, Homo sapiens
  misc_feature (143)..(143): Xaa can be any naturally occurring amino acid
  misc_feature (158)..(158): Xaa can be any naturally occurring amino acid
  misc_feature (171)..(171): Xaa can be any naturally occurring amino acid
MASFLAFLLLNFRVCLLLLQLLMPHSAQFSVLGPSGPILAMVGEDADLPCHLFPTMSAETMELKWVSSSLRQVVNVYADGKEVEDRQSAPYRGRTSILRDGITAGKAALRIHNVTASDSGKYLCYFQDGDFYEKALVELKVAXTGVLNLHVECERVTXGLEGDPIWEMPGXTWL

SEQ ID NO: 892403 - protein, 102 aa, Homo sapiens
MTHSRCLHNPFFRSAQRWIAALAGTLPVLLLLLGGAGYFLWQQQEEKKTQFRKKKREQELREMAWSTMKQEQSTRVKLLEELSKFPFPQRPRHVFLSLLYAP

SEQ ID NO: 892404 - protein, 332 aa, Homo sapiens
MASSLAFLLLNFHVSLLLVQLLTPCSAQFSVLGPSGPILAMVGEDADLPCHLFPTMSAETMELKWVSSSLRQVVNVYADGKEVEDRQSAPYRGRTSILRDGITAGKAALRIHNVTASDSGKYLCYFQDGDFYEKALVELKVAALGSNLHVEVKGYEDGGIHLECRSTGWYPQPQIQWSNAKGENIPAVEAPVVADGVGLYEVAASVIMRGGSGEGVSCIIRNSLLGLEKTASISIADPFFRSAQPWIAALAGTLPILLLLLAGASYFLWRQQKEITALSSEIESEQEMKEMGYAATEREISLRESLQEELKRKKIQYLTRGEESSSDTNKSA

SEQ ID NO: 892405 - protein, 332 aa, Homo sapiens; identical to SEQ ID NO: 892404

SEQ ID NO: 892406 - protein, 332 aa, Homo sapiens; identical to SEQ ID NO: 892404

SEQ ID NO: 892407 - protein, 267 aa, Homo sapiens
MKMASSLAFLLLNFHVSLLLVQLLTPCSAQFSVLGPSGPILAMVGEDADLPCHLFPTMSAETMELKWVSSSLRQVVNVYADGKEVEDRQSAPYRGRTSILRDGITAGKAALRIHNVTASDSGKYLCYFQDGDFYEKALVELKVAALGSNLHVEVKGYEDGGIHLECRSTGWYPQPQIQWSNAKGENIPAVEAPVVADGVGLYEVAASVIMRGGSGEGVSCIIRNSLLGLEKTASISIAESLQEELKRKKIQYLTRGEESSSDTNKSA

SEQ ID NO: 892408 - protein, 267 aa, Homo sapiens; identical to SEQ ID NO: 892407

SEQ ID NO: 892409 - protein, 267 aa, Homo sapiens; identical to SEQ ID NO: 892407

SEQ ID NO: 892410 - protein, 332 aa, Homo sapiens; identical to SEQ ID NO: 892404

SEQ ID NO: 892411 - protein, 262 aa, Homo sapiens
MKMASSLAFLLLNFHVSLLLVQLLTPCSAQFSVLGPSGPILAMVGEDADLPCHLFPTMSAETMELKWVSSSLRQVVNVYADGKEVEDRQSAPYRGRTSILRDGITAGKAALRIHNVTASDSGKYLCYFQDGDFYEKALVELKVAALGSNLHVEVKGYEDGGIHLECRSTGWYPQPQIQWSNAKGENIPAVEAPVVADGVGLYEVAASVIMRGGSGEGVSCIIRNSLLGLEKTASISIAESLQEELSKLPFPQRSRHVFLSSL

SEQ ID NO: 892412 - protein, 311 aa, Homo sapiens
MASSLAFLLLNFHVSLLLVQLLTPCSAQFSVLGPSGPILAMVGEDADLPCHLFPTMSAETMELKWVSSSLRQVVNVYADGKEVEDRQSAPYRGRTSILRDGITAGKAALRIHNVTASDSGKYLCYFQDGDFYEKALVELKVAALGSNLHVEVKGYEDGGIHLECRSTGWYPQPQIQWSNAKGENIPAVEAPVVADGVGLYEVAASVIMRGGSGEGVSCIIRNSLLGLEKTASISIADPFFRSAQPWIAALAGTLPILLLLLAGASYFLWRQQKEITALSSEIESEQEMKEMGYAATEREISLRGIQRKQRI

SEQ ID NO: 892413 - protein, 292 aa, Homo sapiens
MVGEDADLPCHLFPTMSAETMELKWVSSSLRQVVNVYADGKEVEDRQSAPYRGRTSILRDGITAGKAALRIHNVTASDSGKYLCYFQDGDFYEKALVELKVAALGSNLHVEVKGYEDGGIHLECRSTGWYPQPQIQWSNAKGENIPAVEAPVVADGVGLYEVAASVIMRGGSGEGVSCIIRNSLLGLEKTASISIADPFFRSAQPWIAALAGTLPILLLLLAGASYFLWRQQKEITALSSEIESEQEMKEMGYAATEREISLRESLQEELKRKKIQYLTRGEESSSDTNKSA

SEQ ID NO: 892414 - protein, 225 aa, Homo sapiens
MVGEDADLPCHLFPTMSAETMELKWVSSSLRQVVNVYADGKEVEDRQSAPYRGRTSILRDGITAGKAALRIHNVTASDSGKYLCYFQDGDFYEKALVELKVAALGSNLHVEVKGYEDGGIHLECRSTGWYPQPQIQWSNAKGENIPAVEAPVVADGVGLYEVAASVIMRGGSGEGVSCIIRNSLLGLEKTASISIAESLQEELKRKKIQYLTRGEESSSDTNKSA

SEQ ID NO: 892415 - protein, 226 aa, Homo sapiens [sequence omitted]

SEQ ID NO: 892416 - protein, 332 aa, Homo sapiens; identical to SEQ ID NO: 892404

SEQ ID NO: 892417 - protein, 329 aa, Homo sapiens
MKMASSLAFLLLNFHVSLLLVQLLTPCSAQFSVLGPSGPILAMVGEDADLPCHLFPTMSAETMELKWVSSSLRQVVNVYADGKEVEDRQSAPYRGRTSILRDGITAGKAALRIHNVTASDSGKYLCYFQDGDFYEKALVELKVAALGSNLHVEVKGYEDGGIHLECRSTGWYPQPQIQWSNAKGENIPAVEAPVVADGVGLYEVAASVIMRGGSGEGVSCIIRNSLLGLEKTASISIADPFFRSAQPWIAALAGTLPILLLLLAGASYFLWRQQKEITALSSEIESEQEMKEMGYAATEREISLRESLQEELSKLPFPQRSRHVFLSSL

SEQ ID NO: 892418 - protein, 332 aa, Homo sapiens; identical to SEQ ID NO: 892404

SEQ ID NO: 892419 - protein, 267 aa, Homo sapiens; identical to SEQ ID NO: 892407

SEQ ID NO: 892420 - protein, 349 aa, Homo sapiens
MASSLAFLLLNFHVSLLLVQLLTPCSAQFSVLGPSGPILAMVGEDADLPCHLFPTMSAETMELKWVSSSLRQVVNVYADGKEVEDRQSAPYRGRTSILRDGITAGKAALRIHNVTASDSGKYLCYFQDGDFYEKALVELKVAALGSNLHVEVKGYEDGGIHLECRSTGWYPQPQIQWSNAKGENIPAVEAPVVADGVGLYEVAASVIMRGGSGEGVSCIIRNSLLGLEKTASISIADPFFRSAQRWIAALAGTLPVLLLLLGGAGYFLWQQQEEKKTQFRKKKREQELREMAWSTMKQEQSTRVKLLEELRWRSIQYASRGERHSAYNEWKKALFKPGEEMLQMRLHFV

SEQ ID NO: 892421 - protein, 506 aa, Homo sapiens
MKMASSLAFLLLNFHVSLLLVQLLTPCSAQFSVLGPSGPILAMVGEDADLPCHLFPTMSAETMELKWVSSSLRQVVNVYADGKEVEDRQSAPYRGRTSILRDGITAGKAALRIHNVTASDSGKYLCYFQDGDFYEKALVELKVAALGSDLHVDVKGYKDGGIHLECRSTGWYPQPQIQWSNNKGENIPTVEAPVVADGVGLYAVAASVIMRGSSGEGVSCTIRSSLLGLEKTASISIADPFFRSAQRWIAALAGTLPVLLLLLGGAGYFLWQQQEEKKTQFRKKKREQELREMAWSTMKQEQSTRDGEVSSMHLGERDIAAYNEWKKALFKPADVILDPKTANPILLVSEDQRSVQRAKEPQDLPDNPERFNWHYCVLGCESFISGRHYWEVEVGDRKEWHIGVCSKNVQRKGWVKMTPENGFWTMGLTDGNKYRTLTEPRTNLKLPKPPKKVGVFLDYETGDISFYNAVDGSHIHTFLDVSFSEALYPVFRILTLEPTALTICPA

SEQ ID NO: 892422 - protein, 504 aa, Homo sapiens
MASFLAFLLLNFRVCLLLLQLLMPHSAQFSVLGPSGPILAMVGEDADLPCHLFPTMSAETMELKWVSSSLRQVVNVYADGKEVEDRQSAPYRGRTSILRDGITAGKAALRIHNVTASDSGKYLCYFQDGDFYEKALVELKVAALGSDLHVDVKGYKDGGIHLECRSTGWYPQPQIQWSNNKGENIPTVEAPVVADGVGLYAVAASVIMRGSSGEGVSCTIRSSLLGLEKTASISIADPFFRSAQRWIAALAGTLPVLLLLLGGAGYFLWQQQEEKKTQFRKKKREQELREMAWSTMKQEQSTRDGEVSSMHLGERDIAAYNEWKKALFKPADVILDPKTANPILLVSEDQRSVQRAKEPQDLPDNPERFNWHYCVLGCESFISGRHYWEVEVGDRKEWHIGVCSKNVQRKGWVKMTPENGFWTMGLTDGNKYRTLTEPRTNLKLPKPPKKVGVFLDYETGDISFYNAVDGSHIHTFLDVSFSEALYPVFRILTLEPTALTICPA

SEQ ID NO: 892423 - protein, 562 aa, Homo sapiens
LTVSHGEKTIFAFSFSFLPDERLSHNRKNGELLIDRLYSVGSDSPMGIPRDGFPYWNPKVKTLKDRHFWQSFPLVLTAQFSVLGPSGPILAMVGEDADLPCHLFPTMSAETMELKWVSSSLRQVVNVYADGKEVEDRQSAPYRGRTSILRDGITAGKAALRIHNVTASDSGKYLCYFQDGDFYEKALVELKVAALGSNLHVEVKGYEDGGIHLECRSTGWYPQPQIQWSNAKGENIPAVEAPVVADGVGLYEVAASVIMRGGSGEGVSCIIRNSLLGLEKTASISIADPFFRSAQRWIAALAGTLPVLLLLLGGAGYFLWQQQEEKKTQFRKKKREQELREMAWSTMKQEQSTRVKLLEELRWRSIQYASRGERHSAYNEWKKALFKPADVILDPKTANPILLVSEDQRSVQRAKEPQDLPDNPERFNWHYCVLGCESFISGRHYWEVEVGDRKEWHIGVCSKNVQRKGWVKMTPENGFWTMGLTDGNKYRTLTEPRTNLKLPKPPKKVGVFLDYETGDISFYNAVDGSHIHTFLDVSFSEALYPVFRILTLEPTALTICPA

SEQ ID NO: 892424 - protein, 518 aa, Homo sapiens
LTVSHGEKTIFAFSFSFLPDERLSHNRKNGELLIDRLYSVGSDSPMGIPRDGFPYWNPKVKTLKDRHFWQSSVFCAWTLWAHPGHDGKEVEDRQSAPYRGRTSILRDGITAGKAALRIHNVTASDSGKYLCYFQDGDFYEKALVELKVAALGSNLHVEVKGYEDGGIHLECRSTGWYPQPQIQWSNAKGENIPAVEAPVVADGVGLYEVAASVIMRGGSGEGVSCIIRNSLLGLEKTASISIADPFFRSAQRWIAALAGTLPVLLLLLGGAGYFLWQQQEEKKTQFRKKKREQELREMAWSTMKQEQSTRVKLLEELRWRSIQYASRGERHSAYNEWKKALFKPADVILDPKTANPILLVSEDQRSVQRAKEPQDLPDNPERFNWHYCVLGCESFISGRHYWEVEVGDRKEWHIGVCSKNVQRKGWVKMTPENGFWTMGLTDGNKYRTLTEPRTNLKLPKPPKKVGVFLDYETGDISFYNAVDGSHIHTFLDVSFSEALYPVFRILTLEPTALTICPA

SEQ ID NO: 892425 - protein, 556 aa, Homo sapiens
LTVSHGEKTIFAFSFSFLPDERLSHNRKNGELLIDRLYSVGSDSPMGIPRDGFPYWNPKVKTLKDRHFWQRDPPPCASAQFSVLGPSGPILAMVGEDADLPCHLFPTMSAETMELKWVSSSLRQVVNVYADGKEVEDRQSAPYRGRTSILRDGITAGKAALRIHNVTASDSGKYLCYFQDGDFYEKALVELKVAALGSDLHVDVKGYKDGGIHLECRSTGWYPQPQIQWSNNKGENIPTVEAPVVADGVGLYAVAASVIMRGSSGEGVSCTIRSSLLGLEKTASISIADPFFRSAQRWIAALAGTLPVLLLLLGGAGYFLWQQQEEKKTQFRKKKREQELREMAWSTMKQEQSTRDGEVSSMHLGERDIAAYNEWKKALFKPADVILDPKTANPILLVSEDQRSVQRAKEPQDLPDNPERFNWHYCVLGCESFISGRHYWEVEVGDRKEWHIGVCSKNVQRKGWVKMTPENGFWTMGLTDGNKYRTLTEPRTNLKLPKPPKKVGVFLDYETGDISFYNAVDGSHIHTFLDVSFSEALYPVFRILTLEPTALTICPA

SEQ ID NO: 892426 - protein, 281 aa, Homo sapiens
MASFLAFLLLNFRVCLLLLQLLMPHSAQFSVLGPSGPILAMVGEDADLPCHLFPTMSAETMELKWVSSSLRQVVNVYADGKEVEDRQSAPYRGRTSILRDGITAGKAALRIHNVTASDSGKYLCYFQDGDFYEKALVELKVAALGSDLHVDVKGYKDGGIHLECRSTGWYPQPQIQWSNNKGENIPTVEAPVVADGVGLYAVAASVIMRGSSGEGVSCTIRSSLLGLEKTASISIADPFFRSAQPGSQPGRDRLILLVISAEQLSCGTPEGITGVRGTMGN

SEQ ID NO: 892427 - protein, 118 aa, Homo sapiens
LTVSHGEKTIFAFSFSFLPDERLSHNRKNGELLIDRLYSVGSDSPMGIPRDGFPYWNPKVKTLKDRHFWQSIDENGKFPGFPSAQLSCLPPLGPAAHSLLSTALPRPSIMRWSPTPVP

SEQ ID NO: 892428 - protein, 83 aa, Homo sapiens
LAMHPAPPMTQGAKPDIFEKVPPLIHQSCRGGKLDPGRDSKEKERKHVVRGEWSGKSTKILTFFLSVSPSFQNGKMALFKPGE

SEQ ID NO: 892429 - protein, 332 aa, Homo sapiens; identical to SEQ ID NO: 892404

SEQ ID NO: 892430 - protein, 315 aa, Homo sapiens
MKMASSLAFLLLNFHVSLLLVQLLTPCSAQFSVLGPSGPILAMVGEDADLPCHLFPTMSAETMELKWVSSSLRQVVNVYADGKEVEDRQSAPYRGRTSILRDGITAGKAALRIHNVTASDSGKYLCYFQDGDFYEKGYEDGGIHLECRSTGWYPQPQIQWSNAKGENIPAVEAPVVADGVGLYEVAASVIMRGGSGEGVSCIIRNSLLGLEKTASISIADPFFRSAQPWIAALAGTLPILLLLLAGASYFLWRQQKEITALSSEIESEQEMKEMGYAATEREISLRESLQEELKRKKIQYLTRGEESSSDTNKSA

SEQ ID NO: 892431 - protein, 226 aa, Homo sapiens [sequence omitted]

SEQ ID NO: 892432 - protein, 229 aa, Homo sapiens
VSIFPGFKSTACKVGHAEEVFQKPVSLACPECGFEWRYCVLGCESFMSERHYWEVEVGDRKEWHIGVCSKNVERKKVWVKMTPENGYWTMGLTDGNKYRALTEPRTNLKLPEPPRKVGVILDYETGHISFYNATDGSHIYTFLHASSSEPLYPVFRILTLEPTALTVCPIPKVESSPDPDLVPDHSLEIPLTPGLANESGEPQAEVTSLLLPAQPGAKGLTLHNSQSEP

SEQ ID NO: 892433 - protein, 325 aa, Homo sapiens
MKMASSLAFLLLNFHVSLLLVQLLTPCSAQFSVLGPSGPILAMVGEDADLPCHLFPTMSAETMELKWVSSSLRQVVNVYADGKEVEDRQSAPYRGRTSILRDGITAGKAALRIHNVTASDSGKYLCYFQDGDFYEKALVELKVAALGSNLHVEVKGYEDGGIHLECRSTGWYPQPQIQWSNAKGENIPAVEAPVVADGVGLYEVAASVIMRGGSGEGVSCIIRNSLLGLEKTASISIADPFFRSAQPWIAALAGTLPILLLLLAGASYFLWRQQKEITALSSEIESEQEMKEMGYAATEREISLRESLQEELKRKKIQYLTREWL

SEQ ID NO: 892434 - protein, 511 aa, Homo sapiens
MASSLAFLLLNFHVSLLLVQLLTPCSAQFSVLGPSGPILAMVGEDADLPCHLFPTMSAETMELKWVSSSLRQVVNVYADGKEVEDRQSAPYRGRTSILRDGITAGKAALRIHNVTASDSGKYLCYFQDGDFYEKALVELKVAALGSNLHVEVKGYEDGGIHLECRSTGWYPQPQIQWSNAKGENIPAVEAPVVADGVGLYEVAASVIMRGGSGEGVSCIIRNSLLGLEKTASISIADPFFRSAQRWIAALAGTLPVLLLLLGGAGYFLWQQQEEKKTQFRKKKREQELREMAWSTMKQEQSTRVKLLEELRWRSIQYASRGERHSAYNEWKKALFKPADVILDPKTANPILLVSEDQRSVQRAKEPQDLPDNPERFNWHYCVLGCESFISGRHYWEVEVGDRKEWHIGVCSKNVQRKGWVKMTPENGFWTMGLTDGNKYRTLTEPRTNLKLPKPPKKVGVFLDYETGDISFYNAVDGSHIHTFLDVSFSEALYPVFRILTLEPTALTICPA

SEQ ID NO: 892435 - protein, 349 aa, Homo sapiens
MASFLAFLLLNFRVCLLLLQLLMPHSAQFSVLGPSGPILAMVGEDADLPCHLFPTMSAETMELKWVSSSLRQVVNVYADGKEVEDRQSAPYRGRTSILRDGITAGKAALRIHNVTASDSGKYLCYFQDGDFYEKALVELKVAALGSDLHVDVKGYKDGGIHLECRSTGWYPQPQIQWSNNKGENIPTVEAPVVADGVGLYAVAASVIMRGSSGEGVSCTIRSSLLGLEKTASISIADPFFRSAQRWIAALAGTLPVLLLLLGGAGYFLWQQQEEKKTQFRKKKREQELREMAWSTMKQEQSTRVKLLEELRWRSIQYASRGERHSAYNEWKKALFKPGEEMLQMRLHFV

SEQ ID NO: 892436 - protein, 504 aa, Homo sapiens; identical to SEQ ID NO: 892422

SEQ ID NO: 892437 - protein, 254 aa, Homo sapiens
MKMASSLAFLLLNFHVSLLLVQLLTPCSAQFSVLGPSGPILAMVGEDADLPCHLFPTMSAETMELKWVSSSLRQVVNVYADGKEVEDRQSAPYRGRTSILRDGITAGKAALRIHNVTASDSGKYLCYFQDGDFYEKALVELKVAALGSDLHVDVKGYKDGGIHLECRSTGWYPQPQIQWSNNKGENIPTVEAPVVADGVGLYAVAASVIMRGSSGEGVSCTIRSSLLGLEKTASISIAGQYLLGLRFSELGCGS

SEQ ID NO: 892438 - protein, 215 aa, Homo sapiens
MASFLAFLLLNFRVCLLLLQLLMPHSAQFSVLGPSGPILAMVGEDADLPCHLFPTMSAETMELKWVSSSLRQVVNVYADGKEVEDRQSAPYRGRTSILRDGITAGKAALRIHNVTASDSGKYLCYFQDGDFYEKALVELKVAALGSDLHVDVKGYKDGGIHLECRSTGWYPQPQIQWSNNKGENIPTVEAPVVADGVGLYAVAASRSPKVLGLQA

SEQ ID NO: 892439 - protein, 212 aa, Homo sapiens
MEHNEARTKHKRWRSIQYASRGERHSAYNEWKKALFKPADVILDPKTANPILLVSEDQRSVQRAKEPQDLPDNPERFNWHYCVLGCESFISGRHYWEVEVGDRKEWHIGVCSKNVQRKGWVKMTPENGFWTMGLTDGNKYRTLTEPRTNLKLPKPPKKVGVFLDYETGDISFYNAVDGSHIHTFLDVSFSEALYPVFRILTLEPTALTICPA

SEQ ID NO: 892440 - protein, 224 aa, Homo sapiens
DRILGCSTMKQEQCTRVKLLEELRWRSIQYASRGERHSAYNEWKKALFKPADVILDPKTANPILLVSEDQRSVQRAKEPQDLPDNPERFNWHYCVLGCESFISGRHYWEVEVGDRKEWHIGVCSKNVQRKGWVKMTPENGFWTMGLTDGNKYRTLTEPRTNLKLPKPPKKVGVFLDYETGDISFYNAVDGSHIHTFLDVSFSEALYPVFRILTLEPTALTICPA

SEQ ID NO: 892441 - protein, 977 aa, Homo sapiens
MERQKRKADIEKGLQFIQSTLPLKQEEYEAFLLKLVQNLFAEGNDLFREKDYKQALVQYMEGLNVADYAASDQVALPRELLCKLHVNRAACYFTMGLYEKALEDSEKALGLDSESIRALFRKARALNELGRHKEAYECSSRCSLALPHDESVTQLGQELAQKLGLRVRKAYKRPQELETFSLLSNGTAAGVADQGTSNGLGSIDDIETDCYVDPRGSPALLPSTPTMPLFPHVLDLLAPLDSSRTLPSTDSLDDFSDGDVFGPELDTLLDSLSLVQGGLSGSGVPSELPQLIPVFPGGTPLLPPVVGGSIPVSSPLPPASFGLVMDPSKKLAASVLDALDPPGPTLDPLDLLPYSETRLDALDSFGSTRGSLDKPDSFMEETNSQDHRPPSGAQKPAPSPEPCMPNTALLIKNPLAATHEFKQACQLCYPKTGPRAGDYTYREGLEHKCKRDILLGRLRSSEDQTWKRIRPRPTKTSFVGSYYLCKDMINKQDCKYGDNCTFAYHQEEIDVWTEERKGTLNRDLLFDPLGGVKRGSLTIAKLLKEHQGIFTFLCEICFDSKPRIISKGTKDSPSVCSNLAAKHSFYNNKCLVHIVRSTSLKYSKIRQFQEHFQFDVCRHEVRYGCLREDSCHFAHSFIELKVWLLQQYSGMTHEDIVQESKKYWQQMEAHAGKASSSMGAPRTHGPSTFDLQMKFVCGQCWRNGQVVEPDKDLKYCSAKARHCWTKERRVLLVMSKAKRKWVSVRPLPSIRNFPQQYDLCIHAQNGRKCQYVGNCSFAHSPEERDMWTFMKENKILDMQQTYDMWLKKHNPGKPGEGTPISSREGEKQIQMPTDYADIMMGYHCWLCGKNSNSKKQWQQHIQSEKHKEKVFTSDSDASGWAFRFPMGEFRLCDRLQKGKACPDGDKCRCAHGQEELNEWLDRREVLKQKLAKARKDMLLCPRDDDFGKYNFLLQEDGDLAGATPEAPAAAATATTGE

SEQ ID NO: 892442 - protein, 1335 aa, Homo sapiens
MERQKRKADIEKGLQFIQSTLPLKQEEYEAFLLKLVQNLFAEGNDLFREKDYKQALVQYMEGLNVADYAASDQVALPRELLCKLHVNRAACYFTMGLYEKALEDSEKALGLDSESIRALFRKARALNELGRHKEAYECSSRCSLALPHDESVTQLGQELAQKLGLRVRKAYKRPQELETFSLLSNGTAAGVADQGTSNGLGSIDDIETDCYVDPRGSPALLPSTPTMPLFPHVLDLLAPLDSSRTLPSTDSLDDFSDGDVFGPELDTLLDSLSLVQGGLSGSGVPSELPQLIPVFPGGTPLLPPVVGGSIPVSSPLPPASFGLVMDPSKKLAASVLDALDPPGPTLDPLDLLPYSETRLDALDSFGSTRGSLDKPDSFMEETNSQDHRPPSGAQKPAPSVSDLSGDPGLSFPAGGVWVLESGNEPSAWGKALHSPRRGTPRVDGSKMITSCPSSPSHMLGGHTEGTTALSDGRIQVSESEVTSPVLVASLVSRLSPVLSLKEHLGRARWLMPVIPALWEAELGGSQGQEIETILANTVKPRLYYKIQKISRVWWWAPVVPATREAEAEEWHETREAEFAVSRDRATAFQPGRQSETPSQKKENNNKRTSDEGPGVVAHAYNPSTLGGRGVQITRSGVRDQPGQHGDTPSLLKIQKLAGCSGWTPVIPGTQEAEAGESLESRRRRLQCAEIVPLHSSMGNKSKTPSQKKNPFYLFRDLYTSTKAILWGEWGRSDYCTLQVWSAEAGLVFGKEFSALPSPGSRGCSRPCLTCVGVQKGAWYLERTSQLCQVLAGGAAAPGSPSCVGVERSPAWLMGPEPHRPQRGGEGAAGCYPRLAERVSCCLFADMINKQDCKYGDNCTFAYHQEEIDVWTEERKGTLNRDLLFDPLGGVKRGSLTIAKLLKEHQGIFTFLCEICFDSKPRIISKGTKDSPSVCSNLAAKHSFYNNKCLVHIVRSTSLKYSKIRQFQEHFQFDVCRHEVRYGCLREDSCHFAHSFIELKVWLLQQYSGMTHEDIVQESKKYWQQMEAHAGKASSSMGAPRTHGPSTFDLQMKFVCGQCWRNGQVVEPDKDLKYCSAKARHCWTKERRVLLVMSKAKRKWVSVRPLPSIRNFPQQYDLCIHAQNGRKCQYVGNCSFAHSPEERDMWTFMKENKILDMQQTYDMWLKKHNPGKPGEGTPISSREGEKQIQMPTDYADIMMGYHCWLCGKNSNSKKQWQQHIQSEKHKEKVFTSDSDASGWAFRFPMGEFRLCDRLQKGKACPDGDKCRCAHGQEELNEWLDRREVLKQKLAKARKDMLLCPRDDDFGKYNFLLQEDGDLAGATPEAPAAAATATTGE

SEQ ID NO: 892443 - protein, 639 aa, Homo sapiens
MGNKSKTPSQKKNPFYLFRDLYTSTKAILWGEWGRSDYCTLQVWSAEAGLVFGKEFSALPSPGSRGCSRPCLTCVGVQKGAWYLERTSQLCQVLAGGAAAPGSPSCVGVERSPAWLMGPEPHRPQRGGEGAAGCYPRLAERVSCCLFADMINKQDCKYGDNCTFAYHQEEIDVWTEERKGTLNRDLLFDPLGGVKRGSLTIAKLLKEHQGIFTFLCEICFDSKPRIISKGTKDSPSVCSNLAAKHSFYNNKCLVHIVRSTSLKYSKIRQFQEHFQFDVCRHEVRYGCLREDSCHFAHSFIELKVWLLQQYSGMTHEDIVQESKKYWQQMEAHAGKASSSMGAPRTHGPSTFDLQMKFVCGQCWRNGQVVEPDKDLKYCSAKARHCWTKERRVLLVMSKAKRKWVSVRPLPSIRNFPQQYDLCIHAQNGRKCQYVGNCSFAHSPEERDMWTFMKENKILDMQQTYDMWLKKHNPGKPGEGTPISSREGEKQIQMPTDYADIMMGYHCWLCGKNSNSKKQWQQHIQSEKHKEKVFTSDSDASGWAFRFPMGEFRLCDRLQKGKACPDGDKCRCAHGQEELNEWLDRREVLKQKLAKARKDMLLCPRDDDFGKYNFLLQEDGDLAGATPEAPAAAATATTGE

SEQ ID NO: 892444 - protein, 977 aa, Homo sapiens; identical to SEQ ID NO: 892441

SEQ ID NO: 892445 - protein, 498 aa, Homo sapiens
MERQKRKADIEKGLQFIQSTLPLKQEEYEAFLLKLVQNLFAEGNDLFREKDYKQALVQYMEGLNVADYAASDQVALPRELLCKLHVNRAACYFTMGLYEKALEDSEKALGLDSESIRALFRKARALNELGRHKEAYECSSRCSLALPHDESVTQLGQELAQKLGLRVRKAYKRPQELETFSLLSNGTAAGVADQGTSNGLGSIDDIETDCYVDPRGSPALLPSTPTMPLFPHVLDLLAPLDSSRTLPSTDSLDDFSDGDVFGPELDTLLDSLSLVQGGLSGSGVPSELPQLIPVFPGGTPLLPPVVGGSIPVSSPLPPASFGLVMDPSKKLAASVLDALDPPGPTLDPLDLLPYSETRLDALDSFGSTRGSLDKPDSFMEETNSQDHRPPSGAQKPAPSPEPCMPNTALLIKNPLAATHEFKQACQLCYPKTGPRAGDYTYREGLEHKCKRDILLGRLRSSEDQTWKRIRPRPTKTSFVGSYYLCKDMINKQDCKCRG

SEQ ID NO: 892446 - protein, 208 aa, Homo sapiens
MERQKRKADIEKGLQFIQSTLPLKQEEYEAFLLKLVQNLFAEGNDLFREKDYKQALVQYMEGLNVADYAASDQVALPRELLCKLHVNRAACYFTMGLYEKALEDSEKALGLDSESIRALFRKARALNELGRHKEAYECSSRCSLALPHDESVTQLGQELAQKLGLRVRKAYKRPQELETFSLLSNGTAAGVADQVGSGLNQPVSVYPL

SEQ ID NO: 892447 - protein, 1033 aa, Homo sapiens
MERQKRKADIEKGLQFIQSTLPLKQEEYEAFLLKLVQNLFAEGNDLFREKDYKQALVQYMEGLNVADYAASDQVALPRELLCKLHVNRAACYFTMGLYEKALEDSEKALGLDSESIRALFRKARALNELGRHKEAYECSSRCSLALPHDESVTQLGQELAQKLGLRVRKAYKRPQELETFSLLSNGTAAGVADQGTSNGLGSIDDIETDCYVDPRGSPALLPSTPTMPLFPHVLDLLAPLDSSRTLPSTDSLDDFSDGDVFGPELDTLLDSLSLVQGGLSGSGVPSELPQLIPVFPGGTPLLPPVVGGSIPVSSPLPPASFGLVMDPSKKLAASVLDALDPPGPTLDPLDLLPYSETRLDALDSFGSTRGSLDKPDSFMEETNSQDHRPPSGAQKPAPSPEPCMPNTALLIKNPLAATHEFKQACQLCYPKTGPRAGDYTYREGLEHKCKRDILLGRLRSSEDQTWKRIRPRPTKTSFVGSYYLCKDMINKQDCKYGDNCTFAYHQEEIDVWTEERKGTLNRDLLFDPLGGVKRGSLTIAKLLKEHQGIFTFLCEICFDSKPRIISKGTKDSPSVCSNLAAKHSFYNNKCLVHIVRSTSLKYSKIRQFQEHFQFDVCRHEVRYGCLREDSCHFAHSFIELKVWLLQQYSGMTHEDIVQESKKYWQQMEAHAGKASSSMGAPRTHGPSTFDLQMKFVCGQCWRNGQVVEPDKDLKYCSAKARHCWTKERRVLLVMSKAKRKWVSVRPLPSIRNFPQQYDLCIHAQNGRKCQYVGNCSFAHSPEERDMWTFMKENKILDMQQTYDMWLKKHNPGKPGEGTPISSREGEKQIQMPTDYADIMVTPPPCMLGAAVGAVVLSLTWEGQPGGPSRPALSLSEVGGPGRGVGEQAPMMAVPQMGYHCWLCGKNSNSKKQWQQHIQSEKHKEKVFTSDSDASGWAFRFPMGEFRLCDRLQKGKACPDGDKCRCAHGQEELNEWLDRREVLKQKLAKARKDMLLCPRDDDFGKYNFLLQEDGDLAGATPEAPAAAATATTGE

SEQ ID NO: 892448 - protein, 957 aa, Homo sapiens
MERQKRKADIEKGLQFIQSTLPLKQEEYEAFLLKLVQNLFAEGNDLFREKDYKQALVQYMEGLNVADYAASDQVALPRELLCKLHVNRAACYFTMGLYEKALEDSEKALGLDSESIRALFRKARALNELGRHKEAYECSSRCSLALPHDESVTQLGQELAQKLGLRVRKAYKRPQELETFSLLSNGTAAGVADQGTSNGLGSIDDIETDCYVDPRGSPALLPSTPTMPLFPHVLDLLAPLDSSRTLPSTDSLDDFSDGDVFGPELDTLLDSLSLVQGGLSGSGVPSELPQLIPVFPGGTPLLPPVVGGSIPVSSPLPPASFGLVMDPSKKLAASVLDALDPPGPTLDPLDLLPYSETRLDALDSFGSTRGSLDKPDSFMEETNSQDHRPPSGAQKPAPSPEPCMPNTALLIKNPLAATHEFKQAASSATPRQAPGLATTPTVRALSTSASGTSCSAGSGARRTRPGSGSGPGPLRPASWAPTTCAKEEIDVWTEERKGTLNRDLLFDPLGGVKRGSLTIAKLLKEHQGIFTFLCEICFDSKPRIISKGTKDSPSVCSNLAAKHSFYNNKCLVHIVRSTSLKYSKIRQFQEHFQFDVCRHEVRYGCLREDSCHFAHSFIELKVWLLQQYSGMTHEDIVQESKKYWQQMEAHAGKASSSMGAPRTHGPSTFDLQMKFVCGQCWRNGQVVEPDKDLKYCSAKARHCWTKERRVLLVMSKAKRKWVSVRPLPSIRNFPQQYDLCIHAQNGRKCQYVGNCSFAHSPEERDMWTFMKENKILDMQQTYDMWLKKHNPGKPGEGTPISSREGEKQIQMPTDYADIMMGYHCWLCGKNSNSKKQWQQHIQSEKHKEKVFTSDSDASGWAFRFPMGEFRLCDRLQKGKACPDGDKCRCAHGQEELNEWLDRREVLKQKLAKARKDMLLCPRDDDFGKYNFLLQEDGDLAGATPEAPAAAATATTGE

SEQ ID NO: 892449 - protein, 1118 aa, Homo sapiens
MERQKRKADIEKGLQFIQSTLPLKQEEYEAFLLKLVQNLFAEGNDLFREKDYKQALVQYMEGLNVADYAASDQVALPRELLCKLHVNRAACYFTMGLYEKALEDSEKALGLDSESIRALFRKARALNELGRHKEAYECSSRCSLALPHDESVTQLGQELAQKLGLRVRKAYKRPQELETFSLLSNGTAAGVADQGTSNGLGSIDDIETDCYVDPRGSPALLPSTPTMPLFPHVLDLLAPLDSSRTLPSTDSLDDFSDGDVFGPELDTLLDSLSLVQGGLSGSGVPSELPQLIPVFPGGTPLLPPVVGGSIPVSSPLPPASFGLVMDPSKKLAASVLDALDPPGPTLDPLDLLPYSETRLDALDSFGSTRGSLDKPDSFMEETNSQDHRPPSGAQKPAPSPEPCMPNTALLIKNPLAATHEFKQACQLCYPKTGPRAGDYTYREGLEHKCKRDILLGRLRSSEDQTWKRIRPRPTKTSFVGSYYLCKDMINKQDCKYGDNCTFAYHQEEIDVWTEERKGTLNRDLLFDPLGGVKRGSLTIAKLLKEHQGIFTFLCEICFDSKPRIISKGTKDSPSVCSNLAAKHSFYNNKCLVHIVRSTSLKYSKIRQFQEHFQFDVCRHEVRYGCLREDSCHFAHSFIELKVWLLQQYSGMTHEDIVQESKKYWQQMEAHAGKASSSMGAPRTHGPSTFDLQMKFVCGQCWRNGQVVEPDKDLKYCSAKARHCWTKERRVLLVMSKAKRKWVSVRPLPSIRNFPQQYDLCIHAQNGRKCQYVGNCSFAHSPEERDMWTFMKENKILDMQQTYDMWLKKHNPGKPGEGTPISSREGEKQIQMPTDYADIMVTPPPCMLGAAVGAVVLSLTWEGQPGGPSRPALSLSEVGGPGRGVGEQAPMMAVPQMGYHCWLCGKNSNSKKQWQQHIQSEKHKEKVFTSDSDASGWAFRFPMGEFRLCDRLQKGKACPDGDKCRCAHGQEELNEWLDRREVLKQKLAKARKDMLLCPRDDDFGKYNFLLQEDGDLPLELGHPAAGLLSDCPQPNFSWHSDVPPLLFFSATLFHHSIIWSAGLLVCPWSLGFMAYMGAGQEAWRAKRQLLGHKNRNAYSHLGPQDPGLEAGPLHGDHPL

SEQ ID NO: 892450 - protein, 199 aa, Homo sapiens
MERQKRKADIEKGLQFIQSTLPLKQEEYEAFLLKLVQNLFAEGNDLFREKDYKQALVQYMEGLNVADYAASDQVALPRELLCKLHVNRAACYFTMGLYEKALEDSEKALGLDSESIRALFRKRGLEASKVSSCGAKERTCSDKEVTPLLFLLLQGVQKWFTSEETLMFCMRVMVGVIILYDHVHPVGAFCKTSKIDMKG

SEQ ID NO: 892451 - protein, 824 aa, Homo sapiens
MADRAEMFSLSTFHSLSPPGCRPPQDISLEEFDDEDLSEITDDCGLGLSYDSDHCEKDSLSLGRSEQPHPICSFQDDFQEFEMIDDNEEEDDEDEEEEEEEEEGDGEGQEGGDPGSEAPAPGPLIPSPSVEEPHKHRPTTLRLTTLGAQDSLNNNGGFDLVRPASWQETALCSPAPEALRELPGPLPATDTGPGGAQSPVRPGCDCEGNRPAEPPAPGGTSPSSDPGIEADLRSRSSGGRGGRRSSQELSSPGSDSEDAGGARLGRMISSISETELELSSDGGSSSSGRSSHLTNSIEEASSPASEPEPPREPPRRPAFLPVGPDDTNSEYESGSESEPDLSEDADSPWLLSNLVSRMISEGSSPIRCPGQCLSPAPRPPGEPVSPAGGAAQDSQDPEAAAGPGGVELVDMETLCAPPPPAPAAPRPGPAQPGPCLFLSNPTRDTITPLWAAPGRAARPGRACSAACSEEEDEEDDEEEEDAEDSAGSPGGRGTGPSAPRDASLVYDAVKYTLVVDEHTQLELVSLRRCAGLGHDSEEDSGGEASEEEAGAALLGGGQVSGDTSPDSPDLTFSKKFLNVFVNSTSRSSSTESFGLFSCLVNGEEREQTHRAVFRFIPRHPDELELDVDDPVLVEAEEDDFWFRGFNMRTGERGVFPAFYAHAVPGPAKDLLGSKRSPCWVERFDVQFLGSVEVPCHQGNGILCAAMQKIATARKLTVHLRPPASCDLEISLRGVKLSLSGGGPEFQRCSHFFQMKNISFCGCHPRNSCYFGFITKHPLLSRFACHVFVSQESMRPVAQSVGRAFLEYYQEHLAYACPTEDIYLE

SEQ ID NO: 892452 - protein, 797 aa, Homo sapiens
MLPDFPSPSTWAPGLLLPSGPALLSPSVLQDSLSLGRSEQPHPICSFQDDFQEFEMIDDNEEEDDEDEEEEEEEEEGDGEGQEGGDPGSEAPAPGPLIPSPSVEEPHKHRPTTLRLTTLGAQDSLNNNGGFDLVRPASWQETALCSPAPEALRELPGPLPATDTGPGGAQSPVRPGCDCEGNRPAEPPAPGGTSPSSDPGIEADLRSRSSGGRGGRRSSQELSSPGSDSEDAGGARLGRMISSISETELELSSDGGSSSSGRSSHLTNSIEEASSPASEPEPPREPPRRPAFLPVGPDDTNSEYESGSESEPDLSEDADSPWLLSNLVSRMISEGSSPIRCPGQCLSPAPRPPGEPVSPAGGAAQDSQDPEAAAGPGGVELVDMETLCAPPPPAPAAPRPGPAQPGPCLFLSNPTRDTITPLWAAPGRAARPGRACSAACSEEEDEEDDEEEEDAEDSAGSPGGRGTGPSAPRDASLVYDAVKYTLVVDEHTQLELVSLRRCAGLGHDSEEDSGGEASEEEAGAALLGGGQVSGDTSPDSPDLTFSKKFLNVFVNSTSRSSSTESFGLFSCLVNGEEREQTHRAVFRFIPRHPDELELDVDDPVLVEAEEDDFWFRGFNMRTGERGVFPAFYAHAVPGPAKDLLGSKRSPCWVERFDVQFLGSVEVPCHQGNGILCAAMQKIATARKLTVHLRPPASCDLEISLRGVKLSLSGGGPEFQRCSHFFQMKNISFCGCHPRNSCYFGFITKHPLLSRFACHVFVSQESMRPVAQSVGRAFLEYYQEHLAYACPTEDIYLE

SEQ ID NO: 892453 - protein, 285 aa, Homo sapiens
MADRAEMFSLSTFHSLSPPGCRPPQDISLEEFDDEDLSEITDDCGLGLSYDSDHCEKDSLSLGRSEQPHPICSFQDDFQEFEMIDDNEEEDDEDEEEEEEEEEGDGEGQEGGDPGSEAPAPGPLIPSPSVEEPHKHRPTTLRLTTLGAQDSLNNNGGFDLVRPASWPSAPGAAGAEDVSRGHHGFGKDWIGGTWDLTLVGVCGLGTLVLGPQGAAVGAAGEWSPRAPAFPQIRSFSVLSSSFPSQSPFSLSWCLCPSLCLQTLSSILHFGVRTSGVWRRCGSRDR

SEQ ID NO: 892454 - protein, 443 aa, Homo sapiens
MADRAEMFSLSTFHSLSPPGCRPPQDISLEEFDDEDLSEITDDCGLGLSYDSDHCEKDSLSLGRSEQPHPICSFQDDFQEFEMIDDNEEEDEEDDEEEEDAEDSAGSPGGRGTGPSAPRDASLVYDAVKYTLVVDEHTQLELVSLRRCAGLGHDSEEDSGGEASEEEAGAALLGGGQVSGDTSPDSPDLTFSKKFLNVFVNSTSRSSSTESFGLFSCLVNGEEREQTHRAVFRFIPRHPDELELDVDDPVLVEAEEDDFWFRGFNMRTGERGVFPAFYAHAVPGPAKDLLGSKRSPCWVERFDVQFLGSVEVPCHQGNGILCAAMQKIATARKLTVHLRPPASCDLEISLRGVKLSLSGGGPEFQRCSHFFQMKNISFCGCHPRNSCYFGFITKHPLLSRFACHVFVSQESMRPVAQSVGRAFLEYYQEHLAYACPTEDIYLE

SEQ ID NO: 892455 - protein, 135 aa, Homo sapiens
MALARTGLGGHGTLRLWGSAGWELSSSVPRAQLLGLRGSGAPVPLLFLRSVLSLCCPPPSLPSLPFLSPGVSAPLCACKPYPLFFTLGSELRGCGGGAALGTGNVGFQVMPSCHSPAIYKGILIFIVNLKGSSHP

SEQ ID NO: 892456 - protein, 403 aa, Homo sapiens
MNHKSKKRIREAKRSARPELKDSLDWTRHNYYESFSLSPAAVADNVERADALQLSVEEFVERYERPYKPVVLLNAQEGWSAQEKWTLERLKRKYRNQKFKCGEDNDGYSVKMKMKYYIEYMESTRDDSPLYIFDSSYGEHPKRRKLLEDYKVPKFFTDDLFQYAGEKRRPPYRWFVMGPPRSGTGIHIDPLGTSAWNALVQGHKRWCLFPTSTPRELIKVTRDEGGNQQDEAITWFNVIYPRTQLPTWPPEFKPLEILQKPGETVFVPGGWWHVVLNLDTTIAITQNFASSTNFPVVWHKTVRGRPKLSRKWYRILKQEHPELAVLADSVDLQESTGIASDSSSDSSSSSSSSSSDSDSECESGSEGDGTVHRRKKRRTCSMVGNGDTTSQDDCVSKERSSSR

SEQ ID NO: 892457 - protein, 85 aa, Homo sapiens
MTALHLGESDQYLCCLPRSEVCLMKKWVASRLTPCFLSSCVQCESGSEGDGTVHRRKKRRTCSMVGNGDTTSQDDCVSKERSSSR

SEQ ID NO: 892458 - protein, 96 aa, Homo sapiens
MNHKSKKRIREAKRSARPELKDSLDWTRHNYYESFSLSPAAVAVSGSGGGGQAGHRHLQPLRTFLWARGCPRPERPGPRRGSPAPRGVWGPRGADS

SEQ ID NO: 892459 - protein, 315 aa, Homo sapiens
MNHKSKKRIREAKRSARPELKDSLDWTRHNYYESFSLSPAAVADNVERADALQLSVEEFVERYERPYKPVVLLNAQEGWSAQEKWTLERLKRKYRNQKFKCGEDNDGYSVKMKMKYYIEYMESTRDDSPLYIFDSSYGEHPKRRKLLEDYKVPKFFTDDLFQYAGEKRRPPYRWFVMGPPRSGTGIHIDPLGTSAWNALVQGHKRWCLFPTSTPRELIKVTRDEGGNQQDEAITWFNVIYPRTQLPTWPPEFKPLEILQKPGETVFVPGGWWHVVLNLDTTIAITQNFASSTNFPVVWHKTVRGRPKLSRKWYSR

SEQ ID NO: 892460 - protein, 403 aa, Homo sapiens; identical to SEQ ID NO: 892456

SEQ ID NO: 892461 - protein, 315 aa, Homo sapiens; identical to SEQ ID NO: 892459

SEQ ID NO: 892462 - protein, 315 aa, Homo sapiens; identical to SEQ ID NO: 892459

SEQ ID NO: 892463 - protein, 85 aa, Homo sapiens; identical to SEQ ID NO: 892457

SEQ ID NO: 892464 - protein, 414 aa, Homo sapiens
MNHKSKKRIREAKRSARPELKDSLDWTRHNYYESFSLSPAAVADNVERADALQLSVEEFVERYERPYKPVVLLNAQEGWSAQEKWTLERLKRKYRNQKFKCGEDNDGYSVKMKMKYYIEYMESTRDDSPLYIFDSSYGEHPKRRKLLEDYKVPKFFTDDLFQYAGEKRRPPYRWFVMGPPRSGTGIHIDPLGTSAWNALVQGHKRWCLFPTSTPRELIKVTRDEGGNQQDEAITWFNVIYPRTQLPTWPPEFKPLEILQKPGETVFVPGGWWHVVLNLDTTIAITQNFASSTNFPVVWHKTVRGRPKLSRKWYRILKQEHPELAVLADSVDLQESTGIASDSSSDSSSSSSSSSSDSDSECESGSEGDGTVHRRKKRRTCSMVGNGDTTSQDDCVSKERSSSRIRDTCGGRAHP

SEQ ID NO: 892465 - protein, 335 aa, Homo sapiens
MNHKSKKRIREAKRSARPELKDSLDWTRHNYYESFSLSPAAVADNVERADALQLSVEEFVERYERPYKPVVLLNAQEGWSAQEKWTLERLKRKYRNQKFKCGEDNDGYSVKMKMKYYIEYMESTRDDSPLYIFDSSYGEHPKRRKLLEDYKVPKFFTDDLFQYAGEKRRPPYRWFVMGPPRSGTGIHIDPLGTSAWNALVQGHKRWCLFPTSTPRELIKVTRDEGGNQQDEAITWFNVIYPRTQLPTWPPEFKPLEILQKPGETVFVPGGWWHVVLNLDTTIAITQNFASSTNFPVVWHKTVRGRPKLSRKWYRYSTGSGSASHPQPPRATVSQP

SEQ ID NO: 892466 - protein, 315 aa, Homo sapiens; identical to SEQ ID NO: 892459

SEQ ID NO: 892467 - protein, 103 aa, Homo sapiens
MAVSALEQHFLPLRILKQEHPELAVLADSVDLQESTGIASDSSSDSSSSSSSSSSDSDSECESGSEGDGTVHRRKKRRTCSMVGNGDTTSQDDCVSKERSSSR

SEQ ID NO: 892468 - protein, 255 aa, Homo sapiens [sequence omitted]

SEQ ID NO: 892469 - protein, 255 aa, Homo sapiens [sequence omitted]

SEQ ID NO: 892470 - protein, 104 aa, Homo sapiens
MKSRLTYNQINDVIKEINKAVISKYKILHQPKKSMNSVTRNLYHRFIDEETKDTKGRYFIVEADIKEFTTLKADKKFHVLLNILRHCRRLSEVRGGGLTRYVIT

SEQ ID NO: 892471 - protein, 255 aa, Homo sapiens [sequence omitted]

SEQ ID NO: 892472 - protein, 119 aa, Homo sapiens
MPFITCDEFNGVPSYMKSRLTYNQINDVIKEINKAVISKYKILHQPKKSMNSVTRNLYHRFIDEETKDTKGRYFIVEADIKEFTTLKADKKFHVLLNILRHCRRLSEVRGGGLTRYVIT

SEQ ID NO: 892473 - protein, 188 aa, Homo sapiens
PSAFSAPGKPHPPEAKMSSKRAKAKTTKKRPQRATSNVFAMFDQSQIQEFKEAFNMIDQNRDGFIDKEDLHDMLASLGKNPTDEYLEGMMSEAPGPINFTMFLTMFGEKLNGTDPEDVIRNAFACFDEEASGFIHEDHLRELLTTMGDRFTDEEVDEMYREAPIDKKGNFNYVEFTRILKHGAKDKDD

SEQ ID NO: 892474 - protein, 201 aa, Homo sapiens
RPDGRPSSTHPASPSAFSAPGKPHPPEAKMSSKRAKAKTTKKRPQRATSNVFAMFDQSQIQEFKEAFNMIDQNRDGFIDKEDLHDMLASLGKNPTDEYLEGMMSEAPGPINFTMFLTMFGEKLNGTDPEDVIRNAFACFDEEASGFIHEDHLRELLTTMGDRFTDEEVDEMYREAPIDKKGNFNYVEFTRILKHGAKDKDD

SEQ ID NO: 892475 - protein, 192 aa, Homo sapiens
CEPSLRLSPHQGKPHPPEAKMSSKRAKAKTTKKRPQRATSNVFAMFDQSQIQEFKEAFNMIDQNRDGFIDKEDLHDMLASLGKNPTDEYLEGMMSEAPGPINFTMFLTMFGEKLNGTDPEDVIRNAFACFDEEASGFIHEDHLRELLTTMGDRFTDEEVDEMYREAPIDKKGNFNYVEFTRILKHGAKDKDD

SEQ ID NO: 892476 - protein, 188 aa, Homo sapiens; identical to SEQ ID NO: 892473

SEQ ID NO: 892477 - protein, 188 aa, Homo sapiens; identical to SEQ ID NO: 892473

SEQ ID NO: 892478 - protein, 188 aa, Homo sapiens; identical to SEQ ID NO: 892473

SEQ ID NO: 892479 - protein, 188 aa, Homo sapiens; identical to SEQ ID NO: 892473

SEQ ID NO: 892480 - protein, 147 aa, Homo sapiens
RPDGRPSSTHPASPSAFSAPGKPHPPEAKMSSKRAKAKTTKKRPQRATSNVFAMFDQSQIQEFKEAFNMIDQNRDGFIDKEDLHDMLASLGFIHEDHLRELLTTMGDRFTDEEVDEMYREAPIDKKGNFNYVEFTRILKHGAKDKDD

SEQ ID NO: 892481 - protein, 188 aa, Homo sapiens; identical to SEQ ID NO: 892473

SEQ ID NO: 892482 - protein, 188 aa, Homo sapiens; identical to SEQ ID NO: 892473

SEQ ID NO: 892483 - protein, 188 aa, Homo sapiens; identical to SEQ ID NO: 892473

SEQ ID NO: 892484 - protein, 188 aa, Homo sapiens; identical to SEQ ID NO: 892473

SEQ ID NO: 892485 - protein, 147 aa, Homo sapiens; identical to SEQ ID NO: 892480

SEQ ID NO: 892486 - protein, 125 aa, Homo sapiens
MLSSSQNPLPPVSHGAVKGRGGGRGCKLSQLGTEGPGPPGWNTPPATGKNPTDEYLEGMMSEAPGPINFTMFLTMFGEKLNGTDPEDVIRNAFACFDEEASGPWRPLPPLCMQVEQGPGIQCLCP

SEQ ID NO: 892487 - protein, 89 aa, Homo sapiens
CEPSLRLSPHQGKPHPPEAKMSSKRAKAKTTKKRPQRATSNVFAMFDQSQIQEFKEAFNMIDQNRDGFIDKEDLHDMLASLGELGQGQG

SEQ ID NO: 892488 - protein, 230 aa, Homo sapiens
DPTAGPVPRTQRAQAPSPHQELSGTESVNPYCWALLMSPVPDEDSRAQRGKPHPPEAKMSSKRAKAKTTKKRPQRATSNVFAMFDQSQIQEFKEAFNMIDQNRDGFIDKEDLHDMLASLGKNPTDEYLEGMMSEAPGPINFTMFLTMFGEKLNGTDPEDVIRNAFACFDEEASGFIHEDHLRELLTTMGDRFTDEEVDEMYREAPIDKKGNFNYVEFTRILKHGAKDKDD

SEQ ID NO: 892489 - protein, 188 aa, Homo sapiens; identical to SEQ ID NO: 892473

SEQ ID NO: 892490 - protein, 188 aa, Homo sapiens; identical to SEQ ID NO: 892473

SEQ ID NO: 892491 - protein, 182 aa, Homo sapiens
RPDGRPSSTHPASPSAFSAPGKPHPPEAKMSSKRAKAKTTKKRPQRATSNVFAMFDQSQIQEFKEAFNMIDQNRDGFIDKEDMMSEAPGPINFTMFLTMFGEKLNGTDPEDVIRNAFACFDEEASGFIHEDHLRELLTTMGDRFTDEEVDEMYREAPIDKKGNFNYVEFTRILKHGAKDKDD

SEQ ID NO: 892492 - protein, 188 aa, Homo sapiens; identical to SEQ ID NO: 892473

SEQ ID NO: 892493 - protein, 188 aa, Homo sapiens; identical to SEQ ID NO: 892473

SEQ ID NO: 892494 - protein, 188 aa, Homo sapiens; identical to SEQ ID NO: 892473

SEQ ID NO: 892495 - protein, 201 aa, Homo sapiens; identical to SEQ ID NO: 892474

SEQ ID NO: 892496 - protein, 211 aa, Homo sapiens
MDDETKAQGRTGGRDQGDDKKRGRRATGKKKRARRQGGTQREGGGGKGRGERRSRDERQHERRSENTNTESPHRKTTRTRNHRSPEGPNTTPPPERKQGNQHQKEPAESQTRSRDDNEEHNHDGRAAHHSAAAGGKAAAPPTPRRGAAPARARAGTRPGGGRGRTGTGKKGRTGEGAREARGGRQHAKRTADRRGAAETRPDRGKNGDDID

SEQ ID NO: 892497 - protein, 240 aa, Homo sapiens
MCAVAVPEVRFTNVPERTQIDVGRIPLQRLKLKCIFCRHRVKRVSGACIQCSYGRCPASFHVTCAHAAGVLMEPDDWPYVVNITCFRHKVNPNVFTAQSKHSKNESCIATTTSAAAAGATILCELGHKSKACEKVISVGQTVITKHRNTRYYSCRVMAVTSQTFYEVMFDDGSFSRDTFPEDIVSRDCLKLGPPAEGEVVQVKWPDGKLYGAKYFGSNIAHMYQVEFEDGSQIAINTDAA

SEQ ID NO: 892498 - protein, 1109 aa, Homo sapiens
GPVRVRSEQLSPSAEQVSQISQISLGRRPLSSLPPPPSRALAPTRAPDTALTIMEVAEVESPLNPSCKIMTFRPSMEEFREFNKYLAYMESKGAHRAGLAKVIPPKEWKPRQCYDDIDNLLIPAPIQQMVTGQSGLFTQYNIQKKAMTVKEFRQLANSGKYCTPRYLDYEDLERKYWKNLTFVAPIYGADINGSIYDEGVDEWNIARLNTVLDVVEEECGISIEGVNTPYLYFGMWKTTFAWHTEDMDLYSINYLHFGEPKSWYAIPPEHGKRLERLAQGFFPSSSQGCDAFLRHKMTLISPSVLKKYGIPFDKITQEAGEFMITFPYGYHAGFNHGFNCAESTNFATVRWIDYGKVAKLCTCRKDMVKISMDIFVRKFQPDRYQLWKQGKDIYTIDHTKPTPASTPEVKAWLQRRRKVRKASRSFQCARSTSKRPKADEEEEVSDEVDGAEVPNPDSVTDDLKVSEKSEAAVKLRNTEASSEEESSASRMQVEQNLSDHIKLSGNSCLSTSVTEDIKTEDDKAYAYRSVPSISSEADDSIPLSSGYEKPEKSDPSELSWPKSPESCSSVAESNGVLTEGEESDVESHGNGLEPGEIPAVPSGERNSFKVPSIAEGENKTSKSWRHPLSRPPARSPMTLVKQQAPSDEELPEVLSIEEEVEETESWAKPLIHLWQTKSPNFAAEQEYNATVARMKPHCAICTLLMPYHKPDSSNEENDARWETKLDEVVTSEGKTKPLIPEMCFIYSEENIEYSPPNAFLEEDGTSLLISCAKCCVRVHASCYGIPSHEICDGWLCARCKRNAWTAECCLCNLRGGALKQTKNNRWAHVMCAVAVPEVRFTNVPERTQIDVGRIPLQRLKLKCIFCRHRVKRVSGACIQCSYGRCPASFHVTCAHAAGVLMEPDDWPYVVNITCFRHKVNPNVKSKACEKVISVGQTVITKHRNTRYYSCRVMAVTSQTFYEVMFDDGSFSRDTFPEDIVSRDCLKLGPPAEGEVVQVKWPDGKLYGAKYFGSNIAHMYQVEFEDGSQIAMKREDIYTLDEELPKRVKARFSTASDMRFEDTFYGADIIQGERKRQRVLSSRFKNEYVADPVYRTFLKSSFQKKCQKRQ

SEQ ID NO: 892499 - protein, 1100 aa, Homo sapiens
GPVRVRSEQLSPSAEQVSQISQISLGRRPLSSLPPPPSRALAPTRAPDTALTIMEVAEVESPLNPSCKIMTFRPSMEEFREFNKYLAYMESKGAHRAGLAKVIPPKEWKPRQCYDDIDNLLIPAPIQQMVTGQSGLFTQYNIQKKAMTVKEFRQLANSGKYCTPRYLDYEDLERKYWKNLTFVAPIYGADINGSIYDEGVDEWNIARLNTVLDVVEEECGISIEGVNTPYLYFGMWKTTFAWHTEDMDLYSINYLHFGEPKSWYAIPPEHGKRLERLAQGFFPSSSQGCDAFLRHKMTLISPSVLKKYGIPFDKITQEAGEFMITFPYGYHAGFNHGFNCAESTNFATVRWIDYGKVAKLCTCRKDMVKISMDIFVRKFQPDRYQLWKQGKDIYTIDHTKPTPASTPEVKAWLQRRRKVRKASRSFQCARSTSKRPKADEEEEVSDEVDGAEVPNPDSVTDDLKVSEKSEAAVKLRNTEASSEEESSASRMQVEQNLSDHIKLSGNSCLSTSVTEDIKTEDDKAYAYRSVPSISSEADDSIPLSSGYEKPEKSDPSELSWPKSPESCSSVAESNGVLTEGEESDVESHGNGLEPGEIPAVPSGERNSFKVPSIAEGENKTSKSWRHPLSRPPARSPMTLVKQQAPSDEELPEVLSIEEEVEETESWAKPLIHLWQTKSPNFAAEQEYNATVARMKPHCAICTLLMPYHKPDSSNEENDARWETKLDEVVTSEGKTKPLIPEMCFIYSEENIEYSPPNAFLEEDGTSLLISCAKCCVRVHASCYGIPSHEICDGWLCARCKRNAWTAECCLCNLRGGALKQTKNNRWAHVMCAVAVPEVRFTNVPERTQIDVGRIPLQRLKLKCIFCRHRVKRVSGACIQCSYGRCPASFHVTCAHAAGVLMEPDDWPYVVNITCFRHKVNPNVKSKACEKVISVGQTVITKHRNTRYYSCRVMAVTSQTFYEVMFDDGSFSRDTFPEDIVSRDCLKLGPPAEGEVVQVKWPDGKLYGAKYFGSNIAHMYQVEFEDGSQIAMKREDIYTLDEELPKRVKARFVSAGRCHLGTCQVNSLSSPHVSQAQQETYLGFWINSKKSQCNIFLSGTY

SEQ ID NO: 892500 - protein, 282 aa, Homo sapiens
HKIFNEGLGARGKKNGCTAECCLCNLRGGALKQTKNNRWAHVMCAVAVPEVRFTNVPERTQIDVGRIPLQRLKLKCIFCRHRVKRVSGACIQCSYGRCPASFHVTCAHAAGVLMEPDDWPYVVNITCFRHKVNPNVFTAQSKHSKNESCIATTTSAAAAGATILCELGHKSKACEKVISVGQTVITKHRNTRYYSCRVMAVTSQTFYEVMFDDGSFSRDTFPEDIVSRDCLKLGPPAEGEVVQVKWPDGKLYGAKYFGSNIAHMYQVEFEDGSQIAINTDAA

SEQ ID NO: 892501 - protein, 204 aa, Homo sapiens
MKLYTVVLGCYFISFEETKSSSTVKEEKSKACEKVISVGQTVITKHRNTRYYSCRVMAVTSQTFYEVMFDDGSFSRDTFPEDIVSRDCLKLGPPAEGEVVQVKWPDGKLYGAKYFGSNIAHMYQVEFEDGSQIAMKREDIYTLDEELPKRVKARFVSAGRCHLGTCQVNSLSSPHVSQAQQETYLGFWINSKKSQCNIFLSGTY

SEQ ID NO: 892502 - protein, 371 aa, Homo sapiens
CNDSLNLPPLQPDSSNEENDARWETKLDEVVTSEGKTKPLIPEMCFIYSEENIEYSPPNAFLEEDGTSLLISCAKCCVRVHASCYGIPSHEICDGWLCARCKRNAWTAECCLCNLRGGALKQTKNNRWAHVMCAVAVPEVRFTNVPERTQIDVGRIPLQRLKLKCIFCRHRVKRVSGACIQCSYGRCPASFHVTCAHAAGVLMEPDDWPYVVNITCFRHKVNPNVFTAQSKHSKNESCIATTTSAAAAGATILCELGHKSKACEKVISVGQTVITKHRNTRYYSCRVMAVTSQTFYEVMFDDGSFSRDTFPEDIVSRDCLKLGPPAEGEVVQVKWPDGKLYGAKYFGSNIAHMYQVEFEDGSQIAINTDAA

SEQ ID NO: 892503 - protein, 1069 aa, Homo sapiens
GPVRVRSEQLSPSAEQVSQISQISLGRRPLSSLPPPPSRALAPTRAPDTALTIMEVAEVESPLNPSCKIMTFRPSMEEFREFNKYLAYMESKGAHRAGLAKVIPPKEWKPRQCYDDIDNLLIPAPIQQMVTGQSGLFTQYNIQKKAMTVKEFRQLANSGKYCTPRYLDYEDLERKYWKNLTFVAPIYGADINGSIYDEGVDEWNIARLNTVLDVVEEECGISIEGVNTPYLYFGMWKTTFAWHTEDMDLYSINYLHFGEPKSWYAIPPEHGKRLERLAQGFFPSSSQGCDAFLRHKMTLISPSVLKKYGIPFDKITQEAGEFMITFPYGYHAGFNHGFNCAESTNFATVRWIDYGKVAKLCTCRKDMVKISMDIFVRKFQPDRYQLWKQGKDIYTIDHTKPTPASTPEVKAWLQRRRKVRKASRSFQCARSTSKRPKADEEEEVSDEVDGAEVPNPDSVTDDLKVSEKSEAAVKLRNTEASSEEESSASRMQVEQNLSDHIKLSGNSCLSTSVTEDIKTEDDKAYAYRSVPSISSEADDSIPLSSGYEKPEKSDPSELSWPKSPESCSSVAESNGVLTEGEESDVESHGNGLEPGEIPAVPSGERNSFKVPSIAEGENKTSKSWRHPLSRPPARSPMTLVKQQAPSDEELPEVLSIEEEVEETESWAKPLIHLWQTKSPNFAAEQEYNATVARMKPHCAICTLLMPYHKPDSSNEENDARWETKLDEVVTSEGKTKPLIPEMCFIYSEENIEYSPPNAFLEEDGTSLLISCAKCCVRVHASCYGIPSHEICDGWLCARCKRNAWTAECCLCNLRGGALKQTKNNRWAHVMCAVAVPEVRFTNVPERTQIDVGRIPLQRLKLKCIFCRHRVKRVSGACIQCSYGRCPASFHVTCAHAAGVLMEPDDWPYVVNITCFRHKVNPNVFTAQSKHSKNESCIATTTSAAAAGATILCELGHKSKACEKVISVGQTVITKHRNTRYYSCRVMAVTSQTFYEVMFDDGSFSRDTFPEDIVSRDCLKLGPPAEGEVVQVKWPDGKLYGAKYFGSNIAHMYQVEFEDGSQIAINTDAA

SEQ ID NO: 892504 - protein, 372 aa, Homo sapiens
HHETLSEFSPLQPDSSNEENDARWETKLDEVVTSEGKTKPLIPEMCFIYSEENIEYSPPNAFLEEDGTSLLISCAKCCVRVHASCYGIPSHEICDGWLCARCKRNAWTAECCLCNLRGGALKQTKNNRWAHVMCAVAVPEVRFTNVPERTQIDVGRIPLQRLKLKCIFCRHRVKRVSGACIQCSYGRCPASFHVTCAHAAGVLMEPDDWPYVVNITCFRHKVNPNVFTAQSKHSKNESCIATTTSAAAAGATILCELGHKSKACEKVISVGQTVITKHRNTRYYSCRVMAVTSQTFYEVMFDDGSFSRDTFPEDIVSRDCLKLGPPAEGEVVQVKWPDGKLYGAKYFGSNIAHMYQVEFEDGSQIAINTDAA

SEQ ID NO: 892505 - protein, 328 aa, Homo sapiens
MCFIYSEENIEYSPPNAFLEEDGTSLLISCAKCCVRVHASCYGIPSHEICDGWLCARCKRNAWTAECCLCNLRGGALKQTKNNRWAHVMCAVAVPEVRFTNVPERTQIDVGRIPLQRLKLKCIFCRHRVKRVSGACIQCSYGRCPASFHVTCAHAAGVLMEPDDWPYVVNITCFRHKVNPNVFTAQSKHSKNESCIATTTSAAAAGATILCELGHKSKACEKVISVGQTVITKHRNTRYYSCRVMAVTSQTFYEVMFDDGSFSRDTFPEDIVSRDCLKLGPPAEGEVVQVKWPDGKLYGAKYFGSNIAHMYQVEFEDGSQIAINTDAA

SEQ ID NO: 892506 - protein, 444 aa, Homo sapiens
CNDSLNLPPLQPDSSNEENDARWETKLDEVVTSEGKTKPLIPEMCFIYSEENIEYSPPNAFLEEDGTSLLISCAKCCVRVHASCYGIPSHEICDGWLCARCKRNAWTAECCLCNLRGGALKQTKNNRWAHVMCAVAVPEVRFTNVPERTQIDVGRIPLQRLKLKCIFCRHRVKRVSGACIQCSYGRCPASFHVTCAHAAGVLMEPDDWPYVVNITCFRHKVNPNVFTAQSKHSKNESCIATTTSAAAAGATILCELGHKSKACEKVISVGQTVITKHRNTRYYSCRVMAVTSQTFYEVMFDDGSFSRDTFPEDIVSRDCLKLGPPAEGEVVQVKWPDGKLYGAKYFGSNIAHMYQVEFEDGSQIAMKREDIYTLDEELPKRVKARFSTASDMRFEDTFYGADIIQGERKRQRVLSSRFKNEYVADPVYRTFLKSSFQKKCQKRQ

SEQ ID NO: 892507 - protein, 389 aa, Homo sapiens
CNDSLNLPPLQPDSSNEENDARWETKLDEVVTSEGKTKPLIPEMCFIYSEENIEYSPPNAFLEEDGTSLLISCAKCCVRVHASCYGIPSHEICDGWLCARCKRNAWTAECCLCNLRGGALKQTKNNRWAHVMCAVAVPEVRFTNVPERTQIDVGRIPLQRLKLKCIFCRHRVKRVSGACIQCSYGRCPASFHVTCAHAAGVLMEPDDWPYVVNITCFRHKVNPNVFTAQSKHSKNESCIATTTSAAAAGATILCELGHKSKACEKVISVGQTVITKHRNTRYYSCRVMAVTSQTFYEVMFDDGSFSRDTFPEDIVSRDCLKLGPPAEGEVVQVKWPDGKLYGAKYFGSNIAHMYQVEFEDGSQIAINTVGAPEVHTSQVHAHQTVLQQN

SEQ ID NO: 892508 - protein, 435 aa, Homo sapiens
CNDSLNLPPLQPDSSNEENDARWETKLDEVVTSEGKTKPLIPEMCFIYSEENIEYSPPNAFLEEDGTSLLISCAKCCVRVHASCYGIPSHEICDGWLCARCKRNAWTAECCLCNLRGGALKQTKNNRWAHVMCAVAVPEVRFTNVPERTQIDVGRIPLQRLKLKCIFCRHRVKRVSGACIQCSYGRCPASFHVTCAHAAGVLMEPDDWPYVVNITCFRHKVNPNVFTAQSKHSKNESCIATTTSAAAAGATILCELGHKSKACEKVISVGQTVITKHRNTRYYSCRVMAVTSQTFYEVMFDDGSFSRDTFPEDIVSRDCLKLGPPAEGEVVQVKWPDGKLYGAKYFGSNIAHMYQVEFEDGSQIAMKREDIYTLDEELPKRVKARFVSAGRCHLGTCQVNSLSSPHVSQAQQETYLGFWINSKKSQCNIFLSGTY

SEQ ID NO: 892509 - protein, 745 aa, Homo sapiens
GPVRVRSEQLSPSAEQVSQISQISLGRRPLSSLPPPPSRALAPTRAPDTALTIMEVAEVESPLNPSCKIMTFRPSMEEFREFNKYLAYMESKGAHRAGLAKVIPPKEWKPRQCYDDIDNLLIPAPIQQMVTGQSGLFTQYNIQKKAMTVKEFRQLANSGKYCTPRYLDYEDLERKYWKNLTFVAPIYGADINGSIYDEGVDEWNIARLNTVLDVVEEECGISIEGVNTPYLYFGMWKTTFAWHTEDMDLYSINYLHFGEPKSWYAIPPEHGKRLERLAQGFFPSSSQGCDAFLRHKMTLISPSVLKKYGIPFDKITQEAGEFMITFPYGYHAGFNHGFNCAESTNFATVRWIDYGKVAKLCTCRKDMVKISMDIFVRKFQPDRYQLWKQGKDIYTIDHTKPTPASTPEVKAWLQRRRKVRKASRSFQCARSTSKRPKADEEEEVSDEVDGAEVPNPDSVTDDLKVSEKSEAAVKLRNTEASSEEESSASRMQVEQNLSDHIKLSGNSCLSTSVTEDIKTEDDKAYAYRSVPSISSEADDSIPLSSGYEKPEKSDPSELSWPKSPESCSSVAESNGVLTEGEESDVESHGNGLEPGEIPAVPSGERNSFKVPSIAEGENKTSKSWRHPLSRPPARSPMTLVKQQAPSDEELPEVLSIEEEVEETESWAKPLIHLWQTKSPNFAAEQEYNATVARMKPHCAICTLLMPYHKPDSSNEENDARWETKLDEVVTSEGKTKPLIFIVKKI

SEQ ID NO: 892510 - protein, 745 aa, Homo sapiens; identical to SEQ ID NO: 892509

SEQ ID NO: 892511 - protein, 817 aa, Homo sapiens
GPVRVRSEQLSPSAEQVSQISQISLGRRPLSSLPPPPSRALAPTRAPDTALTIMEVAEVESPLNPSCKIMTFRPSMEEFREFNKYLAYMESKGAHRAGLAKVIPPKEWKPRQCYDDIDNLLIPAPIQQMVTGQSGLFTQYNIQKKAMTVKEFRQLANSGKYCTPRYLDYEDLERKYWKNLTFVAPIYGADINGSIYDEGVDEWNIARLNTVLDVVEEECGISIEGVNTPYLYFGMWKTTFAWHTEDMDLYSINYLHFGEPKSWYAIPPEHGKRLERLAQGFFPSSSQGCDAFLRHKMTLISPSVLKKYGIPFDKITQEAGEFMITFPYGYHAGFNHGFNCAESTNFATVRWIDYGKVAKLCTCRKDMVKISMDIFVRKFQPDRYQLWKQGKDIYTIDHTKPTPASTPEVKAWLQRRRKVRKASRSFQCARSTSKRPKADEEEEVSDEVDGAEVPNPDSVTDDLKVSEKSEAAVKLRNTEASSEEESSASRMQVEQNLSDHIKLSGNSCLSTSVTEDIKTEDDKAYAYRSVPSISSEADDSIPLSSGYEKPEKSDPSELSWPKSPESCSSVAESNGVLTEGEESDVESHGNGLEPGEIPAVPSGERNSFKVPSIAEGENKTSKSWRHPLSRPPARSPMTLVKQQAPSDEELPEVLSIEEEVEETESWAKPLIHLWQTKSPNFAAEQEYNATVARMKPHCAICTLLMPYHKPDSSNEENDARWETKLDEVVTSEGKTKPLIPEMCFIYSEENIEYSPPNAFLEEDGTSLLISCAKCCVRVHASKWIYNSSITGFSAFHIIFISHFFGTCQICCMDYWHS

SEQ ID NO: 892512 - protein, 630 aa, Homo sapiens
GPVRVRSEQLSPSAEQVSQISQISLGRRPLSSLPPPPSRALAPTRAPDTALTIMEVAEVESPLNPSCKIMTFRPSMEEFREFNKYLAYMESKGAHRAGLAKVIPPKEWKPRQCYDDIDNLLIPAPIQQMVTGQSGLFTQYNIQKKAMTVKEFRQLANSGKYCTPRYLDYEDLERKYWKNLTFVAPIYGADINGSIYDEGVDEWNIARLNTVLDVVEEECGISIEGVNTPYLYFGMWKTTFAWHTEDMDLYSINYLHFGEPKSWYAIPPEHGKRLERLAQGFFPSSSQGCDAFLRHKMTLISPSVLKKYGIPFDKITQEAGEFMITFPYGYHAGFNHGFNCAESTNFATVRWIDYGKVAKLCTCRKDMVKISMDIFVRKFQPDRYQLWKQGKDIYTIDHTKPTPASTPEVKAWLQRRRKVRKASRSFQCARSTSKRPKADEEEEVSDEVDGAEVPNPDSVTDDLKVSEKSEAAVKLRNTEASSEEESSASRMQVEQNLSDHIKLSGNSCLSTSVTEDIKTEDDKAYAYRSVPSISSEADDSIPLSSGYEKPEKSDPSELSWPKSPESCSSVAESNGVLTEGEESDVESHGNGLEPGEIPAVPSGERNSFKVPSVCGNIHFLPYSLYGESTF

SEQ ID NO: 892513 - protein, 219 aa, Homo sapiens
GPVRVRSEQLSPSAEQVSQISQISLGRRPLSSLPPPPSRALAPTRAPDTALTIMEVAEVESPLNPSCKIMTFRPSMEEFREFNKYLAYMESKGAHRAGLAKVIPPKEWKPRQCYDDIDNLLIPAPIQQMVTGQSGLFTQYNIQKKAMTVKEFRQLANSGKYCTPRYLDYEDLERKYWKNLTFVAPIYGADINGSIYDEGTFIFTVSFVKIIGCDSFVTI

SEQ ID NO: 892514 - protein, 114 aa, Homo sapiens
ASHPPPRREGEARRSDRAAGVLCACAANSCHLVRNKSPKFPKSPWAGGHCLLFLLHRVVLSPQPARQVTAFPESGGQGGGRVRRGLPGTAPLRVGHGGAGVRASGDAGAETLRP

SEQ ID NO: 892515 - protein, 384 aa, Homo sapiens
GDCEGLQTGERAFELHDSLNPPRLQPDSSNEENDARWETKLDEVVTSEGKTKPLIPEMCFIYSEENIEYSPPNAFLEEDGTSLLISCAKCCVRVHASCYGIPSHEICDGWLCARCKRNAWTAECCLCNLRGGALKQTKNNRWAHVMCAVAVPEVRFTNVPERTQIDVGRIPLQRLKLKCIFCRHRVKRVSGACIQCSYGRCPASFHVTCAHAAGVLMEPDDWPYVVNITCFRHKVNPNVFTAQSKHSKNESCIATTTSAAAAGATILCELGHKSKACEKVISVGQTVITKHRNTRYYSCRVMAVTSQTFYEVMFDDGSFSRDTFPEDIVSRDCLKLGPPAEGEVVQVKWPDGKLYGAKYFGSNIAHMYQVEFEDGSQIAINTDA

SEQ ID NO: 892516 - protein, 885 aa, Homo sapiens
PHTTCITHLSIYNEGVDEWNIARLNTVLDVVEEECGISIEGVNTPYLYFGMWKTTFAWHTEDMDLYSINYLHFGEPKSWYAIPPEHGKRLERLAQGFFPSSSQGCDAFLRHKMTLISPSVLKKYGIPFDKITQEAGEFMITFPYGYHAGFNHGFNCAESTNFATVRWIDYGKVAKLCTCRKDMVKISMDIFVRKFQPDRYQLWKQGKDIYTIDHTKPTPASTPEVKAWLQRRRKVRKASRSFQCARSTSKRPKADEEEEVSDEVDGAEVPNPDSVTDDLKVSEKSEAAVKLRNTEASSEEESSASRMQVEQNLSDHIKLSGNSCLSTSVTEDIKTEDDKAYAYRSVPSISSEADDSIPLSSGYEKPEKSDPSELSWPKSPESCSSVAESNGVLTEGEESDVESHGNGLEPGEIPAVPSGERNSFKVPSIAEGENKTSKSWRHPLSRPPARSPMTLVKQQAPSDEELPEVLSIEEEVEETESWAKPLIHLWQTKSPNFAAEQEYNATVARMKPHCAICTLLMPYHKPDSSNEENDARWETKLDEVVTSEGKTKPLIPEMCFIYSEENIEYSPPNAFLEEDGTSLLISCAKCCVRVHASCYGIPSHEICDGWLCARCKRNAWTAECCLCNLRGGALKQTKNNRWAHVMCAVAVPEVRFTNVPERTQIDVGRIPLQRLKLKCIFCRHRVKRVSGACIQCSYGRCPASFHVTCAHAAGVLMEPDDWPYVVNITCFRHKVNPNVFTAQSKHSKNESCIATTTSAAAAGATILCELGHKSKACEKVISVGQTVITKHRNTRYYSCRVMAVTSQTFYEVMFDDGSFSRDTFPEDIVSRDCLKLGPPAEGEVVQVKWPDGKLYGAKYFGSNIAHMYQVEFEDGSQIAINTDAA

SEQ ID NO: 892517 - protein, 444 aa, Homo sapiens; identical to SEQ ID NO: 892506

SEQ ID NO: 892518 - protein, 372 aa, Homo sapiens
CNDSLNLPPLQPDSSNEENDARWETKLDEVVTSEGKTKPLIPEMCFIYSEENIEYSPPNAFLEEDGTSLLISCAKCCVRVHASCYGIPSHEICDGWLCARCKRNAWTAECCLCNLRGGALKQTKNNRWAHVMCAVAVPEVRFTNVPERTQIDVGRIPLQRLKLKCIFCRHRVKRVSGACIQCSYGRCPASFHVTCAHAAGVLMEPDDWPYVVNITCFRHKVNPNVFTAQSKHSKNESCIATTTSAAAAGATILCELGHKSKACEKVISVGQTVITKHRNTRYYSCRVMAVTSQTFYEVMFDDGSFSRDTFPEDIVSRDCLKLGPPAEGEVVQVKWPDGKLYGAKYFGSNIAHMYQVEFEDGPQRTQPSDKRE

SEQ ID NO: 892519 - protein, 256 aa, Homo sapiens
CNDSLNLPPLQPDSSNEENDARWETKLDEVVTSEGKTKPLIPEMCFIYSEENIEYSPPNAFLEEDGTSLLISCAKCCVRVHASCYGIPSHEICDGWLCARCKRNAWTAECCLCNLRGGALKQTKNNRWAHVMCAVAVPEVRFTNVPERTQIDVGRIPLQRLKLKCIFCRHRVKRVSGACIQCSYGRCPASFHVTCAHAAGVLMEPDDWPYVVNITCFRHKVNPNVGKMCPPFLSAKTVSGFSPVLDYLPDIMCFIL

SEQ ID NO: 892520 - protein, 421 aa, Homo sapiens
GPVRVRSEQLSPSAEQVSQISQISLGRRPLSSLPPPPSRALAPTRAPDTALTIMEVAEVESPLNPSCKIMTFRPSMEEFREFNKYLAYMESKGAHRAGLAKVIPPKEWKPRQCYDDIDNLLIPAPIQQMVTGQSGLFTQYNIQKKAMTVKEFRQLANSGKYCTPRYLDYEDLERKYWKNLTFVAPIYGADINGSIYDEGVDEWNIARLNTVLDVVEEECGISIEGVNTPYLYFGMWKTTFAWHTEDMDLYSINYLHFGEPKSWYAIPPEHGKRLERLAQGFFPSSSQGCDAFLRHKMTLISPSVLKKYGIPFDKITQEAGEFMITFPYGYHAGFNHGFNCAESTNFATVRWIDYGKVAKLVSYASKIKQKLNVYSGYFSRNPTILCSIYLFFLTGAMCLSPQQFTSGSIHLFYIANITNFS

SEQ ID NO: 892521 - protein, 403 aa, Homo sapiens
GPVRVRSEQLSPSAEQVSQISQISLGRRPLSSLPPPPSRALAPTRAPDTALTIMEVAEVESPLNPSCKIMTFRPSMEEFREFNKYLAYMESKGAHRAGLAKVIPPKEWKPRQCYDDIDNLLIPAPIQQMVTGQSGLFTQYNIQKKAMTVKEFRQLANSGKYCTPRYLDYEDLERKYWKNLTFVAPIYGADINGSIYDEGVDEWNIARLNTVLDVVEEECGISIEGVNTPYLYFGMWKTTFAWHTEDMDLYSINYLHFGEPKSWYAIPPEHGKRLERLAQGFFPSSSQGCDAFLRHKMTLISPSVLKKYGIPFDKITQEAGEFMITFPYGYHAGFNHGFNCAESTNFATVRWIDYGKVAKLVSYASKIKHIYLFFLTGAMCLSPQQFTSGSIHLFYIANITNFS

SEQ ID NO: 892522 - protein, 204 aa, Homo sapiens
GPVRVRSEQLSPSAEQVSQISQISLGRRPLSSLPPPPSRALAPTRAPDTALTIMEVAEVESPLNPSCKIMTFRPSMEEFREFNKYLAYMESKGAHRAGLAKVIPPKEWKPRQCYDDIDNLLIPAPIQQMVTGQSGLFTQYNIQKKAMTVKEFRQLANSGKYCTPRYLDYEDLERKYWKNLTFVAPIYGADINGSIYDEVSSCAL

SEQ ID NO: 892523 - protein, 112 aa, Homo sapiens
MTGLLGFGRSCILAGQTGPVVSGAQVSSWRERQPCSGSRGPSHILGTDANAGTADHKGEQQEAPSKHPQMALDISHILRNMSCSGRAKASTLPCRNSSDYVATILELHALIV

SEQ ID NO: 892524 - protein, 109 aa, Homo sapiens
KLGLVSFPGFRKKPTRSVLQNETFVSRSTADCKWLPFVAVSILSILRLDWFLLLALPCPTDHKGEQQEAPSKHPQMALDISHILRNILITSCWAKAQQPDFRNILIIFY

SEQ ID NO: 892525 - protein, 152 aa, Homo sapiens
KLGLVSFPGFRKKPTRSVLQNETFVSRSTADCKWLPFVAVSILSILRLDWFLLLALPCPTDHKGEQQEAPSKHPQMALDISHILRNMSCSGRAKASSKACGAGGSQARWGNPEPWGLPMGIGRSQGRVRGSTGGVRESPRALLAQGAVNTMD

SEQ ID NO: 892526 - protein, 152 aa, Homo sapiens; identical to SEQ ID NO: 892525

SEQ ID NO: 892527 - protein, 152 aa, Homo sapiens; identical to SEQ ID NO: 892525

SEQ ID NO: 892528 - protein, 152 aa, Homo sapiens; identical to SEQ ID NO: 892525

SEQ ID NO: 892529 - protein, 282 aa, Homo sapiens
VAGERRAGMAEQWELDEEGIRRLGALTLEQPETGSCYVAQAGLELLDSSNPVSASPVTETTELVESLSLQGSYAGKIHSIGDAFRNFKNLRSLDLSRNLITSLKGIQYLCSLQDLNLYYNNIPSLVEVSRLQPLPFLKELDLRLNPVVRKDTDYRLFAVYTLQTLEKLDDRTVREGERKAAKLHFSQLGNSENFLLEVEKSSREKTMKNCVTGESSASKVSANVDSRIEMDSNKGLFIPFPNREIKDSLSTSATQGNGTRDQKLDTFPLGTQGNVFTLLLIC

SEQ ID NO: 892530 - protein, 762 aa, Homo sapiens
VAGERRAGMAEQWELDEEGIRRLGALTLEQPELVESLSLQGSYAGKIHSIGDAFRNFKNLRSLDLSRNLITSLKGIQYLCSLQDLNLYYNNIPSLVEVSRLQPLPFLKELDLRLNPVVRKDTDYRLFAVYTLQTLEKLDDRTVREGERKAAKLHFSQLGNSENFLLEVEKSSREKTMKNCVTGESSASKVSANVDSRIEMDSNKGLFIPFPNREIKDSLSTSATQGNGTRDQKLDTFPLGTQTQEVARREMPSDNHQEDEFRHYSPRQSTVRSPEKMTREGYQVSFLDNKSSGSSPEKELIPKPDTFHLTHDASLSKCLDVGDSSQIHPYQLPSDVGLENYDSCYSQTLSLHGSLGKRPQRSKNYQEYSIKPSNDIKTTASHSCGDLLTSLSNPDSSTGRLLKLSSDLYATTHFNSDPAVLVNVEQQLSTSLDDLTPAHGSVPNNAVLGNRTTPLRTLLLSPGTSEHRKIFTKRSLSPSKRGFKWKDNILANLNLKHGFQDATGSEPLSSDLGSLHGLAGNHSPPISARTPHVATVLRQLLELVDKHWNGSGSLLLNKKFLGPARDLLLSLVVPAPSQPRCCSHPEDTMKAFCRRELELKEAAQLVPNDMESLKQKLVRVLEENLILSEKIQQLEEGAAISIVSGQQSHTYDDLLHKNQQLTMQVACLNQELAQLKKLEKTVAILHESQRSLVVTNEYLLQQLNKEPKGYSGKALLPPEKGHHLGRSSPFGKSTLSSSSPVAHETGQYLIQSVLDAAPEPGL

SEQ ID NO: 892531 - protein, 365 aa, Homo sapiens [sequence omitted]

SEQ ID NO: 892532 - protein, 602 aa, Homo sapiens
VAGERRAGMAEQWELDEEGIRRLGALTLEQPELVESLSLQGSYAGKIHSIGDAFRNFKNLRSLDLSRNLITSLKGIQYLCSLQDLNLYYNNIPSLVEVSRLQPLPFLKELDLRLNPVVRKDTDYRLFAVYTLQTLEKLDDRTVREGERKAAKLHFSQLGNSENFLLEVEKSSREKTMKNCVTGESSASKVSANVDSRIEMDSNKGLFIPFPNREIKDSLSTSATQGNGTRDQKLDTFPLGTQTQEVARREMPSDNHQEDEFRHYSPRQSTVRSPEKMTREGYQVSFLDNKSSGSSPEKELIPKPDTFHLTHDASLSKCLDVGDSSQIHPYQLPSDVGLENYDSCYSQTLSLHGSLGKRPQRSKNYQEYSIKPSNDIKTTASHSCGDLLTSLSNPDSSTGRLLKLSSDLYATTHFNSDPAVLVNVEQQLSTSLDDLTPAHGSVPNNAVLGNRTTPLRTLLLSPGTSEHRKIFTKRSLSPSKRGFKWKDNILANLNLKHGFQDATGSEPLSSDLGSLHGLAGNHSPPISARTPHVATVLRQLLELVDKHWNGSGSLLLNKKFLGKFEAKTGQSAGGKPHFVRKNSTVGGRCCHLNCEWATVTYL

SEQ ID NO: 892533 - protein, 437 aa, Homo sapiens
MTREGYQVSFLDNKSSGSSPEKELIPKPDTFHLTHDASLSKCLDVGDSSQIHPYQLPSDVGLENYDSCYSQTLSLHGSLGKRPQRSKNYQEYSIKPSNDIKTTASHSCGDLLTSLSNPDSSTGRLLKLSSDLYATTHFNSDPAVLVNVEQQLSTSLDDLTPAHGSVPNNAVLGNRTTPLRTLLLSPGTSEHRKIFTKRSLSPSKRGFKWKDNILANLNLKHGFQDATGSELSLVTWVVCTVWLETTVPPSLPEPPMWPLSSDSSWSLWISTGMAPAPSSSTRSFSESLKQKLVRVLEENLILSEKIQQLEEGAAISIVSGQQSHTYDDLLHKNQQLTMQVACLNQELAQLKKLEKTVAILHESQRSLVVTNEYLLQQLNKEPKGYSGKALLPPEKGHHLGRSSPFGKSTLSSSSPVAHETGQYLIQSVLDAAPEPGL

SEQ ID NO: 892534 - protein, 486 aa, Homo sapiens
MLRPRFLPPDDRTVREGERKAAKLHFSQLGNSENFLLEVEKSSREKTMKNCVTGESSASKVSANVDSRIEMDSNKGLFIPFPNREIKDSLSTSATQGNGTRDQKLDTFPLGTQTQEVARREMPSDNHQEDDLYATTHFNSDPAVLVNVEQQLSTSLDDLTPAHGSVPNNAVLGNRTTPLRTLLLSPGTSEHRKIFTKRSLSPSKRGFKWKDNILANLNLKHGFQDATGSEPLSSDLGSLHGLAGNHSPPISARTPHVATVLRQLLELVDKHWNGSGSLLLNKKFLGPARDLLLSLVVPAPSQPRCCSHPEDTMKAFCRRELELKEAAQLVPNDMESLKQKLVRVLEENLILSEKIQQLEEGAAISIVSGQQSHTYDDLLHKNQQLTMQVACLNQELAQLKKLEKTVAILHESQRSLVVTNEYLLQQLNKEPKGYSGKALLPPEKGHHLGRSSPFGKSTLSSSSPVAHETGQYLIQSVLDAAPEPGL

SEQ ID NO: 892535 - protein, 446 aa, Homo sapiens
VAGERRAGMAEQWELDEEGIRRLGALTLEQPDSNKGLFIPFPNREIKDSLSTSATQGNGTRDQKLDTFPLGTQTQEVARREMPSDNHQEDDLYATTHFNSDPAVLVNVEQQLSTSLDDLTPAHGSVPNNAVLGNRTTPLRTLLLSPGTSEHRKIFTKRSLSPSKRGFKWKDNILANLNLKHGFQDATGSEPLSSDLGSLHGLAGNHSPPISARTPHVATVLRQLLELVDKHWNGSGSLLLNKKFLGPARDLLLSLVVPAPSQPRCCSHPEDTMKAFCRRELELKEAAQLVPNDMESLKQKLVRVLEENLILSEKIQQLEEGAAISIVSGQQSHTYDDLLHKNQQLTMQVACLNQELAQLKKLEKTVAILHESQRSLVVTNEYLLQQLNKEPKGYSGKALLPPEKGHHLGRSSPFGKSTLSSSSPVAHETGQYLIQSVLDAAPEPGL

SEQ ID NO: 892536 - protein, 187 aa, Homo sapiens
MVVVGGGGVGKSALTIQFIQSYFVSDYDPTIEDSYTKICSVDGIPARLDILDTAGQEEFGAMREQYMRAGHGFLLVFAINDRQSFNEVGKLFTQILRVKDRDDFPVVLVGNKADLESQRQVPRSEASAFGASHHVAYFEASAKLRLNVDEAFEQLVRAVRKYQEQELPPSPPSAPRKKGGGCPCVLL

SEQ ID NO: 892537 - protein, 218 aa, Homo sapiens
MSSGAASGTGRGRPRGGGPGPGDPPPSETHKLVVVGGGGVGKSALTIQFIQSYFVSDYDPTIEDSYTKICSVDGIPARLDILDTAGQEEFGAMREQYMRAGHGFLLVFAINDRQSFNEVGKLFTQILRVKDRDDFPVVLVGNKADLESQRQVPRSEASAFGASHHVAYFEASAKLRLNVDEAFEQLVRAVRKYQEQELPPSPPSAPRKKGGGCPCVLL

SEQ ID NO: 892538 - protein, 218 aa, Homo sapiens; identical to SEQ ID NO: 892537

SEQ ID NO: 892539 - protein, 194 aa, Homo sapiens
HFDLAERLTESRVLVVGKSALTIQFIQSYFVSDYDPTIEDSYTKICSVDGIPARLDILDTAGQEEFGAMREQYMRAGHGFLLVFAINDRQSFNEVGKLFTQILRVKDRDDFPVVLVGNKADLESQRQVPRSEASAFGASHHVAYFEASAKLRLNVDEAFEQLVRAVRKYQEQELPPSPPSAPRKKGGGCPCVLL

SEQ ID NO: 892540 - protein, 146 aa, Homo sapiens
MAPLPVSAVLDTAGQEEFGAMREQYMRAGHGFLLVFAINDRQSFNEVGKLFTQILRVKDRDDFPVVLVGNKADLESQRQVPRSEASAFGASHHVAYFEASAKLRLNVDEAFEQLVRAVRKYQEQELPPSPPSAPRKKGGGCPCVLL

SEQ ID NO: 892541 - protein, 218 aa, Homo sapiens; identical to SEQ ID NO: 892537

SEQ ID NO: 892542 - protein, 83 aa, Homo sapiens
SSSARVRVGNLESQRLVPRSEASAFGASHHVAYFEASAKLRLNVDEAFEQLVRAVRKYQEQELPPSPPSAPRKKGGGCPCVLL

SEQ ID NO: 892543 - protein, 314 aa, Homo sapiens
MLVSGRRRLLTVLLQAQKWPFQPSRDMRLVQFRAPHLVGPHLGLETGNGGGVINLNAFDPTLPKTMTQFLEQGEATLSVARRALAAQLPVLPRSEVTFLAPVTRPDKVVCVGMNYVDHCKEQNVPVPKEPIIFSKFASSIVGPYDEVVLPPQSQEVDWEVELAVVIGKKGKHIKATDAMAHVAGFTVAHDVSARDWQMRRNGKQWLLGKTFDTFCPLGPALVTKDSVADPHNLKICCRVNGEVVQSGNTNQMVFKTEDLIAWVSQFVTFYPGDVILTGTPPGVGVFRKPPVFLKKGDEVQCEIEELGVIINKVV

SEQ ID NO: 892544 - protein, 314 aa, Homo sapiens; identical to SEQ ID NO: 892543

SEQ ID NO: 892545 - protein, 314 aa, Homo sapiens; identical to SEQ ID NO: 892543

SEQ ID NO: 892546 - protein, 314 aa, Homo sapiens; identical to SEQ ID NO: 892543

SEQ ID NO: 892547 - protein, 296 aa, Homo sapiens
MLVSGRRRLLTVLLQAQKWPFQPSRDMRLVQFRAPHLVGPHLGLETGNGGGVINLNAFDPTLPKTMTQFLEQGEATLSVARRALAAQLPVLPRSEVTFLAPVTRPDKVVCVGMNYVDHCKEQNVPVPKEPIIFSKFASSIVGPYDEVVLPPQSQEVDWEVELAVVIGKKGKHIKATDAMAHVAGFTVAHDVSARDWQMRRNGKQWLLGKTFDTFCPLGPALVTKDSVADPHNLKICCRVNGEVVQSGNTNQMVFKTEDLIAWVSQFVTFYPGDVILTGTPPGVGVFRKPPVFLKVG

SEQ ID NO: 892548 - protein, 265 aa, Homo sapiens
MLVSGRRRLLTVLLQAQKWPFQPSRDMRLVQFRAPHLVGPHLGLETGNGGGVINLNAFDPTLPKTMTQFLEQGEATLSVARRALAAQLPVLPRSEVTFLAPVTRPDKVVCVGMNYVDHCKEQNVPVPKEPIIFSKFASSIVGPYDEVVLPPQSQEVDWEVELAVVIGKKGKHIKATDAMAHVAGFTVAHDVSARDWQMRRNGKQWLLGKTFDTFCPLGPALVTKDSVADPHNLKICCRVNGEVVQSGNTNQMVFKTEDLIAWVSQ

SEQ ID NO: 892549 - protein, 178 aa, Homo sapiens
MLVSGRRRLLTVLLQAQKWPFQPSRDMRLVQFRAPHLVGPHLGLETGNGGGVINLNAFDPTLPKTMTQFLEQGEATLSVARRALAAQLPVLPRSEVTFLAPVTRPDKVVCVGMNYVDHCKEQNVPVPKEPIIFSKFASSIVGPYDEVVLPPQSQEVDWEVELAVVIGKKGKHIKIHTT

SEQ ID NO: 892550 - protein, 265 aa, Homo sapiens; identical to SEQ ID NO: 892548

SEQ ID NO: 892551 - protein, 269 aa, Homo sapiens
VPAEMTVGNLNAFDPTLPKTMTQFLEQGEATLSVARRALAAQLPVLPRSEVTFLAPVTRPDKVVCVGMNYVDHCKEQNVPVPKEPIIFSKFASSIVGPYDEVVLPPQSQEVDWEVELAVVIGKKGKHIKATDAMAHVAGFTVAHDVSARDWQMRRNGKQWLLGKTFDTFCPLGPALVTKDSVADPHNLKICCRVNGEVVQSGNTNQMVFKTEDLIAWVSQFVTFYPGDVILTGTPPGVGVFRKPPVFLKKGDEVQCEIEELGVIINKVV

SEQ ID NO: 892552 - protein, 178 aa, Homo sapiens; identical to SEQ ID NO: 892549

SEQ ID NO: 892553 - protein, 290 aa, Homo sapiens
MLVSGRRRLLTVLLQAQKWPFQPSRDMRLVQFRAPHLVGPHLGLETGNGGGVINLNAFDPTLPKTMTQFLEQGEATLSVARRALAAQLPVLPRSEVTFLAPVTRPDKVVCVGMNYVDHCKEQNVPVPKEPIIFSKFASSIVGPYDEVVLPPQSQEVDWEVELAVVIGKKGKHIKATDAMAHVAGFTVAHDVSARDWQMRRNGKQWLLGKTFDTFCPLGPALVTKDSVADPHNLKICCRVNGEVVQSGNTNQMVFKTEDLIAWVSQGCHPNWDPPRCRCIQETSCLSQEGG

SEQ ID NO: 892554 - protein, 202 aa, Homo sapiens [sequence omitted]

SEQ ID NO: 892555 - protein, 185 aa, Homo sapiens
MVCSLSAWTVGPEATAAHCSSPTLQEVDWEVELAVVIGKKGKHIKATDAMAHVAGFTVAHDVSARDWQMRRNGKQWLLGKTFDTFCPLGPALVTKDSVADPHNLKICCRVNGEVVQSGNTNQMVFKTEDLIAWVSQFVTFYPGDVILTGTPPGVGVFRKPPVFLKKGDEVQCEIEELGVIINKVV

SEQ ID NO: 892556 - protein, 178 aa, Homo sapiens; identical to SEQ ID NO: 892549

SEQ ID NO: 892557 - protein, 193 aa, Homo sapiens
VISSGLGFIVYTGPVLHSLDRRRLLTVLLQAQKWPFQPSRDMRLVQFRAPHLVGPHLGLETGNGGGVINLNAFDPTLPKTMTQFLEQGEATLSVARRALAAQLPVLPRSEVTFLAPVTRPDKVVCVGMNYVDHCKEQNVPVPKEPIIFSKFASSIVGPYDEVVLPPQSQEVDWEVELAVVIGKKGKHIKIHTT

SEQ ID NO: 892558 - protein, 172 aa, Homo sapiens
MLVSGRRRLLTVLLQAQKWPFQPSRDMRLVQFRAPHLVGPHLGLETGNGGGVINLNAFDPTLPKTMTQFLEQGEATLSVARRALAAQLPVLPRSEVTFLAPVTRPDKVVCVGMNYVDHCKEQNVPVPKEPIIFSKFASSIVGPYDEVVLPPQSQVSVSPLPSLVTGPITRAF

SEQ ID NO: 892559 - protein, 268 aa, Homo sapiens
MLVSGRRRLLTVLLQAQKWPFQPSRDMRLVQFRAPHLVGPHLGLETGNGGGVINLNAFDPTLPKTMTQFLEQGEATLSVARRALAAQLPVLPRSEVTFLAPVTRPDKVVCVGMNYVDHCKEQNVPVPCTGPAHRMRASAPTQPSPGKGPVTGVDRCQPCKPPLLGRREKDRALFNKFVRSKQKKKGTNTQPQANQTHTKGNKKRQNTREHTPQPTRAPYADKKPRASTRPREGRQKRKRNNTQTTKRGAPSAKEQRTTDTEKEHTTHS

SEQ ID NO: 892560 - protein, 134 aa, Homo sapiens
MRASAPTQPSPGKGPVTGVDRCQPCKPPLLGRREKDRALFNKFVRSKQKKKGTNTQPQANQTHTKGNKKRQNTREHTPQPTRAPYADKKPRASTRPREGRQKRKRNNTQTTKRGAPSAKEQRTTDTEKEHTTHS

SEQ ID NO: 892561 - protein, 191 aa, Homo sapiens
SVSSCSLYQDHTIVREAWSGPRPQSSPCGLPQEGALDLLKKLHSCQMSIQLLQTTRIGVAVNGVRKHCSDKEVVSLAKVLIKNWKRLLDSPGPPKGEKGEEREKAKKKEKGLECSDWKPEAGLSPPRKKTRRPQNQERLCGLQVFCLLLSKKTIGGKVKETTAFSIPVSYSACVPFSVFMEEAQGRGKEGR

SEQ ID NO: 892562 - protein, 47 aa, Homo sapiens
MERRELTLVTSSDSNSVYIISFKPFILGRKILVLSPAVPPLGVFFGS

SEQ ID NO: 892563 - protein, 229 aa, Homo sapiens
PCQFSSFRRDSVDSKSSASSSPKRPSVERSNSSKSKAESPKTPSSPLTPTFASSMCLLAPCYLTGDSVRDKCVEMLSAALKADDDYKDYGVNCDKMASEIEDHIYQELKSTDMKYRNRVRSRISNLKDPRNPGLRRNVLSGAISAGLIAKMTAEEMASDELRELRNAMTQEAIREHQMAKTGGTTTDLFQCSKCKKKNCTYNQVQTRSADEPMTTFVLCNECGNRWKFC

SEQ ID NO: 892564 - protein, 385 aa, Homo sapiens
CVFGARAGCAPSAFAPPAPEALLLPLCPSPRRASRANMGQEEELLRIAKKLEKMVARKNTEGALDLLKKLHSCQMSIQLLQTTRIGVAVNGVRKHCSDKEVVSLAKVLIKNWKRLLDSPGPPKGEKGEEREKAKKKEKGLECSDWKPEAGLSPPRKKREDPKTRRDSVDSKSSASSSPKRPSVERSNSSKSKAESPKTPSSPLTPTFASSMCLLAPCYLTGDSVRDKCVEMLSAALKADDDYKDYGVNCDKMASEIEDHIYQELKSTDMKYRNRVRSRISNLKDPRNPGLRRNVLSGAISAGLIAKMTAEEMASDELRELRNAMTQEAIREHQMAKTGGTTTDLFQCSKCKKKNCTYNQVQTRSADEPMTTFVLCNECGNRWKFC

SEQ ID NO: 892565 - protein, 403 aa, Homo sapiens
CVFGARAGCAPSAFAPPAPEALLLPLCPSPRRASRANMGQEEELLRIAKKLEKMVARKNTEGALDLLKKLHSCQMSIQLLQTTRIGVAVNGVRKHCSDKEVVSLAKVLIKNWKRLLDSPGPPKGEKGEEREKAKKKEKGLECSDWKPEAGLSPPRKKREDPKTRRDSVDSKSSASSSPKRPSVERSNSSKSKAESPKTPSSPLTPTFASSMCLLAPCYLTGDSVRDKCVEMLSAALKADDDYKDYGVNCDKMASEIEDHIYQELKSTDMKYRNRVRSRISNLKDPRNPGLRRNVLSGAISAGLIAKMTAEDEGSGSDEDENDEGNDEDYSSPASEGGCKKKKSKVPSRNSADDEELTNDSLTLSQSKSNEDSLILEKSQNWSSPKMDHILICCVCWADDSEDR

SEQ ID NO: 892566 - protein, 101 aa, Homo sapiens
CVFGARAGCAPSAFAPPAPEALLLPLCPSPRRASRANMGQEEELLRIAKKLEKMVARKNTEGALDLLKKLHSCQMSIQLLQTTRIGVAVNGVRKHCSGNGQ

SEQ ID NO: 892567 - protein, 199 aa, Homo sapiens
CVFGARAGCAPSAFAPPAPEALLLPLCPSPRRASRANMGQEEELLRIAKKLEKMVARKNTEGALDLLKKLHSCQMSIQLLQTTRIGVAVNGVRKHCSDKEVVSLAKVLIKNWKRLLDSPGPPKGEKGEEREKAKKKEKGLECSDWKPEAGLSPPRKKTRRPQNQERLCGLQVFCLLLSKKTIGGKIKQQQIKSGEPQNT

SEQ ID NO: 892568 - protein, 385 aa, Homo sapiens; identical to SEQ ID NO: 892564

SEQ ID NO: 892569 - protein, 175 aa, Homo sapiens [sequence omitted]

SEQ ID NO: 892570 - protein, 195 aa, Homo sapiens
RVCLGPARVARPPPSRLLPPRPYCCPCYLTGDSVRDKCVEMLSAALKADDDYKDYGVNCDKMASEIEDHIYQELKSTDMKYRNRVRSRISNLKDPRNPGLRRNVLSGAISAGLIAKMTAEEMASDELRELRNAMTQEAIREHQMAKTGGTTTDLFQCSKCKKKNCTYNQVQTRSADEPMTTFVLCNECGNRWKFC

SEQ ID NO: 892571 - protein, 385 aa, Homo sapiens; identical to SEQ ID NO: 892564

SEQ ID NO: 892572 - protein, 199 aa, Homo sapiens; identical to SEQ ID NO: 892567

SEQ ID NO: 892573 - protein, 218 aa, Homo sapiens
GTRLSVWPHLPRPLIRFLTNFLFPQVPVALAGHTGEFMCLVVVSDRRLYLLKVTGEMREPPASWLQLTLAVPLQDLSGIELGLAGQSLRLEWAAGAGRCVLLPRDARHCRAFLEELLDVLQSLPPAWRNCVSATEEEVTPQHRLWPLLEKDSSLEARQFFYLRAFLVEGEASVQLMLPWSLYPTLSQALAHAQHLYSALAATVSSWNLENLSLEGIAE

SEQ ID NO: 892574 - protein, 1115 aa, Homo sapiens
IIDRRRAAELVGGPDGDVRLRPQRPVAMTTAQRDSLLWKLAGLLRESGDVVLSGCSTLSLLTPTLQQLNHVFELHLGPWGPGQTGFVALPSHPADSPVILQLQFLFDVLQKTLSLKLVHVAGPGPTGPIKIFPFKSLRHLELRGVPLHCLHGLRGIYSQLETLICSRSLQALEELLSACGGDFCSALPWLALLSANFSYNALTALDSSLRLLSALRFLNLSHNQVQDCQGFLMDLCELHHLDISYNRLHLVPRMGPSGAALGVLILRGNELRSLHGLEQLRNLRHLDLAYNLLEGHRELSPLWLLAELRKLYLEGNPLWFHPEHRAATAQYLSPRARDAATGFLLDGKVLSLTDFQTHTSLGLSPMGPPLPWPVGSTPETSGGPDLSDSLSSGGVVTQPLLHKVKSRVRVRRASISEPSDTDPEPRTLNPSPAGWFVQQHPELELMSSFRERFGRNWLQYRSHLEPSGNPLPATPTTSAPSAPPASSQGPDTAPRPSPPQEEARGPQESPQKMSEEVRAEPQEEEEEKEGKEEKEEGEMVEQGEEEAGEEEEEEQDQKEVEAELCRPLLVCPLEGPEGVRGRECFLRVTSAHLFEVELQAARTLERLELQSLEAAEIEPEAQAQRSPRPTGSDLLPGAPILSLRFSYICPDRQLRRYLVLEPDAHAAVQELLAVLTPVTNVAREQLGEARDLLLGRFQCLRCGHEFKPEEPRMGLDSEEGWRPLFQKTESPAVCPNCGSDHVVLLAVSRGTPNRERKQGEQSLAPSPFASPVCHPPGHGDHLDRAKNSPPQAPSTRDHGSWSLSPPPERCGLRSVDHRLRLFLDVEVFSDAQEEFQCCLKVPVALAGHTGEFMCLVVVSDRRLYLLKVTGEMREPPASWLQLTLAVPLQDLSGIELGLAGQSLRLEWAAGAGRCVLLPRDARHCRAFLEELLDVLQSLPPAWRNCVSATEEEVTPQHRLWPLLEKDSSLEARQFFYLRAFLVEGPSTCLVSLLLTPSTLFLLDEDAAGSPAEPSPPAASGEASEKVPPSGPGPAVRVREQQPLSSLSSVLLYRSAPEDLRLLFYDEVSRLESFWALRVVCQEQLTALLAWIREPWEELFSIGLRTVIQEALALDR

SEQ ID NO: 892575 - protein, 1090 aa, Homo sapiens
HYLTKSPSGPGTDLGHNHYCEQGDVVLSGCSTLSLLTPTLQQLNHVFELHLGPWGPGQTGFVALPSHPADSPVILQLQFLFDVLQKTLSLKLVHVAGPGPTGPIKIFPFKSLRHLELRGVPLHCLHGLRGIYSQLETLICSRSLQALEELLSACGGDFCSALPWLALLSANFSYNALTALDSSLRLLSALRFLNLSHNQVQDCQGFLMDLCELHHLDISYNRLHLVPRMGPSGAALGVLILRGNELRSLHGLEQLRNLRHLDLAYNLLEGHRELSPLWLLAELRKLYLEGNPLWFHPEHRAATAQYLSPRARDAATGFLLDGKVLSLTDFQTHTSLGLSPMGPPLPWPVGSTPETSGGPDLSDSLSSGGVVTQPLLHKVKSRVRVRRASISEPSDTDPEPRTLNPSPAGWFVQQHPELELMSSFRERFGRNWLQYRSHLEPSGNPLPATPTTSAPSAPPASSQGPDTAPRPSPPQEEARGPQESPQKMSEEVRAEPQEEEEEKEGKEEKEEGEMVEQGEEEAGEEEEEEQDQKEVEAELCRPLLVCPLEGPEGVRGRECFLRVTSAHLFEVELQAARTLERLELQSLEAAEIEPEAQAQRSPRPTGSDLLPGAPILSLRFSYICPDRQLRRYLVLEPDAHAAVQELLAVLTPVTNVAREQLGEARDLLLGRFQCLRCGHEFKPEEPRMGLDSEEGWRPLFQKTESPAVCPNCGSDHVVLLAVSRGTPNRERKQGEQSLAPSPFASPVCHPPGHGDHLDRAKNSPPQAPSTRDHGSWSLSPPPERCGLRSVDHRLRLFLDVEVFSDAQEEFQCCLKVPVALAGHTGEFMCLVVVSDRRLYLLKVTGEMREPPASWLQLTLAVPLQDLSGIELGLAGQSLRLEWAAGAGRCVLLPRDARHCRAFLEELLDVLQSLPPAWRNCVSATEEEVTPQHRLWPLLEKDSSLEARQFFYLRAFLVEGPSTCLVSLLLTPSTLFLLDEDAAGSPAEPSPPAASGEASEKVPPSGPGPAVRVREQQPLSSLSSVLLYRSAPEDLRLLFYDEVSRLESFWALRVVCQEQLTALLAWIREPWEELFSIGLRTVIQEALALDR

SEQ ID NO: 892576 - protein, 1242 aa, Homo sapiens
IIDRRRAAELVGGPDGDVRLRPQRPVAMTTAQRDSLLWKLAGLLRESGDVVLSGCSTLSLLTPTLQQLNHVFELHLGPWGPGQTGFVALPSHPADSPVILQLQFLFDVLQKTLSLKLVHVAGPGPTGPIKIFPFKSLRHLELRGVPLHCLHGLRGIYSQLETLICSRSLQALEELLSACGGDFCSALPWLALLSANFSYNALTALDSSLRLLSALRFLNLSHNQVQDCQGFLMDLCELHHLDISYNRLHLVPRMGPSGAALGVLILRGNELRSLHGLEQLRNLRHLDLAYNLLEGHRELSPLWLLAELRKLYLEGNPLWFHPEHRAATAQYLSPRARDAATGVSDRPVSTLLPLSCPVLPHLAPSCHPWVRGQGPGPCFTVFLIPGAQQDGPTTYSLPLFVFAQFLLDGKVLSLTDFQVGVVGGRGLLGEDTKGGRWGENRGLAGDRVFLVQWKVGSRLLAGLGKAEVLPGSNLSLLPVVTCQTHTSLGLSPMGPPLPWPVGSTPETSGGPDLSDSLSSGGVVTQPLLHKVKSRVRVRRASISEPSDTDPEPRTLNPSPAGWFVQQHPELELMSSFRERFGRNWLQYRSHLEPSGNPLPATPTTSAPSAPPASSQGPDTAPRPSPPQEEARGPQESPQKMSEEVRAEPQEEEEEKEGKEEKEEGEMVEQGEEEAGEEEEEEQDQKEVEAELCRPLLVCPLEGPEGVRGRECFLRVTSAHLFEVELQAARTLERLELQSLEAAEIEPEAQAQRSPRPTGSDLLPGAPILSLRFSYICPDRQLRRYLVLEPDAHAAVQELLAVLTPVTNVAREQLGEARDLLLGRFQCLRCGHEFKPEEPRMGLDSEEGWRPLFQKTESPAVCPNCGSDHVVLLAVSRGTPNRERKQGEQSLAPSPFASPVCHPPGHGDHLDRAKNSPPQAPSTRDHGSWSLSPPPERCGLRSVDHRLRLFLDVEVFSDAQEEFQCCLKVPVALAGHTGEFMCLVVVSDRRLYLLKVTGEMREPPASWLQLTLAVPLQDLSGIELGLAGQSLRLEWAAGAGRCVLLPRDARHCRAFLEELLDVLQSLPPAWRNCVSATEEEVTPQHRLWPLLEKDSSLEARQFFYLRAFLVEGPSTCLVSLLLTPSTLFLLDEDAAGSPAEPSPPAASGEASEKVPPSGPGPAVRVREQQPLSSLSSVLLYRSAPEDLRLLFYDEVSRLESFWALRVVCQEQLTALLAWIREPWEELFSIGLRTVIQEALALDR

SEQ ID NO: 892577 - protein, 989 aa, Homo sapiens
MGPSGAALGVLILRGNELRSLHGLEQLRNLRHLDLAYNLLEGHRELSPLWLLAELRKLYLEGNPLWFHPEHRAATAQYLSPRARDAATGVSDRPVSTLLPLSCPVLPHLAPSCHPWVRGQGPGPCFTVFLIPGAQQDGPTTYSLPLFVFAQFLLDGKVLSLTDFQVGVVGGRGLLGEDTKGGRWGENRGLAGDRVFLVQWKVGSRLLAGLGKAEVLPGSNLSLLPVVTCQTHTSLGLSPMGPPLPWPVGSTPETSGGPDLSDSLSSGGVVTQPLLHKVKSRVRVRRASISEPSDTDPEPRTLNPSPAGWFVQQHPELELMSSFRERFGRNWLQYRSHLEPSGNPLPATPTTSAPSAPPASSQGPDTAPRPSPPQEEARGPQESPQKMSEEVRAEPQEEEEEKEGKEEKEEGEMVEQGEEEAGEEEEEEQDQKEVEAELCRPLLVCPLEGPEGVRGRECFLRVTSAHLFEVELQAARTLERLELQSLEAAEIEPEAQAQRSPRPTGSDLLPGAPILSLRFSYICPDRQLRRYLVLEPDAHAAVQELLAVLTPVTNVAREQLGEARDLLLGRFQCLRCGHEFKPEEPRMGLDSEEGWRPLFQKTESPAVCPNCGSDHVVLLAVSRGTPNRERKQGEQSLAPSPFASPVCHPPGHGDHLDRAKNSPPQAPSTRDHGSWSLSPPPERCGLRSVDHRLRLFLDVEVFSDAQEEFQCCLKVPVALAGHTGEFMCLVVVSDRRLYLLKVTGEMREPPASWLQLTLAVPLQDLSGIELGLAGQSLRLEWAAGAGRCVLLPRDARHCRAFLEELLDVLQSLPPAWRNCVSATEEEVTPQHRLWPLLEKDSSLEARQFFYLRAFLVEGPSTCLVSLLLTPSTLFLLDEDAAGSPAEPSPPAASGEASEKVPPSGPGPAVRVREQQPLSSLSSVLLYRSAPEDLRLLFYDEVSRLESFWALRVVCQEQLTALLAWIREPWEELFSIGLRTVIQEALALDR

SEQ ID NO: 892578 - protein, 1163 aa, Homo sapiens
IIDRRRAAELVGGPDGDVRLRPQRPVAMTTAQRDSLLWKLAGLLRESGDVVLSGCSTLSLLTPTLQQLNHVFELHLGPWGPGQTGFVALPSHPADSPVILQLQFLFDVLQKTLSLKLVHVAGPGPTGPIKIFPFKSLRHLELRGVPLHCLHGLRGIYSQLETLICSRSLQALEELLSACGGDFCSALPWLALLSANFSYNALTALDSSLRLLSALRFLNLSHNQVQDCQGFLMDLCELHHLDISYNRLHLVPRMGPSGAALGVLILRGNELRSLHGLEQLRNLRHLDLAYNLLEGHRELSPLWLLAELRKLYLEGNPLWFHPEHRAATAQYLSPRARDAATGFLLDGKVLSLTDFQTHTSLGLSPMGPPLPWPVGSTPETSGGPDLSDSLSSGGVVTQPLLHKVKSRVRVRRASISEPSDTDPEPRTLNPSPAGWFVQQHPELELMSSFRERFGRNWLQYRSHLEPSGNPLPATPTTSAPSAPPASSQGPDTAPRPSPPQEEARGPQESPQKMSEEVRAEPQEEEEEKEGKEEKEEGEMVEQGEEEAGEEEEEEQDQKEVEAELCRPLLVCPLEGPEGVRGRECFLRVTSAHLFEVELQAARTLERLELQSLEAAEIEPEAQAQRSPRPTGSDLLPGAPILSLRFSYICPDRQLRRYLVLEPDAHAAVQELLAVLTPVTNVAREQLGEARDLLLGRFQCLRCGHEFKPEEPRMGLDSEEGWRPLFQKTESPAVCPNCGSDHVVLLAVSRGTPNRERKQGEQSLAPSPFASPVCHPPGHGDHLDRAKNSPPQAPSTRDHGSWSLSPPPERCGLRSVDHRLRLFLDVEVFSDAQEEFQCCLKVPVALAGHTGEFMCLVVVSDRRLYLLKVTGEMREPPASWLQLTLAVPLQDLSGIELGLAGQSLRLEWAAGAGRCVLLPRDARHCRAFLEELLDVLQSLPPAWRNCVSATEEEVTPQHRLWPLLEKDSSLEARQFFYLRAFLVEGEASVQLMLPWSLYPTLSQALAHAQHLYSALAATVSSWNLENLSLEGIGPSTCLVSLLLTPSTLFLLDEDAAGSPAEPSPPAASGEASEKVPPSGPGPAVRVREQQPLSSLSSVLLYRSAPEDLRLLFYDEVSRLESFWALRVVCQEQLTALLAWIREPWEELFSIGLRTVIQEALALDR

SEQ ID NO: 892579 - protein, 1115 aa, Homo sapiens; identical to SEQ ID NO: 892574

SEQ ID NO: 892580 - protein, 421 aa, Homo sapiens
CDLEDRVTGFEFKPEEPRMGLDSEEGWRPLFQKTESPAVCPNCGSDHVVLLAVSRGTPNRERKQGEQSLAPSPFASPVCHPPGHGDHLDRAKNSPPQAPSTRDHGSWSLSPPPERCGLRSVDHRLRLFLDVEVFSDAQEEFQCCLKVPVALAGHTGEFMCLVVVSDRRLYLLKVTGEMREPPASWLQLTLAVPLQDLSGIELGLAGQSLRLEWAAGAGRCVLLPRDARHCRAFLEELLDVLQSLPPAWRNCVSATEEEVTPQHRLWPLLEKDSSLEARQFFYLRAFLVEGPSTCLVSLLLTPSTLFLLDEDAAGSPAEPSPPAASGEASEKVPPSGPGPAVRVREQQPLSSLSSVLLYRSAPEDLRLLFYDEVSRLESFWALRVVCQEQLTALLAWIREPWEELFSIGLRTVIQEALALDR

SEQ ID NO: 892581 - protein, 572 aa, Homo sapiens
GCCVPCTGLGISFSLSLALGAEEGSLRGCKHSGSWAEEQGFCAGAWTSVQAFDRLQRSCHPPCSQHPLIPLITAPAVFHPGPPLAAQGSDLLPGAPILSLRFSYICPDRQLRRYLVLEPDAHAAVQELLAVLTPVTNVAREQLGEARDLLLGRFQCLRCGHEFKPEEPRMGLDSEEGWRPLFQKTESPAVCPNCGSDHVVLLAVSRGTPNRERKQGEQSLAPSPFASPVCHPPGHGDHLDRAKNSPPQAPSTRDHGSWSLSPPPERCGLRSVDHRLRLFLDVEVFSDAQEEFQCCLKVPVALAGHTGEFMCLVVVSDRRLYLLKVTGEMREPPASWLQLTLAVPLQDLSGIELGLAGQSLRLEWAAGAGRCVLLPRDARHCRAFLEELLDVLQSLPPAWRNCVSATEEEVTPQHRLWPLLEKDSSLEARQFFYLRAFLVEGPSTCLVSLLLTPSTLFLLDEDAAGSPAEPSPPAASGEASEKVPPSGPGPAVRVREQQPLSSLSSVLLYRSAPEDLRLLFYDEVSRLESFWALRVVCQEQLTALLAWIREPWEELFSIGLRTVIQEALALDR

SEQ ID NO: 892582 - protein, 1093 aa, Homo sapiens
IIDRRRAAELVGGPDGDVRLRPQRPVAMTTAQRDSLLWKLAGLLRESGDVVLSGCSTLSLLTPTLQQLNHVFELHLGPWGPGQTGFVALPSHPADSPVILQLQFLFDVLQKTLSLKLVHVAGPGPTGPIKIFPFKSLRHLELRGVPLHCLHGLRGIYSQLETLICSRSLQALEELLSACGGDFCSALPWLALLSANFSYNALTALDSSLRLLSALRFLNLSHNQVQDCQGFLMDLCELHHLDISYNRLHLVPRMGPSGAALGVLILRGNELRSLHGLEQLRNLRHLDLAYNLLEGHRELSPLWLLAELRKLYLEGNPLWFHPEHRAATAQYLSPRARDAATGFLLDGKVLSLTDFQTHTSLGLSPMGPPLPWPVGSTPETSGGPDLSDSLSSGGVVTQPLLHKVKSRVRVRRASISEPSDTDPEPRTLNPSPAGWFVQQHPELELMSSFRERFGRNWLQYRSHLEPSGNPLPATPTTSAPSAPPASSQGPDTAPRPSPPQEEARGPQESPQKMSEEVRAEPQEEEEEKEGKEEKEEGEMVEQGEEEAGEEEEEEQDQKEVEAELCRPLLVCPLEGPEGVRGRECFLRVTSAHLFEVELQAARTLERLELQSLEAAEIEPEAQAQRSPRPTGSDLLPGAPILSLRFSYICPDRQLRRYLVLEPDAHAAVQELLAVLTPVTNVAREQLGEARDLLLGRFQCLRCGHEFKPEEPRMGLDSEEGWRPLFQKTESPAVCPNCGSDHVVLLAVSRGTPNRERKQGEQSLAPSPFASPVCHPPGHGDHLDRAKNSPPQAPSTRDHGSWSLSPPPERCGLRSVDHRLRLFLDVEVFSDAQEEFQCCLKVPVALAGHTGEFMCLVVVSDRRLYLLKVTGEMREPPASWLQLTLAVPLQDLSGIELGLAGQSLRLEWAAGAGRCVLLPRDARHCRAFLEELLDVLQSLPPAWRNCVSATEEEVTPQHRLWPLLEKDSSLEARQFFYLRAFLVEGPSTCLVSLLLTPSTLFLLDEDAAGSPAEPSPPAASGEASEKVPPSGPGPAVRVREQQPLSSLSSVLLYRSAPEDLRLLFYDEVRKLRLGDVNQFAQSKVVEPGIESTVP

SEQ ID NO: 892583 - protein, 742 aa, Homo sapiens
IIDRRRAAELVGGPDGDVRLRPQRPVAMTTAQRDSLLWKLAGLLRESGDVVLSGCSTLSLLTPTLQQLNHVFELHLGPWGPGQTGFVALPSHPADSPVILQLQFLFDVLQKTLSLKLVHVAGPGPTGPIKIFPFKSLRHLELRGVPLHCLHGLRGIYSQLETLICSRSLQALEELLSACGGDFCSALPWLALLSANFSYNALTALDSSLRLLSALRFLNLSHNQVQDCQGFLMDLCELHHLDISYNRLHLVPRMGPSGAALGVLILRGNELRSLHGLEQLRNLRHLDLAYNLLEGHRELSPLWLLAELRKLYLEGNPLWFHPEHRAATAQYLSPRARDAATGFLLDGKVLSLTDFQTHTSLGLSPMGPPLPWPVGSTPETSGGPDLSDSLSSGGVVTQPLLHKVKSRVRVRRASISEPSDTDPEPRTLNPSPAGWFVQQHPELELMSSFRERFGRNWLQYRSHLEPSGNPLPATPTTSAPSAPPASSQGPDTAPRPSPPQEEARGPQESPQKMSEEVRAEPQEEEEEKEGKEEKEEGEMVEQGEEEAGEEEEEEQDQKEVEAELCRPLLVCPLEGPEGVRGRECFLRVTSAHLFEVELQAARTLERLELQSLEAAEIEPEAQAQRSPRPTGSDLLPGAPILSLRFSYICPDRQLRRYLVLEPDAHAAVQELLAVLTPVTNVAREQLGEARDLLLGRFQCLRCGHEFKPEEPRMGLDSEEGWRPLFQKTDQSALSLKKTLKKK

SEQ ID NO: 892584 - protein, 418 aa, Homo sapiens
IIDRRRAAELVGGPDGDVRLRPQRPVAMTTAQRDSLLWKLAGLLRESGDVVLSGCSTLSLLTPTLQQLNHVFELHLGPWGPGQTGFVALPSHPADSPVILQLQFLFDVLQKTLSLKLVHVAGPGPTGPIKIFPFKSLRHLELRGVPLHCLHGLRGIYSQLETLICSRSLQALEELLSACGGDFCSALPWLALLSANFSYNALTALDSSLRLLSALRFLNLSHNQVQDCQGFLMDLCELHHLDISYNRLHLVPRMGPSGAALGVLILRGNELRSLHGLEQLRNLRHLDLAYNLLEGHRELSPLWLLAELRKLYLEGNPLWFHPEHRAATAQYLSPRARDAATGFLLDGKVLSLTDFQTHTSLGLSPMGPPLPWPVGSTPETSGGPDLSDSLSSGGVVTHLWVLASEVPNDPGLKGEARE

SEQ ID NO: 892585 - protein, 263 aa, Homo sapiens
MWRLPGLLGRALPRTLGPSLWRVTPKSTSPDGPQTTSSTLLVPVPNLDRSGPHGPGTSGGPRSHGWKDAFQWMSSRVSPNTLWDAISWGTLAVLALQLARQIHFQASLPAGPQRVEHCSWHSPLDRFFSSPLWHPCSSLRQHILPSPDGPAPRHTGLREPRLGQEEASAQPRNFSHNSLRGARPQDPSEEGPGDFGFLHASSSIESEAKPAQPQPTGEKEQDKSKTLSLEEAVTSIQQLFQLSVSIAFNFLGTRPDSGTHGAF

SEQ ID NO: 892586 - protein, 317 aa, Homo sapiens [sequence omitted]

SEQ ID NO: 892587 - protein, 456 aa, Homo sapiens
MWRLPGLLGRALPRTLGPSLWRVTPKSTSPDGPQTTSSTLLVPVPNLDRSGPHGPGTSGGPRSHGWKDAFQWMSSRVSPNTLWDAISWGTLAVLALQLARQIHFQASLPAGPQRVEHCSWHSPLDRFFSSPLWHPCSSLRQHILPSPDGPAPRHTGLREPRLGQEEASAQPRNFSHNSLRGARPQDPSEEGPGDFGFLHASSSIESEAKPAQPQPTGEKEQDKSKTLSLEEAVTSIQQLFQLSVSIAFNFLGTENMKSGDHTAAFSYFQKAAARGYSKAQYNAGLCHEHGRGTPRDISKAVLYYQLAASQGHSLAQYRYARCLLRDPASSWNPERQRAVSLLKQAADSGLREAQAFLGVLFTKEPYLDEQRAVKYLWLAANNGDSQSRYHLGICYEKGLGVQRNLGEALRCYQQSAALGNEAAQERLRALFSMGAAGTDPSPSQQVHSLSSVLCDR

SEQ ID NO: 892588 - protein, 515 aa, Homo sapiens
MWRLPGLLGRALPRTLGPSLWRVTPKSTSPDGPQTTSSTLLVPVPNLDRSGPHGPGTSGGPRSHGWKDAFQWMSSRVSPNTLWDAISWGTLAVLALQLARQIHFQASLPAGPQRVEHCSWHSPLDRFFSSPLWHPCSSLRQHILPSPDGPAPRHTGLREPRLGQEEASAQPRNFSHNSLRGARPQDPSEEGPGDFGFLHASSSIESEAKPAQPQPTGEKEQDKSKTLSLEEAVTSIQQLFQLSVSIAFNFLGTENMKSGDHTAAFSYFQKAAARGYSKAQYNAGLCHEHGRGTPRDISKAVLYYQLAASQGHSLAQYRYARCLLRDPASSWNPERQRAVSLLKQAADSGLREAQAFLGVLFTKEPYLDEQRAVKYLWLAANNGDSQSRYHLGICYEKGLGVQRNLGEALRCYQQSAALGNEAAQERLRALFSMGAAAPGPSDLTVTGLKSFSSPSLCSLNTLLAGTSRLPHASSTGNLGLLCRSGHLGASLEASSRAIPPHPYPLERSVVRLGFG

SEQ ID NO: 892589 - protein, 515 aa, Homo sapiens; identical to SEQ ID NO: 892588

SEQ ID NO: 892590 - protein, 515 aa, Homo sapiens; identical to SEQ ID NO: 892588

SEQ ID NO: 892591 - protein, 515 aa, Homo sapiens; identical to SEQ ID NO: 892588

SEQ ID NO: 892592 - protein, 515 aa, Homo sapiens; identical to SEQ ID NO: 892588

SEQ ID NO: 892593 - protein, 317 aa, Homo sapiens [sequence omitted]

SEQ ID NO: 892594 - protein, 162 aa, Homo sapiens
  misc_feature (14)..(14): Xaa can be any naturally occurring amino acid
MRHESLVKQAAKLXLKNAQAFPRGLFNKEPDSQSRYHLGICYEKGLGVQRNLGEALRCYQQSAALGNEAAQERLRALFSMGAAAPGPSDLTVTGLKSFSSPSLCSLNTLLAGTSRLPHASSTGNLGLLCRSGHLGASLEASSRAIPPHPYPLERSVVRLGFG

SEQ ID NO: 892595 - protein, 317 aa, Homo sapiens [sequence omitted]

SEQ ID NO: 892596 - protein, 456 aa, Homo sapiens; identical to SEQ ID NO: 892587

SEQ ID NO: 892597 - protein, 255 aa, Homo sapiens
MWRLPGLLGRALPRTLGPSLWRVTPKSTSPDGPQTTSSTLLVPVPNLDRSGPHGPGTSGGPRSHGWKDAFQWMSSRVSPNTLWDAISWGTLAVLALQLARQIHFQASLPAGPQRVEHCSWHSPLDRFFSSPLWHPCSSLRQHILPSPDGPAPRHTGLREPRLGQEEASAQPRNFSHNSLRGARPQDPSEEGPGDFGFLHASSSIESEAKPAQPQPTGEKEQDKSKTLSLEEAVTSIQQLFQLSVSIAFNFLGTET

SEQ ID NO: 892598 - protein, 515 aa, Homo sapiens; identical to SEQ ID NO: 892588

SEQ ID NO: 892599 - protein, 106 aa, Homo sapiens [sequence omitted]

SEQ ID NO: 892600 - protein, 515 aa, Homo sapiens; identical to SEQ ID NO: 892588

SEQ ID NO: 892601 - protein, 515 aa, Homo sapiens; identical to SEQ ID NO: 892588

SEQ ID NO: 892602 - protein, 515 aa, Homo sapiens; identical to SEQ ID NO: 892588

SEQ ID NO: 892603 - protein, 515 aa, Homo sapiens; identical to SEQ ID NO: 892588

SEQ ID NO: 892604 - protein, 283 aa, Homo sapiens
TTGCFWLEASHGLRLGEAWIESKDRSPHGGGGGASSVEGGGRLSRSFPAPHSHVFQGSHSEAGGGTAQSLCSQALGDGLPVTSRNQCVFIYRLRICVAPDLPASLRQHILPSPDGPAPRHTGLREPRLGQEEASAQPRNFSHNSLRGARPQDPSEEGPGDFGFLHASSSIESEAKPAQPQPTGEKEQDKSKTLSLEEAVTSIQQLFQLSVSIAFNFLGTENMKSGDHTAAFSYFQKAAARGYSKAQYNAGLCHEHGRGTPRDISKVFPCPQACLLCWAAEIDV

SEQ ID NO: 892605 - protein, 394 aa, Homo sapiens [sequence omitted]

SEQ ID NO: 892606 - protein, 317 aa, Homo sapiens [sequence omitted]

SEQ ID NO: 892607 - protein, 133 aa, Homo sapiens
  misc_feature (1)..(1): Xaa can be any naturally occurring amino acid
XDSQSRYHLGICYEKGLGVQRNLGEALRCYQQSAALGNEAAQERLRALFSMGAAAPGPSDLTVTGLKSFSSPSLCSLNTLLAGTSRLPHASSTGNLGLLCRSGHLGASLEASSRAIPPHPYPLERSVVRLGFG

SEQ ID NO: 892608 - protein, 308 aa, Homo sapiens
MGEIKVSPDYNWFRGTVPLKKIIVDDDDSKIWSLYDAGPRSIRCPLIFLPPVSGTADVFFRQILALTGWGYRVIALQYPVYWDHLEFCDGFRKLLDHLQLDKVHLFGASLGGFLAQKFAEYTHKSPRVHSLILCNSFSDTSIFNQTWTANSFWLMPAFMLKKIVLGNFSSGPVDPMMADAIDFMVDRLESLGQSELASRLTLNCQNSYVEPHKIRDIPVTIMDVFDQSALSTEAKEEMYKLYPNARRAHLKTGGNFPYLCRSAEVNLYVQIHLLQFHGTKYAAIDPSMVSAEELEVQKGSLGISQEEQ

SEQ ID NO: 892609 - protein, 117 aa, Homo sapiens
  misc_feature (17)..(17): Xaa can be any naturally occurring amino acid
MVSLRVGKKILPPGNNXMPMWGLLGCSYKNSFAQKKQWGSPFRNSGNIFRPRGSVRERPPPFFFFFFFFFIKVVCCKCCTSRLHIRTLVILCFLGYNHDQSAMATTPLFALLQINCF

SEQ ID NO: 892610 - protein, 171 aa, Homo sapiens
RYPVVSIKTWTANSFWLMPAFMLKKIVLGNFSSGPVDPMMADAIDFMVDRLESLGQSELASRLTLNCQNSYVEPHKIRDIPVTIMDVFDQSALSTEAKEEMYKLYPNARRAHLKTGGNFPYLCRSAEVNLYVQIHLLQFHGTKYAAIDPSMVSAEELEVQKGSLGISQEEQ

SEQ ID NO: 892611 - protein, 321 aa, Homo sapiens
MGEIKVSPDYNWFRGTVPLKKIIVDDDDSKIWSLYDAGPRSIRCPLIFLPPVSGTADVFFRQILALTGWGYRVIALQYPVYWDHLEFCDGFRKLLDHLQLDKVHLFGASLGGFLAQKFAEYTHKSPRVHSLILCNSFSDTSIFNQTWTANSFWLMPAFMLKKIVLGNFSSGPVDPMMADAIDFMVDRSRKLGQSETGFSQKNGKKPIFKNPLLENLVQNSYVEPHKIRDIPVTIMDVFDQSALSTEAKEEMYKLYPNARRAHLKTGGNFPYLCRSAEVNLYVQIHLLQFHGTKYAAIDPSMVSAEELEVQKGSLGISQEEQ

SEQ ID NO: 892612 - protein, 95 aa, Homo sapiens
GLLNGCYQWLVFDQSALSTEAKEEMYKLYPNARRAHLKTGGNFPYLCRSAEVNLYVQIHLLQFHGTKYAAIDPSMVSAEELEVQKGSLGISQEEQ

SEQ ID NO: 892613 - protein, 134 aa, Homo sapiens
QGNRFTAIDPSMVMPSELEVQKGSLASARRSSIVPLAVNDELTRCVMYSQWHQHPQPAFSFRFVRLTGSHCVWEVGLMVIFMTGGISTKPVYLFPWIHLLQFHGTKYAAIDPSMVSAEELEVQKGSLGISQEEQ

SEQ ID NO: 892614 - protein, 280 aa, Homo sapiens [sequence omitted]

SEQ ID NO: 892615 - protein, 308 aa, Homo sapiens; identical to SEQ ID NO: 892608

SEQ ID NO: 892616 - protein, 281 aa, Homo sapiens
MGEIKVSPDYNWFRGTVPLKKIIVDDDDSKIWSLYDAGPRSIRCPLIFLPPVSGTADVFFRQILALTGWGYRVIAVHLFGASLGGFLAQKFAEYTHKSPRVHSLILCNSFSDTSIFNQTWTANSFWLMPAFMLKKIVLGNFSSGPVDPMMADAIDFMVDRLESLGQSELASRLTLNCQNSYVEPHKIRDIPVTIMDVFDQSALSTEAKEEMYKLYPNARRAHLKTGGNFPYLCRSAEVNLYVQIHLLQFHGTKYAAIDPSMVSAEELEVQKGSLGISQEEQ

SEQ ID NO: 892617 - protein, 266 aa, Homo sapiens
MGEIKVSPDYNWFRGTVPLKKIIVDDDDSKIWSLYDAGPRSIRCPLIFLPPVSGTADVFFRQILALTGWGYRVIALQYPVYWDHLEFCDGFRKLLDHLQLDKVHLFGASLGGFLAQKFAEYTHKSPRVHSLILCNSFSDTSIFNQTWTANSFWLMPAFMLKKIVLGNFSSGPVDPMMADAIDFMVDRLESLGQSELASRLTLNCQNSYVEPHKIRDIPVTIMDVFDQSALSTEAKEEMYKLYPNARRAHLKTDTFAAIPWNQIRGH

SEQ ID NO: 892618 - protein, 272 aa, Homo sapiens
MGEIKVSPDYNWFRGTVPLKKIIVDDDDSKIWSLYDAGPRSIRCPLIFLPPVSGTADVFFRQILALTGWGYRVIALQYPVYWDHLEFCDGFRKLLDHLQLDKVHLFGASLGGFLAQKFAEYTHKSPRVHSLILCNSFSDTSIFNQTWTANSFWLMPAFMLKKIVLGNFSSGPVDPMMADAIDFMVDRVFDQSALSTEAKEEMYKLYPNARRAHLKTGGNFPYLCRSAEVNLYVQIHLLQFHGTKYAAIDPSMVSAEELEVQKGSLGISQEEQ

SEQ ID NO: 892619 - protein, 308 aa, Homo sapiens; identical to SEQ ID NO: 892608

SEQ ID NO: 892620 - protein, 223 aa, Homo sapiens
MGEIKVSPDYNWFRGTVPLKKIIVDDDDSKIWSLYDAGPRSIRCPLIFLPPVSGTADVFFRQILALTGWGYRVIALQYPVYWDHLEFCDGFRKLLDHLQLDKVHLFGASLGGFLAQKFAEYTHKSPRVHSLILCNSFSDTSIFNQTWTANSFWLMPAFMLKKIVLGNFSSGPVDPMMADAIDFMVDRGKDHDIGLGTHCIGNFHIYLVPEDRSVSQVCVRGIC

SEQ ID NO: 892621 - protein, 736 aa, Homo sapiens
GRATLPVDPARPGAGPAGRRRRPLARRGRARGRRGHGVAAASPEPRAGECSRPPRLLPSVLPTQPSAEPRRTMPAVDKLLLEEALQDSPQTRSLLSVFEEDAGTLTDYTNQLLQAMQRVYGAQNEMCLATQQLSKQLLAYEKQNFALGKGDEEVISTLHYFSKVVDELNLLHTELAKQLADTMVLPIIQFREKDLTEVSTLKDLFGLASNEHDLSMAKYSRLPKKKENEKVKTEVGKEVAAARRKQHLSSLQYYCALNALQYRKQMAMMEPMIGFAHGQINFFKKGAEMFSKRMDSFLSSVADMVQSIQVELEAEAEKMRVSQQELLSVDESVYTPDSDVAAPQINRNLIQKAGYLNLRNKTGLVTTTWERLYFFTQGGNLMCQPRGAVAGGLIQDLDNCSVMAVDCEDRRYCFQITTPNGKSGIILQAESRKENEEWICAINNISRQIYLTDNPEAVAIKLNQTALQAVTPITSFGKKQESSCPSQNLKNSEMENENDKIVPKATASLPEAEELIAPGTPIQFDIVLPATEFLDQNRGSRRTNPFGETEDESFPEAEDSLLQQMFIVRFLGSMAVKTDSTTEVIYEAMRQVLAARAIHNIFRMTESHLMVTSQSLRLIDPQTQVSRANFELTSVTQFAAHQENKRLVGFVIRVPESTGEESLSTYIFESNSEGEKICYAINLGKEIIEVQKDPEALAQLMLSIPLTNDGKYVLLNDQPDDDDGNPNEHRGAESEA

SEQ ID NO: 892622 - protein, 758 aa, Homo sapiens
GRATLPVDPARPGAGPAGRRRRPLARRGRARGRRGHGVAAASPEPRAGECSRPPRLLPSVLPTQPSAEPRRTMPAVDKLLLEEALQDSPQTRSLLSVFEEDAGTLTDYTNQLLQAMQRVYGAQNEMCLATQQLSKQLLAYEKQNFALGKGDEEVISTLHYFSKVVDELNLLHTELAKQLADTMVLPIIQFREKDLTEVSTLKDLFGLASNEHDLSMAKYSRLPKKKENEKVKTEVGKEVAAARRKQHLSSLQYYCALNALQYRKQMAMMEPMIGFAHGQINFFKKGAEMFSKRMDSFLSSVADMVQSIQVELEAEAEKMRVSQQELLSVDESVYTPDSDVAAPQINRNLIQKAGYLNLRNKTGLVTTTWERLYFFTQGGNLMCQPRGAVAGGLIQDLDNCSVMAVDCEDRRYCFQITTPNGKSGIILQAESRKENEEWICAINNISRQIYLTDNPEAVAIKLNQTALQAVTPITSFGKKQESSCPSQNLKNSEMENENDKIVPKATASLPEAEELIAPGTPIQFDIVLPATEFLDQNRGSSSSVKCPSSCSCRVCSTLAIPLRRTNPFGETEDESFPEAEDSLLQQMFIVRFLGSMAVKTDSTTEVIYEAMRQVLAARAIHNIFRMTESHLMVTSQSLRLIDPQTQVSRANFELTSVTQFAAHQENKRLVGFVIRVPESTGEESLSTYIFESNSEGEKICYAINLGKEIIEVQKDPEALAQLMLSIPLTNDGKYVLLNDQPDDDDGNPNEHRGAESEA

SEQ ID NO: 892623 - protein, 550 aa, Homo sapiens
GRATLPVDPARPGAGPAGRRRRPLARRGRARGRRGHGVAAASPEPRAGECSRPPRLLPSVLPTQPSAEPRRTMPAVDKLLLEEALQDSPQTRSLLSVFEEDAGTLTDYTNQLLQAMQRVYGAQNEMCLATQQLSKQLLAYEKQNFALGKGDEEVISTLHYFSKVVDELNLLHTELAKQLADTMVLPIIQFREKDLTEVSTLKDLFGLASNEHDLSMAKYSRLPKKKENEKVKTEVGKEVAAARRKQHLSSLQYYCALNALQYRKQMAMMEPMIGFAHGQINFFKKGAEMFSKRMDSFLSSVADMVQSIQVELEAEAEKMRVSQQELLSVDESVYTPDSDVAAPQINRNLIQKAGYLNLRNKTGLVTTTWERLYFFTQGGNLMCQPRGAVAGGLIQDLDNCSVMAVDCEDRRYCFQITTPNGKSGIILQAESRKENEEWICAINNISRQIYLTDNPEAVAIKLNQTALQAVTPITSFGKKQESSCPSQNLKNSEMENENDKIVPKATASLPEAEELIAPGTPIQFDIVLPATEFLDQNRGSRAERGYLWEN

SEQ ID NO: 892624 - protein, 742 aa, Homo sapiens
GRATLPVDPARPGAGPAGRRRRPLARRGRARGRRGHGVAAASPEPRAGECSRPPRLLPSVLPTQPSAEPRRTMPAVDKLLLEEALQDSPQTRSLLSVFEEDAGTLTDYTNQLLQAMQRVYGAQNEMCLATQQLSKQLLAYEKQNFALGKGDEEVISTLHYFSKVVDELNLLHTELAKQLADTMVLPIIQFREKDLTAEDKHFTRILYGPQLAMSNDLSNGNYSKADLQKHGEQGARVKTEVGKEVAAARRKQHLSSLQYYCALNALQYRKQMAMMEPMIGFAHGQINFFKKGAEMFSKRMDSFLSSVADMVQSIQVELEAEAEKMRVSQQELLSVDESVYTPDSDVAAPQINRNLIQKAGYLNLRNKTGLVTTTWERLYFFTQGGNLMCQPRGAVAGGLIQDLDNCSVMAVDCEDRRYCFQITTPNGKSGIILQAESRKENEEWICAINNISRQIYLTDNPEAVAIKLNQTALQAVTPITSFGKKQESSCPSQNLKNSEMENENDKIVPKATASLPEAEELIAPGTPIQFDIVLPATEFLDQNRGSRRTNPFGETEDESFPEAEDSLLQQMFIVRFLGSMAVKTDSTTEVIYEAMRQVLAARAIHNIFRMTESHLMVTSQSLRLIDPQTQVSRANFELTSVTQFAAHQENKRLVGFVIRVPESTGEESLSTYIFESNSEGEKICYAINLGKEIIEVQKDPEALAQLMLSIPLTNDGKYVLLNDQPDDDDGNPNEHRGAESEA

SEQ ID NO: 892625 - protein, 488 aa, Homo sapiens
MLAPSQTIPTRLQYRKQMAMMEPMIGFAHGQINFFKKGAEMFSKRMDSFLSSVADMVQSIQVELEAEAEKMRVSQQELLSVDESVYTPDSDVAAPQINRNLIQKAGYLNLRNKTGLVTTTWERLYFFTQGGNLMCQPRGAVAGGLIQDLDNCSVMAVDCEDRRYCFQITTPNGKSGIILQAESRKENEEWICAINNISRQIYLTDNPEAVAIKLNQTALQAVTPITSFGKKQESSCPSQNLKNSEMENENDKIVPKATASLPEAEELIAPGTPIQFDIVLPATEFLDQNRGSRRTNPFGETEDESFPEAEDSLLQQMFIVRFLGSMAVKTDSTTEVIYEAMRQVLAARAIHNIFRMTESHLMVTSQSLRLIDPQTQVSRANFELTSVTQFAAHQENKRLVGFVIRVPESTGEESLSTYIFESNSEGEKICYAINLGKEIIEVQKDPEALAQLMLSIPLTNDGKYVLLNDQPDDDDGNPNEHRGAESEA

SEQ ID NO: 892626 - protein, 769 aa, Homo sapiens
GRATLPVDPARPGAGPAGRRRRPLARRGRARGRRGHGVAAASPEPRAGECSRPPRLLPSVLPTQPSAEPRRTMPAVDKLLLEEALQDSPQTRSLLSVFEEDAGTLTDYTNQLLQAMQRVYGAQNEMCLATQQLSKQLLAYEKQNFALGKGDEEVISTLHYFSKVVDELNLLHTELAKQLADTMVLPIIQFREKDLTEVSTLKDLFGLASNEHDLSMAKYSRLPKKKENEKVKTEVGKEVAAARRKQHLSSLQYYCALNALQYRKQMAMMEPMIGFAHGQINFFKKGAEMFSKRMDSFLSSVADMVQSIQVELEAEAEKMRVSQQELLSVDESVYTPDSDVAAPQINRNLIQKAGYLNLRNKTGLVTTTWERLYFFTQGGNLMCQPRGAVAGGLIQDLDNCSVMAVDCEDRRYCFQITTPNGKSGIILQAESRKENEEWICAINNISRQIYLTDNPEAVAIKLNQTALQAVTPITSFGKKQESSCPSQNLKNSEMENENDKIVPKATASLPEAEELIAPGTPIQFDIVLPATEFLDQNRGSSSSVKCPSSCSCRVCSTLAIPLRRTNPFGETEDESFPEAEDSLLQQMFIVRFLGSMAVKTDSTTEVIYEAMRQVLAARAIHNIFRMTESHLMVTSQSLRLIDPQTQVSRANFELTSVTQFAAHQENKRLVGFVIRVPESTGEESLSTYIFESNSEGEKICYAINLGKEIIEVQKDPEALAQLMLSIPLTNDGKYRRRIRSITHLRLWGKSKQEGELPPKGFNVSDIQAH

SEQ ID NO: 892627 - protein, 107 aa, Homo sapiens
MSLLQPGPVFPSGNSENSDLTVLPNHICSKILSFSTFANHYFSCLLQICYAINLGKEIIEVQKDPEALAQLMLSIPLTNDGKYVLLNDQPDDDDGNPNEHRGAESEA

SEQ ID NO: 892628 - protein, 364 aa, Homo sapiens
GRATLPVDPARPGAGPAGRRRRPLARRGRARGRRGHGVAAASPEPRAGECSRPPRLLPSVLPTQPSAEPRRTMPAVDKLLLEEALQDSPQTRSLLSVFEEDAGTLTDYTNQLLQAMQRVYGAQNEMCLATQQLSKQLLAYEKQNFALGKGDEEVISTLHYFSKVVDELNLLHTELAKQLADTMVLPIIQFREKDLTEVSTLKDLFGLASNEHDLSMAKYSRLPKKKENEKVKTEVGKEVAAARRKQHLSSLQYYCALNALQYRKQMAMMEPMIGFAHGQINFFKKGAEMFSKRMDSFLSSVADMVQSIQVELEAEAEKMRVSQQELLSVDESVYTPDSDVAAPQINRNLIQTSSNKKMNTTKDV

SEQ ID NO: 892629 - protein, 550 aa, Homo sapiens; identical to SEQ ID NO: 892623

SEQ ID NO: 892630 - protein, 550 aa, Homo sapiens; identical to SEQ ID NO: 892623

SEQ ID NO: 892631 - protein, 511 aa, Homo sapiens
GRATLPVDPARPGAGPAGRRRRPLARRGRARGRRGHGVAAASPEPRAGECSRPPRLLPSVLPTQPSAEPRRTMPAVDKLLLEEALQDSPQTRSLLSVFEEDAGTLTDYTNQLLQAMQRVYGAQNEMCLATQQLSKQLLAYEKQNFALGKGDEEVISTLHYFSKVVDELNLLHTELAKQLADTMVLPIIQFREKDLTEVSTLKDLFGLASNEHDLSMAKYSRLPKKKENEKVKTEVGKEVAAARRKQHLSSLQYYCALNALQYRKQMAMMEPMIGFAHGQINFFKKGAEMFSKRMDSFLSSVADMVQSIQVELEAEAEKMRVSQQELLSVDESVYTPDSDVAAPQINRNLIQKAGYLNLRNKTGLVTTTWERLYFFTQGGNLMCQPRGAVAGGLIQDLDNCSVMAVDCEDRRYCFQITTPNGKSGNNPPGWRAESANAEWTMCHKQHLQTDLPGPRTPVAIRDPTSRSQNRLCHPQLTPPFKQALATTPPTALAPQRKPGEIPANREHTDTL

SEQ ID NO: 892632 - protein, 287 aa, Homo sapiens
GRATLPVDPARPGAGPAGRRRRPLARRGRARGRRGHGVAAASPEPRAGECSRPPRLLPSVLPTQPSAEPRRTMPAVDKLLLEEALQDSPQTRSLLSVFEEDAGTLTDYTNQLLQAMQRVYGAQNEMCLATQQLSKQLLAYEKQNFALGKGDEEVISTLHYFSKVVDELNLLHTELAKQLADTMVLPIIQFREKDLTEVSTLKDLFGLASNEHDLSMAKYSRLPKKKENEKVKTEVGKEVAAARRKQHLSSLQYYCALNALQYRKQMAMMEPMIGFAHGQVGESLPEG

SEQ ID NO: 892633 - protein, 788 aa, Homo sapiens
MSDAQGSYKLDEAQAVLRETKAIKKAITCGEKEKQDLIKSLAMLKDGFRTDRGSHSDLWSSSSSLESSSFPLPKQYLDVSSQTDISGSFGINSNNQLAEKVRLRLRYEEAKRRIANLKIQLAKLDSEAWPGVLDSERDRLILINEKEELLKEMRFISPRKWTQGEVEQLEMARKRLEKDLQAARDTQSKALTERLKLNSKRNQLVRELEEATRQVATLHSQLKSLSSSMQSLSSGSSPGSLTSSRGSLVASSLDSSTSASFTDLYYDPFEQLDSELQSKVEFLLLEGATGFRPSGCITTIHEDEVAKTQKAEGGGRLQALRSLSGTPKSMTSLSPRSSLSSPSPPCSPLMADPLLAGDAFLNSLEFEDPELSATLCELSLGNSAQERYRLEEPGTEGKQLGQAVNTAQGCGLKVACVSAAVSDESVAGDSGVYEASVQRLGASEAAAFDSDESEAVGATRIQIALKYDEKNKQFAILIIQLSNLSALLQQQDQKVNIRVAVLPCSESTTCLFRTRPLDASDTLVFNEVFWVSMSYPALHQKTLRVDVCTTDRSHLEECLGGAQISLAEVCRSGERSTRWYNLLSYKYLKKQSRELKPVGVMAPASGPASTDAVSALLEQTAVELEKRQEGRSSTQTLEDSWRYEETSENEAVAEEEEEEVEEEEGEEDVFTEKASPDMDGYPALKVDKETNTETPAPSPTVVRPKDRRVGTPSQGPFLRGSTIIRSKTFSPGPQSQYVCRLNRSDSDSSTLSKKPPFVRNSLERRSVRMKRRPHPHSLPRSSRCAPSV

SEQ ID NO: 892634 - protein, 110 aa, Homo sapiens
MTPATFVSIGRCVCSVGTDSSGAGEEAGGQEQHTDTGRQLVSEPALGPQELPCLDLGPAMRSPNASATKRRVPLGRLRTPLLMGSLQAKRQCNLVRWFPEFLSNLPFRFP

SEQ ID NO: 892635 - protein, 598 aa, Homo sapiens
MSDAQGSYKLDEAQAVLRETKAIKKAITCGEKEKQDLIKSLAMLKDGFRTDRGSHSDLWSSSSSLESSSFPLPKQYLDVSSQTDISGSFGINSNNQLAEKVRLRLRYEEAKRRIANLKIQLAKLDSEAWPGVLDSERDRLILINEKEELLKEMRFISPRKWTPSWLVDAFLNSLEFEDPELSATLCELSLGNSAQERYRLEEPGTEGKQLGQAVNTAQGCGLKVACVSAAVSDESVAGDSGVYEASVQRLGASEAAAFDSDESEAVGATRIQIALKYDEKNKQFAILIIQLSNLSALLQQQDQKVNIRVAVLPCSESTTCLFRTRPLDASDTLVFNEVFWVSMSYPALHQKTLRVDVCTTDRSHLEECLGGAQISLAEVCRSGERSTRWYNLLSYKYLKKQSRELKPVGVMAPASGPASTDAVSALLEQTAVELEKRQEGRSSTQTLEDSWRYEETSENEAVAEEEEEEVEEEEGEEDVFTEKASPDMDGYPALKVDKETNTETPAPSPTVVRPKDRRVGTPSQGPFLRGSTIIRSKTFSPGPQSQYVCRLNRSDSDSSTLSKKPPFVRNSLERRSVRMKRRPHPHSLPRSSRCAPSV

SEQ ID NO: 892636 - protein, 849 aa, Homo sapiens
MSDAQGSYKLDEAQAVLRETKAIKKAITCGEKEKQDLIKSLAMLKDGFRTDRGSHSDLWSSSSSLESSSFPLPKQYLDVSSQTDISGSFGINSNNQLAEKVRLRLRYEEAKRRLSCQCGQATPSNSELTHYQLPQASSKTARHLYLDSHFLFSLKRTTLNLGSVPSCRNACLRWIANLKIQLAKLDSEAWPGVLDSERDRLILINEKEELLKEMRFISPRKWTQGEVEQLEMARKRLEKDLQAARDTQSKALTERLKLNSKRNQLVRELEEATRQVATLHSQLKSLSSSMQSLSSGSSPGSLTSSRGSLVASSLDSSTSASFTDLYYDPFEQLDSELQSKVEFLLLEGATGFRPSGCITTIHEDEVAKTQKAEGGGRLQALRSLSGTPKSMTSLSPRSSLSSPSPPCSPLMADPLLAGDAFLNSLEFEDPELSATLCELSLGNSAQERYRLEEPGTEGKQLGQAVNTAQGCGLKVACVSAAVSDESVAGDSGVYEASVQRLGASEAAAFDSDESEAVGATRIQIALKYDEKNKQFAILIIQLSNLSALLQQQDQKVNIRVAVLPCSESTTCLFRTRPLDASDTLVFNEVFWVSMSYPALHQKTLRVDVCTTDRSHLEECLGGAQISLAEVCRSGERSTRWYNLLSYKYLKKQSRELKPVGVMAPASGPASTDAVSALLEQTAVELEKRQEGRSSTQTLEDSWRYEETSENEAVAEEEEEEVEEEEGEEDVFTEKASPDMDGYPALKVDKETNTETPAPSPTVVRPKDRRVGTPSQGPFLRGSTIIRSKTFSPGPQSQYVCRLNRSDSDSSTLSKKPPFVRNSLERRSVRMKRRPHPHSLPRSSRCAPSV

SEQ ID NO: 892637 - protein, 636 aa, Homo sapiens
MRFISPRKWTQGEVEQLEMARKRLEKDLQAARDTQSKALTERLKLNSKRNQLVRELEEATRQVATLHSQLKSLSSSMQSLSSGSSPGSLTSSRGSLVASSLDSSTSASFTDLYYDPFEQLDSELQSKVEFLLLEGATGFRPSGCITTIHEDEVAKTQKAEGGGRLQALRSLSGTPKSMTSLSPRSSLSSPSPPCSPLMADPLLAGDAFLNSLEFEDPELSATLCELSLGNSAQERYRLEEPGTEGKQLGQAVNTAQGCGLKVACVSAAVSDESVAGDSGVYEASVQRLGASEAAAFDSDESEAVGATRIQIALKYDEKNKQFAILIIQLSNLSALLQQQDQKVNIRVAVLPCSESTTCLFRTRPLDASDTLVFNEVFWVSMSYPALHQKTLRVDVCTTDRSHLEECLGGAQISLAEVCRSGERSTRWYNLLSYKYLKKQSRELKPVGVMAPASGPASTDAVSALLEQTAVELEKRQEGRSSTQTLEDSWRYEETSENEAVAEEEEEEVEEEEGEEDVFTEKASPDMDGYPALKVDKETNTETPAPSPTVVRPKDRRVGTPSQGPFLRGSTIIRSKTFSPGPQSQYVCRLNRSDSDSSTLSKKPPFVRNSLERRSVRMKRRPHPHSLPRSSRCAPSV

SEQ ID NO: 892638 - protein, 778 aa, Homo sapiens
MSDAQGSYKLDEAQAVLRETKAIKKAITCGEKEKQDLIKSLAMLKDGFRTDRGSHSDLWSSSSSLESSSFPLPKQYLDFGINSNNQLAEKVRLRLRYEEAKRRIANLKIQLAKLDSEAWPGVLDSERDRLILINEKEELLKEMRFISPRKWTQGEVEQLEMARKRLEKDLQAARDTQSKALTERLKLNSKRNQLVRELEEATRQVATLHSQLKSLSSSMQSLSSGSSPGSLTSSRGSLVASSLDSSTSASFTDLYYDPFEQLDSELQSKVEFLLLEGATGFRPSGCITTIHEDEVAKTQKAEGGGRLQALRSLSGTPKSMTSLSPRSSLSSPSPPCSPLMADPLLAGDAFLNSLEFEDPELSATLCELSLGNSAQERYRLEEPGTEGKQLGQAVNTAQGCGLKVACVSAAVSDESVAGDSGVYEASVQRLGASEAAAFDSDESEAVGATRIQIALKYDEKNKQFAILIIQLSNLSALLQQQDQKVNIRVAVLPCSESTTCLFRTRPLDASDTLVFNEVFWVSMSYPALHQKTLRVDVCTTDRSHLEECLGGAQISLAEVCRSGERSTRWYNLLSYKYLKKQSRELKPVGVMAPASGPASTDAVSALLEQTAVELEKRQEGRSSTQTLEDSWRYEETSENEAVAEEEEEEVEEEEGEEDVFTEKASPDMDGYPALKVDKETNTETPAPSPTVVRPKDRRVGTPSQGPFLRGSTIIRSKTFSPGPQSQYVCRLNRSDSDSSTLSKKPPFVRNSLERRSVRMKRRPHPHSLPRSSRCAPSV

SEQ ID NO: 892639 - protein, 788 aa, Homo sapiens; identical to SEQ ID NO: 892633

SEQ ID NO: 892640 - protein, 796 aa, Homo sapiens
MSDAQGSYKLDEAQAVLRETKAIKKAITCGEKEKQDLIKSLAMLKDGFRTDRGSHSDLWSSSSSLESSSFPLPKQYLDVSSQTDISGSFGINSNNQLAEKVRLRLRYEEAKRRIANLKIQLAKLDSEAWPGVLDSERDRLILINEKEELLKEMRFISPRKWTQGEVEQLEMARKRLEKDLQAARDTQSKALTERLKLNSKRNQLVRELEEATRQVATLHSQLKSLSSSMQSLSSGSSPGSLTSSRGSLVASSLDSSTSASFTDLYYDPFEQLDSELQSKVEFLLLEGATGFRPSGCITTIHEDEVAKTQKAEGGGRLQALRSLSGTPKSMTSLSPRSSLSSPSPPCSPLMADPLLAGDAFLNSLEFEDPELSATLCELSLGNSAQERYRLEEPGTEGKQLGQAVNTAQGCGLKVACVSAAVSDESVAGDSGVYEASVQRLGASEAAAFDSDESEAVGATRIQIALKYDEKNKQFAILIIQLSNLSALLQQQDQKVNIRVAVLPCSESTTCLFRTRPLDASDTLVFNEVFWVSMSYPALHQKTLRVDVCTTDRSHLEECLGGAQISLAEVCRSGERSTRWYNLLSYKYLKKQSRELKPVGVMAPASGPASTDAVSALLEQTAVELEKRQEGRSSTQTLEDSWRYEETSENEAVAEEEEEEVEEEEGEEDVFTEKASPDMDGYPALKVDKETNTETPAPSPTVVRPKDRRVGTPSQGPFLRGSTIIRSKTFSPGPQSQYVCRLNRSDSDSSTLSKKPPFVRNSLERRSVRMKRFAEPEETRSQNVRKKKGARRGGSRL

SEQ ID NO: 892641 - protein, 637 aa, Homo sapiens
MSDAQGSYKLDEAQAVLRETKAIKKAITCGEKEKQDLIKSLAMLKDGFRTDRGSHSDLWSSSSSLESSSFPLPKQYLDVSSQTDISGSFGINSNNQLAEKVRLRLRYEEAKRRIANLKIQLAKLDSEAWPGVLDSERDRLILINEKEELLKEMRFISPRKWTQGEVEQLEMARKRLEKDLQAARDTQSKALTERLKLNSKRNQLVRELEEATRQVATLHSQLKSLSSSMQSLSSGSSPGSLTSSRGSLVASSLDSSTSASFTDLYYDPFEQLDSELQSKVEFLLLEGATGFRPSGCITTIHEDEVAKTQKAEGGGRLQALRSLSGTPKSMTSLSPRSSLSSPSPPCSPLMADPLLAGDAFLNSLEFEDPELSATLCELSLGNSAQERYRLEEPGTEGKQLGQAVNTAQGCGLKVACVSAAVSDESVAGDSGVYEASVQRLGASEAAAFDSDESEAVGATRIQIALKYDEKNKQFAILIIQLSNLSALLQQQDQKVNIRVAVLPCSESTTCLFRTRPLDASDTLVFNEVFWVSMSYPALHQKTLRVDVCTTDRSHLEECLGGAQISLAEVCRSGERSTRWYNLLSYKYLKKQSRELKPVGVMAPASGPASTVSWDQVCHLPTRPHPDVGRESLSQNWR

SEQ ID NO: 892642 - protein, 641 aa, Homo sapiens
MSDAQGSYKLDEAQAVLRETKAIKKAITCGEKEKQDLIKSLAMLKDGFRTDRGSHSDLWSSSSSLESSSFPLPKQYLDVSSQTDISGSFGINSNNQLAEKVRLRLRYEEAKRRIANLKIQLAKLDSEAWPGVLDSERDRLILINEKEELLKEMRFISPRKWTQGEVEQLEMARKRLEKDLQAARDTQSKALTERLKLNSKRNQLVRELEEATRQVATLHSQLKSLSSSMQSLSSGSSPGSLTSSRGSLVASSLDSSTSASFTDLYYDPFEQLDSELQSKVEFLLLEGATGFRPSGCITTIHEDEVAKTQKAEGGGRLQALRSLSGTPKSMTSLSPRSSLSSPSPPCSPLMADPLLAGDAFLNSLEFEDPELSATLCELSLGNSAQERYRLEEPGTEGKQLGQAVNTAQGCGLKVACVSAAVSDESVAGDSGVYEASVQRLGASEAAAFDSDESEAVGATRIQIALKYDEKNKQFAILIIQLSNLSALLQQQDQKVNIRVAVLPCSESTTCLFRTRPLDASDTLVFNEVFWVSMSYPALHQKTLRVDVCTTDRSHLEECLGGAQISLAEVCRSGERSTRWYNLLSYKYLKKQSRELKPVGVMAPASGPASTDAVSALLEQTAVELEKRQEGRSSTQTLEDSW

SEQ ID NO: 892643 - protein, 111 aa, Homo sapiens [sequence omitted]

SEQ ID NO: 892644 - protein, 746 aa, Homo sapiens
MGQTGKKSEKGPVCWRKRVKSEYMRLRQLKRFRRADEVKSMFSSNRQKILERTEILNQEWKQRRIQPVHILTSVSSLRGTRECSVTSDLDFPTQVIPLKTLNAVASVPIMYSWSPLQQNFMVEDETVLHNIPYMGDEVLDQDGTFIEELIKNYDGKVHGDRECGFINDEIFVELVNALGQYNDDDDDDDGDDPEEREEKQKDLEDHRDDKESRPPRKFPSDKIFEAISSMFPDKGTAEELKEKYKELTEQQLPGALPPECTPNIDGPNAKSVQREQSLHSFHTLFCRRCFKYDCFLHPFHATPNTYKRKNTETALDNKPCGPQCYQHLEGAKEFAAALTAERIKTPPKRPGGRRRGRLPNNSSRPSTPTINVLESKDTDSDREAGTETGGENNDKEEEEKKDETSSSSEANSRCQTPIKMKPNIEPPENVEWSGAEASMFRVLIGTYYDNFCAIARLIGTKTCRQVYEFRVKESSIIAPAPAEDVDTPPRKKKRKHRLWAAHCRKIQLKKDGSSNHVYNYQPCDHPRQPCDSSCPCVIAQNFCEKFCQCSSECQNRFPGCRCKAQCNTKQCPCYLAVRECDPDLCLTCGAADHWDSKNVSCKNCSIQRGSKKHLLLAPSDVAGWGIFIKDPVQKNEFISEYCGEIISQDEADRRGKVYDKYMCSFLFNLNNDFVVDATRKGNKIRFANHSVNPNCYAKVMMVNGDHRIGIFAKRAIQTGEELFFDYRYSQADALKYVGIEREMEIP

SEQ ID NO: 892645 - protein, 793 aa, Homo sapiens
  misc_feature (34)..(35): Xaa can be any naturally occurring amino acid
ENKSRWRLGCRFWRSVRSRPTPGGTQKAVEPRCXXNNASRRAGRRIIMGQTGKKSEKGPVCWRKRVKSEYMRLRQLKRFRRADEVKSMFSSNRQKILERTEILNQEWKQRRIQPVHILTSVSSLRGTRECSVTSDLDFPTQVIPLKTLNAVASVPIMYSWSPLQQNFMVEDETVLHNIPYMGDEVLDQDGTFIEELIKNYDGKVHGDRECGFINDEIFVELVNALGQYNDDDDDDDGDDPEEREEKQKDLEDHRDDKESRPPRKFPSDKIFEAISSMFPDKGTAEELKEKYKELTEQQLPGALPPECTPNIDGPNAKSVQREQSLHSFHTLFCRRCFKYDCFLHPFHATPNTYKRKNTETALDNKPCGPQCYQHLEGAKEFAAALTAERIKTPPKRPGGRRRGRLPNNSSRPSTPTINVLESKDTDSDREAGTETGGENNDKEEEEKKDETSSSSEANSRCQTPIKMKPNIEPPENVEWSGAEASMFRVLIGTYYDNFCAIARLIGTKTCRQVYEFRVKESSIIAPAPAEDVDTPPRKKKRKHRLWAAHCRKIQLKKDGSSNHVYNYQPCDHPRQPCDSSCPCVIAQNFCEKFCQCSSECQNRFPGCRCKAQCNTKQCPCYLAVRECDPDLCLTCGAADHWDSKNVSCKNCSIQRGSKKHLLLAPSDVAGWGIFIKDPVQKNEFISEYCGEIISQDEADRRGKVYDKYMCSFLFNLNNDFVVDATRKGNKIRFANHSVNPNCYAKVMMVNGDHRIGIFAKRAIQTGEELFFDYRYSQADALKYVGIEREMEIP

SEQ ID NO: 892646 - protein, 763 aa, Homo sapiens
ENKSRWRLGCRFWRSVRSRPTPGGTQKAVEPRRRRRRRAGATRGNNASRRAGRRIIMGQTGKKSEKGPVCWRKRVKSEYMRLRQLKRFRRADEVKSMFSSNRQKILERTEILNQEWKQRRIQPVHILTSVSSLRGTREVEDETVLHNIPYMGDEVLDQDGTFIEELIKNYDGKVHGDRECGFINDEIFVELVNALGQYNDDDDDDDGDDPEEREEKQKDLEDHRDDKESRPPRKFPSDKIFEAISSMFPDKGTAEELKEKYKELTEQQLPGALPPECTPNIDGPNAKSVQREQSLHSFHTLFCRRCFKYDCFLHPFHATPNTYKRKNTETALDNKPCGPQCYQHLEGAKEFAAALTAERIKTPPKRPGGRRRGRLPNNSSRPSTPTINVLESKDTDSDREAGTETGGENNDKEEEEKKDETSSSSEANSRCQTPIKMKPNIEPPENVEWSGAEASMFRVLIGTYYDNFCAIARLIGTKTCRQVYEFRVKESSIIAPAPAEDVDTPPRKKKRKHRLWAAHCRKIQLKKDGSSNHVYNYQPCDHPRQPCDSSCPCVIAQNFCEKFCQCSSECQNRFPGCRCKAQCNTKQCPCYLAVRECDPDLCLTCGAADHWDSKNVSCKNCSIQRGSKKHLLLAPSDVAGWGIFIKDPVQKNEFISEYCGEIISQDEADRRGKVYDKYMCSFLFNLNNDFVVDATRKGNKIRFANHSVNPNCYAKVMMVNGDHRIGIFAKRAIQTGEELFFDYRYSQADALKYVGIEREMEIP

SEQ ID NO: 892647 - protein, 723 aa, Homo sapiens
HSPALPSTIFHNTVFTWNQPSAKSLSLVVYSYNYYFWLDFPLQLPVVQPHSRLLYQLVDCSVTSDLDFPTQVIPLKTLNAVASVPIMYSWSPLQQNFMVEDETVLHNIPYMGDEVLDQDGTFIEELIKNYDGKVHGDRECGFINDEIFVELVNALGQYNDDDDDDDGDDPEEREEKQKDLEDHRDDKESRPPRKFPSDKIFEAISSMFPDKGTAEELKEKYKELTEQQLPGALPPECTPNIDGPNAKSVQREQSLHSFHTLFCRRCFKYDCFLHPFHATPNTYKRKNTETALDNKPCGPQCYQHLEGAKEFAAALTAERIKTPPKRPGGRRRGRLPNNSSRPSTPTINVLESKDTDSDREAGTETGGENNDKEEEEKKDETSSSSEANSRCQTPIKMKPNIEPPENVEWSGAEASMFRVLIGTYYDNFCAIARLIGTKTCRQVYEFRVKESSIIAPAPAEDVDTPPRKKKRKHRLWAAHCRKIQLKKDGSSNHVYNYQPCDHPRQPCDSSCPCVIAQNFCEKFCQCSSECQNRFPGCRCKAQCNTKQCPCYLAVRECDPDLCLTCGAADHWDSKNVSCKNCSIQRGSKKHLLLAPSDVAGWGIFIKDPVQKNEFISEYCGEIISQDEADRRGKVYDKYMCSFLFNLNNDFVVDATRKGNKIRFANHSVNPNCYAKVMMVNGDHRIGIFAKRAIQTGEELFFDYRYSQADALKYVGIEREMEIP

SEQ ID NO: 892648 - protein, 535 aa, Homo sapiens
ENKSRWRLGCRFWRSVRSRPTPGGTQKAVEPRRRRRRRAGATRGNNASRRAGRRIIMGQTGKKSEKGPVCWRKRVKSEYMRLRQLKRFRRADEVKSMFSSNRQKILERTEILNQEWKQRRIQPVHILTSVSSLRGTRECSVTSDLDFPTQVIPLKTLNAVASVPIMYSWSPLQQNFMVEDETVLHNIPYMGDEVLDQDGTFIEELIKNYDGKVHGDRECGFINDEIFVELVNALGQYNDDDDDDDGDDPEEREEKQKDLEDHRDDKESRPPRKFPSDKIFEAISSMFPDKGTAEELKEKYKELTEQQLPGALPPECTPNIDGPNAKSVQREQSLHSFHTLFCRRCFKYDCFLHPFHATPNTYKRKNTETALDNKPCGPQCYQHLEGAKEFAAALTAERIKTPPKRPGGRRRGRLPNNSSRPSTPTINVLESKDTDSDREAGTETGGENNDKEEEEKKDETSSSSEANSRCQTPIKMKPNIEPPENVEWSGAEASMFRVLIGTYYDNFCAIARLIGTKTCRQVRYPIKMLLKELQT

SEQ ID NO: 892649 - protein, 327 aa, Homo sapiens
MKPNIEPPENVEWSGAEASMFRVLIGTYYDNFCAIARLIGTKTCRQVYEFRVKESSIIAPAPAEDVDTPPRKKKRKHRLWAAHCRKIQLKKDGSSNHVYNYQPCDHPRQPCDSSCPCVIAQNFCEKFCQCSSECQNRFPGCRCKAQCNTKQCPCYLAVRECDPDLCLTCGAADHWDSKNVSCKNCSIQRGSKKHLLLAPSDVAGWGIFIKDPVQKNEFISEYCGEIISQDEADRRGKVYDKYMCSFLFNLNNDFVVDATRKGNKIRFANHSVNPNCYAKVMMVNGDHRIGIFAKRAIQTGEELFFDYRYSQADALKYVGIEREMEIP

SEQ ID NO: 892650 - protein, 224 aa, Homo sapiens
MLRREDVILSEKEEHTRLWAAHCRKIQLKKGQNRFPGCRCKAQCNTKQCPCYLAVRECDPDLCLTCGAADHWDSKNVSCKNCSIQRGSKKHLLLAPSDVAGWGIFIKDPVQKNEFISEYCGEIISQDEADRRGKVYDKYMCSFLFNLNNDFVVDATRKGNKIRFANHSVNPNCYAKVMMVNGDHRIGIFAKRAIQTGEELFFDYRYSQADALKYVGIEREMEIP

SEQ ID NO: 892651 - protein, 802 aa, Homo sapiens
ENKSRWRLGCRFWRSVRSRPTPGGTQKAVEPRRRRRRRAGATRGNNASRRAGRRIIMGQTGKKSEKGPVCWRKRVKSEYMRLRQLKRFRRADEVKSMFSSNRQKILERTEILNQEWKQRRIQPVHILTSVSSLRGTRECSVTSDLDFPTQVIPLKTLNAVASVPIMYSWSPLQQNFMVEDETVLHNIPYMGDEVLDQDGTFIEELIKNYDGKVHGDRECGFINDEIFVELVNALGQYNDDDDDDDGDDPEEREEKQKDLEDHRDDKESRPPRKFPSDKIFEAISSMFPDKGTAEELKEKYKELTEQQLPGALPPECTPNIDGPNAKSVQREQSLHSFHTLFCRRCFKYDCFLHPFHATPNTYKRKNTETALDNKPCGPQCYQHLEGAKEFAAALTAERIKTPPKRPGGRRRGRLPNNSSRPSTPTINVLESKDTDSDREAGTETGGENNDKEEEEKKDETSSSSEANSRCQTPIKMKPNIEPPENVEWSGAEASMFRVLIGTYYDNFCAIARLIGTKTCRQVYEFRVKESSIIAPAPAEDVDTPPRKKKRKHRLWAAHCRKIQLKKDGSSNHVYNYQPCDHPRQPCDSSCPCVIAQNFCEKFCQCSSECQNRFPGCRCKAQCNTKQCPCYLAVRECDPDLCLTCGAADHWDSKNVSCKNCSIQRGSKKHLLLAPSDVAGWGIFIKDPVQKNEFISEYCGEIISQDEADRRGKVYDKYMCSFLFNLNNDFVVDATRKGNKIRFANHSVNPNCYAKVMMVNGDHRIGIFAKRAIQTGEELFFDYRYSQADALKYVGIEREMEIP

SEQ ID NO: 892652 - protein, 738 aa, Homo sapiens
ENKSRWRLGCRFWRSVRSRPTPGGTQKAVEPRRRRRRRAGATRGNNASRRAGRRIIMGQTGKKSEKGPVCWRKRVKSEYMRLRQLKRFRRADEVKSMFSSNRQKILERTEILNQEWKQRRIQPVHILTSVSSLRGTRECSVTSDLDFPTQVIPLKTLNAVASVPIMYSWSPLQQNFMVEDETVLHNIPYMGDEVLDQDGTFIEELIKNYDGKVHGDRECGFINDEIFVELVNALGQYNDDDDDDDGDDPEEREEKQKDLEDHRDDKESRPPRKFPSDKIFEAISSMFPDKGTAEELKEKYKELTEQQLPGALPPECTPNIDGPNAKSVQREQSLHSFHTLFCRRCFKYDCFLHPFHATPNTYKRKNTETALDNKPCGPQCYQHLEGAKEFAAALTAERIKTPPKRPGGRRRGRLPNNSSRPSTPTINVLESKDTDSDREAGTETGGENNDKEEEEKKDETSSSSEANSRCQTPIKMKPNIEPPENVEWSGAEASMFRVLIGTYYDNFCAIARLIGTKTCRQVYEFRVKESSIIAPAPAEDVDTPPRKKKRKHRLWAAHCRKIQLKKDGSSNHVYNYQPCDHPRQPCDSSCPCVIAQNFCEKFCQCSSECQNRFPGCRCKAQCNTKQCPCYLAVRECDPDLCLTCGAADHWDSKNVSCKNCSIQRGSKKHLLLAPSDVAGWGIFIKDPVQKNEFISEYCGEIISQDEADRRGKVYDKYMCSFLFNLNNGMFQSWEAVSS

SEQ ID NO: 892653 - protein, 553 aa, Homo sapiens
ENKSRWRLGCRFWRSVRSRPTPGGTQKAVEPRRRRRRRAGATRGNNASRRAGRRIIMGQTGKKSEKGPVCWRKRVKSEYMRLRQLKRFRRADEVKSMFSSNRQKILERTEILNQEWKQRRIQPVHILTSVSSLRGTRECSVTSDLDFPTQVIPLKTLNAVASVPIMYSWSPLQQNFMVEDETVLHNIPYMGDEVLDQDGTFIEELIKNYDGKVHGDRECGFINDEIFVELVNALGQYNDDDDDDDGDDPEEREEKQKDLEDHRDDKESRPPRKFPSDKIFEAISSMFPDKGTAEELKEKYKELTEQQLPGALPPECTPNIDGPNAKSVQREQSLHSFHTLFCRRCFKYDCFLHPFHATPNTYKRKNTETALDNKPCGPQCYQHLEGAKEFAAALTAERIKTPPKRPGGRRRGRLPNNSSRPSTPTINVLESKDTDSDREAGTETGGENNDKEEEEKKDETSSSSEANSRCQTPIKMKPNIEPPENVEWSGAEASMFRVLIGTYYDNFCAIARLIGTKTCRQVYEFRVKESSIIAPAPAEDVDTPPRKKKRKHR

SEQ ID NO: 892654 - protein, 260 aa, Homo sapiens
ENKSRWRLGCRFWRSVRSRPTPGGTQKAVEPRRRRRRRAGATRGNNASRRAGRRIIMGQTGKKSEKGPVCWRKRVKSEYMRLRQLKRFRRADEVKSMFSSNRQKILERTEILNQEWKQRRIQPVHILTSCSVTSDLDFPTQVIPLKTLNAVASVPIMYSWSPLQQNFMVEDETVLHNIPYMGDEVLDQDGTFIEELIKNYDGKVHGDRECGFINDEIFVELVNALGQYNDDDDDDDGDDPEEREEKQKDLEDHRDGMPDY

SEQ ID NO: 892655 - protein, 802 aa, Homo sapiens; identical to SEQ ID NO: 892651

SEQ ID NO: 892656 - protein, 717 aa, Homo sapiens
KIKAMAIGLPLLALGPVASDTRWDSEGSGAPAAAAAARGGDAREQRESARGTKCSVTSDLDFPTQVIPLKTLNAVASVPIMYSWSPLQQNFMVEDETVLHNIPYMGDEVLDQDGTFIEELIKNYDGKVHGDRECGFINDEIFVELVNALGQYNDDDDDDDGDDPEEREEKQKDLEDHRDDKESRPPRKFPSDKIFEAISSMFPDKGTAEELKEKYKELTEQQLPGALPPECTPNIDGPNAKSVQREQSLHSFHTLFCRRCFKYDCFLHPFHATPNTYKRKNTETALDNKPCGPQCYQHLEGAKEFAAALTAERIKTPPKRPGGRRRGRLPNNSSRPSTPTINVLESKDTDSDREAGTETGGENNDKEEEEKKDETSSSSEANSRCQTPIKMKPNIEPPENVEWSGAEASMFRVLIGTYYDNFCAIARLIGTKTCRQVYEFRVKESSIIAPAPAEDVDTPPRKKKRKHRLWAAHCRKIQLKKDGSSNHVYNYQPCDHPRQPCDSSCPCVIAQNFCEKFCQCSSECQNRFPGCRCKAQCNTKQCPCYLAVRECDPDLCLTCGAADHWDSKNVSCKNCSIQRGSKKHLLLAPSDVAGWGIFIKDPVQKNEFISEYCGEIISQDEADRRGKVYDKYMCSFLFNLNNDFVVDATRKGNKIRFANHSVNPNCYAKVMMVNGDHRIGIFAKRAIQTGEELFFDYRYSQADALKYVGIEREMEIP

SEQ ID NO: 892657 - protein, 793 aa, Homo sapiens
ENKSRWRLGCRFWRSVRSRPTPGGTQKAVEPRRRRRRRAGATRGNNASRRAGRRIIMGQTGKKSEKGPVCWRKRVKSEYMRLRQLKRFRRADEVKSMFSSNRQKILERTEILNQEWKQRRIQPVHILTSCSVTSDLDFPTQVIPLKTLNAVASVPIMYSWSPLQQNFMVEDETVLHNIPYMGDEVLDQDGTFIEELIKNYDGKVHGDRECGFINDEIFVELVNALGQYNDDDDDDDGDDPEEREEKQKDLEDHRDDKESRPPRKFPSDKIFEAISSMFPDKGTAEELKEKYKELTEQQLPGALPPECTPNIDGPNAKSVQREQSLHSFHTLFCRRCFKYDCFLHPFHATPNTYKRKNTETALDNKPCGPQCYQHLEGAKEFAAALTAERIKTPPKRPGGRRRGRLPNNSSRPSTPTINVLESKDTDSDREAGTETGGENNDKEEEEKKDETSSSSEANSRCQTPIKMKPNIEPPENVEWSGAEASMFRVLIGTYYDNFCAIARLIGTKTCRQVYEFRVKESSIIAPAPAEDVDTPPRKKKRKHRLWAAHCRKIQLKKDGSSNHVYNYQPCDHPRQPCDSSCPCVIAQNFCEKFCQCSSECQNRFPGCRCKAQCNTKQCPCYLAVRECDPDLCLTCGAADHWDSKNVSCKNCSIQRGSKKHLLLAPSDVAGWGIFIKDPVQKNEFISEYCGEIISQDEADRRGKVYDKYMCSFLFNLNNDFVVDATRKGNKIRFANHSVNPNCYAKVMMVNGDHRIGIFAKRAIQTGEELFFDYRYSQADALKYVGIEREMEIP

SEQ ID NO: 892658 - protein, 829 aa, Homo sapiens
ENKSRWRLGCRFWRSVRSRPTPGGTQKAVEPRRRRRRRAGATRGNNASRRAGRRIIMGQTGKKSEKGPVCWRKRVKSEYMRLRQLKRFRRADEVKSMFSSNRQKILERTEILNQEWKQRRIQPVHILTSVSSLRGTRECSVTSDLDFPTQVIPLKTLNAVASVPIMYSWSPLQQNFMVEDETVLHNIPYMGDEVLDQDGTFIEELIKNYDGKVHGDRECGFINDEIFVELVNALGQYNDDDDDDDGDDPEEREEKQKDLEDHRDDKESRPPRKFPSDKIFEAISSMFPDKGTAEELKEKYKELTEQQLPGALPPECTPNIDGPNAKSVQREQSLHSFHTLFCRRCFKYDCFLHPFHATPNTYKRKNTETALDNKPCGPQCYQHLPSYLGTKWVYIACWILDRRFIEWHLQKEGAKEFAAALTAERIKTPPKRPGGRRRGRLPNNSSRPSTPTINVLESKDTDSDREAGTETGGENNDKEEEEKKDETSSSSEANSRCQTPIKMKPNIEPPENVEWSGAEASMFRVLIGTYYDNFCAIARLIGTKTCRQVYEFRVKESSIIAPAPAEDVDTPPRKKKRKHRLWAAHCRKIQLKKDGSSNHVYNYQPCDHPRQPCDSSCPCVIAQNFCEKFCQCSSECQNRFPGCRCKAQCNTKQCPCYLAVRECDPDLCLTCGAADHWDSKNVSCKNCSIQRGSKKHLLLAPSDVAGWGIFIKDPVQKNEFISEYCGEIISQDEADRRGKVYDKYMCSFLFNLNNDFVVDATRKGNKIRFANHSVNPNCYAKVMMVNGDHRIGIFAKRAIQTGEELFFDYRYSQADALKYVGIEREMEIP

SEQ ID NO: 892659 - protein, 738 aa, Homo sapiens; identical to SEQ ID NO: 892652

SEQ ID NO: 892660 - protein, 738 aa, Homo sapiens; identical to SEQ ID NO: 892652

SEQ ID NO: 892661 - protein, 614 aa, Homo sapiens
ENKSRWRLGCRFWRSVRSRPTPGGTQKAVEPRRRRRRRAGATRGNNASRRAGRRIIMGQTGKKSEKGPVCWRKRVKSEYMRLRQLKRFRRADEVKSMFSSNRQKILERTEILNQEWKQRRIQPVHILTSVSSLRGTRECSVTSDLDFPTQVIPLKTLNAVASVPIMYSWSPLQQNFMVEDETVLHNIPYMGDEVLDQDGTFIEELIKNYDGKVHGDRECGFINDEIFVELVNALGQYNDDDDDDDGDDPEEREEKQKDLEDHRDDKESRPPRKFPSDKIFEAISSMFPDKGTAEELKEKYKELTEQQLPGALPPECTPNIDGPNAKSVQREQSLHSFHTLFCRRCFKYDCFLHPFHATPNTYKRKNTETALDNKPCGPQCYQHLEGAKEFAAALTAERIKTPPKRPGGRRRGRLPNNSSRPSTPTINVLESKDTDSDREAGTETGGENNDKEEEEKKDETSSSSEANSRCQTPIKMKPNIEPPENVEWSGAEASMFRVLIGTYYDNFCAIARLIGTKTCRQVYEFRVKESSIIAPAPAEDVDTPPRKKKRKHRLWAAHCRKIQLKKDGSSNHVYNYQPCDHPRQPCDSSCPCVIAQNFCEKFCQCSSECKYLLL

SEQ ID NO: 892662 - protein, 386 aa, Homo sapiens
ENKSRWRLGCRFWRSVRSRPTPGGTQKAVEPRRRRRRRAGATRGNNASRRAGRRIIMGQTGKKSEKGPVCWRKRVKSEYMRLRQLKRFRRADEVKSMFSSNRQKILERTEILNQEWKQRRIQPVHILTSVSSLRGTRECSVTSDLDFPTQVIPLKTLNAVASVPIMYSWSPLQQNFMVEDETVLHNIPYMGDEVLDQDGTFIEELIKNYDGKVHGDRECGFINDEIFVELVNALGQYNDDDDDDDGDDPEEREEKQKDLEDHRDDKESRPPRKFPSDKIFEAISSMFPDKGTAEELKEKYKELTEQQLPGALPPECTPNIDGPNAKSVQREQSLHSFHTLFCRRCFKYDCFLHPFHATPNTYKRKNTETALDNKPCGPQCYQHLPH

SEQ ID NO: 892663 - protein, 202 aa, Homo sapiens
MATLIYVDKENGEPGTRVVAKDGLKLGSGPSIKALDGRSQVSTPRFGKTFDAPPALPKATRKALGTVNRATEKSVKTKGPLKQKQPSFSAKKMTEKTVKAKSSVPASDDAYPEIEKFFPFNPLDFESFDLPEEHQIAHLPLSGVPLMILDEERELEKLFQLGPPSPVKMPSPPWESNLLQSPSSILSTLDVELPPVCCDIDI

SEQ ID NO: 892664 - protein, 202 aa, Homo sapiens; identical to SEQ ID NO: 892663

SEQ ID NO: 892665 - protein, 202 aa, Homo sapiens; identical to SEQ ID NO: 892663

SEQ ID NO: 892666 - protein, 202 aa, Homo sapiens; identical to SEQ ID NO: 892663

SEQ ID NO: 892667 - protein, 216 aa, Homo sapiens
MATLIYVDKENGEPGTRVVAKDGLKLGSGPSIKALDGRSQVSTPRFGKTFDAPPALPKATRKALGTVNRATEKSVKTKGPLKQKQPSFSAKKMTEKTVKAKSSVPASDDAYPEIEKFFPFNPLDFESFDLPEEHQIAHLPLSGVPLMILDEERELEKLFQLGPPSPVKMPSPPWESNLLQSPSSILSTLDGGLAPGCGLFLISSPQWGLVKSFSKK

SEQ ID NO: 892668 - protein, 142 aa, Homo sapiens
YVPRAILVDLEPGTMDSVRSGPFGQIFRPDNFVFESVWGRYKVVWSKDDAYPEIEKFFPFNPLDFESFDLPEEHQIAHLPLSGVPLMILDEERELEKLFQLGPPSPVKMPSPPWESNLLQSPSSILSTLDVELPPVCCDIDI

SEQ ID NO: 892669 - protein, 202 aa, Homo sapiens; identical to SEQ ID NO: 892663

SEQ ID NO: 892670 - protein, 202 aa, Homo sapiens; identical to SEQ ID NO: 892663

SEQ ID NO: 892671 - protein, 110 aa, Homo sapiens
MTEKTVKAKSSVPASDDAYPEIEKFFPFNPLDFESFDLPEEHQIAHLPLSGVPLMILDEERELEKLFQLGPPSPVKMPSPPWESNLLQSPSSILSTLDVELPPVCCDIDI

SEQ ID NO: 892672 - protein, 212 aa, Homo sapiens
MPLPKVGGGFGGERSSLYTQYLSCTGILLLEYSYGKTFSSAIKALDGRSQVSTPRFGKTFDAPPALPKATRKALGTVNRATEKSVKTKGPLKQKQPSFSAKKMTEKTVKAKSSVPASDDAYPEIEKFFPFNPLDFESFDLPEEHQIAHLPLSGVPLMILDEERELEKLFQLGPPSPVKMPSPPWESNLLQSPSSILSTLDVELPPVCCDIDI

SEQ ID NO: 892673 - protein, 185 aa, Homo sapiens
EFELRSPSLGSGPSIKALDGRSQVSTPRFGKTFDAPPALPKATRKALGTVNRATEKSVKTKGPLKQKQPSFSAKKMTEKTVKAKSSVPASDDAYPEIEKFFPFNPLDFESFDLPEEHQIAHLPLSGVPLMILDEERELEKLFQLGPPSPVKMPSPPWESNLLQSPSSILSTLDVELPPVCCDIDI

SEQ ID NO: 892674 - protein, 202 aa, Homo sapiens; identical to SEQ ID NO: 892663

SEQ ID NO: 892675 - protein, 202 aa, Homo sapiens; identical to SEQ ID NO: 892663

SEQ ID NO: 892676 - protein, 202 aa, Homo sapiens; identical to SEQ ID NO: 892663

SEQ ID NO: 892677 - protein, 202 aa, Homo sapiens; identical to SEQ ID NO: 892663

SEQ ID NO: 892678 - protein, 202 aa, Homo sapiens; identical to SEQ ID NO: 892663

SEQ ID NO: 892679 - protein, 125 aa, Homo sapiens
MATLIYVDKENGEPGTRVVAKDGLKLGSGPSIKALDGRSQVSTPRFGKTFDAPPALPKATRKALGTVNRATEKSVKTKGPLKQKQPSFSAKKMTEKTVKAKSSVPASDDAYPEIEKFFPFNPLEH

SEQ ID NO: 892680 - protein, 139 aa, Homo sapiens
MATLIYVDKENGEPGTRVVAKDGLKLGSGPSIKALDGRSQVSTPRFGKTFDAPPALPKATRKALGTVNRATEKSVKTKGPLKQKQPSFSAKKMTEKTVKAKSSVPASDDAYPEIEKFFPFNPLDSIFCNCEKCFWPLVS

SEQ ID NO: 892681 - protein, 186 aa, Homo sapiens [sequence omitted]

SEQ ID NO: 892682 - protein, 326 aa, Homo sapiens
DGSGSAGGARVGSGEFGVEMAALAPLPPLPAQFKSIQHHLRTAQEHDKRDPVVAYYCRLYAMQTGMKIDSKTPECRKFLSKLMDQLEALKKQLGDNEAITQEIVGCAHLENYALKMFLYADNEDRAGRFHKNMIKSFYTASLLIDVITVFGELTDENVKHRKYARWKATYIHNCLKNGETPQAGPVGIEEDNDIEENEDAGAASLPTQPTQPSSSSTYDPSNMPSGNYTGIQIPPGAHAPANTPAEVPHSTGVASNTIQPTPQTIPAIDPALFNTISQGDVRLTPEDFARAQKYCKYAGSALQYEDVSTAVQNLQKALKLLTTGRE

SEQ ID NO: 892683 - protein, 326 aa, Homo sapiens; identical to SEQ ID NO: 892682

SEQ ID NO: 892684 - protein, 326 aa, Homo sapiens; identical to SEQ ID NO: 892682

SEQ ID NO: 892685 - protein, 326 aa, Homo sapiens; identical to SEQ ID NO: 892682

SEQ ID NO: 892686 - protein, 136 aa, Homo sapiens
DGSGSAGGARVGSGEFGVEMAALAPLPPLPAQFKSIQHHLRTAQEHDKRDPVVAYYCRLYAMQTGMKIDSKTPECRKFLSKLMDQLEALKKQLGDNEAITQEIVGCAHLENYALKMFLYADNEDRAGRFHNIWRTH

SEQ ID NO: 892687 - protein, 326 aa, Homo sapiens; identical to SEQ ID NO: 892682

SEQ ID NO: 892688 - protein, 326 aa, Homo sapiens; identical to SEQ ID NO: 892682

SEQ ID NO: 892689 - protein, 326 aa, Homo sapiens; identical to SEQ ID NO: 892682

SEQ ID NO: 892690 - protein, 299 aa, Homo sapiens
DGSGSAGGARVGSGEFGVEMAALAPLPPLPAQFKSIQHHLRTAQEHDKRDPVVAYYCRLYAMQTGMKIDSKTPECRKFLSKLMDQLEALKKQLGDNEAITQEIVGCAHLENYALKMFLYADNEDRAGRFHKNMIKSFYTASLLIDVITVFGELTDENVKHRKYARWKATYIHNCLKNGETPQAGPVGIEEDNDIEENEDAGAASLPTQPTQPSSSSTYDPSNMPSGNYTGIQIPPGAHAPANTPAEVPHSTGDVRLTPEDFARAQKYCKYAGSALQYEDVSTAVQNLQKALKLLTTGRE

SEQ ID NO: 892691 - protein, 326 aa, Homo sapiens; identical to SEQ ID NO: 892682

SEQ ID NO: 892692 - protein, 326 aa, Homo sapiens; identical to SEQ ID NO: 892682

SEQ ID NO: 892693 - protein, 198 aa, Homo sapiens
DGSGSAGGARVGSGEFGVEMAALAPLPPLPAQFKSIQHHLRTAQEHDKRDPVVAYYCRLYAMQTGMKIDSKTPECRKFLSKLMDQLEALKKQLGDNEAITQEIVGCAHLENYALKMFLYADNEDRAGRFHKNMIKSFYTASLLIDVITVFGELTDENVKHRKYARWKATYIHNCLKNGETPQAGPVGIEEDNVIIFNL

SEQ ID NO: 892694 - protein, 157 aa, Homo sapiens
DGSGSAGGARVGSGEFGVEMAALAPLPPLPAQFKSIQHHLRTAQEHDKRDPVVAYYCRLYAMQTGMKIDSKTPECRKFLSKLMDQLEALKKQLGDNEAITQEIVGCAHLENYALKMFLYADNEDRAGRFHKNMIKSFYTASLLIDVITVFGELTDEV

SEQ ID NO: 892695 - protein, 255 aa, Homo sapiens
DGSGSAGGARVGSGEFGVEMAALAPLPPLPAQFKSIQHHLRTAQEHDKRDPVVAYYCRLYAMQTGMKIDSKTPECRKFLSKLMDQLEALKKQLGDNEAITQEIVGCAHLENYALKMFLYADNEDRAGRFHKNMIKSFYTASLLIDVITVFGELTDENVKHRKYARWKATYIHNCLKNGETPQAGPVGIEEDNDIEENEDAGAASLPTQPTQPSSSSTYDPSNMPSGNYTGIQIPPGAHAPANTPAEVPHSTGGKL

SEQ ID NO: 892696 - protein, 328 aa, Homo sapiens [sequence omitted]

SEQ ID NO: 892697 - protein, 400 aa, Homo sapiens
MKVKRTYSHGTYRAGPMRQISLVGAVDEEVGDYFPEFLDMLEESPFLKCTLPWGTLSSLKLQSRKDSDDGPIMWVRPGEQMIPVADMPKSPFKRKRTTNEIKNLQYLPRTSEPREMLFEDRTRAHADHIGQGFERQTTAAVGVLKAVHCGEWPDQPRITKDVICFHAEDFLEVVQRMQLDLHEPPLSQCVQWVDDAKLNQLRREGIRYARIQLYDNDIYFIPRNVVHQFKTVSAVCSLAWHIRLKLYHSEEDTSQNTATHETGTSSDSTSSVLGPHTDNMICAVSKASLDSVFSDKLHSKYELQQIKHEPIASVRIKEEPVNVNIPEKTTALNNMDGKNVKAKLDHVQFAEFKIDMDSKFENSNKDLKEELCPGNLSLVDTRQHSSAHSNQDKKDDDILC

SEQ ID NO: 892698 - protein, 368 aa, Homo sapiens
SVPDFLSVLEESPFLKCTLPWGTLSSLKLQSRKDSDDGPIMWVRPGEQMIPVADMPKSPFKRKRTTNEIKNLQYLPRTSEPREMLFEDRTRAHADHIGQGFERQTTAAVGVLKAVHCGEWPDQPRITKDVICFHAEDFLEVVQRMQLDLHEPPLSQCVQWVDDAKLNQLRREGIRYARIQLYDNDIYFIPRNVVHQFKTVSAVCSLAWHIRLKLYHSEEDTSQNTATHETGTSSDSTSSVLGPHTDNMICAVSKASLDSVFSDKLHSKYELQQIKHEPIASVRIKEEPVNVNIPEKTTALNNMDGKNVKAKLDHVQFAEFKIDMDSKFENSNKDLKEELCPGNLSLVDTRQHSSAHSNQDKKDDDILC

SEQ ID NO: 892699 - protein, 328 aa, Homo sapiens [sequence omitted]

SEQ ID NO: 892700 - protein, 447 aa, Homo sapiens
AGGVRRAEFRFIAGLPTPIRQCTTTGLEGAGERIAKKYLYLHIMVDHYEVKRTYSHGTYRAGPMRQISLVGAVDEEVGDYFPEFLDMLEESPFLKCTLPWGTLSSLKLQSRKDSDDGPIMWVRPGEQMIPVADMPKSPFKRKRTTNEIKNLQYLPRTSEPREMLFEDRTRAHADHIGQGFERQTTAAVGVLKAVHCGEWPDQPRITKDVICFHAEDFLEVVQRMQLDLHEPPLSQCVQWVDDAKLNQLRREGIRYARIQLYDNDIYFIPRNVVHQFKTVSAVCSLAWHIRLKLYHSEEDTSQNTATHETGTSSDSTSSVLGPHTDNMICAVSKASLDSVFSDKLHSKYELQQIKHEPIASVRIKEEPVNVNIPEKTTALNNMDGKNVKAKLDHVQFAEFKIDMDSKFENSNKDLKEELCPGNLSLVDTRQHSSAHSNQDKKDDDILC

SEQ ID NO: 892701 - protein, 193 aa, Homo sapiens
SVPDFLSVLEESPFLKCTLPWGTLSSLKLQSRKDSDDGPIMWVRPGEQMIPVADMPKSPFKRKRTTNEIKNLQYLPRTSEPREMLFEDRTRAHADHIGQGFERQTTAAVGVLKAVHCGEWPDQPRITKDVICFHAEDFLEVVQRMQLDLHEPPLSQECCSSVQDSFSCMQFSMAYSAQIISLRGGHFSEYSYS

SEQ ID NO: 892702 - protein, 122 aa, Homo sapiens
EISFVIWILKLPCFLVLFFVSSCLDTQYCLTVHHFTSHGRSTSITKKCASRSECHFVGCHHSRDSEHTECRSCCEGMICNVELPTNHTNAVFAVMHAQRTSGSSAPTLYLPVLAWVFVLPLL

SEQ ID NO: 892703 - protein, 183 aa, Homo sapiens
MLYKSSDRPAHKVSMLLLCHALAIAVVQIVIFSESWAFAKNINFYNVRPPLDPTPFPNSFKCFTCENAGDNYNCNRWAEDKWCPQNTQYCLTVHHFTSHGRSTSITKKCASRSECHFVGCHHSRDSEHTECRSCCEGMICNVELPTNHTNAVFAVMHAQRTSGSSAPTLYLPVLAWVFVLPLL

SEQ ID NO: 892704 - protein, 317 aa, Homo sapiens
HFLSRAGWVGTGSLPPPQRWPLPHCRPPGPPFNLVVEPCGFPAEPGPGLLPRGRGSPVPARPPPAPQVVQGREEPRPAPRGSSQRRPQAGALGAWAGSRVRAPRGSVGAGGEICHTSACCWQPSWTRLLLLITWMLYKSSDRPAHKVSMLLLCHALAIAVVQIVIFSESWAFAKNINFYNVRPPLDPTPFPNSFKCFTCENAGDNYNCNRWAEDKWCPQNTQYCLTVHHFTSHGRSTSITKKCASRSECHFVGCHHSRDSEHTECRSCCEGMICNVELPTNHTNAVFAVMHAQRTSGSSAPTLYLPVLAWVFVLPLL

SEQ ID NO: 892705 - protein, 202 aa, Homo sapiens
  misc_feature (18)..(18): Xaa can be any naturally occurring amino acid
DLLYTISSAAGEEQKKAXYKAYKSSDRPAHKVSMLLLCHALAIAVVQIVIFSESWAFAKNINFYNVRPPLDPTPFPNSFKCFTCENAGDNYNCNRWAEDKWCPQNTQYCLTVHHFTSHGRSTSITKKCASRSECHFVGCHHSRDSEHTECRSCCEGMICNVELPTNHTNAVFAVMHAQRTSGSSAPTLYLPVLAWVFVLPLL

SEQ ID NO: 892706 - protein, 341 aa, Homo sapiens
HFLSRAGWVGTGSLPPPQRWPLPHCRPPGPPFNLVVEPCGFPAEPGPGLLPRGRGSPVPARPPPAPQVVQGREEPRPAPRGSSQRRPQAGALGAWAGSRVRAPRGSVGAGGEICHTSACCWQPSWTRLLLLITWMLLITLSANLFTVPERSLTTTFSFSRYKSSDRPAHKVSMLLLCHALAIAVVQIVIFSESWAFAKNINFYNVRPPLDPTPFPNSFKCFTCENAGDNYNCNRWAEDKWCPQNTQYCLTVHHFTSHGRSTSITKKCASRSECHFVGCHHSRDSEHTECRSCCEGMICNVELPTNHTNAVFAVMHAQRTSGSSAPTLYLPVLAWVFVLPLL

SEQ ID NO: 892707 - protein, 212 aa, Homo sapiens
HFLSRAGWVGTGSLPPPQRWPLPHCRPPGPPFNLVVEPCGFPAEPGPGLLPRGRGSPVPARPPPAPQVVQGREEPRPAPRGSSQRRPQAGALGAWAGSRVRAPRGSVGAGGEICHTSACCWQPSWTRLLLLITWMLLITLSANLFTVPERSLTTTFSFSRYKSSDRPAHKVSMLLLCHALAIAVVQIVIFSESWAFAKNINFYNVRPPLDHK

SEQ ID NO: 892708 - protein, 169 aa, Homo sapiens [sequence omitted]

SEQ ID NO: 892709 - protein, 497 aa, Homo sapiens
MEGSGEQPGPQPQHPGDHRIRDGDFVVLKREDVFKAVQVQRRKKVTFEKQWFYLDNVIGHSYGTAFEVTSGGSLQPKKKREEPTAETKEAGTDNRNIVDDGKSQKLTQDDIKALKDKGIKGEEIVQQLIENSTTFRDKTEFAQDKYIKKKKKKYEAIITVVKPSTRILSIMYYAREPGKINHMRYDTLAQMLTLGNIRAGNKMIVMETCAGLVLGAMMERMGGFGSIIQLYPGGGPVRAATACFGFPKSFLSGLYEFPLNKVDSLLHGTFSAKMLSSEPKDSALVEESNGTLEEKQASEQENEDSMAEAPESNHPEDQETMETISQDPEHKGPKERGSKKDYIQEKQRRQEEQRKRHLEAAALLSERNADGLIVASRFHPTPLLLSLLDFVAPSRPFVVYCQYKEPLLECYTKLRERGGVINLRLSETWLRNYQVLPDRSHPKLLMSGGGGYLLSGFTVAMDNLKADTSLKSNASTLESHETEEPAAKKRKCPESDS

SEQ ID NO: 892710 - protein, 327 aa, Homo sapiens
MYYAREPGKINHMRYDTLAQMLTLGNIRAGNKMIVMETCAGLVLGAMMERMGGFGSIIQLYPGGGPVRAATACFGFPKSFLSGLYEFPLNKVDSLLHGTFSAKMLSSEPKDSALVEESNGTLEEKQASEQENEDSMAEAPESNHPEDQETMETISQDPEHKGPKERGSKKDYIQEKQRRQEEQRKRHLEAAALLSERNADGLIVASRFHPTPLLLSLLDFVAPSRPFVVYCQYKEPLLECYTKLRERGGVINLRLSETWLRNYQVLPDRSHPKLLMSGGGGYLLSGFTVAMDNLKADTSLKSNASTLESHETEEPAAKKRKCPESDS

SEQ ID NO: 892711 - protein, 400 aa, Homo sapiens
MEGSGEQPGPQPQHPGDHRIRDGDFVVLKREDVFKAVQVQRRKKVTFEKQWFYLDNVIGHSYGTAFEVTSGGSLQPKKKREEPTAETKEAGTDNRNIVDDGKSQKLTQDDIKALKDKGIKGEEIVQQLIENSTTFRDKTEFAQDKYIKKKKKKYEAIITVVKPSTRILSIMYYAREPGKINHMRYDTLAQMLTLGNIRAGNKMIVMETCAGLVLGAMMERMGGFGSIIQLYPGGGPVRAATACFGFPKSFLSGLYEFPLNKVDSLLHGTFSAKMLSSEPKDSALVEESNGTLEEKQASEQENEDSMAEAPESNHPEDQETMETISQDPEHKGPKERGSKKDYIQEKQRRQEEQRKRHLEAAALLSERNADGCVDGRRQETPQCMWALLQTDWHSLSPCLL

SEQ ID NO: 892712 - protein, 239 aa, Homo sapiens
LHPGTDSSRLDAGTMVMAEGTAVLRRNRPGTKAQDFYNWPDESFDEMDSTLAVQQYIQQNIRADCSNIDKILEPPEGQDEGVWKYEHLRQFCLELNGLAVKLQSECHPDTCTQMTATEQWIFLCAAHKTPKECPAIDYTRHTLDGAACLLNSNKYFPSRVSIKESSVAKLGSVCRRIYRIFSHAYFHHRQIFDEYENETFLCHRFTKFVMKYNLMSKDNLIVPILEEEVQNSVSGESEA

SEQ ID NO: 892713 - protein, 239 aa, Homo sapiens; identical to SEQ ID NO: 892712

SEQ ID NO: 892714 - protein, 193 aa, Homo sapiens
MDSTLAVQQYIQQNIRADCSNIDKILEPPEGQDEGVWKYEHLRQFCLELNGLAVKLQSECHPDTCTQMTATEQWIFLCAAHKTPKECPAIDYTRHTLDGAACLLNSNKYFPSRVSIKESSVAKLGSVCRRIYRIFSHAYFHHRQIFDEYENETFLCHRFTKFVMKYNLMSKDNLIVPILEEEVQNSVSGESEA

SEQ ID NO: 892715 - protein, 239 aa, Homo sapiens; identical to SEQ ID NO: 892712

SEQ ID NO: 892716 - protein, 239 aa, Homo sapiens; identical to SEQ ID NO: 892712

SEQ ID NO: 892717 - protein, 239 aa, Homo sapiens; identical to SEQ ID NO: 892712

SEQ ID NO: 892718 - protein, 218 aa, Homo sapiens
LHPGTDSSRLDAGTMVMAEGTAVLRRNRPGTKAQYIQQNIRADCSNIDKILEPPEGQDEGVWKYEHLRQFCLELNGLAVKLQSECHPDTCTQMTATEQWIFLCAAHKTPKECPAIDYTRHTLDGAACLLNSNKYFPSRVSIKESSVAKLGSVCRRIYRIFSHAYFHHRQIFDEYENETFLCHRFTKFVMKYNLMSKDNLIVPILEEEVQNSVSGESEA

SEQ ID NO: 892719 - protein, 193 aa, Homo sapiens; identical to SEQ ID NO: 892714

SEQ ID NO: 892720 - protein, 126 aa, Homo sapiens
MTATEQWIFLCAAHKTPKECPAIDYTRHTLDGAACLLNSNKYFPSRVSIKESSVAKLGSVCRRIYRIFSHAYFHHRQIFDEYENETFLCHRFTKFVMKYNLMSKDNLIVPILEEEVQNSVSGESEA

SEQ ID NO: 892721 - protein, 168 aa, Homo sapiens
FGGPFGVSPQKKKPLFFPKGERVGKNGPPQSQSECHPDTCTQMTATEQWIFLCAAHKTPKECPAIDYTRHTLDGAACLLNSNKYFPSRVSIKESSVAKLGSVCRRIYRIFSHAYFHHRQIFDEYENETFLCHRFTKFVMKYNLMSKDNLIVPILEEEVQNSVSGESEA

SEQ ID NO: 892722 - protein, 575 aa, Homo sapiens
MSRSPDAKEDPVECPLCMEPLEIDDINFFPCTCGYQICRFCWHRIRTDENGLCPACRKPYPEDPAVYKPLSQEELQRIKNEKKQKQNERKQKISENRKHLASVRVVQKNLVFVVGLSQRLADPEVLKRPEYFGKFGKIHKVVINNSTSYAGSQGPSASAYVTYIRSEDALRAIQCVNNVVVDGRTLKASLGTTKYCSYFLKNMQCPKPDCMYLHELGDEAASFTKEEMQAGKHQEYEQKLLQELYKLNPNFLQLSTGSVDKNKNKVTPLQRYDTPIDKPSDSLSIGNGDNSQQISNSDTPSPPPGLSKSNPVIPISSSNHSARSPFEGAVTESQSLFSDNFRHPNPIPSGLPPFPSSPQTSSDWPTAPEPQSLFTSETIPVSSSTDWQAAFGFGSSKQPEDDLGFDPFDVTRKALADLIEKELSVQDQPSLSPTSLQNSSSHTTTAKGPGSGFLHPAAATNANSLNSTFSVLPQRFPQFQQHRAVYNSFSFPGQAARYPWMAFPRNSIMHLNHTANPTSNSNFLDLNLPPQHNTGLGGIPVAGEEEVKVSTMPLSTSSHSLQQGQQPTSLHTTVA

SEQ ID NO: 892723 - protein, 575 aa, Homo sapiens; identical to SEQ ID NO: 892722

SEQ ID NO: 892724 - protein, 642 aa, Homo sapiens
MSRSPDAKEDPVECPLCMEPLEIDDINFFPCTCGYQICRFCWHRIRTDENGLCPACRKPYPEDPAVYKPLSQEELQRIKNEKKQKQNERKQKISENRKHLASVRVVQKNLVFVVGLSQRLADPEVLKRPEYFGKFGKIHKVVINNSTSYAGSQGPSASAYVTYIRSEDALRAIQCVNNVVVDGRTLKASLGTTKYCSYFLKNMQCPKPDCMYLHELGDEAASFTKEEMQAGKHQEYEQKLLQELYKLNPNFLQLSTGSVDKNKNKVTPLQRYDTPIDKPSDSLSIGNGDNSQQISNSDTPSPPPGLSKSNPVIPISSSNHSARSPFEGAVTESQSLFSDNFRHPNPIPSGLPPFPSSPQTSSDWPTAPEPQSLFTSETIPVSSSTDWQAAFGFGSSKQPEDDLGFDPFDVTRKALADLIEKELSVQDQPSLSPTSLQNSSSHTTTAKGPGSGFLHPAAATNANSLNSTFSVLPQRFPQFQQHRAVYNSFSFPGQAARYPWMAFPRNSIMHLNHTANPTSNSNFLDLNLPPQHNTGLGGIPVAGIPASSGNSLDSLQDDNPPHWLKSLQALTEMDGPSAAPSQTHHSAPFSTQIPLHRASWNPYPPPSNPSSFHSPPPGFQTAFRPPSKTPTDLLQSSTLDRH

SEQ ID NO: 892725 - protein, 575 aa, Homo sapiens; identical to SEQ ID NO: 892722

SEQ ID NO: 892726 - protein, 161 aa, Homo sapiens
MKEWQDGLRALLPNININFGGLPNSSSPSNANHSAPTSNTATTDSLSWDSPGSWTDPAIITGIPASSGNSLDSLQDDNPPHWLKSLQALTEMDGPSAAPSQTHHSAPFSTQIPLHRASWNPYPPPSNPSSFHSPPPGFQTAFRPPSKTPTDLLQSSTLDRH

SEQ ID NO: 892727 - protein, 575 aa, Homo sapiens; identical to SEQ ID NO: 892722

SEQ ID NO: 892728 - protein, 546 aa, Homo sapiens [sequence omitted]

SEQ ID NO: 892729 - protein, 642 aa, Homo sapiens; identical to SEQ ID NO: 892724

SEQ ID NO: 892730 - protein, 642 aa, Homo sapiens; identical to SEQ ID NO: 892724

SEQ ID NO: 892731 - protein, 713 aa, Homo sapiens
MSRSPDAKEDPVECPLCMEPLEIDDINFFPCTCGYQICRFCWHRIRTDENGLCPACRKPYPEDPAVYKPLSQEELQRIKNEKKQKQNERKQKISENRKHLASVRVVQKNLVFVVGLSQRLADPEVLKRPEYFGKFGKIHKVVINNSTSYAGSQGPSASAYVTYIRSEDALRAIQCVNNVVVDGRTLKASLGTTKYCSYFLKNMQCPKPDCMYLHELGDEAASFTKEEMQAGKHQEYEQKLLQELYKLNPNFLQLSTGSVDKNKNKVTPLQRYDTPIDKPSDSLSIGNGDNSQQISNSDTPSPPPGLSKSNPVIPISSSNHSARSPFEGAVTESQSLFSDNFRHPNPIPSGLPPFPSSPQTSSDWPTAPEPQSLFTSETIPVSSSTDWQAAFGFGSSKQPEDDLGFDPFDVTRKALADLIEKELSVQDQPSLSPTSLQNSSSHTTTAKGPGSGFLHPAAATNANSLNSTFSVLPQRFPQFQQHRAVYNSFSFPGQAARYPWMAFPRNSIMHLNHTANPTSNSNFLDLNLPPQHNTGLGGIPVADNSSSVESLNMKEWQDGLRALLPNININFGGLPNSSSPSNANHSAPTSNTATTDSLSWDSPGSWTDPAIITGIPASSGNSLDSLQDDNPPHWLKSLQALTEMDGPSAAPSQTHHSAPFSTQIPLHRASWNPYPPPSNPSSFHSPPPGFQTAFRPPSKTPTDLLQSSTLDRH

SEQ ID NO: 892732 - protein, 575 aa, Homo sapiens; identical to SEQ ID NO: 892722

SEQ ID NO: 892733 - protein, 433 aa, Homo sapiens
MSRSPDAKEDPVECPLCMEPLEIDDINFFPCTCGYQICRFCWHRIRTDENGLCPACRKPYPEDPAVYKPLSQEELQRIKNEKKQKQNERKQKISENRKHLASVRVVQKNLVFVVGLSQRLADPEVLKRPEYFGKFGKIHKVVINNSTSYAGSQGPSASAYVTYIRSEDALRAIQCVNNVVVDGRTLKASLGTTKYCSYFLKNMQCPKPDCMYLHELGDEAASFTKEEMQAGKHQEYEQKLLQELYKLNPNFLQLSTGSVDKNKNKVTPLQRYDTPIDKPSDSLSIGNGDNSQQISNSDTPSPPPGLSKSNPVIPISSSNHSARSPFEGAVTESQSLFSDNFRHPNPIPSGLPPFPSSPQTSSDWPTAPEPQSLFTSETIPVSSSTDWQAAFGFGSSKQPEDDLGFDPFDVTRKALADLTEPIERKRLAVLKRR

SEQ ID NO: 892734 - protein, 77 aa, Homo sapiens
KRERVRRQRGGKQRLSFENFFNWGAEAAFGLQLFPLHFHRGRILRSQPSLFPQSPVPCLTSFPSGPRLPRPKPSLPL

SEQ ID NO: 892735 - protein, 275 aa, Homo sapiens
MESYSVTQAGVQWHELCSLQPSPPRFREMCIEQDGRVHLTVVYFGKEEINEVKGILENTSKAANFRNFTFIQLNGEFSRGKGLDVGARFWKGSNVLLFFCDVDIYFTSEFLNTCRLNTQPGKKVFYPVLFSQYNPGIIYGHHDAVPPLEQQLVIKKETGFWRDFGFGMTCQYRSDFINIGGFDLDIKGWGGEDVHLYRKYLHSNLIVVRTPVRGLFHLWHEKRCMDELTPEQYKMCMQSKAMNEASHGQLGMLVFRHEIEAHLRKQKQKTSSKKT

SEQ ID NO: 892736 - protein, 275 aa, Homo sapiens; identical to SEQ ID NO: 892735

SEQ ID NO: 892737 - protein, 347 aa, Homo sapiens
SALETLNSPAENSPNHRPYTASDFIEGIYRTERDKGTLYELTFKGDHKHEFKRLILFRPFGPIMKVKNEKLNMANTLINVIVPLAKRVDKFRQFMQNFREMCIEQDGRVHLTVVYFGKEEINEVKGILENTSKAANFRNFTFIQLNGEFSRGKGLDVGARFWKGSNVLLFFCDVDIYFTSEFLNTCRLNTQPGKKVFYPVLFSQYNPGIIYGHHDAVPPLEQQLVIKKETGFWRDFGFGMTCQYRSDFINIGGFDLDIKGWGGEDVHLYRKYLHSNLIVVRTPVRGLFHLWHEKRCMDELTPEQYKMCMQSKAMNEASHGQLGMLVFRHEIEAHLRKQKQKTSSKKT

SEQ ID NO: 892738 - protein, 162 aa, Homo sapiens
MFVFWFVGKKVFYPVLFSQYNPGIIYGHHDAVPPLEQQLVIKKETGFWRDFGFGMTCQYRSDFINIGGFDLDIKGWGGEDVHLYRKYLHSNLIVVRTPVRGLFHLWHEKRCMDELTPEQYKMCMQSKAMNEASHGQLGMLVFRHEIEAHLRKQKQKTSSKKT

SEQ ID NO: 892739 - protein, 274 aa, Homo sapiens
MESYSVTQAGVQWHELCSLQPSPPRFREMCIEQDGRVHLTVVYFGKEEINEVKGILENTSKAANFRNFTFIQLNGEFSRGKGLDVGARFWKGSNVLLFFCDVDIYFTSEFLNTCRLNTQPGKKVFYPVLFSQYNPGIIYGHHDAVPPLEQQLVIKKETGFWRDFGFGMTCQYRSDFINIGGFDLDIKGWGGEDVHLYRKYLHSNLIVVRTPVRGLFHLWHEKRCMDELTPEQYKMCMQSKAMNEASHGQLGMLVFRHEIEAHLRKQKQKTSSNY

SEQ ID NO: 892740 - protein, 69 aa, Homo sapiens
CSGAEQSARGAAQQLLLASVDASRLVRASRARAVHRQSAAAQEREGLSRLRCFFKTDPGNASFSKGCCC

SEQ ID NO: 892741 - protein, 159 aa, Homo sapiens
MTLEEVRGQDTVPESTARMQGAGKALHELLLSAQRQGCLTAGVYESAKVLNVDPDNVTFCVLAAGEEDEGDIALQIHFTLIQAFCCENDIDIVRVGDVQRLAAIVGAGEEAGAPGDLHCILISNPNEDAWKDPALEKLSLFCEESRSVNDWVPSITLPE

SEQ ID NO: 892742 - protein, 141 aa, Homo sapiens
MQGAGKALHELLLSAQRQGCLTAGVYESAKVLNVDPDNVTFCVLAAGEEDEGDIALQIHFTLIQAFCCENDIDIVRVGDVQRLAAIVGAGEEAGAPGDLHCILISNPNEDAWKDPALEKLSLFCEESRSVNDWVPSITLPE

SEQ ID NO: 892743 - protein, 861 aa, Homo sapiens
MAHYPTRLKTRKTYSWVGRPLLDRKLHYQTYREMCVKTEGCSTEIHIQIGQFVLIEGDDDENPYVAKLLELFEDDSDPPPKKRARVQWFVRFCEVPACKRHLLGRKPGAQEIFWYDYPACDSNINAETIIGLVRVIPLAPKDVVPTNLKNEKTLFVKLSWNEKKFRPLSSELFAELNKPQESAAKCQKPVRAKSKSAESPSWTPAEHVAKRIESRHSASKSRQTPTHPLTPRARKRLELGNLGNPQMSQQTSCASLDSPGRIKRKVAFSEITSPSKRSQPDKLQTLSPALKAPEKTRETGLSYTEDDKKASPEHRIILRTRIAASKTIDIREERTLTPISGGQRSSVVPSVILKPENIKKRDAKEAKAQNEATSTPHRIRRKSSVLTMNRIRQQLRFLGNSKSDQEEKEILPAAEISDSSSDEEEASTPPLPRRAPRTVSRNLRSSLKSSLHTLTKVPKKSLKPRTPRCAAPQIRSRSLAAQEPASVLEEARLRLHVSAVPESLPCREQEFQDIYNFVESKLLDHTGGCMYISGVPGTGKTATVHEVIRCLQQAAQANDVPPFQYIEVNGMKLTEPHQVYVQILQKLTGQKATANHAAELLAKQFCTRGSPQETTVLLVDELDLLWTHKQDIMYNLFDWPTHKEARLVVLAIANTMDLPERIMMNRVSSRLGLTRMCFQPYTYSQLQQILRSRLKHLKAFEDDAIQLVARKVAALSGDARRCLDICRRATEICEFSQQKPDSPGLVTIAHSMEAVDEMFSSSYITAIKNSSVLEQSFLRAILAEFRRSGLEEATFQQIYSQHVALCRMEGLPYPTMSETMAVCSHLGSCRLLLVEPSRNDLLLRVRLNVSQDDVLYALKDE

SEQ ID NO: 892744 - protein, 861 aa, Homo sapiens; identical to SEQ ID NO: 892743

SEQ ID NO: 892745 - protein, 361 aa, Homo sapiens
MAHYPTRLKTRKTYSWVGRPLLDRKLHYQTYREMCVKTEGCSTEIHIQIGQFVLIEGDDDENPYVAKLLELFEDDSDPPPKKRARVQWFVRFCEVPACKRHLLGRKPGAQEIFWYDYPACDSNINAETIIGLVRVIPLAPKDVVPTNLKNEKTLFVKLSWNEKKFRPLSSELFAELNKPQESAAKCQKPVRAKSKSAESPSWTPAEHVAKRIESRHSASKSRQTPTHPLTPRARKRLELGNLGNPQMSQQTSCASLDSPGRIKRKVAFSEITSPSKRSQPDKLQTLSPALKAPEKTRETGLSYTEDDKKASPEHRIILRTRIAASKTIDIREERTLTPISGGQRSSVVPSVILKPENIKKR

SEQ ID NO: 892746 - protein, 724 aa, Homo sapiens
MAHYPTRLKTRKTYSWVGRPLLDRKLHYQTYREMCVKTEGCSTEIHIQIGQFVLIEGDDDENPYVAKLLELFEDDSDPPPKKRARVQWFVRFCEVPACKRHLLGRKPGAQEIFWYDYPACDSNINAETIIGLVRVIPLAPKDVVPTNLKNEKTLFVKLSWNEKKFRPLSSELFAELNKPQESAAKCQKPVRAKSKSAESPSWTPAEHVAKRIESRHSASKSRQTPTHPLTPRARKRLELGNLGNPQMSQQTSCASLDSPGRIKRKVAFSEITSPSKRSQPDKLQTLSPALKAPEKTRETGLSYTEDDKKASPEHRIILRTRIAASKTIDIREERTLTPISGGQRSSVVPSVILKPENIKKRDAKEAKAQNEATSTPHRIRRKSSVLTMNRIRQQLRFLGNSKSDQEEKEILPAAEISDSSSDEEEASTPPLPRRAPRTVSRNLRSSLKSSLHTLTKVPKKSLKPRTPRCAAPQIRSRSLAAQEPASVLEEARLRLHVSAVPESLPCREQEFQDIYNFVESKLLDHTGGCMYISGVPGTGKTATVHEVIRCLQQAAQANDVPPFQYIEVNGMKLTEPHQVYVQILQKLTGQKATANHAAELLAKQFCTRGSPQETTVLLVDELDLLWTHKQDIMYNLFDWPTHKEARLVVLAIANTMDLPERIMMNRVSSRLGLTRMCFQPYTYSQLQQILRSRLKHLKAFEDDAIQLVARKAGVQWHDHGSLQP

SEQ ID NO: 892747 - protein, 727 aa, Homo sapiens
AREIPSASGIRRVSKTMATSSMSKGCFVFKPNSKKRKISLPIEDYFNKGKNEPEDSKLRFETYQLIWQQMKSENERLQEELNKNLFDNLIEFLQKSHSGFQKNSRDLGGQIKLREIPTAALVLGVNVTDHDLTFGSLTEALQNNVTPYVVSLQAKDCPDMKHFLQKLISQLMDCCVDIKSKEEESVHVTQRKTHYSMDSLSSWYMTVTQKTDPKMLSKKRTTSSQWQSPPVVVILKDMESFATKVLQDFIIISSQHLHEFPLILIFGIATSPIIIHRLLPHAVSSLLCIELFQSLSCKEHLTTVLDKLLLTTQFPFKINEKVLQVLTNIFLYHDFSVQNFIKGLQLSLLEHFYSQPLSVLCCNLPEAKRRINFLSNNQCENIRRLPSFRRYVEKQASEKQVALLTNERYLKEETQLLLENLHVYHMNYFLVLRCLHKFTSSLPKYPLGRQIRELYCTCLEKNIWDSEEYASVLQLLRMLAKDELMTILEKCFKVFKSYCENHLGSTAKRIEEFLAQFQSLDETKEEEDASGSQPKGLQKTDLYHLQKSLLEMKELRRSKKQTKFEVLRENVVNFIDCLVREYLLPPETQPLHEVVYFSAAHALREHLNAAPRIALHTALNNPYYYLKNEALKSEEGCIPNIAPDICIAYKLHLECSRLINLVDWSEAFATVVTAAEKMDANSATSEEMNEIIHARFIRAVSELELLGFIKPTKQKTDHVARLTWGGC

SEQ ID NO: 892748 - protein, 707 aa, Homo sapiens
AREIPSASGIRRVSKTMATSSMSKGCFVFKPNSKKRKISLPIEDYFNKGKNEPEDSKLRFETYQLIWQQMKSENERLQEELNKNLFDNLIEFLQKSHSGFQKNSRDLGGQIKLREIPTAALVLGVNVTDHDLTFGSLTEALQNNVTPYVVSLQAKDCPDMKHFLQKLISQLMDCCVDIKSKEEESVHVTQRKTHYSMDSLSSWYMTVTQKTDPKMLSKKRTTSSQWQSPPVVVILKDMESFATKVLQDFIIISSQHLHEFPLILIFGIATSPIIIHRLLPHAVSSLLCIELFQSLSCKEHLTTVLDKLLLTTQFPFKINEKVLQVLTNIFLYHDFSVQNFIKGLQLSLLEHFYSQPLSVLCCNLPEAKRRINFLSNNQCENIRRLPSFRRYVEKQASEKQVALLTNERYLKEETQLLLENLHVYHMNYFLVLRCLHKFTSSLPKYPLGRQIRELYCTCLEKNIWDSEEYASVLQLLRMLAKDELMTILEKCFKVFKSYCENHLGSTAKRIEEFLAQFQSLDETKEEEDASGSQPKGLQKTDLYHLQKSLLEMKELRRSKKQTKFEVLRENVVNFIDCLVREYLLPPETQPLHEVVYFSAAHALREHLNAAPRIALHTALNNPYYYLKNEALKSEEGCIPNIAPDICIAYKLHLECSRLINLVDWSEAFATVVTAAEKMDANSATSEEMNEISILLKPFLQCPTTHKI

SEQ ID NO: 892749 - protein, 513 aa, Homo sapiens [sequence omitted]

SEQ ID NO: 892750 - protein, 250 aa, Homo sapiens [sequence omitted]

SEQ ID NO: 892751 - protein, 254 aa, Homo sapiens
AREIPSASGIRRVSKTMATSSMSKGCFVFKPNSKKRKISLPIEDYFNKGKNEPEDSKLRFETYQLIWQQMKSENERLQEELNKNLFDNLIEFLQKSHSGFQKNSRDLGGQIKLREIPTAALVLGVNVTDHDLTFGSLTEALQNNVTPYVVSLQAKDCPDMKHFLQKLISQLMDCCVDIKSKEEESVHVTQRKTHYSMDSLSSWYMTVTQKTDPKMLSKKRTTSSQWQSPPVVVILKDMESFATKVLQDFIIISR

SEQ ID NO: 892752 - protein, 727 aa, Homo sapiens; identical to SEQ ID NO: 892747

SEQ ID NO: 892753 - protein, 658 aa, Homo sapiens
MKSENERLQEELNKNLFDNLIEFLQKSHSGFQKNSRDLGGQIKLREIPTAALVLGVNVTDHDLTFGSLTEALQNNVTPYVVSLQAKDCPDMKHFLQKLISQLMDCCVDIKSKEEESVHVTQRKTHYSMDSLSSWYMTVTQKTDPKMLSKKRTTSSQWQSPPVVVILKDMESFATKVLQDFIIISSQHLHEFPLILIFGIATSPIIIHRLLPHAVSSLLCIELFQSLSCKEHLTTVLDKLLLTTQFPFKINEKVLQVLTNIFLYHDFSVQNFIKGLQLSLLEHFYSQPLSVLCCNLPEAKRRINFLSNNQCENIRRLPSFRRYVEKQASEKQVALLTNERYLKEETQLLLENLHVYHMNYFLVLRCLHKFTSSLPKYPLGRQIRELYCTCLEKNIWDSEEYASVLQLLRMLAKDELMTILEKCFKVFKSYCENHLGSTAKRIEEFLAQFQSLDETKEEEDASGSQPKGLQKTDLYHLQKSLLEMKELRRSKKQTKFEVLRENVVNFIDCLVREYLLPPETQPLHEVVYFSAAHALREHLNAAPRIALHTALNNPYYYLKNEALKSEEGCIPNIAPDICIAYKLHLECSRLINLVDWSEAFATVVTAAEKMDANSATSEEMNEIIHARFIRAVSELELLGFIKPTKQKTDHVARLTWGGC

SEQ ID NO: 892754 - protein, 484 aa, Homo sapiens
MESFATKVLQDNDNRRRLPLARSSPVVVILKDMESFATKVLQDFIIISSQHLHEFPLILIFGIATSPIIIHRLLPHAVSSLLCIELFQSLSCKEHLTTVLDKLSLLEHFYSQPLSVLCCNLPEAKRRINFLSNNQCENIRRLPSFRRYVEKQASEKQVALLTNERYLKEETQLLLENLHVYHMNYFLVLRCLHKFTSSLPKYPLGRQIRELYCTCLEKNIWDSEEYASVLQLLRMLAKDELMTILEKCFKVFKSYCENHLGSTAKRIEEFLAQFQSLDETKEEEDASGSQPKGLQKTDLYHLQKSLLEMKELRRSKKQTKFEVLRENVVNFIDCLVREYLLPPETQPLHEVVYFSAAHALREHLNAAPRIALHTALNNPYYYLKNEALKSEEGCIPNIAPDICIAYKLHLECSRLINLVDWSEAFATVVTAAEKMDANSATSEEMNEIIHARFIRAVSELELLGFIKPTKQKTDHVARLTWGGC

SEQ ID NO: 892755 - protein, 363 aa, Homo sapiens
AREIPSASGIRRVSKTMATSSMSKGCFVFKPNSKKRKISLPIEDYFNKGKNEPEDSKLRFETYQLIWQQMKSENERLQEELNKNLFDNLIEFLQKSHSGFQKNSRDLGGQIKLREIPTAALVLGVNVTDHDLTFGSLTEALQNNVTPYVVSLQAKDCPDMKHFLQKLISQLMDCCVDIKSKEEESVHVTQRKTHYSMDSLSSWYMTVTQKTDPKMLSKKRTTSSQWQSPPVVVILKDMESFATKVLQDFIIISSQHLHEFPLILIFGIATSPIIIHRLLPHAVSSLLCIELFQSLSCKEHLTTVLDKLLLTTQFPFIKFSTEEIMTHAFAHASGQTPSPRLALSTRYSPDEMNNSPNFEEKKK

SEQ ID NO: 892756 - protein, 580 aa, Homo sapiens
MGSSRLRVFDPHLERKDSAAALSDRELPLPTFDVPYFKYIDEEDEDDEWSSRSQSSTEDDSVDSLLSDRYVVVSGTPEKILEHLLNDLHLEEVQDKETETLLDDFLLTYTVFMTTDDLCQALLRHYSAKKYQGKEENSDVPRRKRKVLHLVSQWIALYKDWLPEDEHSKMFLKTIYRNVLDDVYEYPILEKELKEFQKILGMHRRHTVDEYSPQKKNKALFHQFSLKENWLQHRGTVTETEEIFCHVYITEHSYVSVKAKVSSIAQEILKVVAEKIQYAEEDLALVAITFSGEKHELQPNDLVISKSLEASGRIYVYRKDLADTLNPFAENEESQQRSMRILGMNTWDLALELMNFDWSLFNSIHEQELIYFTFSRQGSGEHTANLSLLLQRCNEVQLWVATEILLCSQLGKRVQLVKKFIKIAAHCKAQRNLNSFFAIVMGLNTASVSRLSQTWEKIPGKFKKLFSELESLTDPSLNHKAYRDAFKKMKPPKIPFMPLLLKDVTFIHEGNKTFLDNLVNFEKLHMIADTVRTLRHCRTNQFGDLSPKEHQELKSYVNHLYVIDSQQALFELSHRIEPRV

SEQ ID NO: 892757 - protein, 116 aa, Homo sapiens
MSWDCGFKYIFAFSPTLKAGVMCKLQERDEIGRIELVQKLAKENYQFLQTDKKEQEKSEHVSLLPLGDAGLKGWKMFLPDCMFEPPRASSLVKMTAAHSSKQVAYDTGFIRDSSQK

SEQ ID NO: 892758 - protein, 116 aa, Homo sapiens; identical to SEQ ID NO: 892757

SEQ ID NO: 892759 - protein, 580 aa, Homo sapiens; identical to SEQ ID NO: 892756

SEQ ID NO: 892760 - protein, 649 aa, Homo sapiens
MSWDCGFKYIFAFSPTLKAGVMCKLQERDEIGRIELVQKLAKENYQFLQTDKKEQEKSEHQDDEVTTVQVKEQDQSVLVLKKVQCCGPAPTAGSAESHWRYVVVSGTPEKILEHLLNDLHLEEVQDKETVIPTPGITCVTSAMCSKAKRTRTSWLDSPSTNLSGEEEETLLDDFLLTYTVFMTTDDLCQALLRHYSAKKYQGKEENSDVPRRKRKVLHLVSQWIALYKDWLPEDEHSKMFLKTIYRNVLDDVYEYPILEKELKEFQKILGMHRRHTVDEYSPQKKNKALFHQFSLKENWLQHRGTVTETEEIFCHVYITEHSYVSVKAKVSSIAQEILKVVAEKIQYAEEDLALVAITFSGEKHELQPNDLVISKSLEASGRIYVYRKDLADTLNPFAENEESQQRSMRILGMNTWDLALELMNFDWSLFNSIHEQELIYFTFSRQGSGEHTANLSLLLQRCNEVQLWVATEILLCSQLGKRVQLVKKFIKIAAHCKAQRNLNSFFAIVMGLNTASVSRLSQTWEKIPGKFKKLFSELESLTDPSLNHKAYRDAFKKMKPPKIPFMPLLLKDVTFIHEGNKTFLDNLVNFEKLHMIADTVRTLRHCRTNQFGDLSPKEHQELKSYVNHLYVIDSQQALFELSHRIEPRV

SEQ ID NO: 892761 - protein, 611 aa, Homo sapiens [sequence omitted]

SEQ ID NO: 892762 - protein, 468 aa, Homo sapiens
MTTDDLCQALLRHYSAKKYQGKEENSDVPRRKRKVLHLVSQWIALYKDWLPEDEHSKMFLKTIYRNVLDDVYEYPILEKELKEFQKILGMHRRHTVDEYSPQKKNKALFHQFSLKENWLQHRGTVTETEEIFCHVYITEHSYVSVKAKVSSIAQEILKVVAEKIQYAEEDLALVAITFSGEKHELQPNDLVISKSLEASGRIYVYRKDLADTLNPFAENEESQQRSMRILGMNTWDLALELMNFDWSLFNSIHEQELIYFTFSRQGSGEHTANLSLLLQRCNEVQLWVATEILLCSQLGKRVQLVKKFIKIAAHCKAQRNLNSFFAIVMGLNTASVSRLSQTWEKIPGKFKKLFSELESLTDPSLNHKAYRDAFKKMKPPKIPFMPLLLKDVTFIHEGNKTFLDNLVNFEKLHMIADTVRTLRHCRTNQFGDLSPKEHQELKSYVNHLYVIDSQQALFELSHRIEPRV

SEQ ID NO: 892763 - protein, 358 aa, Homo sapiens
MGSSRLRVFDPHLERKDSAAALSDRELPLPTFDVPYFKYIDEEDEDDEWSSRSQSSTEDDSVDSLLSDRYVVVSGTPEKILEHLLNDLHLEEVQDKETETLLDDFLLTYTVFMTTDDLCQALLRHYSAKKYQGKEENSDVPRRKRKVLHLVSQWIALYKDWLPEDEHSKMFLKTIYRNVLDDVYEYPILEKELKEFQKILGMHRRHTVDEYSPQKKNKALFHQFSLKENWLQHRGTVTETEEIFCHVYITEHSYVSVKAKVSSIAQEILKVVAEKIQYAEEDLALVAITFSGEKHELQPNDLVISKSLEASGRIYVYRKDLADTLVRTFSLVFETNRPGEVAHTCNLSTLGGQGRKMA

SEQ ID NO: 892764 - protein, 463 aa, Homo sapiens
MGSSRLRVFDPHLERKDSAAALSDRELPLPTFDVPYFKYIDEEDEDDEWSSRSQSSTEDDSVDSLLSDRYVVVSGTPEKILEHLLNDLHLEEVQDKETETLLDDFLLTYTVFMTTDDLCQALLRHYSAKKYQGKEENSDVPRRKRKVLHLVSQWIALYKDWLPEDEHSKMFLKTIYRNVLDDVYEYPILEKELKEFQKILGMHRRHTVDEYSPQKKNKALFHQFSLKENWLQHRGTVTETEEIFCHVYITEHSYVSVKAKVSSIAQEILKVVAEKIQYAEEDLALVAITFSGEKHELQPNDLVISKSLEASGRIYVYRKDLADTLNPFAENEESQQRSMRILGMNTWDLALELMNFDWSLFNSIHEQELIYFTFSRQGSGEHTANLSLLLQRCNEVQLWVATEILLCSQLGKRVQLVKKFIKIAAHCKAQRNLNSFFAIVMGLNTASVSRLSQTWEVSLGVPW

SEQ ID NO: 892765 - protein, 595 aa, Homo sapiens
MGSSRLRVFDPHLERKDSAAALSDRELPLPTFDVPYFKYIDEEDEDDEWSSRSQSSTEDDSVDSLLSDRYVVVSGTPEKILEHLLNDLHLEEVQDKETETLLDDFLLTYTVFMTTDDLCQALLRHYSAKKYQGKEENSDVPRRKRKVLHLVSQWIALYKDWLPEDEHSKMFLKTIYRNVLDDVYEYPILEKELKEFQKILGMHRRHTVDEYSPQKKNKALFHQFSLKENWLQHRGTVTETEEIFCHVYITEHSYVSVKAKVSSIAQEILKVVAEKIQYAEEDLALVAITFSGEKHELQPNDLVISKSLEASGRIYVYRKDLADTLNPFAENEESQQRSMRILGMNTWDLALELMNFDWSLFNSIHEQELIYFTFSRQGSGEHTANLSLLLQRCNEVQLWVATEILLCSQLGKRVQLVKKFIKIAAHCKAQRNLNSFFAIVMGLNTASVSRLSQTWEKIPGKFKKLFSELESLTDPSLNHKAYRDAFKKMKPPKIPFMPLLLKDVTFIHEGNKTFLDNLVNFEKLHMIADTVRTLRHCRTNQFEEDKIWQIIIPSWQQVYAVKSDFTHSETSSPQLPLTPVPTVSCFACPLAQNHW

SEQ ID NO: 892766 - protein, 544 aa, Homo sapiens
MGSSRLRVFDPHLERKDSAAALSDRELPLPTFDVPYFKYIDEEDEDDEWSSRSQSSTEDDSVDSLLSDRYVVVSGTPEKILEHLLNDLHLEEVQDKETETLLDDFLLTYTVFMTTDDLCQALLRHYSAKKYQGKEENSDVPRRKRKVLHLVSQWIALYKDWLPEDEHSKMFLKTIYRNVLDDVYEYPILEKELKEFQKILGMHRRHTVDEYSPQKKNKALFHQFSLKENWLQHRGTVTETEEIFCHVYITEHSYVSVKAKVSSIAQEILKVVAEKIQYAEEDLALVAITFSGEKHELQPNDLVISKSLEASGRIYVYRKDLADTLNPFAENEESQQRSMRILGMNTWDLALELMNFDWSLFNSIHEQELIYFTFSRQGSGEHTANLSLLLQRCNEVQLWVATEILLCSQLGKRVQLVKKFIKIAAHCKAQRNLNSFFAIVMGLNTASVSRLSQTWEKIPGKFKKLFSELESLTDPSLNHKAYRDAFKKMKPPKIPFMPLLLKDVTFIHEGNKTFLDNLVNFEKLHMIADTVRTLRHCRTNQFGE

SEQ ID NO: 892767 - protein, 411 aa, Homo sapiens
METPEVPVGSLIDFGPEAPTSSPLEAPPPVLQDGDGSLGDGASESETTESADSENDMGESPSHPSWDQDRRSSSNESFSSNQSTESTQDEETLALRDFMRGYVEKIFSGGEDLDQEEKAKFGEYCSSENGKGREWFARYVSAQRCNSKCVSEATFYRLVQSFAVVLFECHQMDDFGPAKNLMTMCFTYYHIGKPQLLPPESREKPAGSIDSYLKSANSWLAEKKDIAERLLKNTSARTENVKGFFGGLETKLKGPLARRNEEDENKPQEKRPRAVTAYSPEDEKKGEKIYLYTHLKQQPIWHTLRFWNAAFFDAVHCERTKRSPTTRGDAGEEEEKREKWCHMTQEERDDSLRFNENITFGQLGTFTHNMLAFGLNKKLCNDFLKKQAVIGNLDEEQYKLLSDHIEQMATE

SEQ ID NO: 892768 - protein, 401 aa, Homo sapiens
METPEVPVGSLIDFGPEAPTSSPLEAPPPVLQDGDGSLGDGASESETTESADSENDMGESPSHPSWDQDRRSSSNESFSSNQSTESTQDEETLALRDFMRGYVEKIFSGGEDLDQEEKAKFGEYCSSENGKGREWFARYVSAQRCNSKCVSEATFYRLVQSFAVVLFECHQMDDFGPAKNLMTMCFTYYHIGKPQLLPPESREKPAGSIDSYLKSANSWLAEKKDIAERLLKNTSARTENVKGFFGGLETKLKGPLARRNEEDENKPQEKRPRAVTAYSPEDEKKGEKIYLYTHLKQQPIWHTLRFWNAAFFDAVHCERTKRSPTTREKWCHMTQEERDDSLRFNENITFGQLGTFTHNMLAFGLNKKLCNDFLKKQAVIGNLDEEQYKLLSDHIEQMATE

SEQ ID NO: 892769 - protein, 301 aa, Homo sapiens
METPEVPVGSLIDFGPEAPTSSPLEAPPPVLQDGDGSLGDGASESETTESADSENDMGESPSHPSWDQDRRSSSNESFSSNQSTESTQDEETLALRDFMRGYVEKIFSGGEDLDQEEKAKFGEYCSSENGKGREWFARYVSAQRCNSKCVSEATFYRLVQSFAVVLFECHQMDDFGPAKNLMTMCFTYYHIGKPQLLPPESREKPAGSIDSYLKSANSWLAEKKDIAERLLKNTSARTENVKGFFGGLETKLKGPLARRNEEDENKPQEKRPRAVTAYSPEDEKKGEKIYLYTHLKQQPIW

SEQ ID NO: 892770 - protein, 197 aa, Homo sapiens
METPEVPVGSLIDFGPEAPTSSPLEAPPPVLQDGDGSLGDGASESETTESADSENDMGESPSHPSWDQDRRSSSNESFSSNQSTESTQDEETLALRDFMRGYVEKIFSGGEDLDQEEKAKFGEYCSSENGKGREWFARYVSAQRCNSKCVSEATFYRLVQSFAVVLFECHQMDDFGPAKNLMTMCFTYYHIGKTWVG

SEQ ID NO: 892771 - protein, 591 aa, Homo sapiens
MFGKRKKRVEISAPSNFEHRVHTGFDQHEQKFTGLPRQWQSLIEESARRPKPLVDPACITSIQPGAPKTIVRGSKGAKDGALTLLLDEFENMSVTRSNSLRRDSPPPPARARQENGMPEEPATTARGGPGKAGSRGRFAGHSEAGGGSGDRRRAGPEKRPKSSREGSGGPQESSRDKRPLSGPDVGTPQPAGLASGAKLAAGRPFNTYPRADTDHPSRGAQGEPHDVAPNGPSAGGLAIPQSSSSSSRPPTRARGAPSPGVLGPHASEPQLAPPACTPAAPAVPGPPGPRSPQREPQRVSHEQFRAALQLVVDPGDPRSYLDNFIKIGEGSTGIVCIATVRSSGKLVAVKKMDLRKQQRRELLFNEVVIMRDYQHENVVEMYNSYLVGDELWVVMEFLEGGALTDIVTHTRMNEEQIAAVCLAVLQALSVLHAQGVIHRDIKSDSILLTHDGRVKLSDFGFCAQVSKEVPRRKSLVGTPYWMAPELISRLPYGPEVDIWSLGIMVIEMVDGEPPYFNEPPLKAMKMIRDNLPPRLKNLHKVSPSLKGFLDRLLVRDPAQRATAAELLKHPFLAKAGPPASIVPLMRQNRTR

SEQ ID NO: 892772 - protein, 652 aa, Homo sapiens
WWAVRGESPGCSLGIQHGGGSVRGGGGARELREARGRGVPGRAVRPRATAAPSRPHRVPGTMFGKRKKRVEISAPSNFEHRVHTGFDQHEQKFTGLPRQWQSLIEESARRPKPLVDPACITSIQPGAPKTIVRGSKGAKDGALTLLLDEFENMSVTRSNSLRRDSPPPPARARQENGMPEEPATTARGGPGKAGSRGRFAGHSEAGGGSGDRRRAGPEKRPKSSREGSGGPQESSRDKRPLSGPDVGTPQPAGLASGAKLAAGRPFNTYPRADTDHPSRGAQGEPHDVAPNGPSAGGLAIPQSSSSSSRPPTRARGAPSPGVLGPHASEPQLAPPACTPAAPAVPGPPGPRSPQREPQRVSHEQFRAALQLVVDPGDPRSYLDNFIKIGEGSTGIVCIATVRSSGKLVAVKKMDLRKQQRRELLFNEVVIMRDYQHENVVEMYNSYLVGDELWVVMEFLEGGALTDIVTHTRMNEEQIAAVCLAVLQALSVLHAQGVIHRDIKSDSILLTHDGRVKLSDFGFCAQVSKEVPRRKSLVGTPYWMAPELISRLPYGPEVDIWSLGIMVIEMVDGEPPYFNEPPLKAMKMIRDNLPPRLKNLHKVSPSLKGFLDRLLVRDPAQRATAAELLKHPFLAKAGPPASIVPLMRQNRTR

SEQ ID NO: 892773 - protein, 591 aa, Homo sapiens; identical to SEQ ID NO: 892771

SEQ ID NO: 892774 - protein, 426 aa, Homo sapiens
MFGKRKKRVEISAPSNFEHRVHTGFDQHEQKFTGLPRQWQSLIEESARRPKPLVDPACITSIQPGAPKTIVRGSKGAKDGALTLLLDEFENMSVTRSNSLRRDSPPPPARARQENGMPEEPPGPRSPQREPQRVSHEQFRAALQLVVDPGDPRSYLDNFIKIGEGSTGIVCIATVRSSGKLVAVKKMDLRKQQRRELLFNEVVIMRDYQHENVVEMYNSYLVGDELWVVMEFLEGGALTDIVTHTRMNEEQIAAVCLAVLQALSVLHAQGVIHRDIKSDSILLTHDGRVKLSDFGFCAQVSKEVPRRKSLVGTPYWMAPELISRLPYGPEVDIWSLGIMVIEMVDGEPPYFNEPPLKAMKMIRDNLPPRLKNLHKVSPSLKGFLDRLLVRDPAQRATAAELLKHPFLAKAGPPASIVPLMRQNRTR

SEQ ID NO: 892775 - protein, 381 aa, Homo sapiens
MFGKRKKRVEISAPSNFEHRVHTGFDQHEQKFTGLPRQWQSLIEESARRPKPLVDPACITSIQPGAPKTIVRGSKGAKDGALTLLLDEFENMSVTRSNSLRRDSPPPPARARQENGMPEEPATTARGGPGKAGSRGRFAGHSEAGGGSGDRRRAGPEKRPKSSREGSGGPQESSRDKRPLSGPDVGTPQPAGLASGAKLAAGRPFNTYPRADTDHPSRGAQGEPHDVAPNGPSAGGLAIPQSSSSSSRPPTRARGAPSPGVLGPHASEPQLAPPACTPAAPAVPGPPGPRSPQREPQRVSHEQFRAALQLVVDPGDPRSYLDNFIKIGEGSTGIVCIATVRSSGKLVAVKKMDLRKQQRRELLFNEVVIMRDYQHENVVEM

SEQ ID NO: 892776 - protein, 384 aa, Homo sapiens
MGCQRSRPPRPEGAGEPHDVAPNGPSAGGLAIPQSSSSSSRPPTRARGAPSPGVLGPHASEPQLAPPACTPAAPAVPGPPGPRSPQREPQRVSHEQFRAALQLVVDPGDPRSYLDNFIKIGEGSTGIVCIATVRSSGKLVAVKKMDLRKQQRRELLFNEVVIMRDYQHENVVEMYNSYLVGDELWVVMEFLEGGALTDIVTHTRMNEEQIAAVCLAVLQALSVLHAQGVIHRDIKSDSILLTHDGRVKLSDFGFCAQVSKEVPRRKSLVGTPYWMAPELISRLPYGPEVDIWSLGIMVIEMVDGEPPYFNEPPLKAMKMIRDNLPPRLKNLHKVSPSLKGFLDRLLVRDPAQRATAAELLKHPFLAKAGPPASIVPLMRQNRTR

SEQ ID NO: 892777 - protein, 591 aa, Homo sapiens; identical to SEQ ID NO: 892771

SEQ ID NO: 892778 - protein, 215 aa, Homo sapiens
MFGKRKKRVEISAPSNFEHRVHTGFDQHEQKFTGLPRQWQSLIEESARRPKPLVDPACITSIQPGAPKTIVRGSKGAKDGALTLLLDEFENMSVTRSNSLRRDSPPPPARARQENGMPEEPATTARGGPGKAGSRGRFAGHSEAGGGSGDRRRAGPEKRPKSSREGSGSLRTSPLGPVRALLWSAWGTGGGLTTGCALRSPLAGRSLPERPLGVL

SEQ ID NO: 892779 - protein, 591 aa, Homo sapiens; identical to SEQ ID NO: 892771

SEQ ID NO: 892780 - protein, 438 aa, Homo sapiens
MFGKRKKRVEISAPSNFEHRVHTGFDQHEQKFTGLPRQWQSLIEESARRPKPLVDPACITSIQPGAPKGEPHDVAPNGPSAGGLAIPQSSSSSSRPPTRARGAPSPGVLGPHASEPQLAPPACTPAAPAVPGPPGPRSPQREPQRVSHEQFRAALQLVVDPGDPRSYLDNFIKIGEGSTGIVCIATVRSSGKLVAVKKMDLRKQQRRELLFNEVVIMRDYQHENVVEMYNSYLVGDELWVVMEFLEGGALTDIVTHTRMNEEQIAAVCLAVLQALSVLHAQGVIHRDIKSDSILLTHDGRVKLSDFGFCAQVSKEVPRRKSLVGTPYWMAPELISRLPYGPEVDIWSLGIMVIEMVDGEPPYFNEPPLKAMKMIRDNLPPRLKNLHKVSPSLKGFLDRLLVRDPAQRATAAELLKHPFLAKAGPPASIVPLMRQNRTR

SEQ ID NO: 892781 - protein, 591 aa, Homo sapiens; identical to SEQ ID NO: 892771

SEQ ID NO: 892782 - protein, 525 aa, Homo sapiens
MFGKRKKRVEISAPSNFEHRVHTGFDQHEQKFTGLPRQWQSLIEESARRPKPLVDPACITSIQPGAPKTIVRGSKGAKDGALTLLLDEFENMSVTRSNSLRRDSPPPPARARQENGMPEEPATTARGGLGRNWQLAGPLTPTRGLTRTTHPGVPRGSLMTWPLTGHQRGAWPSPSPPPPPPGLPPEPEVPPALECWDPTPQSPSWPLQPAPPPPLLFLGPPGPRSPQREPQRVSHEQFRAALQLVVDPGDPRSYLDNFIKIGEGSTGIVCIATVRSSGKLVAVKKMDLRKQQRRELLFNEVVIMRDYQHENVVEMYNSYLVGDELWVVMEFLEGGALTDIVTHTRMNEEQIAAVCLAVLQALSVLHAQGVIHRDIKSDSILLTHDGRVKLSDFGFCAQVSKEVPRRKSLVGTPYWMAPELISRLPYGPEVDIWSLGIMVIEMVDGEPPYFNEPPLKAMKMIRDNLPPRLKNLHKVSPSLKGFLDRLLVRDPAQRATAAELLKHPFLAKAGPPASIVPLMRQNRTR

SEQ ID NO: 892783 - protein, 499 aa, Homo sapiens
WWAVRGESPGCSLGIQHGGGSVRGGGGARELREARGRGVPGRAVRPRATAAPSRPHRVPGTMFGKRKKRVEISAPSNFEHRVHTGFDQHEQKFTGLPRQWQSLIEESARRPKPLVDPACITSIQPGAPKGEPHDVAPNGPSAGGLAIPQSSSSSSRPPTRARGAPSPGVLGPHASEPQLAPPACTPAAPAVPGPPGPRSPQREPQRVSHEQFRAALQLVVDPGDPRSYLDNFIKIGEGSTGIVCIATVRSSGKLVAVKKMDLRKQQRRELLFNEVVIMRDYQHENVVEMYNSYLVGDELWVVMEFLEGGALTDIVTHTRMNEEQIAAVCLAVLQALSVLHAQGVIHRDIKSDSILLTHDGRVKLSDFGFCAQVSKEVPRRKSLVGTPYWMAPELISRLPYGPEVDIWSLGIMVIEMVDGEPPYFNEPPLKAMKMIRDNLPPRLKNLHKVSPSLKGFLDRLLVRDPAQRATAAELLKHPFLAKAGPPASIVPLMRQNRTR

SEQ ID NO: 892784 - protein, 106 aa, Homo sapiens
HTSSGLHTSSGLHTSSGLHTSSGLHTSSGLHTNSGLHTSSGLHTSSGLHTSSGVPLWGSIMNVRRVAFSRSPAPPFCGWMGRQVRAPHPLQPLQQMTTAPGQPPLF

SEQ ID NO: 892785 - protein, 327 aa, Homo sapiens
MASMAAAIAASRSAVMSGNRPLDDRERKRFTYFSSLSPMARKIMQDKEKIREKYGPEWARLPPAQQDEIIDRCLVGPRAPAPRDPGDSEELTRFPGLRGPTGQKVVRFGDEDLTWQDEHSAPFSWETKSQMEFSISALSIQEPSNGTAASEPRPLSKASQGSQALKSSQGSRSSSLDALGPTRKEEEASFWKINAERSRGEGPEAEFQSLTPSQIKSMEKGEKVLPPCYRQEPAPKDREAKVERPSTLRQEQRPLPNVSTERERPQPVQAFSSALHEAAPSQLEGKLPSPDVRQDDGEDTLFSEPKFAQVSSSNVVLKTGFDFLDNW

SEQ ID NO: 892786 - protein, 327 aa, Homo sapiens; identical to SEQ ID NO: 892785

SEQ ID NO: 892787 - protein, 85 aa, Homo sapiens
RGANLPYRELLHIKAVLVHMAPLNAFELCTKRFCPASNPGRGHFQSAHNAVCTWSPLIFRQPAPERVVVPKPKVGFCVFFFFFFF

SEQ ID NO: 892788 - protein, 327 aa, Homo sapiens; identical to SEQ ID NO: 892785

SEQ ID NO: 892789 - protein, 327 aa, Homo sapiens; identical to SEQ ID NO: 892785

SEQ ID NO: 892790 - protein, 327 aa, Homo sapiens; identical to SEQ ID NO: 892785

SEQ ID NO: 892791 - protein, 327 aa, Homo sapiens; identical to SEQ ID NO: 892785

SEQ ID NO: 892792 - protein, 327 aa, Homo sapiens; identical to SEQ ID NO: 892785

SEQ ID NO: 892793 - protein, 327 aa, Homo sapiens; identical to SEQ ID NO: 892785

SEQ ID NO: 892794 - protein, 428 aa, Homo sapiens
MASMAAAIAASRSAVMSGNRPLDDRERKRFTYFSSLSPMARKIMQDKEKIREKYGPEWARLPPAQQDEIIDRCLVGPRAPAPRDPGDSEELTRFPGLRGPTGQKVVRFGDEDLTWQDEHSAPFSWETKSQMEFSISALSIQEPSNGTAASEPRPLSKASQGSQALKSSQGSRSSSLDALGPTRKEEEASFWKINAERSRGEGPEAEFQSLTPSQIKSMEKGEKVLPPCYRQEPAPKDREAKVERPSTLRQEQRPLPNVSTERERPQPVQAFSSALHEAAPSQLEGKLPSPDVRQDDGEDTLFSEPKFAQVSGLYQRVLRWDGALFHGNREGPPQSRQATGAHALFLLLPLPLPQRMPRLRVLSHQQICNKTSFASPSGCPNLFTSQGSVAHCAFPSARAAIRRGPWKALRPGLSQLKAVLGLLFGSCP

SEQ ID NO: 892795 - protein, 302 aa, Homo sapiens
MCAERLGQFMTLALVLATFDPARGTDATNPPEGPQDRSSQQKGRLSLQNTAEIQHCLVNAGDVGCGVFECFENNSCEIRGLHGICMTFLHNAGKFDAQGKSFIKDALKCKAHALRHRFGCISRKCPAIREMVSQLQRECYLKHDLCAAAQENTRVIVEMIHFKDLLLHEPYVDLVNLLLTCGEEVKEAITHSVQVQCEQNWGSLCSILSFCTSAIQKPPTAPPERQPQVDRTKLSRAHHGEAGHHLPEPSSRETGRGAKGERGSKSHPNAHARGRVGGLGAQGPSGSSEWEDEQSEYSDIRR

SEQ ID NO: 892796 - protein, 302 aa, Homo sapiens; identical to SEQ ID NO: 892795

SEQ ID NO: 892797 - protein, 302 aa, Homo sapiens; identical to SEQ ID NO: 892795

SEQ ID NO: 892798 - protein, 302 aa, Homo sapiens; identical to SEQ ID NO: 892795

SEQ ID NO: 892799 - protein, 302 aa, Homo sapiens; identical to SEQ ID NO: 892795

SEQ ID NO: 892800 - protein, 274 aa, Homo sapiens
MCAERLGQFMTLALVLATFDPARGTDATNPPEGPQDRSSQQKGRLSLQNTAEIQHCLVNAGDVGCGVFECFENNSCEIRGLHGICMTFLHNAGKFDAQGKSFIKDALKCKAHALRHRFGCISRKCPAIREMVSQLQRECYLKHDLCAAAQENTRVIVEMIHFKDLLLHEPYVDLVNLLLTCGEEVKEAITHSVQVQCEQNWGSLCSILSFCTSAIQKPPTAPPERQPQVDRTKLSRAHHGVLGAKLKFSFLCGALRFRALGEGGGRSVISMCNF

SEQ ID NO: 892801 - protein, 220 aa, Homo sapiens
GDAGHHLPEPSSRETGRGAKGERGSKSHPNALRHRFGCISRKCPAIREMVSQLQRECYLKHDLCAAAQENTRVIVEMIHFKDLLLHEPYVDLVNLLLTCGEEVKEAITHSVQVQCEQNWGSLCSILSFCTSAIQKPPTAPPERQPQVDRTKLSRAHHGEAGHHLPEPSSRETGRGAKGERGSKSHPNAHARGRVGGLGAQGPSGSSEWEDEQSEYSDIRR

SEQ ID NO: 892802 - protein, 160 aa, Homo sapiens
MCAERLGQFMTLALVLATFDPARGTDATNPPEGPQDRSSQQKGRLSLQNTAEIQHCLVNAGDVGCGVFECFENNSCEIRGLHGICMTFLHNAGKFDAQGKSFIKDALKCKAHALRHRFGCISRKCPAIREMVSQLQRECYLKPLQGPPRGSRTSPPRAQQ

SEQ ID NO: 892803 - protein, 302 aa, Homo sapiens; identical to SEQ ID NO: 892795

SEQ ID NO: 892804 - protein, 274 aa, Homo sapiens; identical to SEQ ID NO: 892800

SEQ ID NO: 892805 - protein, 909 aa, Homo sapiens
MEPDIIRMYSSSPPPLDNGAEDDDDDEFGEFGGFSEVSPSGVGFVDFDTPDYTRPKEEFVPSNHFMPIHEFSENVDSLTSFKSIKNGNDKDITAELSAPVKGQSDVLLSTTSKEIISSEMLATSIDGMERPGNLNKVVEQRQNVGTLESFSPGDFRTNMNVVHQNKQLESCNGEKPPCLEILTNGFAVLETVNPQGTDDLDNVADSKGRKPLSTHSTEYNLDSVPSPAEEFADFATFSKKERIQLEEIECAVLNDREALTIRENNKINRVNELNSVKEVALGRSLDNKGDTDGEDQVCVSEISIVTNRGFSVEKQGLPTLQQDEFLQSGVQSKAWSLVDSADNSEAIRREQCKTEEKLDLLTSKCAHLCMDSVKTSDDEVGSPKEESRKFTNFQSPNIDPTEENDLDDSLSVKNGDSSNDFVTCNDINEDDFGDFGDFGSASGSTPPFVTGTQDSMSDATFEESSEHFPHFSEPGDDFGEFGDINAVSCQEETILTKSDLKQTSDNLSEECQLARKSSGTGTEPVAKLKNGQEGEIGHFDSVPNIQDDCNGFQDSDDFADFSSAGPSQVVDWNAFEDEQKDSCSWAAFGDQQATESHHRKEAWQSHRTDENIDTPGTPKTHSVPSATSKGAVASGHLQESATSVQTALLNRLERIFEACFPSILVPDAEEEVTSLKHLLETSTLPIKTREALPESGELLDVWTELQDIHDAHGLRYQWGGSHSNKKLLSSLGIDTRNILFTGNKKQPVIVPMYAAGLGMLEPTKEPLKPLSAAEKIASIGQTATMSPDMNTCTSDQFQESLPPVQFDWSSSGLTNPLDGVDPELYELTTSKLEISTSSLKVTDAFARLMSTVEKTSTSTSRKPKREEHLSEEAIKVIAGLPDLTFMHAKVLMFPATLTPSTSSQEKADG

SEQ ID NO: 892806 - protein, 909 aa, Homo sapiens; identical to SEQ ID NO: 892805

SEQ ID NO: 892807 - protein, 937 aa, Homo sapiens
MEPDIIRMYSSSPPPLDNGAEDDDDDEFGEFGGFSEVSPSGVGFVDFDTPDYTRPKEEFVPSNHFMPIHEFSENVDSLTSFKSIKNGNDKDITAELSAPVKGQSDVLLSTTSKEIISSEMLATSIDGMERPGNLNKVVEQRQNVGTLESFSPGDFRTNMNVVHQNKQLESCNGEKPPCLEILTNGFAVLETVNPQGTDDLDNVADSKGRKPLSTHSTEYNLDSVPSPAEEFADFATFSKKERIQLEEIECAVLNDREALTIRENNKINRVNELNSVKEVALGRSLDNKGDTDGEDQVCVSEISIVTNRGFSVEKQGLPTLQQDEFLQSGVQSKAWSLVDSADNSEAIRREQCKTEEKLDLLTSKCAHLCMDSVKTSDDEVGSPKEESRKFTNFQSPNIDPTEENDLDDSLSVKNGDSSNDFVTCNDINEDDFGDFGDFGSASGSTPPFVTGTQDSMSDATFEESSEHFPHFSEPGDDFGEFGDINAVSCQEETILTKSDLKQTSDNLSEECQLARKSSGTGTEPVAKLKNGQEGEIGHFDSVPNIQDDCNGFQDSDDFADFSSAGPSQVVDWNAFEDEQKDSCSWAAFGDQQATESHHRKEAWQSHRTDENIDTPGTPKTHSVPSATSKGAVASGHLQESATSVQTALLNRLERIFEACFPSILVPDAEEEVTSLKHLLETSTLPIKTREALPESGELLDVWTELQDIHDAHGLRYQWGGSHSNKKLLSSLGIDTRNILFTGNKKQPVIVPMYAAGLGMLEPTKEPLKPLSAAEKIASIGQTATMSPDMNTCTSDQFQESLPPVQFDWSSSGLTNPLDASGGSTLLNLDFFGPVDDSSSSSSTTIPGVDPELYELTTSKLEISTSSLKVTDAFARLMSTVEKTSTSTSRKPKREEHLSEEAIKVIAGLPDLTFMHAKVLMFPATLTPSTSSQEKADG

SEQ ID NO: 892808 - protein, 891 aa, Homo sapiens
MEPDIIRMYSSSPPPLDNGAEDDDDDEFGEFGGFSEVSPSGVGFVDFDTPDYTRPKEEFVPSNHFMPIHEFSENVDSLTSFKSIKNGNDKDITAELSAPVKGQSDVLLSTTSKEIISSEMLATSIDGMERPGNLNKVVEQRQNVGTLESFSPGDFRTNMNVVHQNKQLESCNGEKPPCLEILTNGFAVLETVNPQGTDDLDNVADSKGRKPLSTHSTEYNLDSVPSPAEEFADFATFSKKERIQLEEIECAVLNDREALTIRENNKINRVNELNSVKEVALGRSLDNKGDTDGEDQVCVSEISIVTNRGFSVEKQGLPTLQQDEFLQSGVQSKAWSLVDSADNSEAIRREQCKTEEKLDLLTSKCAHLCMDSVKTSDDEVGSPKEESRKFTNFQSPNIDPTEENDLDDSLSVNFGDFGDFGSASGSTPPFVTGTQDSMSDATFEESSEHFPHFSEPGDDFGEFGDINAVSCQEETILTKSDLKQTSDNLSEECQLARKSSGTGTEPVAKLKNGQEGEIGHFDSVPNIQDDCNGFQDSDDFADFSSAGPSQVVDWNAFEDEQKDSCSWAAFGDQQATESHHRKEAWQSHRTDENIDTPGTPKTHSVPSATSKGAVASGHLQESATSVQTALLNRLERIFEACFPSILVPDAEEEVTSLKHLLETSTLPIKTREALPESGELLDVWTELQDIHDAHGLRYQWGGSHSNKKLLSSLGIDTRNILFTGNKKQPVIVPMYAAGLGMLEPTKEPLKPLSAAEKIASIGQTATMSPDMNTCTSDQFQESLPPVQFDWSSSGLTNPLDGVDPELYELTTSKLEISTSSLKVTDAFARLMSTVEKTSTSTSRKPKREEHLSEEAIKVIAGLPDLTFMHAKVLMFPATLTPSTSSQEKADG

SEQ ID NO: 892809 - protein, 151 aa, Homo sapiens [sequence omitted]

SEQ ID NO: 892810 - protein, 806 aa, Homo sapiens
MEPDIIRMYSSSPPPLDNGAEDDDDDEFGEFGGFSEVSPSGVGFVDFDTPDYTRPKEEFVPSNHFMPIHEFSENVDSLTSFKSIKNGNDKDITAELSAPVKGQSDVLLSTTSKEIISSEMLATSIDGMERPGNLNKVVEQRQNVGTLESFSPGDFRTNMNVVHQNKQLESCNGEKPPCLEILTNGFAVLETVNPQGTDDLDNVADSKGRKPLSTHSTEYNLDSVPSPAEEFADFATFSKKERIQLEEIECAVLNDREALTIRENNKINRVNELNSVKEVALGRSLDNKGDTDGEDQVCVSEISIVTNRGFSVEKQGLPTLQQDEFLQSGVQSKAWSLVDSADNSEAIRREQCKTEEKLDLLTSKCAHLCMDSVKTSDDEVGSPKEESRKFTNFQSPNIDPTEENDLDDSLSVKNGDSSNDFVTCNDINEDDFGDFGDFGSASGSTPPFVTGTQDSMSDATFEESSEHFPHFSEPGDDFGEFGDINAVSCQEETILTKSDLKQTSDNLSEECQLARKSSGTGTEPVAKLKNGQEGEIGHFDSVPNIQDDCNGFQDSDDFADFSSAGPSQVVDWNAFEDEQKDSCSWAAFGDQQATESHHRKEAWQSHRTDENIDTPGTPKTHSVPSATSKGAVASGHLQESATSVQTALLNRLERIFEACFPSILVPDAEEEVTSLKHLLETSTLPIKTREALPESGELLDVWTELQDIHDAHGLRYQWGGSHSNKKLLSSLGIDTRNILFTGNKKQPVIVPMYAAGLGMLEPTKEPLKPLSAAEKIASIGQTATMSPDMNTCTSDQFQVWIRSCMS

SEQ ID NO: 892811 - protein, 153 aa, Homo sapiens
LHVQVCVLPLFTHNPSSLGLPSVWLPTNTVTEFQASGGSTLLNLDFFGPVDDSSSSSSTTIPGVDPELYELTTSKLEISTSSLKVTDAFARLMSTVEKTSTSTSRKPKREEHLSEEAIKVIAGLPDLTFMHAKVLMFPATLTPSTSSQEKADG

SEQ ID NO: 892812 - protein, 85 aa, Homo sapiens
VKAVFRKGNWVCHTISDLLKAMRNYTCPQGTHSSQGVSDPKTDYTLPTQKRPLHWYDPETSTEPGFDGRSSPKLHPLPPPSHPST

SEQ ID NO: 892813 - protein, 635 aa, Homo sapiens
MVSQSTVRQDSPVEPWEGISDHSGIIDGSPRLLNTDHPPCQLDIRLMRHKAVWINPQDVQQQPQDLQSQVPAAGNSGTHFVTDAASPSGPSPSCLGDSLAETTLSEDTTDSVGSASPHGSSEKSSSFSLSSTEVHMVRPGYSHRVSLPTSPRILATSPYPETDSAFFEPSHLTSAADEGAVQVSRRTISSNSFSPEVFVLPVDVEKENAHFYVADMIISAMEKMKCNILSQQQTESWSKEVSGLLGSDQPDSEMTFDTNIKQESGSSTSSYSGYEGCAVLQVSPVTETRTYHDVKEICKCDVDEFVILELGDFNDITETCSCSCSSSKSVTYEPDFNSAELLAKELYRVFQKCWILSVVNSQLAGSLSAAGSIVVNEECVRKDFESSMNVVQEIKFKSRIRGTEDWAPPRFQIIFNIHPPLKRDLVVAAQNFFCAGCGTPVEPKFVKRLRYCEYLGKYFCDCCHSYAESCIPARILMMWDFKKYYVSNFSKQLLDSIWHQPIFNLLSIGQSLYAKAKELDRVKEIQEQLFHIKKLLKTCRFANSCVKERALFVNFARIRLSSSHFRQQHVEDVQRAGLAFTNSASSPPSAPGVRGSQRGENFWKVWPLQQHDAPEYCEKDCSTCLMITPICVYYW

SEQ ID NO: 892814 - protein, 635 aa, Homo sapiens; identical to SEQ ID NO: 892813

SEQ ID NO: 892815 - protein, 662 aa, Homo sapiens [sequence omitted]

SEQ ID NO: 892816 - protein, 662 aa, Homo sapiens [sequence omitted]

SEQ ID NO: 892817 - protein, 595 aa, Homo sapiens [sequence omitted]

SEQ ID NO: 892818 - protein, 662 aa, Homo sapiens [sequence omitted]

SEQ ID NO: 892819 - protein, 527 aa, Homo sapiens [sequence omitted]

SEQ ID NO: 892820 - protein, 146 aa, Homo sapiens
MVSQSTVRQDSPVEPWEGISDHSGIIDGSPRLLNTDHPPCQLDIRLMRHKAVWINPQDVQQQPQDLQSQVPAAGNSGTHFVTDAASPSGPSPSCLGDSLAETTLSEDTTDSVGSASPHGSSEKSSSFSLSSTEVKACMRKPRSWTE

SEQ ID NO: 892821 - protein, 345 aa, Homo sapiens
MVSQSTVRQDSPVEPWEGISDHSGIIDGSPRLLNTDHPPCQLDIRLMRHKAVWINPQDVQQQPQDLQSQVPAAGNSGTHFVTDAASPSGPSPSCLGDSLAETTLSEDTTDSVGSASPHGSSEKSSSFSLSSTEVHMVRPGYSHRVSLPTSPRILATSPYPETDSAFFEPSHLTSAADEGAVQVSRRTISSNSFSPEVFVLPVDVEKENAHFYVADMIISAMEKMKCNILSQQQTESWSKEVSGLLGSDQPDSEMTFDTNIKQESGSSTSSYSGYEGCAVLQVSPVTETRTYHDVKEICKCDVDEFVILELGDFNDITETCSCSCSSSKRYLSSVHSAHRPLGCHL

SEQ ID NO: 892822 - protein, 662 aa, Homo sapiens [sequence omitted]

SEQ ID NO: 892823 - protein, 662 aa, Homo sapiens [sequence omitted]

SEQ ID NO: 892824 - protein, 662 aa, Homo sapiens [sequence omitted]

SEQ ID NO: 892825 - protein, 527 aa, Homo sapiens [sequence omitted]

SEQ ID NO: 892826 - protein, 185 aa, Homo sapiens [sequence omitted]

SEQ ID NO: 892827 - protein, 183 aa, Homo sapiens [sequence omitted]

SEQ ID NO: 892828 - protein, 134 aa, Homo sapiens
MTALRLLQRMKRDWMHTGRRPSGLCGAALLVAARMHDFRRTVKEVISVVKVCESTLRKRLTEFEDTPTSQLTIDEFMKIDLEEECDPPIEEGGQTEAREPPQASSWEGPSTTRRRSQLWHGCPGCGRGGFTLCP

SEQ ID NO: 892829 - protein, 677 aa, Homo sapiens
MTGRVCRGCGGTDIELDAARGDAVCTACGSVLEDNIIVSEVQFVESSGGGSSAVGQFVSLDGAGKTPTLGGGFHVNLGKESRAQTLQNGRRHIHHLGNQLQLNQHCLDTAFNFFKMAVSRHLTRGRKMAHVIAACLYLVCRTEGTPHMLLDLSDLLQVNVYVLGKTFLLLARELCINAPAIDPCLYIPRFAHLLEFGEKNHEVSMTALRLLQRMKRDWMHTGRRPSGLCGAALLVAARMHDFRRTVKEVISVVKVCESTLRKRLTEFEDTPTSQLTIDEFMKIDLEEECDPPSYTAGQRKLRMKQLEQVLSKKLEEVEGEISSYQDAIEIELENSRPKAKGGLASLAKDGSTEDTASSLCGEEDTEDEELEAAASHLNKDLYRELLGGAPGSSEAAGSPEWGGRPPALGSLLDPLPTAASLGISDSIRECISSQSSDPKDASGDGELDLSGIDDLEIDRYILNESEARVKAELWMRENAEYLREQREKEARIAKEKELGIYKEHKPKKSCKRREPIQASTAREAIEKMLEQKKISSKINYSVLRGLSSAGGGSPHREDAQPEHSASARKLSRRRTPASRSGADPVTSVGKRLRPLVSTQPAKKVATGEALLPSSPTLGAEPARPQAVLVESGPVSYHADEEADEEEPDEEDGEPCVSALQMMGSNDYGCDGDEDDGY

SEQ ID NO: 892830 - protein, 473 aa, Homo sapiens
MTALRLLQRMKRDWMHTGRRPSGLCGAALLVAARMHDFRRTVKEVISVVKVCESTLRKRLTEFEDTPTSQLTIDEFMKIDLEEECDPPSYTAGQRKLRMKQLEQVLSKKLEEVEGEISSYQDAIEIELENSRPKAKGGLASLAKDGSTEDTASSLCGEEDTEDEELEAAASHLNKDLYRELLGGAPGSSEAAGSPEWGGRPPALGSLLDPLPTAASLGISDSIRECISSQSSDPKDASGDGELDLSGIDDLEIDRYILNESEARVKAELWMRENAEYLREQREKEARIAKEKELGIYKEHKPKKSCKRREPIQASTAREAIEKMLEQKKISSKINYSVLRGLSSAGGGSPHREDAQPEHSASARKLSRRRTPASRSGADPVTSVGKRLRPLVSTQPAKKVATGEALLPSSPTLGAEPARPQAVLVESGPVSYHADEEADEEEPDEEDGEPCVSALQMMGSNDYGCDGDEDDGY

SEQ ID NO: 892831 - protein, 617 aa, Homo sapiens
ARAARCAEVAVEGGSRRWQAAAPRPAVPCAGACARSSVSDLLVRNAGGPACLAICIPESASGRGLWDGRWASSFVQMLRDLACYGRQQPALAESAVHSALRALQGQALLFPGIFLEEIGTEDPCLYIPRFAHLLEFGEKNHEVSMTALRLLQRMKRDWMHTGRRPSGLCGAALLVAARMHDFRRTVKEVISVVKVCESTLRKRLTEFEDTPTSQLTIDEFMKIDLEEECDPPSYTAGQRKLRMKQLEQVLSKKLEEVEGEISSYQDAIEIELENSRPKAKGGLASLAKDGSTEDTASSLCGEEDTEDEELEAAASHLNKDLYRELLGGAPGSSEAAGSPEWGGRPPALGSLLDPLPTAASLGISDSIRECISSQSSDPKDASGDGELDLSGIDDLEIDRYILNESEARVKAELWMRENAEYLREQREKEARIAKEKELGIYKEHKPKKSCKRREPIQASTAREAIEKMLEQKKISSKINYSVLRGLSSAGGGSPHREDAQPEHSASARKLSRRRTPASRSGADPVTSVGKRLRPLVSTQPAKKVATGEALLPSSPTLGAEPARPQAVLVESGPVSYHADEEADEEEPDEEDGEPCVSALQMMGSNDYGCDGDEDDGY

SEQ ID NO: 892832 - protein, 454 aa, Homo sapiens
MDSAFRTIRNVCLIQGHKVFLLRFCLKCLYFNSPPRSVICFELTSACSARCGLGGGSRFPFWPPWNRPRGGGGGGGGGGGGGGGGGGHRALTAVLWVTWQLGSMFFVTKAGTLALCLVNRWIVYTYGSTEDTASSLCGEEDTEDEELEAAASHLNKDLYRELLGGAPGSSEAAGSPEWGGRPPALGSLLDPLPTAASLGISDSIRECISSQSSDPKDASGDGELDLSGIDDLEIDRYILNESEARVKAELWMRENAEYLREQREKEARIAKEKELGIYKEHKPKKSCKRREPIQASTAREAIEKMLEQKKISSKINYSVLRGLSSAGGGSPHREDAQPEHSASARKLSRRRTPASRSGADPVTSVGKRLRPLVSTQPAKKVATGEALLPSSPTLGAEPARPQAVLVESGPVSYHADEEADEEEPDEEDGEPCVSALQMMGSNDYGCDGDEDDGY

SEQ ID NO: 892833 - protein, 373 aa, Homo sapiens
MFFVTKAGTLALCLVNRWIVYTYGSTEDTASSLCGEEDTEDEELEAAASHLNKDLYRELLGGAPGSSEAAGSPEWGGRPPALGSLLDPLPTAASLGISDSIRECISSQSSDPKDASGDGELDLSGIDDLEIDRRDLSMPRCAKAKSQPHFPVLAQYILNESEARVKAELWMRENAEYLREQREKEARIAKEKELGIYKEHKPKKSCKRREPIQASTAREAIEKMLEQKKISSKINYSVLRGLSSAGGGSPHREDAQPEHSASARKLSRRRTPASRSGADPVTSVGKRLRPLVSTQPAKKVATGEALLPSSPTLGAEPARPQAVLVESGPVSYHADEEADEEEPDEEDGEPCVSALQMMGSNDYGCDGDEDDGY

SEQ ID NO: 892834 - protein, 213 aa, Homo sapiens
GLSPHPRPRSPLENAEYLREQREKEARIAKEKELGIYKEHKPKKSCKRREPIQASTAREAIEKMLEQKKISSKINYSVLRGLSSAGGGSPHREDAQPEHSASARKLSRRRTPASRSGADPVTSVGKRLRPLVSTQPAKKVATGEALLPSSPTLGAEPARPQAVLVESGPVSYHADEEADEEEPDEEDGEPCVSALQMMGSNDYGCDGDEDDGY

SEQ ID NO: 892835 - protein, 107 aa, Homo sapiens
KIASRAACYRRGTCWTVVGKRLRPLVSTQPAKKVATGEALLPSSPTLGAEPARPQAVLVESGPVSYHADEEADEEEPDEEDGEPCVSALQMMGSNDYGCDGDEDDGY

SEQ ID NO: 892836 - protein, 677 aa, Homo sapiens; identical to SEQ ID NO: 892829

SEQ ID NO: 892837 - protein, 674 aa, Homo sapiens
MTGRVCRGCGGTDIELDAARGDAVCTACGSVLEDNIIVSEVQFVESSGGGSSAVGQFVSLDGAGKTPTLGGGFHVNLGKESRAQTLQNGRRHIHHLGNQLQLNQHCLDTAFNFFKMAVSRHLTRGRKMAHVIAACLYLVCRTEGTPHMLLDLSDLLQVNVYVLGKTFLLLARELCINAPAIDPCLYIPRFAHLLEFGEKNHEVSMTALRLLQRMKRDWMHTGRRPSGLCGAALLVAARMHDFRRTVKEVISVVKVCESTLRKRLTEFEDTPTSQLTIDEFMKIDLEEECDPPSYTAGQRKLRMKQLEQVLSKKLEEVEGEISSYQDAIEIELENSRPKAKGGLASLAKDGSTEDTASSLCGEEDTEDEELEAAASHLNKDLYRELLGGAPGSSEAAGSPEWGGRPPALGSLLDPLPTAASLGISDSIRECISSQSSDPKDASGDGELDLSGIDDLEIDRYILNESEARVKAELWMRENAEYLREQREKEARIAKEKELGIYKEHKPKKSCKRREPIQASTAREAIEKMLEQKKISSKINYSVLRGLSSAGGGSPHREDAQPEHSASARKLSRRRTPASRSGADPVTSVGKRLRPLVSTQPAKKVATGEALLPSSPTLGAEPARPQAVLVESGPVSYHADEEADEEEPDEEDGEPCVSALQMMGSNACVLRRGWP

SEQ ID NO: 892838 - protein, 572 aa, Homo sapiens
MTGRVCRGCGGTDIELDAARGDAVCTACGSVLEDNIIVSEVQFVESSGGGSSAVGQFVSLDGAGKTPTLGGGFHVNLGKESRAQTLQNGRRHIHHLGNQLQLNQHCLDTAFNFFKMAVSRHLTRGRKMAHVIAACLYLVCRTEGTPHMLLDLSDLLQVNVYVLGKTFLLLARELCINAPAIDPCLYIPRFAHLLEFGEKNHEVSMTALRLLQRMKRDWMHTGRRPSGLCGAALLVAARMHDFRRTVKEVISVVKVCESTLRKRLTEFEDTPTSQLTIDEFMKIDLEEECDPPSYTAGQRKLRMKQLEQVLSKKLEEVEGEISSYQDAIEIELENSRPKAKGGLASLAKDGSTEDTASSLCGEEDTEDEELEAAASHLNKDLYRELLGGAPGSSEAAGSPEWGGRPPALGSLLDPLPTAASLGISDSIRECISSQSSDPKDASGDGELDLSGIDDLEIDRYILNESEARVKAELWMRENAEYLREQREKEARIAKEKELGIYKEHKPKKSCKRREPIQASTAREAIEKMLEQKKISSKINYSVLRGLSSAGGGSPAPTWPAAGQTPLPPPRAQ

SEQ ID NO: 892839 - protein, 208 aa, Homo sapiens
MTGRVCRGCGGTDIELDAARGDAVCTACGSVLEDNIIVSEVQFVESSGGGSSAVGQFVSLDGAGKTPTLGGGFHVNLGKESRAQTLQNGRRHIHHLGNQLQLNQHCLDTAFNFFKMAVSRHLTRGRKMAHVIAACLYLVCRTEGTPHMLLDLSDLLQVDSLRPASFPTWGCDLGVVTRVVTGVYPRCLHASQWPVCAACPVRKFWSVG

SEQ ID NO: 892840 - protein, 341 aa, Homo sapiens
MPHSVTLRGPSPWGFRLVGGRDFSAPLTISRVHAGSKAALAALCPGDLIQAINGESTELMTHLEAQNRIKGCHDHLTLSVSRPEGRSWPSAPDDSKAQAHRIHIDPEIQDGSPTTSRRPSGTGTGPEDGRPSLGSPYGQPPRFPVPHNGSSEATLPAQMSTLHVSPPPSADPARGLPRSRDCRVDLGSEVYRMLREPAEPVAAEPKQSGSFRYLQGMLEAGEGGDWPGPGGPRNLKPTASKLGAPLSGLQGLPECTRCGHGIVGTIVKARDKLYHPECFMCSDCGLNLKQRGYFFLDERLYCESHAKARVKPPEGLRRGGGVPQCQGGTRLSWDPAPTPAS

SEQ ID NO: 892841 - protein, 341 aa, Homo sapiens
LPGVPTSRSSHPKEWGHWQLLNQLGTGWRGWVHAGSKAALAALCPGDLIQAINGESTELMTHLEAQNRIKGCHDHLTLSVSRPEGRSWPSAPDDSKAQAHRIHIDPEIQDGSPTTSRRPSGTGTGPEDGRPSLGSPYGQPPRFPVPHNGSSEATLPAQMSTLHVSPPPSADPARGLPRSRDCRVDLGSEVYRMLREPAEPVAAEPKQSGSFRYLQGMLEAGEGGDWPGPGGPRNLKPTASKLGAPLSGLQGLPECTRCGHGIVGTIVKARDKLYHPECFMCSDCGLNLKQRGYFFLDERLYCESHAKARVKPPEGLRRGGGVPQCQGGTRLSWDPAPTPAS

SEQ ID NO: 892842 - protein, 246 aa, Homo sapiens
MPHSVTLRGPSPWGFRLVGGRDFSAPLTISRVHAGSKAALAALCPGDLIQAINGESTELMTHLEAQNRIKGCHDHLTLSVSRPEGRSWPSAPDDSKAQAHRIHIDPEIQDGSPTTSRRPSGTGTGPEDGRPSLGSPYGQPPRFPVPHNGSSEATLPAQMSTLHVSPPPSADPARGLPRSRDCRVDLGSEVYRMLREPAEPVAAEPKQSGSFRYLQGMLEAGEGGAPSSRHGTSSTIPSASCAVTAA

SEQ ID NO: 892843 - protein, 341 aa, Homo sapiens; identical to SEQ ID NO: 892840

SEQ ID NO: 892844 - protein, 341 aa, Homo sapiens; identical to SEQ ID NO: 892840

SEQ ID NO: 892845 - protein, 263 aa, Homo sapiens
MPHSVTLRGPSPWGFRLVGGRDFSAPLTISRDGSPTTSRRPSGTGTGPEDGRPSLGSPYGQPPRFPVPHNGSSEATLPAQMSTLHVSPPPSADPARGLPRSRDCRVDLGSEVYRMLREPAEPVAAEPKQSGSFRYLQGMLEAGEGGDWPGPGGPRNLKPTASKLGAPLSGLQGLPECTRCGHGIVGTIVKARDKLYHPECFMCSDCGLNLKQRGYFFLDERLYCESHAKARVKPPEGLRRGGGVPQCQGGTRLSWDPAPTPAS

SEQ ID NO: 892846 - protein, 341 aa, Homo sapiens; identical to SEQ ID NO: 892840

SEQ ID NO: 892847 - protein, 183 aa, Homo sapiens
MSTLHVSPPPSADPARGLPRSRDCRVDLGSEVYRMLREPAEPVAAEPKQSGSFRYLQGMLEAGEGGDWPGPGGPRNLKPTASKLGAPLSGLQGLPECTRCGHGIVGTIVKARDKLYHPECFMCSDCGLNLKQRGYFFLDERLYCESHAKARVKPPEGLRRGGGVPQCQGGTRLSWDPAPTPAS

SEQ ID NO: 892848 - protein, 449 aa, Homo sapiens
MPHSVTLRGPSPWGFRLVGGRDFSAPLTISRVHAGSKAALAALCPGDLIQAINGESTELMTHLEAQNRIKGCHDHLTLSVSRPEGRSWPSAPDDSKAQAHRIHIDPEIQDGSPTTSRRPSGTGTGPEDGRPSLGSPYGQPPRFPVPHNGSSEATLPAQMSTLHVSPPPSADPARGLPRSRDCRVDLGSEVYRMLREPAEPVAAEPKQSGSFRYLQGMLEAGEGGEDACHLSPSAFPLPAVPRLPPSDPTSRLAVTCPLRSLRPGPTPLLQPCYALASRFPLHPLSLPLTHARQTRSPVSGADGPSGAQPNTPQKWSSDLLTPFMPPTLRVSGDWPGPGGPRNLKPTASKLGAPLSGLQGLPECTRCGHGIVGTIVKARDKLYHPECFMCSDCGLNLKQRGYFFLDERLYCESHAKARVKPPEGLRRGGGVPQCQGGTRLSWDPAPTPAS

SEQ ID NO: 892849 - protein, 310 aa, Homo sapiens
MPHSVTLRGPSPWGFRLVGGRDFSAPLTISRVHAGSKAALAALCPGDLIQAINGESTELMTHLEAQNRIKGCHDHLTLSVSRPEGRSWPSAPDDSKAQAHRIHIDPEIQDGSPTTSRRPSGTGTGPEDGRPSLGSPYGQPPRFPVPHNGSSEATLPAQMSTLHVSPPPSADPARGLPRSRDCRVDLGSEVYRMLREPAEPVAAEPKQSGSFRYLQGMLEAGEGADGRLGAGTSHGKKRGPVKAQGAKSPCAGRGHVGGKLHQGGRMGKHRGLATVSKPGDARTGAHRGSAPGKGERKNGAQHSGCGGGWG

SEQ ID NO: 892850 - protein, 272 aa, Homo sapiens
PPPRLLRLGTRLRGVNRPRWRSVSPCRQLHFPLFLFPFPSRPRAPPSLVGWSRSPCAFSLLGSCVRACPAMNEEYDVIVLGTGLTECILSGIMSVNGKKVLHMDRNPYYGGESASITPLEDLYKRFKIPGSPPESMGRGRDWNVDLIPKFLMANGQLVKMLLYTEVTRYLDFKVTEGSFVYKGGKIYKVPSTEAEALASSLMGLFEKRRFRKFLVYVANFDEKDPRTFEGIDPKKTTMRDVYKKFDLGQDVIDFTGHALALYRTDDYLDQRL

SEQ ID NO: 892851 - protein, 100 aa, Homo sapiens
YHLFLDIYVCMISFAHNVAAQGKYIAIVSTTVETKEPEKEIRPALELLEPIEQKFVSISDLLVPKDLGTESQIFISRTYDATTHFETTCDDIKNIFWWQG

SEQ ID NO: 892852 - protein, 445 aa, Homo sapiens
MNEEYDVIVLGTGLTECILSGIMSVNGKKVLHMDRNPYYGGESASITPLEDLYKRFKIPGSPPESMGRGRDWNVDLIPKFLMANGQLVKMLLYTEVTRYLDFKVTEGSFVYKGGKIYKVPSTEAEALASSLMGLFEKRRFRKFLVYVANFDEKDPRTFEGIDPKKTTMRDVYKKFDLGQDVIDFTGHALALYRTDDYLDQPCYETINRIKLYSESLARYGKSPYLYPLYGLGELPQGFARLSAIYGGTYMLNKPIEEIIVQNGKVIGVKSEGEIARCKQLICDPSYVKDRVEKVGQVIRVICILSHPIKNTNDANSCQIIIPQNQVNRKSDIYVCMISFAHNVAAQGKYIAIVSTTVETKEPEKEIRPALELLEPIEQKFVSISDLLVPKDLGTESQIFISRTYDATTHFETTCDDIKNIYKRMTGSEFDFEEMKRKKNDIYGED

SEQ ID NO: 892853 - protein, 445 aa, Homo sapiens; identical to SEQ ID NO: 892852

SEQ ID NO: 892854 - protein, 445 aa, Homo sapiens; identical to SEQ ID NO: 892852

SEQ ID NO: 892855 - protein, 445 aa, Homo sapiens; identical to SEQ ID NO: 892852

SEQ ID NO: 892856 - protein, 445 aa, Homo sapiens; identical to SEQ ID NO: 892852

SEQ ID NO: 892857 - protein, 445 aa, Homo sapiens; identical to SEQ ID NO: 892852

SEQ ID NO: 892858 - protein, 445 aa, Homo sapiens; identical to SEQ ID NO: 892852

SEQ ID NO: 892859 - protein, 445 aa, Homo sapiens; identical to SEQ ID NO: 892852

SEQ ID NO: 892860 - protein, 445 aa, Homo sapiens; identical to SEQ ID NO: 892852

SEQ ID NO: 892861 - protein, 423 aa, Homo sapiens
MSVNGKKVLHMDRNPYYGGESASITPLEDLYKRFKIPGSPPESMGRGRDWNVDLIPKFLMANGQLVKMLLYTEVTRYLDFKVTEGSFVYKGGKIYKVPSTEAEALASSLMGLFEKRRFRKFLVYVANFDEKDPRTFEGIDPKKTTMRDVYKKFDLGQDVIDFTGHALALYRTDDYLDQPCYETINRIKLYSESLARYGKSPYLYPLYGLGELPQGFARLSAIYGGTYMLNKPIEEIIVQNGKVIGVKSEGEIARCKQLICDPSYVKDRVEKVGQVIRVICILSHPIKNTNDANSCQIIIPQNQVNRKSDIYVCMISFAHNVAAQGKYIAIVSTTVETKEPEKEIRPALELLEPIEQKFVSISDLLVPKDLGTESQIFISRTYDATTHFETTCDDIKNIYKRMTGSEFDFEEMKRKKNDIYGED

SEQ ID NO: 892862 - protein, 375 aa, Homo sapiens
MNEEYDVIVLGTGLTECILSGIMSVNGKKVLHMDRNPYYGGESASITPLEDLYKRFKIPGSPPESMGRGRDWNVDLIPKFLMANGQLVKMLLYTEVTRYLDFKVTEGSFVYKGGKIYKVPSTEAEALASSLMGLFEKRRFRKFLVYVANFDEKDPRTFEGIDPKKTTMRDVYKKFDLGQDVIDFTGHALALYRTDDYLDQPCYETINRIKLYSESLARYGKSPYLYPLYGLGELPQGFARLSAIYGGTYMLNKPIEEIIVQNGKVIGVKSEGEIARCKQLICDPSYVKDRVEKVGQVIRVICILSHPIKNTNDANSCQIIIPQNQVNRKSDLLASVTSWYQKTWEQKARSLFPAHMMPPLILRQRVMTLKTSIRG

SEQ ID NO: 892863 - protein, 427 aa, Homo sapiens
MNEEYDVIVLGTGLTECILSGIMSVNGKKVLHMDRNPYYGGESASITPLEDLYKRFKIPGSPPESMGRGRDWNVDLIPKFLMANGQLVKMLLYTEVTRYLDFKVTEGSFVYKGGKIYKVPSTEAEALASSLMGLFEKRRFRKFLVYVANFDEKDPRTFEGIDPKKTTMRDVYKKFDLGQDVIDFTGHALALYRTDDYLDQPCYETINRIKLYSESLARYGKSPYLYPLYGLGELPQGFARLSAIYGGTYMLNKPIEEIIVQNGKVIGVKSEGEIARCKQLICDPSYVKDRVEKVGQVIRVICILSHPIKNTNDANSCQIIIPQNQVNRKSDIYVCMISFAHNVAAQGKYIAIVSTTVETKEPEKEIRPALELLEPIEQKFVSISDLLVPKDLGTESQIFISRTYDATTHFETTCDDIKNKNDIYGED

SEQ ID NO: 892864 - protein, 495 aa, Homo sapiens
SPRKPPQKLLPVLCDLYSLQNQRSMVQYNISSSSIYGVTSQNNTFRVSLGKRKPSNFYLANFLGKECILSGIMSVNGKKVLHMDRNPYYGGESASITPLEDLYKRFKIPGSPPESMGRGRDWNVDLIPKFLMANGQLVKMLLYTEVTRYLDFKVTEGSFVYKGGKIYKVPSTEAEALASSLMGLFEKRRFRKFLVYVANFDEKDPRTFEGIDPKKTTMRDVYKKFDLGQDVIDFTGHALALYRTDDYLDQPCYETINRIKLYSESLARYGKSPYLYPLYGLGELPQGFARLSAIYGGTYMLNKPIEEIIVQNGKVIGVKSEGEIARCKQLICDPSYVKDRVEKVGQVIRVICILSHPIKNTNDANSCQIIIPQNQVNRKSDIYVCMISFAHNVAAQGKYIAIVSTTVETKEPEKEIRPALELLEPIEQKFVSISDLLVPKDLGTESQIFISRTYDATTHFETTCDDIKNIYKRMTGSEFDFEEMKRKKNDIYGED

SEQ ID NO: 892865 - protein, 196 aa, Homo sapiens
MNEEYDVIVLGTGLTECILSGIMSVNGKKVLHMDRNPYYGGESASITPLEDLYKRFKIPGSPPESMGRGRDWNVDLIPKFLMANGQLVKMLLYTEVTRYLDFKVTEGSFVYKGGKIYKVPSTEAEALASSLMGLFEKRRFRKFLVYVANFDEKDPRTFEGIDPKKTTMRDVYKKFDLGQDVIDFTGHALALYRTDE

SEQ ID NO: 892866 - protein, 410 aa, Homo sapiens
MYPVRYNVSEWQESSSYGSKPLLRRRECIYNTIGRYWNVDLIPKFLMANGQLVKMLLYTEVTRYLDFKVTEGSFVYKGGKIYKVPSTEAEALASSLMGLFEKRRFRKFLVYVANFDEKDPRTFEGIDPKKTTMRDVYKKFDLGQDVIDFTGHALALYRTDDYLDQPCYETINRIKLYSESLARYGKSPYLYPLYGLGELPQGFARLSAIYGGTYMLNKPIEEIIVQNGKVIGVKSEGEIARCKQLICDPSYVKDRVEKVGQVIRVICILSHPIKNTNDANSCQIIIPQNQVNRKSDIYVCMISFAHNVAAQGKYIAIVSTTVETKEPEKEIRPALELLEPIEQKFVSISDLLVPKDLGTESQIFISRTYDATTHFETTCDDIKNIYKRMTGSEFDFEEMKRKKNDIYGED

SEQ ID NO: 892867 - protein, 400 aa, Homo sapiens
MNEEYDVIVLGTGLTECILSGIMSVNGKKVLHMDRNPYYGGESASITPLEDLYKRFKIPGSPPESMGRGRDWNVDLIPKFLMANGLMGLFEKRRFRKFLVYVANFDEKDPRTFEGIDPKKTTMRDVYKKFDLGQDVIDFTGHALALYRTDDYLDQPCYETINRIKLYSESLARYGKSPYLYPLYGLGELPQGFARLSAIYGGTYMLNKPIEEIIVQNGKVIGVKSEGEIARCKQLICDPSYVKDRVEKVGQVIRVICILSHPIKNTNDANSCQIIIPQNQVNRKSDIYVCMISFAHNVAAQGKYIAIVSTTVETKEPEKEIRPALELLEPIEQKFVSISDLLVPKDLGTESQIFISRTYDATTHFETTCDDIKNIYKRMTGSEFDFEEMKRKKNDIYGED

SEQ ID NO: 892868 - protein, 445 aa, Homo sapiens; identical to SEQ ID NO: 892852

SEQ ID NO: 892869 - protein, 445 aa, Homo sapiens; identical to SEQ ID NO: 892852

SEQ ID NO: 892870 - protein, 314 aa, Homo sapiens [sequence omitted]

SEQ ID NO: 892871 - protein, 267 aa, Homo sapiens
  misc_feature (2)..(2): Xaa can be any naturally occurring amino acid
AXLEDPERVMGALYRTDDYLDQPCYETINRIKLYSESLARYGKSPYLYPLYGLGELPQGFARLSAIYGGTYMLNKPIEEIIVQNGKVIGVKSEGEIARCKQLICDPSYVKDRVEKVGQVIRVICILSHPIKNTNDANSCQIIIPQNQVNRKSDIYVCMISFAHNVAAQGKYIAIVSTTVETKEPEKEIRPALELLEPIEQKFVSISDLLVPKDLGTESQIFISRTYDATTHFETTCDDIKNIYKRMTGSEFDFEEMKRKKNDIYGED

SEQ ID NO: 892872 - protein, 403 aa, Homo sapiens
MNEEYDVIVLGTGLTECILSGIMSVNGKKVLHMDRNPYYGGESASITPLEDLYKRFKIPGSPPESMGRGRDWNVDLIPKFLMANGQLVKMLLYTEVTRYLDFKVTEGSFVYKGGKIYKVPSTEAEALASSLMGLFEKRRFRKFLVYVANFDEKDPRTFEGIDPKKTTMRDVYKKFDLGQDVIDFTGHALALYRTDDYLDQPCYETINRIKLYSESLARYGKSPYLYPLYGLGELPQGFARLSAIYGGTYMLNKPIEEIIVQNGKVIGVKSEGEIARCKQLICDPSYVKDRVEKVGQVIRVICILSHPIKNTNDANSCQIIIPQNQVNRKSDIYVCMISFAHNVAAQGKYIAIVSTTVETKEPEKEIRPALELLEPIEQKFVSISDLLVPKDLGTESQIFIPRR

SEQ ID NO: 892873 - protein, 414 aa, Homo sapiens
MNEEYDVIVLGTGLTECILSGIMSVNGKKVLHMDRNPYYGGESASITPLEDLYKRFKIPGSPPESMGRGRDWNVDLIPKFLMANGQLVKMLLYTEVTRYLDFKVTEGSFVYKGGKIYKVPSTEAEALASSLMGLFEKRRFRKFLVYVANFDEKDPRTFEGIDPKKTTMRDVYKKFDLGQDVIDFTGHALALYRTDDYLDQPCYETINRIKLYSESLARYGKSPYLYPLYGLGELPQGFARLSAIYGGTYMLNKPIEEIIVQNGKVIGVKSEGEIARCKQLICDPSYVKDRVEKVGQVIRVICILSHPIKNTNDANSCQIIIPQNQVNRKSDIYVCMISFAHNVAAQGKYIAIVSTTVETKEPEKEIRPALELLEPIEQKFVSISDLLVPKDLGTESQIYFPHIMSHVGGILLER

SEQ ID NO: 892874 - protein, 371 aa, Homo sapiens
MNEEYDVIVLGTGLTECILSGIMSVNGKKVLHMDRNPYYGGESASITPLEDLYKRFKIPGSPPESMGRGRDWNVDLIPKFLMANGQLVKMLLYTEVTRYLDFKVTEGSFVYKGGKIYKVPSTEAEALASSLMGLFEKRRFRKFLVYVANFDEKDPRTFEGIDPKKTTMRDVYKKFDLGQDVIDFTGHALALYRTDDYLDQPCYETINRIKLYSESLARYGKSPYLYPLYGLGELPQGFARLSAIYGGTYMLNKPIEEIIVQNGKVIGVKSEGEIARCKQLICDPSYVKDRVEKVGQVIRVICILSHPIKNTNDANSCQIIIPQNQVNRKSDIYVCMISFAHNVAAQGKYIAIVSTTVETKELYLIRPVSGL

SEQ ID NO: 892875 - protein, 404 aa, Homo sapiens
MNEEYDVIVLGTGLTECILSGIMSVNGKKVLHMDRNPYYGGESASITPLEDLYKRFKIPGSPPESMGRGRDWNVDLIPKFLMANGQLVKMLLYTEVTRYLDFKVTEGSFVYKGGKIYKVPSTEAEALASSLMGLFEKRRFRKFLVYVANFDEKDPRTFEGIDPKKTTMRDVYKKFDLGQDVIDFTGHALALYRTDDYLDQPCYETINRIKLYSESLARYGKSPYLYPLYGLGELPQGFARLSAIYGGTYMLNKPIEEIIVQNGKVIGVKSEGEIARCKQLICDPSYVKDRVEKVGQVIRVICILSHPIKNTNDANSCQIIIPQNQVNRKSDIYVCMISFAHNVAAQGKYIAIVSTTVETKERGKPEKGNQKTPQAFGGPLSFGKNQKTLEKPKGGEKPNFLGGY

SEQ ID NO: 892876 - protein, 198 aa, Homo sapiens
ERAYTRRRHLTGSYMMAEVGKTFKQKQYKQRSKEKQETWHIENHKKFGMADVSKLRHLAPIKNTNDANSCQIIIPQNQVNRKSDIYVCMISFAHNVAAQGKYIAIVSTTVETKEPEKEIRPALELLEPIEQKFVSISDLLVPKDLGTESQIFISRTYDATTHFETTCDDIKNIYKRMTGSEFDFEEMKRKKNDIYGED

SEQ ID NO: 892877 - protein, 333 aa, Homo sapiens
MNEEYDVIVLGTGLTECILSGIMSVNGKKVLHMDRNPYYGGESASITPLEDLYKRFKIPGSPPESMGRGRDWNVDLIPKFLMANGQLVKMLLYTEVTRYLDFKVTEGSFVYKGGKIYKVPSTEAEALASSLMGLFEKRRFRKFLVYVANFDEKDPRTFEGIDPKKTTMRDVYKKFDLGQDVIDFTGHALALYRTDDYLDQPCYETINRIKLYSESLARYGKSPYLYPLYGLGELPQGFARLSAIYGGTYMLNKPIEEIIVQNGKVIGVKSEGEIARCKQLICDPSYVKDRVEKVGQVIRVICILSHPIKNTNDANSCQIIIPQNQVNRKSGEV

SEQ ID NO: 892878 - protein, 277 aa, Homo sapiens
MNEEYDVIVLGTGLTECILSGIMSVNGKKVLHMDRNPYYGGESASITPLEDLYKRFKIPGSPPESMGRGRDWNVDLIPKFLMANGQLVKMLLYTEVTRYLDFKVTEGSFVYKGGKIYKVPSTEAEALASSLMGLFEKRRFRKFLVYVANFDEKDPRTFEGIDPKKTTMRDVYKKFDLGQDVIDFTGHALALYRTDDYLDQPCYETINRIKLYSESLARYGKSPYLYPLYGLGELPQGFARLSAIYGGTYMLNKPIEEIIVQNGKVIGVKSEGEVSSF

SEQ ID NO: 892879 - protein, 240 aa, Homo sapiens
MNEEYDVIVLGTGLTECILSGIMSVNGKKVLHMDRNPYYGGESASITPLEDLYKRFKIPGSPPESMGRGRDWNVDLIPKFLMANGQLVKMLLYTEVTRYLDFKVTEGSFVYKGGKIYKVPSTEAEALASSLMGLFEKRRFRKFLVYVANFDEKDPRTFEGIDPKKTTMRDVYKKFDLGQDVIDFTGHALALYRTDDYLDQPCYETINRIKLYSESLARYGKSPYLYPLYGLGELPQGFAR

SEQ ID NO: 892880 - protein, 202 aa, Homo sapiens
MNEEYDVIVLGTGLTECILSGIMSVNGKKVLHMDRNPYYGGESASITPLEDLYKRFKIPGSPPESMGRGRDWNVDLIPKFLMANGQLVKMLLYTEVTRYLDFKVTEGSFVYKGGKIYKVPSTEAEALASSLMGLFEKRRFRKFLVYVANFDEKDPRTFEGIDPKKTTMRDVYKKFDLGQDVIDFTGHALALYRTDDSLDHRV

SEQ ID NO: 892881 - protein, 196 aa, Homo sapiens; identical to SEQ ID NO: 892865

SEQ ID NO: 892882 - protein, 202 aa, Homo sapiens
MNEEYDVIVLGTGLTECILSGIMSVNGKKVLHMDRNPYYGGESASITPLEDLYKRFKIPGSPPESMGRGRDWNVDLIPKFLMANGQLVKMLLYTEVTRYLDFKVTEGSFVYKGGKIYKVPSTEAEALASSLMGLFEKRRFRKFLVYVANFDEKDPRTFEGIDPKKTTMRDVYKKFDLGQDVIDFTGHALALYRTDDYLDQRL

SEQ ID NO: 892883 - protein, 240 aa, Homo sapiens
  misc_feature (200)..(200): Xaa can be any naturally occurring amino acid
MNEEYDVIVLGTGLTECILSGIMSVNGKKVLHMDRNPYYGGESASITPLEDLYKRFKIPGSPPESMGRGRDWNVDLIPKFLMANGQLVKMLLYTEVTRYLDFKVTEGSFVYKGGKIYKVPSTEAEALASSLMGLFEKRRFRKFLVYVANFDEKDPRTFEGIDPKKTTMRDVYKKFDLGQDVIDFTGHALAQPHCRGLGNXTIGAPAEGHSPLKAVTRAKVLGGADAPMDLAHPAQPQASS

SEQ ID NO: 892884 - protein, 254 aa, Homo sapiens
MNEEYDVIVLGTGLTECILSGIMSVNGKKVLHMDRNPYYGGESASITPLEDLYKRFKIPGSPPESMGRGRDWNVDLIPKFLMANGQLVKMLLYTEVTRYLDFKVTEGSFVYKGGKIYKVPSTEAEALASSLMGLFEKRRFRKFLVYVANFDEKDPRTFEGIDPKKTTMRDVYKKFDLGQDVIDFTGHALDNCDAETDRFTMRMQARCFTESPVKIRKFRDPFEQVGNSFWDTSTYLGLHTKDPPSLNPLIFKIP

SEQ ID NO: 892885 - protein, 130 aa, Homo sapiens
MNEEYDVIVLGTGLTECILSGIMSVNGKKVLHMDRNPYYGGESASITPLEDLYKRFKIPGSPPESMGRGRDWNVDLIPKFLMANGQLVKMLLYTEVTRYLDFKVTEGSFVYKGGKIYKVPSTEAEALAST

SEQ ID NO: 892886 - protein, 128 aa, Homo sapiens
MEVLCWKCFGRSSVGGLWKGVYIGVSAGGRGLHVNRFCTEITRERGWEDGKRRFPVCTPENMGEGPVPWPVRRRSGCGNSRPGGSGGGRSRPGNALYAQAGPWEPQSHGSCPGWCRSWTWGNWRAWPG

SEQ ID NO: 892887 - protein, 329 aa, Homo sapiens
MGTPKPRILPWLVSQLDLGQLEGVAWVNKSRTRFRIPWKHGLRQDAQQEDFGIFQAWAEATGAYVPGRDKPDLPTWKRNFRSALNRKEGLRLAEDRSKDPHDPHKIYEFVNSGVGDFSQPDTSPDTNGGGSTSDTQEDILDELLGNMVLAPLPDPGPPSLAVAPEPCPQPLRSPSLDNPTPFPNLGPSENPLKRLLVPGEEWEFEVTAFYRGRQVFQQTISCPEGLRLVGSEVGDRTLPGWPVTLPDPGMSLTDRGVMSYVRHVLSCLGGGLALWRAGQWLWAQRLGHCHTYWAVSEELLPNSGHGPDGEVPKDKEGGVFDLGPFIVGE

SEQ ID NO: 892888 - protein, 329 aa, Homo sapiens
MGTPKPRILPWLVSQLDLGQLEGVAWVNKSRTRFRIPWKHGLRQDAQQEDFGIFQAWAEATGAYVPGRDKPDLPTWKRNFRSALNRKEGLRLAEDRSKDPHDPHKIYEFVNSGVGDFSQPDTSPDTNGGGSTSDTQEDILDELLGNMVLAPLPDPGPPSLAVAPEPCPQPLRSPSLDNPTPFPNLGPSENPLKRLLVPGEEWEFEVTAFYRGRQVFQQTISCPEGLRLVGSEVGDRTLPGWPVTLPDPGMSLTDRGVMSYVRHVLSCLGGGLALWRAGQWLWAQRLGHCHTYWAVSEELLPNSGHGPDGEVPKDKEGGVFDLGPFIVAW

SEQ ID NO: 892889 - protein, 72 aa, Homo sapiens
GNSPAGRPIGFWVCYPKNDKVGFISRSRSKRKPQRSRAQLTGKGVRSLEFESYPELQDRGGFQLPARPDLPS

SEQ ID NO: 892890 - protein, 72 aa, Homo sapiens; identical to SEQ ID NO: 892889

SEQ ID NO: 892891 - protein, 329 aa, Homo sapiens; identical to SEQ ID NO: 892887

SEQ ID NO: 892892 - protein, 100 aa, Homo sapiens
DFALSPWNPRMVSSLYLPASAGVRHRPSTQSLLRELAATVIIIVTNDGEQTNSRKATSLRVSLCSGTFCHDGNDSHLHCPVQQPLATGAKHSGEASATRT

SEQ ID NO: 892893 - protein, 72 aa, Homo sapiens; identical to SEQ ID NO: 892889

SEQ ID NO: 892894 - protein, 72 aa, Homo sapiens; identical to SEQ ID NO: 892889

SEQ ID NO: 892895 - protein, 72 aa, Homo sapiens; identical to SEQ ID NO: 892889

SEQ ID NO: 892896 - protein, 329 aa, Homo sapiens; identical to SEQ ID NO: 892887

SEQ ID NO: 892897 - protein, 72 aa, Homo sapiens; identical to SEQ ID NO: 892889

SEQ ID NO: 892898 - protein, 465 aa, Homo sapiens
MAMTGSTPCSSMSNHTKERVTMTKVTLENFYSNLIAQHEEREMRQKKLEKVMEEEGLKDEEKRLRRSAHARKETEFLRLKRTRLGLEDFESLKVIGRGAFGEVRLVQKKDTGHVYAMKILRKADMLEKEQVGHIRAERDILVEADSLWVVKMFYSFQDKLNLYLIMEFLPGGDMMTLLMKKDTLTEEETQFYIAETVLAIDSIHQLGFIHRDIKPDNLLLDSKGHVKLSDFGLCTGLKKAHRTEFYRNLNHSLPSDFTFQNMNSKRKAETWKRNRRQLAFSTVGTPDYIAPEVFMQTGYNKLCDWWSLGVIMYEMLIGYPPFCSETPQETYKKVMNWKETLTFPPEVPISEKAKDLILRFCCEWEHRIGAPGVEEIKSNSFFEGVDWEHIRERPAAISIEIKSIDDTSNFDEFPESDILKPTVATSNHPETDYKNKDWVFINYTYKRFEGLTARGAIPSYMKAAK

SEQ ID NO: 892899 - protein, 124 aa, Homo sapiens
LILADREDISENWYSLVCCVCVCVCVCVCVWWLCIFLFPGDMMTLLMKKDTLTEEETQFYIAETVLAIDSIHQLGFIHRDIKPDNLLLDSKVLGGHWHELCTFTDLSSLCFNTCTPVVIPVGEL

SEQ ID NO: 892900 - protein, 465 aa, Homo sapiens; identical to SEQ ID NO: 892898

SEQ ID NO: 892901 - protein, 428 aa, Homo sapiens
MAMTGSTPCSSMSNHTKERVTMTKVTLENFYSNLIAQHEEREMRQKKLEKVMEEEGLKDEEKRLRRSAHARKETEFLRLKRTRLGLEDFESLKVIGRGAFGEVRLVQKKDTGHVYAMKILRKADMLEKEQVGHIRAERDILVEADSLWVVKMFYSFQDKLNLYLIMEFLPGGDMMTLLMKKDTLTEEETQFYIAETVLAIDSIHQLGFIHRDIKPDNLLLDSKGHVKLSDFGLCTGLKKAHRTEFYRNLNHSLPSDFTFQNMNSKRKAETWKRNRRQLAFSTVGTPDYIAPEVFMQTGYNKLCDWWSLGVIMYEMLIGYPPFCSETPQETYKKVMNWKETLTFPPEVPISEKAKDLILRFCCEWEHRIGAPGVEEIKSNSFFEGVDWEHIRERPAAISIEIKSIDDTSNFDEFPESDILKPTVLSSAP

SEQ ID NO: 892902 - protein, 465 aa, Homo sapiens; identical to SEQ ID NO: 892898

SEQ ID NO: 892903 - protein, 439 aa, Homo sapiens
MAMTGSTPCSSMSNHTKERVTMTKVTLENFYSNLIAQHEEREMRQKKLEKVMEEEGLKDEEKRLRRSAHARKETEFLRLKRTRLGLEDFESLKVIGRGAFGEVRLVQKKDTGHVYAMKILRKADMLEKEQVGHIRAERDILVEADSLWVVKMFYSFQDKLNLYLIMEFLPGGDMMTLLMKKDTLTEEETQFYIAETVLAIDSIHQLGFIHRDIKPDNLLLDSKGHVKLSDFGLCTGLKKAHRTEFYRNLNHSLPSDFTFQNMNSKRKAETWKRNRRQLAFSTVGTPDYIAPEVFMQTGYNKLCDWWSLGVIMYEMLIGYPPFCSETPQETYKKVMNWKETLTFPPEVPISEKAKDLILRFCCEWEHRIGAPGVEEIKSNSFFEGVDWEHIRERPAAISIEIKSIDDTSNFDEFPESDILKPTDAFLGDTPPHPKGSPAT

SEQ ID NO: 892904 - protein, 336 aa, Homo sapiens
MAMTGSTPCSSMSNHTKERVTMTKVTLENFYSNLIAQHEEREMRQKKLEKVMEEEGLKDEEKRLRRSAHARKETEFLRLKRTRLGLEDFESLKVIGRGAFGEVRLVQKKDTGHVYAMKILRKADMLEKEQVGHIRAERDILVEADSLWVVKMFYSFQDKLNLYLIMEFLPGGDMMTLLMKKDTLTEEETQFYIAETVLAIDSIHQLGFIHRDIKPDNLLLDSKGHVKLSDFGLCTGLKKAHRTEFYRNLNHSLPSDFTFQNMNSKRKAETWKRNRRQLAFSTVGTPDYIAPEVFMQTGYNKLCDWWSLGVIMYEMLIGKLHGFRGLFLCIHDRLLH

SEQ ID NO: 892905 - protein, 256 aa, Homo sapiens
MAMTGSTPCSSMSNHTKERVTMTKVTLENFYSNLIAQHEEREMRQKKLEKVMEEEGLKDEEKRLRRSAHARKETEFLRLKRTRLGLEDFESLKVIGRGAFGEVRLVQKKDTGHVYAMKILRKADMLEKEQVGHIRAERDILVEADSLWVVKMFYSFQDKLNLYLIMEFLPGGDMMTLLMKKDTLTEEETQFYIAETVLAIDSIHQLGFIHRDIKPDNLLLDSKVLGGHWHELCTFTDLSSLCFNTCTPVVIPVGEL

SEQ ID NO: 892906 - protein, 92 aa, Homo sapiens
ISLRFAHTPCGQEELEFAIMRIEALKLARQIALASRSHQDAKVPVCCCVRHLLRMSCVPLGSRSCFANHPPGGHHRCPAKSRFQKAESVTLA

SEQ ID NO: 892907 - protein, 973 aa, Homo sapiens
MPPELSPVADDIIQPAAPADLESPTLAASSYHGDVVGQVSTDLIAQRSSDSEEAFETPESTTPVKAPPAPPPPPPEVIPEPEVSTQPPPEEPGCGSETVPVPDGPRSDSVEGSPFRPPSHSFSAVFDEDKPIASSGTYNLDFDNIELVDTFQTLEPRASDAKNQEGKVNTRRKSTDSVPISKSTLSRSLSLQASDFDGASSSGNPEAVALAPDAYSTGSSSASSTLKRTKKPRPPSLKKKQTTKKPTETPPVKETQQEPDEESLVPSGENLASETKTESAKTEGPSPALLEETPLEPAVGPKAACPLDSESAEGVVPPASGGGRVQNSPPVGRKTLPLTTAPEAGEVTPSDSGGQEDSPAKGLSVRLEFDYSEDKSSWDNQQENPPPTKKIGKKPVAKMPLRRPKMKKTPEKLDNTPASPPRSPAEPNDIPIAKGTYTFDIDKWDDPNFNPFSSTSKMQESPKLPQQSYNFDPDTCDESVDPFKTSSKTPSSPSKSPASFEIPASAMEANGVDGDGLNKPAKKKKTPLKTDTFRVKKSPKRSPLSDPPSQDPTPAATPETPPVISAVVHATDEEKLAVTNQKWTCMTVDLEADKQDYPQPSDLSTFVNETKFSSPTEELDYRNSYEIEYMEKIGSSLPQDDDAPKKQALYLMFDTSQESPVKSSPVRMSESPTPCSGSSFEETEALVNTAAKNQHPVPRGLAPNQESHLQVPEKSSQKELEAMGLGTPSEAIEIREAAHPTDVSISKTALYSRIGTAEVEKPAGLLFQQPDLDSALQIARAEIITKEREVSEWKDKYEESRREVMEMRKIVAEYEKTIAQMIEDEQREKSVSHQTVQQLVLEKEQALADLNSVEKSLADLFRRYEKMKEVLEGFRKNEEVLKRCAQEYLSRVKKEEQRYQALKVHAEEKLDRANAEIAQVRGKAKQEQAAHQASLRKEQLRVDALERTLEQKNKEIEELTKICDELIAKMGKS

SEQ ID NO: 892908 - protein, 291 aa, Homo sapiens
KQHQETSACGSPHGEDGPGDFAHTGVPGHVPRSTCAPSPQREVLTVPEANSEPWTLDTLGGERRPGVTAGILEMRNALGNQSTPAPPTGEVADTPLEPGKVAGAAGKAEGDITLSTAETQACASGDLPEAGTTRTFSVVAGDLVLPGSCQDPACSDKAPGMEGTAALHGDSPARPQQAKEQPGPERPIPAGDGKVCVSSPPEPDETHDPKLQHLAPEELHTDRESPRPGPSMLPSVPKKDAPRVMDKVTSDETRGAEGTESSPVADDIIQPAAPADLESPTLAVLRVMSPS

SEQ ID NO: 892909 - protein, 216 aa, Homo sapiens
KQHQETSACGSPHGEDGPGDFAHTGVPGHVPRSTCAPSPQREVLTVPEANSEPWTLDTLGGERRPGVTAGILEMRNALGNQSTPAPPTGEVADTPLEPGKVAGAAGKAEGDITLSTAETQACASGDLPEAGTTRTFSVVAGDLVLPGSCQDPACSDKAPGMEGTAALHGDSPARPQQAKEQPGPERPIPAGDGKVCVSSPPEPDQASVPDQASVPD

SEQ ID NO: 892910 - protein, 1229 aa, Homo sapiens
KQHQETSACGSPHGEDGPGDFAHTGVPGHVPRSTCAPSPQREVLTVPEANSEPWTLDTLGGERRPGVTTGILEMRNALGNQSTPAPPTGEVADTPLEPGKVAGAAGKAEGDITLSTAETQACASGDLPEAGTTRTFSVVAGDLVLPGSCQDPACSDKAPGMEGTAALHGDSPARPQQAKEQPGPERPIPAGDGKVCVSSPPEPDETHDPKLQHLAPEELHTDRESPRPGPSMLPSVPKKDAPRVMDKVTSDETRGAEGTESSPVADDIIQPAAPADLESPTLAASSYHGDVVGQVSTDLIAQRSSDSEEAFETPESTTPVKAPPAPPPPPPEVIPEPEVSTQPPPEEPGCGSETVPVPDGPRSDSVEGSPFRPPSHSFSAVFDEDKPIASSGTYNLDFDNIELVDTFQTLEPRASDAKNQEGKVNTRRKSTDSVPISKSTLSRSLSLQASDFDGASSSGNPEAVALAPDAYSTGSSSASSTLKRTKKPRPPSLKKKQTTKKPTETPPVKETQQEPDEESLVPSGENLASETKTESAKTEGPSPALLEETPLEPAVGPKAACPLDSESAEGVVPPASGGGRVQNSPPVGRKTLPLTTAPEAGEVTPSDSGGQEDSPAKGLSVRLEFDYSEDKSSWDNQQENPPPTKKIGKKPVAKMPLRRPKMKKTPEKLDNTPASPPRSPAEPNDIPIAKGTYTFDIDKWDDPNFNPFSSTSKMQESPKLPQQSYNFDPDTCDESVDPFKTSSKTPSSPSKSPASFEIPASAMEANGVDGDGLNKPAKKKKTPLKTDTFRVKKSPKRSPLSDPPSQDPTPAATPETPPVISAVVHATDEEKLAVTNQKWTCMTVDLEADKQDYPQPSDLSTFVNETKFSSPTEELDYRNSYEIEYMEKIGSSLPQDDDAPKKQALYLMFDTSQESPVKSSPVRMSESPTPCSGSSFEETEALVNTAAKNQHPVPRGLAPNQESHLQVPEKSSQKELEAMGLGTPSEAIEIREAAHPTDVSISKTALYSRIGTAEVEKPAGLLFQQPDLDSALQIARAEIITKEREVSEWKDKYEESRREVMEMRKIVAEYEKTIAQMIEDEQREKSVSHQTVQQLVLEKEQALADLNSVEKSLADLFRRYEKMKEVLEGFRKNEEVLKRCAQEYLSRVKKEEQRYQALKVHAEEKLDRANAEIAQVRGKAKQEQAAHQASLRKEQLRVDALERTLEQKNKEIEELTKICDELIAKMGKS

SEQ ID NO: 892911 - protein, 1019 aa, Homo sapiens
MRLRTKAAPCGPSPISPGGSPVADDIIQPAAPADLESPTLAASSYHGDVVGQVSTDLIAQRSSDSEEAFETPESTTPVKAPPAPPPPPPEVIPEPEVSTQPPPEEPVETGFHHDDQAGLKLLTSSDLPASASQSAGITGCGSETVPVPDGPRSDSVEGSPFRPPSHSFSAVFDEDKPIASSGTYNLDFDNIELVDTFQTLEPRASDAKNQEGKVNTRRKSTDSVPISKSTLSRSLSLQASDFDGASSSGNPEAVALAPDAYSTGSSSASSTLKRTKKPRPPSLKKKQTTKKPTETPPVKETQQEPDEESLVPSGENLASETKTESAKTEGPSPALLEETPLEPAVGPKAACPLDSESAEGVVPPASGGGRVQNSPPVGRKTLPLTTAPEAGEVTPSDSGGQEDSPAKGLSVRLEFDYSEDKSSWDNQQENPPPTKKIGKKPVAKMPLRRPKMKKTPEKLDNTPASPPRSPAEPNDIPIAKGTYTFDIDKWDDPNFNPFSSTSKMQESPKLPQQSYNFDPDTCDESVDPFKTSSKTPSSPSKSPASFEIPASAMEANGVDGDGLNKPAKKKKTPLKTDTFRVKKSPKRSPLSDPPSQDPTPAATPETPPVISAVVHATDEEKLAVTNQKWTCMTVDLEADKQDYPQPSDLSTFVNETKFSSPTEELDYRNSYEIEYMEKIGSSLPQDDDAPKKQALYLMFDTSQESPVKSSPVRMSESPTPCSGSSFEETEALVNTAAKNQHPVPRGLAPNQESHLQVPEKSSQKELEAMGLGTPSEAIEIREAAHPTDVSISKTALYSRIGTAEVEKPAGLLFQQPDLDSALQIARAEIITKEREVSEWKDKYEESRREVMEMRKIVAEYEKTIAQMIEDEQREKSVSHQTVQQLVLEKEQALADLNSVEKSLADLFRRYEKMKEVLEGFRKNEEVLKRCAQEYLSRVKKEEQRYQALKVHAEEKLDRANAEIAQVRGKAKQEQAAHQASLRKEQLRVDALERTLEQKNKEIEELTKICDELIAKMGKS

SEQ ID NO: 892912 - protein, 1276 aa, Homo sapiens
KQHQETSACGSPHGEDGPGDFAHTGVPGHVPRSTCAPSPQREVLTVPEANSEPWTLDTLGGERRPGVTTGILEMRNALGNQSTPAPPTGEVADTPLEPGKVAGAAGKAEGDITLSTAETQACASGDLPEAGTTRTFSVVAGDLVLPGSCQDPACSDKAPGMEGTAALHGDSPARPQQAKEQPGPERPIPAGDGKVCVSSPPEPDETHDPKLQHLAPEELHTDRESPRPGPSMLPSVPKKDAPRVMDKVTSDETRGAEGTESSPVADDIIQPAAPADLESPTLAASSYHGDVVGQVSTDLIAQRSSDSEEAFETPESTTPVKAPPAPPPPPPEVIPEPEVSTQPPPEEPGCGSETVPVPDGPRSDSVEGSPFRPPSHSFSAVFDEDKPIASSGTYNLDFDNIELVDTFQTLEPRASDAKNQEGKVNTRRKSTDSVPISKSTLSRSLSLQASDFDGASSSGNPEAVALAPDAYSTGSSSASSTLKRTKKPRPPSLKKKQTTKKPTETPPVKETQQEPDEESLVPSGENLASETKTESAKTEGPSPALLEETPLEPAVGPKAACPLDSESAEGVVPPASGGGRVQNSPPVGRKTLPLTTAPEAGEVTPSDSGGQEDSPAKGLSVRLEFDYSEDKSSWDNQQENPPPTKKIGKKPVAKMPLRRPKMKKTPEKLDNTPASPPRSPAEPNDIPIAKGTYTFDIDKWDDPNFNPFSSTSKMQESPKLPQQSYNFDPDTCDESVDPFKTSSKTPSSPSKSPASFEIPASAMEANGVDGDGLNKPAKKKKTPLKTDTFRVKKSPKRSPLSDPPSQDPTPAATPETPPVISAVVHATDEEKLAVTNQKWTCMTVDLEADKQDYPQPSDLSTFVNETKFSSPTEELDYRNSYEIEYMEKIGSSLPQDDDAPKKQALYLMFDTSQESPVKSSPVRMSESPTPCSGSSFEETEALVNTAAKNQHPVPRGLAPNQESHLQVPEKSSQKELEAMGLGTPSEAIEITAPEGSFASADALLSRLAHPVSLCGALDYLEPDLAEKNPPLFAQKLQREAAHPTDVSISKTALYSRIGTAEVEKPAGLLFQQPDLDSALQIARAEIITKEREVSEWKDKYEESRREVMEMRKIVAEYEKTIAQMIEDEQREKSVSHQTVQQLVLEKEQALADLNSVEKSLADLFRRYEKMKEVLEGFRKNEEVLKRCAQEYLSRVKKEEQRYQALKVHAEEKLDRANAEIAQVRGKAKQEQAAHQASLRKEQLRVDALERTLEQKNKEIEELTKICDELIAKMGKS

SEQ ID NO: 892913 - protein, 1157 aa, Homo sapiens
KQHQETSACGSPHGEDGPGDFAHTGVPGHVPRSTCAPSPQREVLTVPEANSEPWTLDTLGGERRPGVTAGILEMRNALGNQSTPAPPTGEVADTPLEPGKVAGAAGKAEGDITLSTAETQACASGDLPEAGTTRTFSVVAGDLVLPGSCQDPACSDKAPGMEGTAALHGDSPARPQQAKEQPGPERPIPAGDGKVCVSSPPEPDETHDPKLQHLAPEELHTDRESPRPGPSMLPSVPKKDAPRVMDKVTSDETRGAEGTESSPVADDIIQPAAPADLESPTLAASSYHGDVVGQVSTDLIAQRSSDSEEAFETPESTTPVKAPPAPPPPPPEVIPEPEVSTQPPPEEPGCGSETVPVPDGPRSDSVEGSPFRPPSHSFSAVFDEDKPIASSGTYNLDFDNIELVDTFQTLEPRASDAKNQEGKVNTRRKSTDSVPISKSTLSRSLSLQASDFDGASSSGNPEAVALAPDAYSTGSSSASSTLKRTKKPRPPSLKKKQTTKKPTETPPVKETQQEPDEESLVPSGENLASETKTESAKTEGPSPALLEETPLEPAVGPKAACPLDSESAEGVVPPASGGGRVQNSPPVGRKTLPLTTAPEAGEVTPSDSGGQEDSPAKGLSVRLEFDYSEDKSSWDNQQENPPPTKKIGKKPVAKMPLRRPKMKKTPEKLDNTPASPPRSPAEPNDIPIAKGTYTFDIDKWDDPNFNPFSSTSKMQESPKLPQQSYNFDPDTCDESVDPFKTSSKTPSSPSKSPASFEIPASAMEANGVDGDGLNKPAKKKKTPLKTDTFRVKKSPKRSPLSDPPSQDPTPAATPETPPVISAVVHATDEEKLAVTNQKWTCMTVDLEADKQDYPQPSDLSTFVNETKFSSPTEELDYRNSYEIEYMEKIGSSLPQDDDAPKKQALYLMFDTSQESPVKSSPVRMSESPTPCSGSSFEETEALVNTAAKNQHPVPRGLAPNQESHLQVPEKSSQKELEAMGLGTPSEAIEIREAAHPTDVSISKTALYSRIGTAEVEKPAGLLFQQPDLDSALQIARAEKSLADLFRRYEKMKEVLEGFRKNEEVLKRCAQEYLSRVKKEEQRYQALKVHAEEKLDRANAEIAQVRGKAKQEQAAHQASLRKEQLRVDALERTLEQKNKEIEELTKICDELIAKMGKS

SEQ ID NO: 892914 - protein, 97 aa, Homo sapiens
CIWQGQGHNSIGSFFYFDVVHLPSRYPAPCPLPYTTPWPCHMQAYGKAKQEQAAHQASLRKEQLRVDALERTLEQKNKEIEELTKICDELIAKMGKS

SEQ ID NO: 892915 - protein, 1133 aa, Homo sapiens
KQHQETSACGSPHGEDGPGDFAHTGVPGHVPRSTCAPSPQREVLTVPEANSEPWTLDTLGGERRPGVTTGILEMRNALGNQSTPAPPTGEVADTPLEPGKVAGAAGKAEGDITLSTAETQACASGDLPEAGTTRTFSVVAGDLVLPGSCQDPACSDKAPGMEGTAALHGDSPARPQQAKEQPGPERPIPAGDGKVCVSSPPEPDETHDPKLQHLAPEELHTDRESPRPGPSMLPSVPKKDAPRVMDKVTSDETRGAEGTESSPVADDIIQPAAPADLESPTLAASSYHGDVVGQVSTDLIAQRSSDSEEAFETPESTTPVKAPPAPPPPPPEVIPEPEVSTQPPPEEPGCGSETVPVPDGPRSDSVEGSPFRPPSHSFSAVFDEDKPIASSGTYNLDFDNIELVDTFQTLEPRASDAKNQEGKVNTRRKSTDSVPISKSTLSRSLSLQASDFDGASSSGNPEAVALAPDAYSTGSSSASSTLKRTKKPRPPSLKKKQTTKKPTETPPVKETQQEPDEESLVPSGENLASETKTESAKTEGPSPALLEETPLEPAVGPKAACPLDSESAEGVVPPASGGGRVQNSPPVGRKTLPLTTAPEAGEVTPSDSGGQEDSPAKGLSVRLEFDYSEDKSSWDNQQENPPPTKKIGKKPVAKMPLRRPKMKKTPEKLDNTPASPPRSPAEPNDIPIAKGTYTFDIDKWDDPNFNPFSSTSKMQESPKLPQQSYNFDPDTCDESVDPFKTSSKTPSSPSKSPASFEIPASAMEANGVDGDGLNKPAKKKKTPLKTDTFRVKKSPKRSPLSDPPSQDPTPAATPETPPVISAVVHATDEEKLAVTNQKWTCMTVDLEADKQDYPQPSDLSTFVNETKFSSPTEELDYRNSYEIEYMEKIGSSLPQDDDAPKKQALYLMFDTSQESPVKSSPVRMSESPTPCSGSSFEETEALVNTAAKNQHPVPRGLAPNQESHLQVPEKSSQKELEAMGLGTPSEAIEIREAAHPTDVSISKTALYSRIGTAEVEKPAGLLFQQPDLDSALQIARAEIITKEREVSEWKDKYEESRREVMEMRKIVAEYEKTIAQMIEDEQREKSVSHQTVQQLVLEKEQALADLNSVEKSLADLFRRYEKMKEVLEGFRKN

SEQ ID NO: 892916 - protein, 1117 aa, Homo sapiens
KQHQETSACGSPHGEDGPGDFAHTGVPGHVPRSTCAPSPQREVLTVPEANSEPWTLDTLGGERRPGVTAGILEMRNALGNQSTPAPPTGEVADTPLEPGKVAGAAGKAEGDITLSTAETQACASGDLPEAGTTRTFSVVAGDLVLPGSCQDPACSDKAPGMEGTAALHGDSPARPQQAKEQPGPERPIPAGDGKVCVSSPPEPDETHDPKLQHLAPEELHTDRESPRPGPSMLPSVPKKDAPRVMDKVTSDETRGAEGTESSPVADDIIQPAAPADLESPTLAASSYHGDVVGQVSTDLIAQRSSDSEEAFETPESTTPVKAPPAPPPPPPEVIPEPEVSTQPPPEEPGCGSETVPVPDGPRSDSVEGSPFRPPSHSFSAVFDEDKPIASSGTYNLDFDNIELVDTFQTLEPRASDAKNQEGKVNTRRKSTDSVPISKSTLSRSLSLQASDFDGASSSGNPEAVALAPDAYSTGSSSASSTLKRTKKPRPPSLKKKQTTKKPTETPPVKETQQEPDEESLVPSGENLASETKTESAKTEGPSPALLEETPLEPAVGPKAACPLDSESAEGVVPPASGGGRVQNSPPVGRKTLPLTTAPEAGEVTPSDSGGQEDSPAKGLSVRLEFDYSEDKSSWDNQQENPPPTKKIGKKPVAKMPLRRPKMKKTPEKLDNTPASPPRSPAEPNDIPIAKGTYTFDIDKWDDPNFNPFSSTSKMQESPKLPQQSYNFDPDTCDESVDPFKTSSKTPSSPSKSPASFEIPASAMEANGVDGDGLNKPAKKKKTPLKTDTFRVKKSPKRSPLSDPPSQDPTPAATPETPPVISAVVHATDEEKLAVTNQKWTCMTVDLEADKQDYPQPSDLSTFVNETKFSSPTEELDYRNSYEIEYMEKIGSSLPQDDDAPKKQALYLMFDTSQESPVKSSPVRMSESPTPCSGSSFEETEALVNTAAKNQHPVPRGLAPNQESHLQVPEKSSQKELEAMGLGTPSEAIEITAPEGSFASADALLSRLAHPVSLCGALDYLEPDLAEKNPPLFAQKLQEELEFAIMRIEALKLARQIALASRSHQDAKVPVCCCVRHLLRMSCVPLGSRSCFANHPPGGHHRCPAKSRFQKAESVTLA

SEQ ID NO: 892917 - protein, 189 aa, Homo sapiens
GFKRRAFRTTPALTLIPARPGQSRARRPHSGARRPHSRAHIRGARPPAPGSGRESQLPAAAPAATDARSCSPLQCSNPGRRRPPRLPAAGIAPGRWPRSRLACTPGHSEDGRVAVPAASPSQRPEPGGFRGNVSAPPGPPRVSRGGGEDARALLVSPFLMPVQPGAQAGLGFFAALESFTWGCSGRSIW

SEQ ID NO: 892918 - protein, 1026 aa, Homo sapiens
MGGSQSLQPAPASDLNLEASEAMSSDSEEAFETPESTTPVKAPPAPPPPPPEVIPEPEVSTQPPPEEPGCGSETVPVPDGPRSDSVEGSPFRPPSHSFSAVFDEDKPIASSGTYNLDFDNIELVDTFQTLEPRASDAKNQEGKVNTRRKSTDSVPISKSTLSRSLSLQASDFDGASSSGNPEAVALAPDAYSTGSSSASSTLKRTKKPRPPSLKKKQTTKKPTETPPVKETQQEPDEESLVPSGENLASETKTESAKTEGPSPALLEETPLEPAVGPKAACPLDSESAEGVVPPASGGGRVQNSPPVGRKTLPLTTAPEAGEVTPSDSGGQEDSPAKGLSVRLEFDYSEDKSSWDNQQENPPPTKKIGKKPVAKMPLRRPKMKKTPEKLDNTPASPPRSPAEPNDIPIAKGTYTFDIDKWDDPNFNPFSSTSKMQESPKLPQQSYNFDPDTCDESVDPFKTSSKTPSSPSKSPASFEIPASAMEANGVDGDGLNKPAKKKKTPLKTDTFRVKKSPKRSPLSDPPSQDPTPAATPETPPVISAVVHATDEEKLAVTNQKWTCMTVDLEADKQDYPQPSDLSTFVNETKFSSPTEELDYRNSYEIEYMEKIGSSLPQDDDAPKKQALYLMFDTSQESPVKSSPVRMSESPTPCSGSSFEETEALVNTAAKNQHPVPRGLAPNQESHLQVPEKSSQKELEAMGLGTPSEAIEITAPEGSFASADALLSRLAHPVSLCGALDYLEPDLAEKNPPLFAQKLQEELEFAIMRIEALKLARQIALASRSHQDAKREAAHPTDVSISKTALYSRIGTAEVEKPAGLLFQQPDLDSALQIARAEIITKEREVSEWKDKYEESRREVMEMRKIVAEYEKTIAQMIEDEQREKSVSHQTVQQLVLEKEQALADLNSVEKSLADLFRRYEKMKEVLEGFRKNEEVLKRCAQEYLSRVKKEEQRYQALKVHAEEKLDRANAEIAQVRGKAKQEQAAHQASLRKEQLRVDALERTLEQKNKEIEELTKICDELIAKMGKS

SEQ ID NO: 892919 - protein, 906 aa, Homo sapiens
MFWYKRRGAPMRPVSVIDGVVCVSPGCGSETVPVPDGPRSDSVEGSPFRPPSHSFSAVFDEDKPIASSGTYNLDFDNIELVDTFQTLEPRASDAKNQEGKVNTRRKSTDSVPISKSTLSRSLSLQASDFDGASSSGNPEAVALAPDAYSTGSSSASSTLKRTKKPRPPSLKKKQTTKKPTETPPVKETQQEPDEESLVPSGENLASETKTESAKTEGPSPALLEETPLEPAVGPKAACPLDSESAEGVVPPASGGGRVQNSPPVGRKTLPLTTAPEAGEVTPSDSGGQEDSPAKGLSVRLEFDYSEDKSSWDNQQENPPPTKKIGKKPVAKMPLRRPKMKKTPEKLDNTPASPPRSPAEPNDIPIAKGTYTFDIDKWDDPNFNPFSSTSKMQESPKLPQQSYNFDPDTCDESVDPFKTSSKTPSSPSKSPASFEIPASAMEANGVDGDGLNKPAKKKKTPLKTDTFRVKKSPKRSPLSDPPSQDPTPAATPETPPVISAVVHATDEEKLAVTNQKWTCMTVDLEADKQDYPQPSDLSTFVNETKFSSPTEELDYRNSYEIEYMEKIGSSLPQDDDAPKKQALYLMFDTSQESPVKSSPVRMSESPTPCSGSSFEETEALVNTAAKNQHPVPRGLAPNQESHLQVPEKSSQKELEAMGLGTPSEAIEIREAAHPTDVSISKTALYSRIGTAEVEKPAGLLFQQPDLDSALQIARAEIITKEREVSEWKDKYEESRREVMEMRKIVAEYEKTIAQMIEDEQREKSVSHQTVQQLVLEKEQALADLNSVEKSLADLFRRYEKMKEVLEGFRKNEEVLKRCAQEYLSRVKKEEQRYQALKVHAEEKLDRANAEIAQVRGKAKQEQAAHQASLRKEQLRVDALERTLEQKNKEIEELTKICDELIAKMGKS

SEQ ID NO: 892920 - protein, 101 aa, Homo sapiens
CCLLSSWWLQNNEGFSLMGYLFSVEECSSFHLRCTFRPTVPKLICDFDPCSRTTMPRRSRPCTLCLTLLRRALSSHLPSACQSPRRRVQGQVLKREQPAIL

SEQ ID NO: 892921 - protein, 1031 aa, Homo sapiens
FSIGHEEKCLTIYIILLIAFFYYPRESPRPGPSMLPSVPKKDAPRVMDKVTSDETRGAEGTESSPVADDIIQPAAPADLESPTLAASSYHGDVVGQVSTDLIAQRSSDSEEAFETPESTTPVKAPPAPPPPPPEVIPEPEVSTQPPPEEPGCGSETVPVPDGPRSDSVEGSPFRPPSHSFSAVFDEDKPIASSGTYNLDFDNIELVDTFQTLEPRASDAKNQEGKVNTRRKSTDSVPISKSTLSRSLSLQASDFDGASSSGNPEAVALAPDAYSTGSSSASSTLKRTKKPRPPSLKKKQTTKKPTETPPVKETQQEPDEESLVPSGENLASETKTESAKTEGPSPALLEETPLEPAVGPKAACPLDSESAEGVVPPASGGGRVQNSPPVGRKTLPLTTAPEAGEVTPSDSGGQEDSPAKGLSVRLEFDYSEDKSSWDNQQENPPPTKKIGKKPVAKMPLRRPKMKKTPEKLDNTPASPPRSPAEPNDIPIAKGTYTFDIDKWDDPNFNPFSSTSKMQESPKLPQQSYNFDPDTCDESVDPFKTSSKTPSSPSKSPASFEIPASAMEANGVDGDGLNKPAKKKKTPLKTDTFRVKKSPKRSPLSDPPSQDPTPAATPETPPVISAVVHATDEEKLAVTNQKWTCMTVDLEADKQDYPQPSDLSTFVNETKFSSPTEELDYRNSYEIEYMEKIGSSLPQDDDAPKKQALYLMFDTSQESPVKSSPVRMSESPTPCSGSSFEETEALVNTAAKNQHPVPRGLAPNQESHLQVPEKSSQKELEAMGLGTPSEAIEIREAAHPTDVSISKTALYSRIGTAEVEKPAGLLFQQPDLDSALQIARAEIITKEREVSEWKDKYEESRREVMEMRKIVAEYEKTIAQMIEDEQREKSVSHQTVQQLVLEKEQALADLNSVEKSLADLFRRYEKMKEVLEGFRKNEEVLKRCAQEYLSRVKKEEQRYQALKVHAEEKLDRANAEIAQVRGKAKQEQAAHQASLRKEQLRVDALERTLEQKNKEIEELTKICDELIAKMGKS

SEQ ID NO: 892922 - protein, 950 aa, Homo sapiens
SAPAGDRVEASTPSCPDPAKDLSRSSDSEEAFETPESTTPVKAPPAPPPPPPEVIPEPEVSTQPPPEEPGCGSETVPVPDGPRSDSVEGSPFRPPSHSFSAVFDEDKPIASSGTYNLDFDNIELVDTFQTLEPRASDAKNQEGKVNTRRKSTDSVPISKSTLSRSLSLQASDFDGASSSGNPEAVALAPDAYSTGSSSASSTLKRTKKPRPPSLKKKQTTKKPTETPPVKETQQEPDEESLVPSGENLASETKTESAKTEGPSPALLEETPLEPAVGPKAACPLDSESAEGVVPPASGGGRVQNSPPVGRKTLPLTTAPEAGEVTPSDSGGQEDSPAKGLSVRLEFDYSEDKSSWDNQQENPPPTKKIGKKPVAKMPLRRPKMKKTPEKLDNTPASPPRSPAEPNDIPIAKGTYTFDIDKWDDPNFNPFSSTSKMQESPKLPQQSYNFDPDTCDESVDPFKTSSKTPSSPSKSPASFEIPASAMEANGVDGDGLNKPAKKKKTPLKTDTFRVKKSPKRSPLSDPPSQDPTPAATPETPPVISAVVHATDEEKLAVTNQKWTCMTVDLEADKQDYPQPSDLSTFVNETKFSSPTEELDYRNSYEIEYMEKIGSSLPQDDDAPKKQALYLMFDTSQESPVKSSPVRMSESPTPCSGSSFEETEALVNTAAKNQHPVPRGLAPNQESHLQVPEKSSQKELEAMGLGTPSEAIEIREAAHPTDVSISKTALYSRIGTAEVEKPAGLLFQQPDLDSALQIARAEIITKEREVSEWKDKYEESRREVMEMRKIVAEYEKTIAQMIEDEQREKSVSHQTVQQLVLEKEQALADLNSVEKSLADLFRRYEKMKEVLEGFRKNEEVLKRCAQEYLSRVKKEEQRYQALKVHAEEKLDRANAEIAQVRGKAKQEQAAHQASLRKEQLRVDALERTLEQKNKEIEELTKICDELIAKMGKS

SEQ ID NO: 892923 - protein, 1229 aa, Homo sapiens; identical to SEQ ID NO: 892910

SEQ ID NO: 892924 - protein, 1229 aa, Homo sapiens; identical to SEQ ID NO: 892910

SEQ ID NO: 892925 - protein, 1110 aa, Homo sapiens
KQHQETSACGSPHGEDGPGDFAHTGVPGHVPRSTCAPSPQREVLTVPEANSEPWTLDTLGGERRPGVTTGILEMRNALGNQSTPAPPTGEVADTPLEPGKVAGAAGKAEGDITLSTAETQACASGDLPEAGTTRTFSVVAGDLVLPGSCQDPACSDKAPGMEGTAALHGDSPARPQQAKEQPGPERPIPAGDGKVCVSSPPEPDETHDPKLQHLAPEELHTDRESPRPGPSMLPSVPKKDAPRVMDKVTSDETRGAEGTESSPVADDIIQPAAPADLESPTLAASSYHGDVVGQVSTDLIAQRSSDSEEAFETPESTTPVKAPPAPPPPPPEVIPEPEVSTQPPPEEPGCGSETVPVPDGPRSDSVEGSPFRPPSHSFSAVFDEDKPIASSGTYNLDFDNIELVDTFQTLEPRASDAKNQEGKVNTRRKSTDSVPISKSTLSRSLSLQASDFDGASSSGNPEAVALAPDAYSTGSSSASSTLKRTKKPRPPSLKKKQTTKKPTETPPVKETQQEPDEESLVPSGENLASETKTESAKTEGPSPALLEETPLEPAVGPKAACPLDSESAEGVVPPASGGGRVQNSPPVGRKTLPLTTAPEAGEVTPSDSGGQEDSPAKGLSVRLEFDYSEDKSSWDNQQENPPPTKKIGKKPVAKMPLRRPKMKKTPEKLDNTPASPPRSPAEPNDIPIAKGTYTFDIDKWDDPNFNPFSSTSKMQESPKLPQQSYNFDPDTCDESVDPFKTSSKTPSSPSKSPASFEIPASAMEANGVDGDGLNKPAKKKKTPLKTDTFRVKKSPKRSPLSDPPSQDPTPAATPETPPVISAVVHATDEEKLAVTNQKWTCMTVDLEADKQDYPQPSDLSTFVNETKFSSPTEELDYRNSYEIEYMEKIGSSLPQDDDAPKKQALYLMFDTSQESPVKSSPVRMSESPTPCSGSSFEETEALVNTAAKNQHPVPRGLAPNQESHLQVPEKSSQKELEAMGLGTPSEAIEIREAAHPTDVSISKTALYSRIGTAEVEKPAGLLFQQPDLDSALQIARAEIITKEREVSEWKDKYEESRREVMEMRKIVAEYEKTIAQMIGRCPDLRGLRPAPMFLNYEEALEDRRLRVGFW

SEQ ID NO: 892926 - protein, 201 aa, Homo sapiens
MWLFTVNQVLRKMQRRHSSNTDNIPPERNRSQALSSEASVDEGGVFESLKAEAASPPALFSGLSGSLPTSSFPSSLVLGSSAGGGDVFIQMPASREEGGGRGEGGAYHHRQPHHHFHHGGHRGGSLLQHVGGDHRGHSEEGGDEQPGTPAPALSELKAVICWLQKGLPFILILLAKLCFQHKLGCVAQGCQHWLRIQSKRP

SEQ ID NO: 892927 - protein, 321 aa, Homo sapiens
MWLFTVNQVLRKMQRRHSSNTDNIPPERNRSQALSSEASVDEGGVFESLKAEAASPPALFSGLSGSLPTSSFPSSLVLGSSAGGGDVFIQMPASREEGGGRGEGGAYHHRQPHHHFHHGGHRGGSLLQHVGGDHRGHSEEGGDEQPGTPAPALSELKAVICWLQKGLPFILILLAKLCFQHKLGIAVCIGMASTFAYANSTLREQVSLKEKRSVLVILWILAFLAGNTLYVLYTFSSEIAPQHSNLGDRVSETLSKKKKKERREGGRKEGRKERKKGQLWPRCGYPLVSCLYVFLLFLFCHLPHLSLRPVSSSCGHCHPLW

SEQ ID NO: 892928 - protein, 321 aa, Homo sapiens; identical to SEQ ID NO: 892927

SEQ ID NO: 892929 - protein, 444 aa, Homo sapiens
MWLFTVNQVLRKMQRRHSSNTDNIPPERNRSQALSSEASVDEGGVFESLKAEAASPPALFSGLSGSLPTSSFPSSLVLGSSAGGGDVFIQMPASREEGGGRGEGGAYHHRQPHHHFHHGGHRGGSLLQHVGGDHRGHSEEGGDEQPGTPAPALSELKAVICWLQKGLPFILILLAKLCFQHKLGIAVCIGMASTFAYANSTLREQVSLKEKRSVLVILWILAFLAGNTLYVLYTFSSQQLYNSLIFLKPNLEMLDFFDLLWIVGIADFVLKYITIALKCLIVALPKIILAVKSKGKFYLVIEELSQLFRSLVPIQLWYKYIMGDDSSNSYFLGGVLIVLYSLCKSFDICGRVGGVRKALKLLCTSQNYGVRATGQQCTEAGDICAICQAEFREPLILLCQHVFCEECLCLWLDRERTCPLCRSVAVDTLRCWKDGATSAHFQVY

SEQ ID NO: 892930 - protein, 321 aa, Homo sapiens; identical to SEQ ID NO: 892927

SEQ ID NO: 892931 - protein, 330 aa, Homo sapiens
MPASREEGGGRGEGGAYHHRQPHHHFHHGGHRGGSLLQHVGGDHRGHSEEGGDEQPGTPAPALSELKAVICWLQKGLPFILILLAKLCFQHKLGIAVCIGMASTFAYANSTLREQVSLKEKRSVLVILWILAFLAGNTLYVLYTFSSQQLYNSLIFLKPNLEMLDFFDLLWIVGIADFVLKYITIALKCLIVALPKIILAVKSKGKFYLVIEELSQLFRSLVPIQLWYKYIMGDDSSNSYFLGGVLIVLYSLCKSFDICGRVGGVRKALKLLCTSQNYGVRATGQQCTEAGDICAICQAEFREPLILLCQMLLKGHKKLELEKIDESAGV

SEQ ID NO: 892932 - protein, 330 aa, Homo sapiens; identical to SEQ ID NO: 892931

SEQ ID NO: 892933 - protein, 307 aa, Homo sapiens
MWLFTVNQVLRKMQRRHSSNTDNIPPERNRSQALSSEASVDEGGVFESLKAEAASPPALFSGLSGSLPTSSFPSSLVLGSSAGGGDVFIQMPASREEGGGRGEGGAYHHRQPHHHFHHGGHRGGSLLQHVGGDHRGHSEEGGDEQPGTPAPALSELKAVICWLQKGLPFILILLAKLCFQHKLGIAVCIGMASTFAYANSTLREQVSLKEKRSVLVILWILAFLAGNTLYVLYTFSSQQLYNSLIFLKPNLEMLDFFDLLWIVGIADFVLKYITIALKCLIVALPKIILAVKSKVGTGCGHKVAYQF

SEQ ID NO: 892934 - protein, 379 aa, Homo sapiens
MTCEGCKGFFRRAMKRNARLRCPFRKGACEITRKTRRQCQACRLRKCLESGMKKEMIMSDEAVEERRALIKRKKSERTGTQPLGVQGLTEEQRMMIRELMDAQMKTFDTTFSHFKNFRLPGVLSSGCELPESLQAPSREEAAKWSQVRKDLCSLKVSLQLRGEDGSVWNYKPPADSGGKEIFSLLPHMADMSTYMFKGIISFAKVISYFRDLPIEDQISLLKGAAFELCQLRFNTVFNAETGTWECGRLSYCLEDTAGGFQQLLLEPMLKFHYMLKKLQLHEEEYVLMQAISLFSPDRPGVLQHRVVDQLQEQFAITLKSYIECNRPQPAHRFLFLKIMAMLTELRSINAQHTQRLLRIQDIHPFATPLMQELFGITGS

SEQ ID NO: 892935 - protein, 342 aa, Homo sapiens
MTCEGCKGFFRRAMKRNARLRCPFRKGACEITRKTRRQCQACRLRKCLESGMKKEMIMSDEAVEERRALIKRKKSERTGTQPLGVQGLTEEQRMMIRELMDAQMKTFDTTFSHFKNFRVSLQLRGEDGSVWNYKPPADSGGKEIFSLLPHMADMSTYMFKGIISFAKVISYFRDLPIEDQISLLKGAAFELCQLRFNTVFNAETGTWECGRLSYCLEDTAGGFQQLLLEPMLKFHYMLKKLQLHEEEYVLMQAISLFSPDRPGVLQHRVVDQLQEQFAITLKSYIECNRPQPAHRFLFLKIMAMLTELRSINAQHTQRLLRIQDIHPFATPLMQELFGITGS

SEQ ID NO: 892936 - protein, 473 aa, Homo sapiens
MTVTRTHHFKEGSLRAPAIPLHSAAAELASNHPRGPEANLEVRPKESWNHADFVHCEDTESVPGKPSVNADEEVGGPQICRVCGDKATGYHFNVMTCEGCKGFFRRAMKRNARLRCPFRKGACEITRKTRRQCQACRLRKCLESGMKKEMIMSDEAVEERRALIKRKKSERTGTQPLGVQGLTEEQRMMIRELMDAQMKTFDTTFSHFKNFRLPGVLSSGCELPESLQAPSREEAAKWSQVRKDLCSLKVSLQLRGEDGSVWNYKPPADSGGKEIFSLLPHMADMSTYMFKGIISFAKVISYFRDLPIEDQISLLKGAAFELCQLRFNTVFNAETGTWECGRLSYCLEDTAGGFQQLLLEPMLKFHYMLKKLQLHEEEYVLMQAISLFSPDRPGVLQHRVVDQLQEQFAITLKSYIECNRPQPAHRFLFLKIMAMLTELRSINAQHTQRLLRIQDIHPFATPLMQELFGITGS

SEQ ID NO: 892937 - protein, 379 aa, Homo sapiens; identical to SEQ ID NO: 892934

SEQ ID NO: 892938 - protein, 121 aa, Homo sapiens
MLLENLTDNESENTNLKKKVFEKEAHIQELSCLFQSEKANTLKANRFSQSVKVVHERLQIQIHKREAENDKLKEYVKSLETKIAKWNLQSRMNKNEAIVMKEASRQKTVALKKASKVYKQG

SEQ ID NO: 892939 - protein, 636 aa, Homo sapiens
MEKAVNDGSHSEELFCHLKTISEKEDLPRCTSESHLSCLKQDILNEKTELEATLKEAELVTHSVELLLPLFKDTIEKINFENANLSALNLKISEQKEILIKELDTFKSVKLALEHLLRKRDYKQTGDNLSSMLLENLTDNESENTNLKKKVFEKEAHIQELSCLFQSEKANTLKANRFSQSVKVVHERLQIQIHKREAENDKLKEYVKSLETKIAKWNLQSRMNKNEAIVMKEASRQKTVALKKASKVYKQRLDHFTGAIEKLTSQIRDQEAKLSETISASNAWKSHYEKIVIEKTELEVQIETMKKQIINLLEDLKKMEDHGKNSCEEILRKVHSIEYENETLNLENTKLKLRFPCRITESKNMNILIVLDMLCYISSEKTTLAALKDEVVSVENELSELQEVEKKQKTLIEMYKTQVQKLQEAAEIVKSRCENLLHKNNQITKTKNKNVEKMRGQMESHLKELERVCDSLTAAERRLHECQESLQCCKGKCADQEHTIRELQGQVDGNHNLLTKLSLEEENCLIQLKCENLQQKLEQMDAENKELEKKLANQEECLKHSNLKFKEKSAEYTALARQLEAALEEGRQKVAEEIEKMSSRESALQIKILDLETELRKKNEEQNQLVCKMNSDPETP

SEQ ID NO: 892940 - protein, 460 aa, Homo sapiens
MLLENLTDNESENTNLKKKVFEKEAHIQELSCLFQSEKANTLKANRFSQSVKVVHERLQIQIHKREAENDKLKEYVKSLETKIAKWNLQSRMNKNEAIVMKEASRQKTVALKKASKVYKQRLDHFTGAIEKLTSQIRDQEAKLSETISASNAWKSHYEKIVIEKTELEVQIETMKKQIINLLEDLKKMEDHGKNSCEEILRKVHSIEYENETLNLENTKLKTTLAALKDEVVSVENELSELQEVEKKQKTLIEMYKTQVQKLQEAAEIVKSRCENLLHKNNQITKTKNKNVEKVDGNHNLLTKLSLEEENCLIQLKCENLQQKLEQMDAENKELEKKLANQEECLKHSNLKFKEKSAEYTALARQLEAALEEGRQKVAEEIEKMSSRESALQIKILDLETELRKKNEEQNQLVCKMNSKAQHQEVCLKEVQNSLEKSENQNESIKNYLQFLKTSYVTMFE

SEQ ID NO: 892941 - protein, 365 aa, Homo sapiens
MLLENLTDNESENTNLKKKVFEKEAHIQELSCLFQSEKANTLKANRFSQSVKVVHERLQIQIHKREAENDKLKEYVKSLETKIAKWNLQSRMNKNEAIVMKEASRQKTVALKKASKVYKQRLDHFTGAIEKLTSQIRDQEAKLSETISASNAWKSHYEKIVIEKTELEVQIETMKKQIINLLEDLKKMEDHGKNSCEEILRKVHSIEYENETLNLENTKLKTTLAALKDEVVSVENELSELQEVEKKQKTLIEMYKTQVQKLQEAAEIVKSRCENLLHKNNQITKTKNKNVEKMRGQMESHLKELERVCDSLTAAERRLHECQESLQCCKGKCADQEHTIRELQGQNMIRADFEAVGRIFCLGMG

SEQ ID NO: 892942 - protein, 294 aa, Homo sapiens
MLLENLTDNESENTNLKKKVFEKEAHIQELSCLFQSEKANTLKANRFSQSVKVVHERLQIQIHKREAENDKLKEYVKSLETKIAKWNLQSRMNKNEAIVMKEASRQKTVALKKASKVYKQRLDHFTGAIEKLTSQIRDQEAKLSETISASNAWKSHYEKIVIEKTELEVQIETMKKQIINLLEDLKKMEDHGKNSCEEILRKVHSIEYENETLNLENTKLKTTLAALKDEVVSVENELSELQEVEKKQKTLIEMYKTQVQKLQEAAEIVKSRCENLLHKNNQITKTKNKNVEKD

SEQ ID NO: 892943 - protein, 662 aa, Homo sapiens
MEKAVNDGSHSEELFCHLKTISEKEDLPRCTSESHLSCLKQDILNEKTELEATLKEAELVTHSVELLLPLFKDTIEKINFENANLSALNLKISEQKEILIKELDTFKSVKLALEHLLRKRDYKQTGDNLSSMLLENLTDNESENTNLKKKVFEKEAHIQELSCLFQSEKANTLKANRFSQSVKVVHERLQIQIHKREAENDKLKEYVKSLETKIAKWNLQSRMNKNEAIVMKEASRQKTVALKKASKVYKQRLDHFTGAIEKLTSQIRDQEAKLSETISASNAWKSHYEKIVIEKTELEVQIETMKKQIINLLEDLKKMEDHGKNSCEEILRKVHSIEYENETLNLENTKLKTTLAALKDEVVSVENELSELQEVEKKQKTLIEMYKTQVQKLQEAAEIVKSRCENLLHKNNQITKTKNKNVEKMRGQMESHLKELERVCDSLTAAERRLHECQESLQCCKGKCADQEHTIRELQGQNMSEQILKQWEEYSVLAWVDGNHNLLTKLSLEEENCLIQLKCENLQQKLEQMDAENKELEKKLANQEECLKHSNLKFKEKSAEYTALARQLEAALEEGRQKVAEEIEKMSSRESALQIKILDLETELRKKNEEQNQLVCKMNSKAQHQEVCLKEVQNSLEKSENQNESIKNYLQFLKTSYVTMFE

SEQ ID NO: 892944 - protein, 531 aa, Homo sapiens
MLLENLTDNESENTNLKKKVFEKEAHIQELSCLFQSEKANTLKANRFSQSVKVVHERLQIQIHKREAENDKLKEYVKSLETKIAKWNLQSRMNKNEAIVMKEASRQKTVALKKASKVYKQRLDHFTGAIEKLTSQIRDQEAKLSETISASNAWKSHYEKIVIEKTELEVQIETMKKQIINLLEDLKKMEDHGKNSCEEILRKVHSIEYENETLNLENTKLKTTLAALKDEVVSVENELSELQEVEKKQKTLIEMYKTQVQKLQEAAEIVKSRCENLLHKNNQITKTKNKNVEKMRGQMESHLKELERVCDSLTAAERRLHECQESLQCCKGKCADQEHTIRELQGQNMSEQILKQWEEYSVLAWVDGNHNLLTKLSLEEENCLIQLKCENLQQKLEQMDAENKELEKKLANQEECLKHSNLKFKEKSAEYTALARQLEAALEEGRQKVAEEIEKMSSRESALQIKILDLETELRKKNEEQNQLVCKMNSKAQHQEVCLKEVQNSLEKSENQNESIKNYLQFLKTSYVTMFE

SEQ ID NO: 892945 - protein, 551 aa, Homo sapiens
ILPVIVICMLLGFIKLANIIQVVKFLILILYLLKNLKKKVFEKEAHIQELSCLFQSEKANTLKANRFSQSVKVVHERLQIQIHKREAENDKLKEYVKSLETKIAKWNLQSRMNKNEAIVMKEASRQKTVALKKASKVYKQRLDHFTGAIEKLTSQIRDQEAKLSETISASNAWKSHYEKIVIEKTELEVQIETMKKQIINLLEDLKKMEDHGKNSCEEILRKVHSIEYENETLNLENTKLKTTLAALKDEVVSVENELSELQEVEKKQKTLIEMYKTQVQKLQEAAEIVKSRCENLLHKNNQITKTKNKNVEKMRGQMESHLKELERVCDSLTAAERRLHECQESLQCCKGKCADQEHTIRELQGQNMSEQILKQWEEYSVLAWVDGNHNLLTKLSLEEENCLIQLKCENLQQKLEQMDAENKELEKKLANQEECLKHSNLKFKEKSAEYTALARQLEAALEEGRQKVAEEIEKMSSRESALQIKILDLETELRKKNEEQNQLVCKMNSKAQHQEVCLKEVQNSLEKSENQNESIKNYLQFLKTSYVTMFE

SEQ ID NO: 892946 - protein, 441 aa, Homo sapiens
ILPVIVICMLLGFIKLANIIQVVKFLILILYLLKNLKKKVFEKEAHIQELSCLFQSEKSLETKIAKWNLQSRMNKNEAIVMKEASRQKTVALKKASKVYKQRLDHFTGAIEKLTSQIRDQEAKLSETISASNAWKSHYEKIVIEKTELEVQIETMKKQIINLLEDLKKMEDHGKNSCEEILRKVHSIEYENETLNLENTKLKTTLAALKDEVVSVENELSELQEVEKKQKTLIEMYKTQVQKLQEAAEIVKSRCENLLHKNNQITKTKNKNVEKVDGNHNLLTKLSLEEENCLIQLKCENLQQKLEQMDAENKELEKKLANQEECLKHSNLKFKEKSAEYTALARQLEAALEEGRQKVAEEIEKMSSRESALQIKILDLETELRKKNEEQNQLVCKMNSKAQHQEVCLKEVQNSLEKSENQNESIKNYLQFLKTSYVTMFE

SEQ ID NO: 892947 - protein, 110 aa, Homo sapiens
AAVAREATSRLLAALLFHLSGHSSAASRSRNSPGSHLASLAFLPSLPTVVPPASRSLLADSEHKKDCHGFHCSSRGASDPFFISRRRRAVVTTTCGRSGGGLSAYVEKSL

SEQ ID NO: 892948 - protein, 531 aa, Homo sapiens; identical to SEQ ID NO: 892944

SEQ ID NO: 892949 - protein, 355 aa, Homo sapiens
MLLENLTDNESENTNLKKKVFEKEAHIQELSCLFQSEKANTLKANRFSQSVKVVHERLQIQIHKREAENDKLKEYVKSLETKIAKWNLQSRMNKNEAIVMKEASRQKTVALKKASKVYKQRLDHFTGAIEKLTSQIRDQEAKLSETISASNAWKSHYEKIVIEKTELEVQIETMKKQIINLLEDLKKMEDHGKNSCEEILRKVHSIEYENETLNLENTKLKTTLAALKDEVVSVENELSELQEVEKKQKTLIEMYKTQVQKLQEAAEIVKSRCENLLHKNNQITKTKNKNVEKMRGQMESHLKELERVCDSLTAAERRLHECQESLQCCKGKCADQEHTIRELQGQVSSRPSEFC

SEQ ID NO: 892950 - protein, 600 aa, Homo sapiens
AAVAREATSRLLAALLFHLSGHSSAASRSRNSPGSHLASLAFLPSLPTVVPPASRSLLADSEHKKDCHGFHCSSRGASDPFFISRRRRAVVTTTCGRSGGGTGDNLSSMLLENLTDNESENTNLKKKVFEKEAHIQELSCLFQSEKSLETKIAKWNLQSRMNKNEAIVMKEASRQKTVALKKASKVYKQRLDHFTGAIEKLTSQIRDQEAKLSETISASNAWKSHYEKIVIEKTELEVQIETMKKQIINLLEDLKKMEDHGKNSCEEILRKVHSIEYENETLNLENTKLKTTLAALKDEVVSVENELSELQEVEKKQKTLIEMYKTQVQKLQEAAEIVKSRCENLLHKNNQITKTKNKNVEKMRGQMESHLKELERVCDSLTAAERRLHECQESLQCCKGKCADQEHTIRELQGQNMSEQILKQWEEYSVLAWVDGNHNLLTKLSLEEENCLIQLKCENLQQKLEQMDAENKELEKKLANQEECLKHSNLKFKEKSAEYTALARQLEAALEEGRQKVAEEIEKMSSRESALQIKILDLETELRKKNEEQNQLVCKMNSKAQHQEVCLKEVQNSLEKSENQNESIKNYLQFLKTSYVTMFE

SEQ ID NO: 892951 - protein, 681 aa, Homo sapiens
AAVAREATSRLLAALLFHLSGHSSAASRSRNSPGSHLASLAFLPSLPTVVPPASRSLLADSEHKKDCHGFHCSSRGASDPFFISRRRRAVVTTTCGRSGGGANLSALNLKISEQKEILIKELDTFKSVKLALEHLLRKRDYKQTGDNLSSMLLENLTDNESENTNLKKKVFEKEAHIQELSCLFQSEKANTLKANRFSQSVKVVHERLQIQIHKREAENDKLKEYVKSLETKIAKWNLQSRMNKNEAIVMKEASRQKTVALKKASKVYKQRLDHFTGAIEKLTSQIRDQEAKLSETISASNAWKSHYEKIVIEKTELEVQIETMKKQIINLLEDLKKMEDHGKNSCEEILRKVHSIEYENETLNLENTKLKTTLAALKDEVVSVENELSELQEVEKKQKTLIEMYKTQVQKLQEAAEIVKSRCENLLHKNNQITKTKNKNVEKMRGQMESHLKELERVCDSLTAAERRLHECQESLQCCKGKCADQEHTIRELQGQNMSEQILKQWEEYSVLAWVDGNHNLLTKLSLEEENCLIQLKCENLQQKLEQMDAENKELEKKLANQEECLKHSNLKFKEKSAEYTALARQLEAALEEGRQKVAEEIEKMSSRESALQIKILDLETELRKKNEEQNQLVCKMNSKAQHQEVCLKEVQNSLEKSENQNESIKNYLQFLKTSYVTMFE

SEQ ID NO: 892952 - protein, 278 aa, Homo sapiens
MYKTQVQKLQEAAEIVKSRCENLLHKNNQITKTKNKNVEKMRGQMESHLKELERVCDSLTAAERRLHECQESLQCCKGKCADQEHTIRELQGQNMSEQILKQWEEYSVLAWVDGNHNLLTKLSLEEENCLIQLKCENLQQKLEQMDAENKELEKKLANQEECLKHSNLKFKEKSAEYTALARQLEAALEEGRQKVAEEIEKMSSRESALQIKILDLETELRKKNEEQNQLVCKMNSKAQHQEVCLKEVQNSLEKSENQNESIKNYLQFLKTSYVTMFE

SEQ ID NO: 892953 - protein, 95 aa, Homo sapiens
KQQTQQHPQSPRSREMGQRDSKCRHPIQRWSLVGQRRHSEVPVFLPMPTEALCEQSAGTFVTGIGKPKRHGSKHACVFPRKMGRAFQNRKKWFKL

SEQ ID NO: 892954 - protein, 127 aa, Homo sapiens
MIQAQESITLEDVAVDFTWEEWQLLGAAQKDLYRDVMLENYSNLVAVGYQASKPDALFKLEQGEQLWTIEDGIHSGACSGERTHKTEGYGSHILDSQRRQHSCEGGLRICKQFLYSSVSQCETSFSL

SEQ ID NO: 892955 - protein, 124 aa, Homo sapiens
MIQAQESITLEDVAVDFTWEEWQLLGAAQKDLYRDVMLENYSNLVAVGYQASKPDALFKLEQGEQLWTIEDGIHSGACSESCSVPRLERNGVNLAHRNLHLLDSSDSCAYPQHQHHTWHTVIIQ

SEQ ID NO: 892956 - protein, 532 aa, Homo sapiens
MIQAQESITLEDVAVDFTWEEWQLLGAAQKDLYRDVMLENYSNLVAVGYQASKPDALFKLEQGEQLWTIEDGIHSGACSDIWKVDHVLERLQSESLVNRRKPCHEHDAFENIVHCSKSQFLLGQNHDIFDLRGKSLKSNLTLVNQSKGYEIKNSVEFTGNGDSFLHANHERLHTAIKFPASQKLISTKSQFISPKHQKTRKLEKHHVCSECGKAFIKKSWLTDHQVMHTGEKPHRCSLCEKAFSRKFMLTEHQRTHTGEKPYECPECGKAFLKKSRLNIHQKTHTGEKPYICSECGKGFIQKGNLIVHQRIHTGEKPYICNECGKGFIQKTCLIAHQRFHTGKTPFVCSECGKSCSQKSGLIKHQRIHTGEKPFECSECGKAFSTKQKLIVHQRTHTGERPYGCNECGKAFAYMSCLVKHKRIHTREKQEAAKVENPPAERHSSLHTSDVMQEKNSANGATTQVPSVAPQTSLNISGLLANRNVVLVGQPVVRCAASGDNRGFAQDRNLVNAVNVVVPSVINYVLFYVTENP

SEQ ID NO: 892957 - protein, 532 aa, Homo sapiens; identical to SEQ ID NO: 892956

SEQ ID NO: 892958 - protein, 929 aa, Homo sapiens
MESMLNKLKSTVTKVTADVTSAVMGNPVTREFDVGRHIASGGNGLAWKIFNGTKKSTKQEVAVFVFDKKLIDKYQKFEKDQIIDSLKRGVQQLTRLRHPRLLTVQHPLEESRDCLAFCTEPVFASLANVLGNWENLPSPISPDIKDYKLYDVETKYGLLQVSEGLSFLHSSVKMVHGNITPENIILNKSGAWKIMGFDFCVSSTNPSEQEPKFPCKEWDPNLPSLCLPNPEYLAPEYILSVSCETASDMYSLGTVMYAVFNKGKPIFEVNKQDIYKSFSRQLDQLSRLGSSSLTNIPEEVREHVKLLLNVTPTVRPDADQMTKIPFFDDVGAVTLQYFDTLFQRDNLQKSQFFKGLPKVLPKLPKRVIVQRILPCLTSEFVNPDMVPFVLPNVLLIAEECTKEEYVKLILPELGPVFKQQEPIQILLIFLQKMDLLLTKTPPDEIKNSVLPMVYRALEAPSIQIQELCLNIIPTFANLIDYPSMKNALIPRIKNACLQTSSLAVRVNSLVCLGKILEYLDKWFVLDDILPFLQQIPSKEPAVLMGILGIYKCTFTHKKLGITKEQLAGKVLPHLIPLSIENNLNLNQFNSFISVIKEMLNRLESEHKTKLEQLHIMQEQQKSLDIGNQMNVSEEMKVTNIGNQQIDKVFNNIGADLLTGSESENKEDGLQNKHKRASLTLEEKQKLAKEQEQAQKLKSQQPLKPQVHTPVATVKQTKDLTDTLMDNMSSLTSLSVSTPKSSASSTFTSVPSMGIGMMFSTPTDNTKRNLTNGLNANMGFQTSGFNMPVNTNQNFYSSPSTVGVTKMTLGTPPTLPNFNALSVPPAGAKQTQQRPTDMSALNNLFGPQKPKVSMNQLSQQKPNQWLNQFVPPQGSPTMGSSVMGTQMNVIGQSAFGMQGNPFFNPQNFAQPPTTMTNSSSASNDLKDLFG

SEQ ID NO: 892959 - protein, 929 aa, Homo sapiens; identical to SEQ ID NO: 892958

SEQ ID NO: 892960 - protein, 616 aa, Homo sapiens
MVHGNITPENIILNKSGAWKIMGFDFCVSSTNPSEQEPKFPCKEWDPNLPSLCLPNPEYLAPEYILSVSCETASDMYSLGTVMYAVFNKGKPIFEVNKQDIYKSFSRQLDQLSRLGSSSLTNIPEEVREHVKLLLNVTPTVRPDADQMTKIPFFDDVGAVTLQYFDTLFQRDNLQKSQFFKGLPKVLPKLPKRVIVQRILPCLTSEFVNPDMVPFVLPNVLLIAEECTKEEYVKLILPELGPVFKQQEPIQILLIFLQKMDLLLTKTPPDEIKNSVLPMVYRALEAPSIQIQELCLNIIPTFANLIDYPSMKNALIPRIKNACLQTSSLAQIDKVFNNIGADLLTGSESENKEDGLQNKHKRASLTLEEKQKLAKEQEQAQKLKSQQPLKPQVHTPVATVKQTKDLTDTLMDNMSSLTSLSVSTPKSSASSTFTSVPSMGIGMMFSTPTDNTKRNLTNGLNANMGFQTSGFNMPVNTNQNFYSSPSTVGVTKMTLGTPPTLPNFNALSVPPAGAKQTQQRPTDMSALNNLFGPQKPKVSMNQLSQQKPNQWLNQFVPPQGSPTMGSSVMGTQMNVIGQSAFGMQGNPFFNPQNFAQPPTTMTNSSSASNDLKDLFG

SEQ ID NO: 892961 - protein, 929 aa, Homo sapiens; identical to SEQ ID NO: 892958

SEQ ID NO: 892962 - protein, 929 aa, Homo sapiens; identical to SEQ ID NO: 892958

SEQ ID NO: 892963 - protein, 756 aa, Homo sapiens
MVHGNITPENIILNKSGAWKIMGFDFCVSSTNPSEQEPKFPCKEWDPNLPSLCLPNPEYLAPEYILSVSCETASDMYSLGTVMYAVFNKGKPIFEVNKQDIYKSFSRQLDQLSRLGSSSLTNIPEEVREHVKLLLNVTPTVRPDADQMTKIPFFDDVGAVTLQYFDTLFQRDNLQKSQFFKGLPKVLPKLPKRVIVQRILPCLTSEFVNPDMVPFVLPNVLLIAEECTKEEYVKLILPELGPVFKQQEPIQILLIFLQKMDLLLTKTPPDEIKNSVLPMVYRALEAPSIQIQELCLNIIPTFANLIDYPSMKNALIPRIKNACLQTSSLAVRVNSLVCLGKILEYLDKWFVLDDILPFLQQIPSKEPAVLMGILGIYKCTFTHKKLGITKEQLAGKVLPHLIPLSIENNLNLNQFNSFISVIKEMLNRLESEHKTKLEQLHIMQEQQKSLDIGNQMNVSEEMKVTNIGNQQIDKVFNNIGADLLTGSESENKEDGLQNKHKRASLTLEEKQKLAKEQEQAQKLKSQQPLKPQVHTPVATVKQTKDLTDTLMDNMSSLTSLSVSTPKSSASSTFTSVPSMGIGMMFSTPTDNTKRNLTNGLNANMGFQTSGFNMPVNTNQNFYSSPSTVGVTKMTLGTPPTLPNFNALSVPPAGAKQTQQRPTDMSALNNLFGPQKPKVSMNQLSQQKPNQWLNQFVPPQGSPTMGSSVMGTQMNVIGQSAFGMQGNPFFNPQNFAQPPTTMTNSSSASNDLKDLFG

SEQ ID NO: 892964 - protein, 929 aa, Homo sapiens; identical to SEQ ID NO: 892958

SEQ ID NO: 892965 - protein, 946 aa, Homo sapiens
MESMLNKLKSTVTKVTADVTSAVMGNPVTREFDVGRHIASGGNGLAWKIFNGTKKSTKQEVAVFVFDKKLIDKYQKFEKDQIIDSLKRGVQQLTRLRHPRLLTVQHPLEESRDCLAFCTEPVFASLANVLGNWENLPSPISPDIKDYKLYDVETKYGLLQVSEGLSFLHSSVKMVHGNITPENIILNKSGAWKIMGFDFCVSSTNPSEQEPKFPCKEWDPNLPSLCLPNPEYLAPEYILSVSCETASDMYSLGTVMYAVFNKGKPIFEVNKQDIYKSFSRQLDQLSRLGSSSLTNIPEEVREHVKLLLNVTPTVRPDADQMTKIPFFDDVGAVTLQYFDTLFQRDNLQKSQFFKGLPKVLPKLPKRVIVQRILPCLTSEFVNPDMVPFVLPNVLLIAEECTKEEYVKLILPELGPVFKQQEPIQILLIFLQKMDLLLTKTPPDEIKNSVLPMVYRALEAPSIQIQELCLNIIPTFANLIDYPSMKNALIPRIKNACLQTSSLAVRVNSLVCLGKILEYLDKWFVLDDILPFLQQIPSKEPAVLMGILGKLRLREVKYSDSRSYKGIYKCTFTHKKLGITKEQLAGKVLPHLIPLSIENNLNLNQFNSFISVIKEMLNRLESEHKTKLEQLHIMQEQQKSLDIGNQMNVSEEMKVTNIGNQQIDKVFNNIGADLLTGSESENKEDGLQNKHKRASLTLEEKQKLAKEQEQAQKLKSQQPLKPQVHTPVATVKQTKDLTDTLMDNMSSLTSLSVSTPKSSASSTFTSVPSMGIGMMFSTPTDNTKRNLTNGLNANMGFQTSGFNMPVNTNQNFYSSPSTVGVTKMTLGTPPTLPNFNALSVPPAGAKQTQQRPTDMSALNNLFGPQKPKVSMNQLSQQKPNQWLNQFVPPQGSPTMGSSVMGTQMNVIGQSAFGMQGNPFFNPQNFAQPPTTMTNSSSASNDLKDLFG

SEQ ID NO: 892966 - protein, 206 aa, Homo sapiens [sequence omitted]

SEQ ID NO: 892967 - protein, 761 aa, Homo sapiens
MNWRFVELLYFLFIWGRISVQPSHQEPAGTDQHVSKEFDWLISDRGPFHHSRSYLSFVERHRQGFTTRYKIYREFARWKVRNTAIERRDLVRHPVPLMPEFQRSIRLLGRRPTTQQFIDTIIKKYGTHLLISATLGGEEALTMYMDKSRLDRKSGNATQSVEALHQLASSYFVDRDGTMRRLHEIQISTGAIKVTETRTGPLGCNSYDNLDSVSSVLLQSTESKLHLQGLQIIFPQYLQEKFVQSALSYIMCNGEGEYLCQNSQCRCQCAEEFPQCNCPITDIQIMEYTLANMAKSWAEAYKDLENSDEFKSFMKRLPSNHFLTIGSIHQHWGNDWDLQNRYKLLQSATEAQRQKIQRTARKLFGLSVRCRHNPNHQLPRERTIQQWLARVQSLLYCNENGFWGTFLESQRSCVCHGSTTLCQRPIPCVIGGNNSCAMCSLANISLCGSCNKGYKLYRGRCEPQNVDSERSEQFISFETDLDFQDLELKYLLQKMDSRLYVHTTFISNEIRLDTFFDPRWRKRMSLTLKSNKNRMDFIHMVIGMSMRICQMRNSSLDPMFFVYVNPFSGSHSEGWNMPFGEFGYPRWEKIRLQNSQCYNWTLLLGNRWKTFFETVHIYLRSRTRLPTLLRNETGQGPVDLSDPSKRQFYIKISDVQVFGYSLRFNADLLRSAVQQVNQSYTQGGQFYSSSSVMLLLLDIRDRINRLAPPVAPGKPQLDLFSCMLKHRLKLTNSEIIRVNHALDLYNTEILKQSDQMTAKLC

SEQ ID NO: 892968 - protein, 664 aa, Homo sapiens
MPEFQRSIRLLGRRPTTQQFIDTIIKKYGTHLLISATLGGEEALTMYMDKSRLDRKSGNATQSVEALHQLASSYFVDRDGTMRRLHEIQISTGAIKVTETRTGPLGCNSYDNLDSVSSVLLQSTESKLHLQGLQIIFPQYLQEKFVQSALSYIMCNGEGEYLCQNSQCRCQCAEEFPQCNCPITDIQIMEYTLANMAKSWAEAYKDLENSDEFKSFMKRLPSNHFLTIGSIHQHWGNDWDLQNRYKLLQSATEAQRQKIQRTARKLFGLSVRCRHNPNHQLPRERTIQQWLARVQSLLYCNENGFWGTFLESQRSCVCHGSTTLCQRPIPCVIGGNNSCAMCSLANISLCGSCNKGYKLYRGRCEPQNVDSERSEQFISFETDLDFQDLELKYLLQKMDSRLYVHTTFISNEIRLDTFFDPRWRKRMSLTLKSNKNRMDFIHMVIGMSMRICQMRNSSLDPMFFVYVNPFSGSHSEGWNMPFGEFGYPRWEKIRLQNSQCYNWTLLLGNRWKTFFETVHIYLRSRTRLPTLLRNETGQGPVDLSDPSKRQFYIKISDVQVFGYSLRFNADLLRSAVQQVNQSYTQGGQFYSSSSVMLLLLDIRDRINRLAPPVAPGKPQLDLFSCMLKHRLKLTNSEIIRVNHALDLYNTEILKQSDQMTAKLC

SEQ ID NO: 892969 - protein, 624 aa, Homo sapiens
MNWRFVELLYFLFIWGRISVQPSHQEPAGTDQHVSKEFDWLISDRGPFHHSRSYLSFVERHRQGFTTRYKIYREFARWKVRNTAIERRDLVRHPVPLMPEFQRSIRLLGRRPTTQQFIDTIIKKYGTHLLISATLGGEEALTMYMDKSRLDRKSGNATQSVEAYKDLENSDEFKSFMKRLPSNHFLTIGSIHQHWGNDWDLQNRYKLLQSATEAQRQKIQRTARKLFGLSVRCRHNPNHQLPRERTIQQWLARVQSLLYCNENGFWGTFLESQRSCVCHGSTTLCQRPIPCVIGGNNSCAMCSLANISLCGSCNKGYKLYRGRCEPQNVDSERSEQFISFETDLDFQDLELKYLLQKMDSRLYVHTTFISNEIRLDTFFDPRWRKRMSLTLKSNKNRMDFIHMVIGMSMRICQMRNSSLDPMFFVYVNPFSGSHSEGWNMPFGEFGYPRWEKIRLQNSQCYNWTLLLGNRWKTFFETVHIYLRSRTRLPTLLRNETGQGPVDLSDPSKRQFYIKISDVQVFGYSLRFNADLLRSAVQQVNQSYTQGGQFYSSSSVMLLLLDIRDRINRLAPPVAPGKPQLDLFSCMLKHRLKLTNSEIIRVNHALDLYNTEILKQSDQMTAKLC

SEQ ID NO: 892970 - protein, 476 aa, Homo sapiens
MEYTLANMAKSWAEAYKDLENSDEFKSFMKRLPSNHFLTIGSIHQHWGNDWDLQNRYKLLQSATEAQRQKIQRTARKLFGLSVRCRHNPNHQLPRERTIQQWLARVQSLLYCNENGFWGTFLESQRSCVCHGSTTLCQRPIPCVIGGNNSCAMCSLANISLCGSCNKGYKLYRGRCEPQNVDSERSEQFISFETDLDFQDLELKYLLQKMDSRLYVHTTFISNEIRLDTFFDPRWRKRMSLTLKSNKNRMDFIHMVIGMSMRICQMRNSSLDPMFFVYVNPFSGSHSEGWNMPFGEFGYPRWEKIRLQNSQCYNWTLLLGNRWKTFFETVHIYLRSRTRLPTLLRNETGQGPVDLSDPSKRQFYIKISDVQVFGYSLRFNADLLRSAVQQVNQSYTQGGQFYSSSSVMLLLLDIRDRINRLAPPVAPGKPQLDLFSCMLKHRLKLTNSEIIRVNHALDLYNTEILKQSDQMTAKLC

SEQ ID NO: 892971 - protein, 423 aa, Homo sapiens
  misc_feature (31)..(31): Xaa can be any naturally occurring amino acid
ERASSTEKIQYRNCPDQHYRPSVCTARRQLXLHTDHVLPYRYDWTIQQWLARVQSLLYCNENGFWGTFLESQRSCVCHGSTTLCQRPIPCVIGGNNSCAMCSLANISLCGSCNKGYKLYRGRCEPQNVDSERSEQFISFETDLDFQDLELKYLLQKMDSRLYVHTTFISNEIRLDTFFDPRWRKRMSLTLKSNKNRMDFIHMVIGMSMRICQMRNSSLDPMFFVYVNPFSGSHSEGWNMPFGEFGYPRWEKIRLQNSQCYNWTLLLGNRWKTFFETVHIYLRSRTRLPTLLRNETGQGPVDLSDPSKRQFYIKISDVQVFGYSLRFNADLLRSAVQQVNQSYTQGGQFYSSSSVMLLLLDIRDRINRLAPPVAPGKPQLDLFSCMLKHRLKLTNSEIIRVNHALDLYNTEILKQSDQMTAKLC

SEQ ID NO: 892972 - protein, 132 aa, Homo sapiens
MQVIHGPHVEKLQSPLGPHRPSPRCPLSVVTGPDLQECTFHSTRKPYDILRLPRPAACMGPLPSSTPTLRMVPCSALVLCWPLPATPTLRHPGVVGPNWLAPPSAALCRPDAAVWPDLPSSNILLVTPPPAK

SEQ ID NO: 892973 - protein, 866 aa, Homo sapiens
MAARAVLDEFTAPAEKAELLEQSRGRIEGLFGVSLAVLGALGAEEPLPARIWLQLCGAQEAEHSAKEYIKGICEPELEERECYPKDMHCIFVGAESLFLKSLIQDTCADLCILDIGLLGIRGSAEAVVMARSHIQQFVKLFENKENLPSSQKESEVKREFKQFVEAHADNYTMDLLILPTSLKKELLTLTQGEENLFETGDDEVIEMRDSQQTEFTQNAATGLNISRDETVLQEEARNKAGTPVSELTKQMDTVLSSSPDVLFDPINGLTPDEEALSNERICQKRRFSDSEERHTKKQFSLENVQEGEILHDAKTLAGNVIADLSDSSADSENLSPDIKETTEEMEYNILVNFFKTMGYSQEIVEKVIKVYGPSTEPLLLLEEIEKENKRFQEDREFSAGTVYPETNKTKNKGVYSSTNELTTDSTPKKTQAHTQQNMVEKFSQLPFKVEAKPCTSNCRINTFRTVPIEQKHEVWGSNQNYICNTDPETDGLSPSVASPSPKEVNFVSRGASSHQPRVPLFPENGLHQQPEPLLPNNMKSACEKRLGCCSSPHSKPNCSTLSPPMPLPQLLPSVTDARSAGPSDHIDSSVTGVQRFRDTLKIPYKLELKNEPGRTDLKHIVIDGSNVAITHGLKKFFSCRGIAIAVEYFWKLGNRNITVFVPQWRTRRDPNVTEQHFLTQLQELGILSLTPARMVFGERIASHDDRFLLHLADKTGGIIVTNDNFREFVNESVSWREIITKRLLQYTFVGDIFMVPDDPLGRSGPRLEEFLQKEVCLRDMQPLLSALPNVGMFDPSFRVPGTQAASTTNTASDPDSGSPFKPLAPSAAPLPTAASPPQSPAEPAHASSEIFCRNQRAEGSPSEDLP

SEQ ID NO: 892974 - protein, 90 aa, Homo sapiens
AVVHTCMLFMGAPSSHWLPQQPHFPLLPALPSLQQNLPMPAQRSSAETNELREALLKIFPDSEQRLKIDQILVAHPYMKDLNALSAMVLD

SEQ ID NO: 892975 - protein, 105 aa, Homo sapiens
PGEKMGRTQNSFKLNLREIITKRLLQYTFVGDIFMVPDDPLGRSGPRLEEFLQKEVCLRDMQPLLSALPNVGMFDPSFRVPGTQAASTTNTASDPDSDTDQLHLN

SEQ ID NO: 892976 - protein, 692 aa, Homo sapiens
FFKTMGYSQEIVEKVIKVYGPSTEPLLLLEEIEKENKRFQEDREFSAGTVYPETNKTKNKGVYSSTNELTTDSISKENTVLSSSPDVLFDPINGLTPDEEALSNERICQKRRFSDSEERHTKKQFSLENVQEGEILHDAKTLAGNVIADLSDSSADSENLSPDIKETTEEMEYNILVNFFKTMGYSQEIVEKVIKVYGPSTEPLLLLEEIEKENKRFQEDREFSAGTVYPETNKTKNKGVYSSTNELTTDSTPKKTQAHTQQNMVEKFSQLPFKVEAKPCTSNCRINTFRTVPIEQKHEVWGSNQNYICNTDPETDGLSPSVASPSPKEVNFVSRGASSHQPRVPLFPENGLHQQPEPLLPNNMKSACEKRLGCCSSPHSKPNCSTLSPPMPLPQLLPSVTDARSAGPSDHIDSSVTGVQRFRDTLKIPYKLELKNEPGRTDLKHIVIDGSNVAITHGLKKFFSCRGIAIAVEYFWKLGNRNITVFVPQWRTRRDPNVTEQHFLTQLQELGILSLTPARMVFGERIASHDDRFLLHLADKTGGIIVTNDNFREFVNESVSWREIITKRLLQYTFVGDIFMVPDDPLGRSGPRLEEFLQKEVCLRDMQPLLSALPNVGMFDPSFRVPGTQAASTTNTASDPDSGSPFKPLAPSAAPLPTAASPPQSPAEPAHASSEIFCRNQRAEGSPSEDLP

SEQ ID NO: 892977 - protein, 108 aa, Homo sapiens
MWACLTPASESLAPRQPAPPIQPPTRIQGAPSSHWLPQQPHFPLLPALPSLQQNLPMPAQRSSAETNELREALLKIFPDSEQRLKIDQILVAHPYMKDLNALSAMVLD

SEQ ID NO: 892978 - protein, 678 aa, Homo sapiens
MAARAVLDEFTAPAEKAELLEQSRGRIEGLFGVSLAVLGALGAEEPLPARIWLQLCGAQEAEHSAKEYIKGICEPELEERECYPKDMHCIFVGAESLFLKSLIQDTCADLCILDIGLLGIRGSAEAVVMARSHIQQFVKLFENKENLPSSQKESEVKREFKQFVEAHADNYTMDLLILPTSLKKELLTLTQGEENLFETGDDEVIEMRDSQQTEFTQNAATGLNISRDETVLQEEARNKAGTPVSELTKQMDTVLSSSPDVLFDPINGLTPDEEALSNERICQKRRFSDSEERHTKKQFSLENVQEGEILHDAKTLAGNVIADLSDSSADSENLSPDIKETTEEMEYNILVNFFKTMGYSQEIVEKVIKVYGPSTEPLLLLEEIEKENKRFQEDREFSAGTVYPETNKTKNKGVYSSTNELTTDSTPKKTQAHTQQNMVEKFSQLPFKVEAKPCTSNCRINTFRTVPIEQKHEVWGSNQNYICNTDPETDGLSPSVASPSPKEVNFVSRGASSHQPRVPLFPENGLHQQPEPLLPNNMKSACEKRLGCCSSPHSKPNCSTLSPPMPLPQLLPSVTDARSAGPSDHIDSSVTGVQRFRDTLKIPYKLELKNEPGRTDLKHIVIDGSNVAITHGLKKFFSCRGIAIAVEYFWKLGNRNITVFVPQWRTRRDPNVTGFYYT

SEQ ID NO: 892979 - protein, 329 aa, Homo sapiens
MKSACEKRLGCCSSPHSKPNCSTLSPPMPLPQLLPSVTDARSAGPSDHIDSSVTGVQRFRDTLKIPYKLELKNEPGRTDLKHIVIDGSNVAITHGLKKFFSCRGIAIAVEYFWKLGNRNITVFVPQWRTRRDPNVTEQHFLTQLQELGILSLTPARMVFGERIASHDDRFLLHLADKTGGIIVTNDNFREFVNESVSWREIITKRLLQYTFVGDIFMVPDDPLGRSGPRLEEFLQKEVCLRDMQPLLSALPNVGMFDPSFRVPGTQAASTTNTASDPDSGSPFKPLAPSAAPLPTAASPPQSPAEPAHASSEIFCRNQRAEGSPSEDLP

SEQ ID NO: 892980 - protein, 108 aa, Homo sapiens; identical to SEQ ID NO: 892977

SEQ ID NO: 892981 - protein, 752 aa, Homo sapiens
MAARAVLDEFTAPAEKAELLEQSRGRIEGLFGVSLAVLGALGAEEPLPARIWLQLCGAQEAEHSAKEYIKGICEPELEERECYPKDMHCIFVGAESLFLKSLIQDTCADLCILDIGLLGIRGSAEAVVMARSHIQQFVKLFENKENLPSSQKESEVKREFKQFVEAHADNYTMDLLILPTSLKKELLTLTQGEENLFETGDDEVIEMRDSQQTEFTQNAATGLNISRDETVLQEEARNKAGTPVSELTKQMDTVLSSSPDVLFDPINGLTPDEEALSNERICQKRRFSDSEERHTKKQFSLENVQEGEILHDAKTLAGNVIADLSDSSADSENLSPDIKETTEEMEYNILVNFFKTMGYSQEIVEKVIKVYGPSTEPLLLLEEIEKENKRFQEDREFSAGTVYPETNKTKNKGVYSSTNELTTDSTPKKTQAHTQQNMVEKFSQLPFKVEAKPCTSNCRINTFRTVPIEQKHEVWGSNQNYICNTDPETDGLSPSVASPSPKEVNFVSRGASSHQPRVPLFPENGLHQQPEPLLPNNMKSACEKRLGCCSSPHSKPNCSTLSPPMPLPQLLPSVTDARSAGPSDHIDSSVTGVQRFRDTLKIPYKLELKNEPGRTDLKHIVIDGSNVAITHGLKKFFSCRGIAIAVEYFWKLGNRNITVFVPQWRTRRDPNVTEQHFLTQLQELGILSLTPARMVFGERIASHDDRFLLHLADKTGGIIVTNDNFREFVNESVLATLAGAAATDCVLSCCPF

SEQ ID NO: 892982 - protein, 113 aa, Homo sapiens
MVPDDPLGRSGPRLEEFLQKEVCLRDMQPLLSALPNVGMFDPSFRVPGTQAASTTNTASDPDSGSPFKPLAPSAAPLPTAASPPQSPAEPAHASSEIFCRNQRAEGSPSEDLP

SEQ ID NO: 892983 - protein, 742 aa, Homo sapiens
MAARAVLDEFTAPAEKAELLEQSRGRIEGLFGVSLAVLGALGAEEPLPARIWLQLCGAQEAEHSAKEYIKGICEPELEERECYPKDMHCIFVGAESLFLKSLIQDTCADLCILDIGLLGIRGSAEAVVMARSHIQQFVKLFENKENLPSSQKESEVKREFKQFVEAHADNYTMDLLILPTSLKKELLTLTQGEENLFETGDDEVIEMRDSQQTEFTQNAATGLNISRDETVLQEEARNKAGTPVSELTKQMDTVLSSSPDVLFDPINGLTPDEEALSNERICQKRRFSDSEERHTKKQFSLENVQEGEILHDAKTLAGNVIADLSDSSADSENLSPDIKETTEEMEYNILVNFFKTMGYSQEIVEKVIKVYGPSTEPLLLLEEIEKENKRFQEDREFSAGTVYPETNKTKNKGVYSSTNELTTDSTPKKTQAHTQQNMVEKFSQLPFKVEAKPCTSNCRINTFRTVPIEQKHEVWGSNQNYICNTDPETDGLSPSVASPSPKEVNFVSRGASSHQPRVPLFPENGLHQQPEPLLPNNMKSACEKRLGCCSSPHSKPNCSTLSPPMPLPQLLPSVTDARSAGPSDHIDSSVTGVQRFRDTLKIPYKLELKNEPGRTDLKHIVIDGSNVAITHGLKKFFSCRGIAIAVEYFWKLGNRNITVFVPQWRTRRDPNVTEQHFLTQLQELGILSLTPARMVFGERIASHDDRFLLHLADKTGGIIVTNDNFREFVNESVSWREIITKR

SEQ ID NO: 892984 - protein, 52 aa, Homo sapiens
MVGLGGMSQLLLASLLPPVPQGSPTRRKLPASLLVSTALISPVCVRGWMWQN

SEQ ID NO: 892985 - protein, 173 aa, Homo sapiens
MDELKHQVMINQFVLTAGCAADQAKQLLQAAHWQFETALSAFFQETNIPYSHHHHQMMCTPANTPATPPNFPDALTMFSRLKASESFHSGGSGSPMAATATSPPPHFPHAATSSSAASSWPTAASPPGGPQHHQPQPPLWTPTPPSPASDWPPLAPQQATSEPRAHPAMEAER

SEQ ID NO: 892986 - protein, 280 aa, Homo sapiens
PQFWIGRKEAELVLCISSPWPRCTRALVQAGLDLFGDGSAGVPAPWVLHLILPVPAPPETWGALASGAMKLLTLQPPGMLWLMERGGLGKPRGPRHRGLLRVRLGRFISRLLLWEPLGGGQAWGSGEGTQSLPRMGQPRISPWEAVGAPPGRGAHPISPLFPSQMCTPANTPATPPNFPDALTMFSRLKASESFHSGGSGSPMAATATSPPPHFPHAATSSSAASSWPTAASPPGGPQHHQPQPPLWTPTPPSPASDWPPLAPQQATSEPRAHPAMEAER

SEQ ID NO: 892987 - protein, 129 aa, Homo sapiens
MSVNMDELKHQVMINQFVLTAGCAADQAKQLLQAAHWQFETALSAFFQETNIPYSHHHHQMMCTPANTPATPPNFPDALTMFSRLKASESFHSGGSGSPMAATATSPPHPLPFPLLTKEKNEFQTTKKK

SEQ ID NO: 892988 - protein, 90 aa, Homo sapiens
MSVNMDELKHQVMINQFVLTAGCAADQAKQLLQAAHWQFETALSAFFQETNIPYSHHHHQMLPCTWGYPHPLPFPLLTKEKNEFQTTKKK

SEQ ID NO: 892989 - protein, 177 aa, Homo sapiens
MSVNMDELKHQVMINQFVLTAGCAADQAKQLLQAAHWQFETALSAFFQETNIPYSHHHHQMMCTPANTPATPPNFPDALTMFSRLKASESFHSGGSGSPMAATATSPPPHFPHAATSSSAASSWPTAASPPGGPQHHQPQPPLWTPTPPSPASDWPPLAPQQATSEPRAHPAMEAER

SEQ ID NO: 892990 - protein, 183 aa, Homo sapiens
MEWFRAAWVPGGQNFRDHAAFLRRRTCPAQPRGAVEDHPGGDIADPWLGAPWGPAGLDPHPRECRASPHVCAWPCLCISTCVALQKQPSSWGSWTLHVSVSPQPPARRPLPRALPPPHPLVSQRCCSLQRKGLWETPGLFPPPPSACLLGLPACLPCTWGYPHPLPFPLLTKEKNEFQTTKKK

SEQ ID NO: 892991 - protein, 178 aa, Homo sapiens
HAPSRASRPLGCRPRSPGAPGAPWGLHIPACRGAGGARRGATALSAFFQETNIPYSHHHHQMMCTPANTPATPPNFPDALTMFSRLKASESFHSGGSGSPMAATATSPPPHFPHAATSSSAASSWPTAASPPGGPQHHQPQPPLWTPTPPSPASDWPPLAPQQATSEPRAHPAMEAER

SEQ ID NO: 892992 - protein, 239 aa, Homo sapiens
WWSEGSLCDGIDPPKVYPPVPAEKRKPIRVLSLFDGIATGLLVLKDLGIQVDRYIASEVCEDSITVGMVRHQGKIMYVGDVRSVTQKHIQEWGPFDLVIGGSPCNDLSIVNPARKGLYEGTGRLFFEFYRLLHDARPKEGDDRPFFWLFENVVAMGVSDKRDISRFLESNPVMIDAKEVSAAHRARYFWGNLPGMNRPLASTVNDKLELQECLEHGRIAKFTKVRLLLSSLIPSPSKYS

SEQ ID NO: 892993 - protein, 163 aa, Homo sapiens
MPSSGPGDTSSSAAEREEDRKDGEEQEEPRGKEERQEPSTTARKVGRPGRKRKHPPVESGDTPKDPAVISKSPSMAQDSGASELLPNGDLEKRSEPQPEEGSPAGGQKGGAPAEGEGAAETLPEASRAVENGCCTPKEGRGAPAEAGESSAPGAASSGPTSIP

SEQ ID NO: 892994 - protein, 163 aa, Homo sapiens; identical to SEQ ID NO: 892993

SEQ ID NO: 892995 - protein, 120 aa, Homo sapiens
GTLCDGIDPPKVYPPVPAEKRKPIRVLSLFDGIATGLLVLKDLGIQVDRYIASEVCEDSITVGMVRHQGKIMYVGDVRSVTQKHIQEWGPFDLVIGGSPCNDLSIVNPARKGLYVQPCDD

SEQ ID NO: 892996 - protein, 909 aa, Homo sapiens
MPSSGPGDTSSSAAEREEDRKDGEEQEEPRGKEERQEPSTTARKVGRPGRKRKHPPVESGDTPKDPAVISKSPSMAQDSGASELLPNGDLEKRSEPQPEEGSPAGGQKGGAPAEGEGAAETLPEASRAVENGCCTPKEGRGAPAEAGKEQKETNIESMKMEGSRGRLRGGLGWESSLRQRPMPRLTFQAGDPYYISKRKRDEWLARWKREAEKKAKVIAGMNAVEENQGPGESQKVEEASPPAVQQPTDPASPTVATTPEPVGSDAGDKNATKAGDDEPEYEDGRGFGIGELVWGKLRGFSWWPGRIVSWWMTGRSRAAEGTRWVMWFGDGKFSVVCVEKLMPLSSFCSAFHQATYNKQPMYRKAIYEVLQVASSRAGKLFPVCHDSDESDTAKAVEVQNKPMIEWALGGFQPSGPKGLEPPEEEKNPYKEVYTDMWVEPEAAAYAPPPPAKKPRKSTAEKPKVKEIIDERTRERLVYEVRQKCRNIEDICISCGSLNVTLEHPLFVGGMCQNCKNCFLECAYQYDDDGYQSYCTICCGGREVLMCGNNNCCRCFCVECVDLLVGPGAAQAAIKEDPWNCYMCGHKGTYGLLRRREDWPSRLQMFFANNHDQEFDPPKVYPPVPAEKRKPIRVLSLFDGIATGLLVLKDLGIQVDRYIASEVCEDSITVGMVRHQGKIMYVGDVRSVTQKHIQEWGPFDLVIGGSPCNDLSIVNPARKGLYEGTGRLFFEFYRLLHDARPKEGDDRPFFWLFENVVAMGVSDKRDISRFLESNPVMIDAKEVSAAHRARYFWGNLPGMNRPLASTVNDKLELQECLEHGRIAKFSKVRTITTRSNSIKQGKDQHFPVFMNEKEDILWCTEMERVFGFPVHYTDVSNMSRLARQRLLGRSWSVPVIRHLFAPLKEYFACV

SEQ ID NO: 892997 - protein, 909 aa, Homo sapiens; identical to SEQ ID NO: 892996

SEQ ID NO: 892998 - protein, 909 aa, Homo sapiens; identical to SEQ ID NO: 892996

SEQ ID NO: 892999 - protein, 689 aa, Homo sapiens
MNAVEENQGPGESQKVEEASPPAVQQPTDPASPTVATTPEPVGSDAGDKNATKAGDDEPEYEDGRGFGIGELVWGKLRGFSWWPGRIVSWWMTGRSRAAEGTRWVMWFGDGKFSVVCVEKLMPLSSFCSAFHQATYNKQPMYRKAIYEVLQVASSRAGKLFPVCHDSDESDTAKAVEVQNKPMIEWALGGFQPSGPKGLEPPEEEKNPYKEVYTDMWVEPEAAAYAPPPPAKKPRKSTAEKPKVKEIIDERTRERLVYEVRQKCRNIEDICISCGSLNVTLEHPLFVGGMCQNCKNCFLECAYQYDDDGYQSYCTICCGGREVLMCGNNNCCRCFCVECVDLLVGPGAAQAAIKEDPWNCYMCGHKGTYGLLRRREDWPSRLQMFFANNHDQEFDPPKVYPPVPAEKRKPIRVLSLFDGIATGLLVLKDLGIQVDRYIASEVCEDSITVGMVRHQGKIMYVGDVRSVTQKHIQEWGPFDLVIGGSPCNDLSIVNPARKGLYEGTGRLFFEFYRLLHDARPKEGDDRPFFWLFENVVAMGVSDKRDISRFLESNPVMIDAKEVSAAHRARYFWGNLPGMNRPLASTVNDKLELQECLEHGRIAKFSKVRTITTRSNSIKQGKDQHFPVFMNEKEDILWCTEMERVFGFPVHYTDVSNMSRLARQRLLGRSWSVPVIRHLFAPLKEYFACV

SEQ ID NO: 893000 - protein, 677 aa, Homo sapiens
RFCSVLPHSDGAPSWLSCPPDAQGWGCHGGIRVAGPRDQLCNDFCSLGLQDGRGFGIGELVWGKLRGFSWWPGRIVSWWMTGRSRAAEGTRWVMWFGDGKFSVVCVEKLMPLSSFCSAFHQATYNKQPMYRKAIYEVLQVASSRAGKLFPVCHDSDESDTAKAVEVQNKPMIEWALGGFQPSGPKGLEPPEEEKNPYKEVYTDMWVEPEAAAYAPPPPAKKPRKSTAEKPKVKEIIDERTRERLVYEVRQKCRNIEDICISCGSLNVTLEHPLFVGGMCQNCKNCFLECAYQYDDDGYQSYCTICCGGREVLMCGNNNCCRCFCVECVDLLVGPGAAQAAIKEDPWNCYMCGHKGTYGLLRRREDWPSRLQMFFANNHDQEFDPPKVYPPVPAEKRKPIRVLSLFDGIATGLLVLKDLGIQVDRYIASEVCEDSITVGMVRHQGKIMYVGDVRSVTQKHIQEWGPFDLVIGGSPCNDLSIVNPARKGLYEGTGRLFFEFYRLLHDARPKEGDDRPFFWLFENVVAMGVSDKRDISRFLESNPVMIDAKEVSAAHRARYFWGNLPGMNRPLASTVNDKLELQECLEHGRIAKFSKVRTITTRSNSIKQGKDQHFPVFMNEKEDILWCTEMERVFGFPVHYTDVSNMSRLARQRLLGRSWSVPVIRHLFAPLKEYFACV

SEQ ID NO: 893001 - protein, 306 aa, Homo sapiens
WWSEGSLCDGIDPPKVYPPVPAEKRKPIRVLSLFDGIATGLLVLKDLGIQVDRYIASEVCEDSITVGMVRHQGKIMYVGDVRSVTQKHIQEWGPFDLVIGGSPCNDLSIVNPARKGLYEGTGRLFFEFYRLLHDARPKEGDDRPFFWLFENVVAMGVSDKRDISRFLESNPVMIDAKEVSAAHRARYFWGNLPGMNRPLASTVNDKLELQECLEHGRIAKFSKVRTITTRSNSIKQGKDQHFPVFMNEKEDILWCTEMERVFGFPVHYTDVSNMSRLARQRLLGRSWSVPVIRHLFAPLKEYFACV

SEQ ID NO: 893002 - protein, 298 aa, Homo sapiens
MEYDPPKVYPPVPAEKRKPIRVLSLFDGIATGLLVLKDLGIQVDRYIASEVCEDSITVGMVRHQGKIMYVGDVRSVTQKHIQEWGPFDLVIGGSPCNDLSIVNPARKGLYEGTGRLFFEFYRLLHDARPKEGDDRPFFWLFENVVAMGVSDKRDISRFLESNPVMIDAKEVSAAHRARYFWGNLPGMNRPLASTVNDKLELQECLEHGRIAKFSKVRTITTRSNSIKQGKDQHFPVFMNEKEDILWCTEMERVFGFPVHYTDVSNMSRLARQRLLGRSWSVPVIRHLFAPLKEYFACV

SEQ ID NO: 893003 - protein, 712 aa, Homo sapiens
MNAVEENQGPGESQKVEEASPPAVQQPTDPASPTVATTPEPVGSDAGDKNATKAGDDEPEYEDGRGFGIGELVWGKLRGFSWWPGRIVSWWMTGRSRAAEGTRWVMWFGDGKFSVVCVEKLMPLSSFCSAFHQATYNKQPMYRKAIYEVLQVASSRAGKLFPVCHDSDESDTAKAVEVQNKPMIEWALGGFQPSGPKGLEPPEEEKNPYKEVYTDMWVEPEAAAYAPPPPAKKPRKSTAEKPKVKEIIDERTRERLVYEVRQKCRNIEDICISCGSLNVTLEHPLFVGGMCQNCKNCFLECAYQYDDDGYQSYCTICCGGREVLMCGNNNCCRCFCVECVDLLVGPGAAQAAIKEDPWNCYMCGHKGTYGLLRRREDWPSRLQMFFANNHDQEFDPPKVYPPVPAEKRKPIRVLSLFDGIATGSPAETRVPGRWLQVTVLLLAGAGLLVLKDLGIQVDRYIASEVCEDSITVGMVRHQGKIMYVGDVRSVTQKHIQEWGPFDLVIGGSPCNDLSIVNPARKGLYEGTGRLFFEFYRLLHDARPKEGDDRPFFWLFENVVAMGVSDKRDISRFLESNPVMIDAKEVSAAHRARYFWGNLPGMNRPLASTVNDKLELQECLEHGRIAKFSKVRTITTRSNSIKQGKDQHFPVFMNEKEDILWCTEMERVFGFPVHYTDVSNMSRLARQRLLGRSWSVPVIRHLFAPLKEYFACV

SEQ ID NO: 893004 - protein, 507 aa, Homo sapiens
MNAVEENQGPGESQKVEEASPPAVQQPTDPASPTVATTPEPVGSDAGDKNATKAGDDEPEYEDGRGFGIGELVWGKLRGFSWWPGRIVSWWMTGRSRAAEGTRWVMWFGDGKFSVVCVEKLMPLSSFCSAFHQATYNKQPMYRKAIYEVLQVASSRAGKLFPVCHDSDESDTAKAVEVQNKPMIEWALGGFQPSGPKGLEPPEEEKNPYKEVYTDMWVEPEAAAYAPPPPAKKPRKSTAEKPKVKEIIDERTRERLVYEVRQKCRNIEDICISCGSLNVTLEHPLFVGGMCQNCKNCFLECAYQYDDDGYQSYCTICCGGREVLMCGNNNCCRCFCVECVDLLVGPGAAQAAIKEDPWNCYMCGHKGTYGLLRRREDWPSRLQMFFANNHDQEFDPPKVYPPVPAEKRKPIRVLSLFDGIATGLLVLKDLGIQVDRYIASEVCEDSITVGMVRHQGKIMYVGDVRSVTQKHIQEWGPFDLVIGGSPCNDLSIVNPARKGLYVQPCDD

SEQ ID NO: 893005 - protein, 620 aa, Homo sapiens
MNAVEENQGPGESQKVEEASPPAVQQPTDPASPTVATTPEPVGSDAGDKNATKAGDDEPEYEDGRGFGIGELVWGKLRGFSWWPGRIVSWWMTGRSRAAEGTRWVMWFGDGKFSVVCVEKLMPLSSFCSAFHQATYNKQPMYRKAIYEVLQVASSRAGKLFPVCHDSDESDTAKAVEVQNKPMIEWALGGFQPSGPKGLEPPEEEKNPYKEVYTDMWVEPEAAAYAPPPPAKKPRKSTAEKPKVKEIIDERTRERLVYEVRQKCRNIEDICISCGSLNVTLEHPLFVGGMCQNCKNCFLECAYQYDDDGYQSYCTICCGGREVLMCGNNNCCRCFCVECVDLLVGPGAAQAAIKEDPWNCYMCGHKGTYGLLRRREDWPSRLQMFFANNHDQEFDPPKVYPPVPAEKRKPIRVLSLFDGIATGLLVLKDLGIQVDRYIASEVCEDSITVGMVRHQGKIMYVGDVRSVTQKHIQEWGPFDLVIGGSPCNDLSIVNPARKGLYEGTGRLFFEFYRLLHDARPKEGDDRPFFWLFENVVAMGVSDKRDISRFLESNPVMIDAKEVSAAHRARYFWGNLPGMNRPLASTVNDKLELQECLEHGRIAKFRKVEDHYYKSIHCISP

SEQ ID NO: 893006 - protein, 626 aa, Homo sapiens
MNAVEENQGPGESQKVEEASPPAVQQPTDPASPTVATTPEPVGSDAGDKNATKAGDDEPEYEDGRGFGIGELVWGKLRGFSWWPGRIVSWWMTGRSRAAEGTRWVMWFGDGKFSVVCVEKLMPLSSFCSAFHQATYNKQPMYRKAIYEVLQVASSRAGKLFPVCHDSDESDTAKAVEVQNKPMIEWALGGFQPSGPKGLEPPEEEKNPYKEVYTDMWVEPEAAAYAPPPPAKKPRKSTAEKPKVKEIIDERTRERLVYEVRQKCRNIEDICISCGSLNVTLEHPLFVGGMCQNCKNCFLECAYQYDDDGYQSYCTICCGGREVLMCGNNNCCRCFCVECVDLLVGPGAAQAAIKEDPWNCYMCGHKGTYGLLRRREDWPSRLQMFFANNHDQEFDPPKVYPPVPAEKRKPIRVLSLFDGIATGLLVLKDLGIQVDRYIASEVCEDSITVGMVRHQGKIMYVGDVRSVTQKHIQEWGPFDLVIGGSPCNDLSIVNPARKGLYEGTGRLFFEFYRLLHDARPKEGDDRPFFWLFENVVAMGVSDKRDISRFLESNPVMIDAKEVSAAHRARYFWGNLPGMNRPLASTVNDKLELQECLEHGRIAKFSKWELILRVNPSKVRPIDQQKI

SEQ ID NO: 893007 - protein, 620 aa, Homo sapiens
MNAVEENQGPGESQKVEEASPPAVQQPTDPASPTVATTPEPVGSDAGDKNATKAGDDEPEYEDGRGFGIGELVWGKLRGFSWWPGRIVSWWMTGRSRAAEGTRWVMWFGDGKFSVVCVEKLMPLSSFCSAFHQATYNKQPMYRKAIYEVLQVASSRAGKLFPVCHDSDESDTAKAVEVQNKPMIEWALGGFQPSGPKGLEPPEEEKNPYKEVYTDMWVEPEAAAYAPPPPAKKPRKSTAEKPKVKEIIDERTRERLVYEVRQKCRNIEDICISCGSLNVTLEHPLFVGGMCQNCKNCFLECAYQYDDDGYQSYCTICCGGREVLMCGNNNCCRCFCVECVDLLVGPGAAQAAIKEDPWNCYMCGHKGTYGLLRRREDWPSRLQMFFANNHDQEFDPPKVYPPVPAEKRKPIRVLSLFDGIATGLLVLKDLGIQVDRYIASEVCEDSITVGMVRHQGKIMYVGDVRSVTQKHIQEWGPFDLVIGGSPCNDLSIVNPARKGLYEGTGRLFFEFYRLLHDARPKEGDDRPFFWLFENVVAMGVSDKRDISRFLESNPVMIDAKEVSAAHRARYFWGNLPGMNRPLASTVNDKLELQECLEHGRIAKFSIVCHYFGVYSIAIEI

SEQ ID NO: 893008 - protein, 507 aa, Homo sapiens; identical to SEQ ID NO: 893004

SEQ ID NO: 893009 - protein, 363 aa, Homo sapiens
MNAVEENQGPGESQKVEEASPPAVQQPTDPASPTVATTPEPVGSDAGDKNATKAGDDEPEYEDGRGFGIGELVWGKLRGFSWWPGRIVSWWMTGRSRAAEGTRWVMWFGDGKFSVVCVEKLMPLSSFCSAFHQATYNKQPMYRKAIYEVLQVASSRAGKLFPVCHDSDESDTAKAVEVQNKPMIEWALGGFQPSGPKGLEPPEEEKNPYKEVYTDMWVEPEAAAYAPPPPAKKPRKSTAEKPKVKEIIDERTRERLVYEVRQKCRNIEDICISCGSLNVTLEHPLFVGGMCQNCKNCFLECAYQYDDDGYQSYCTICCGGREVLMCGNNNCCRCFCVECVDLPGPWNVMFLVISKGCSFILGG

SEQ ID NO: 893010 - protein, 306 aa, Homo sapiens
EKEETEDFKEREEALQVTTVPAEKRKPIRVLSLFDGIATGLLVLKDLGIQVDRYIASEVCEDSITVGMVRHQGKIMYVGDVRSVTQKHIQEWGPFDLVIGGSPCNDLSIVNPARKGLYEGTGRLFFEFYRLLHDARPKEGDDRPFFWLFENVVAMGVSDKRDISRFLESNPVMIDAKEVSAAHRARYFWGNLPGMNRPLASTVNDKLELQECLEHGRIAKFSKVRTITTRSNSIKQGKDQHFPVFMNEKEDILWCTEMERVFGFPVHYTDVSNMSRLARQRLLGRSWSVPVIRHLFAPLKEYFACV

SEQ ID NO: 893011 - protein, 587 aa, Homo sapiens
MNAVEENQGPGESQKVEEASPPAVQQPTDPASPTVATTPEPVGSDAGDKNATKAGDDEPEYEDGRGFGIGELVWGKLRGFSWWPGRIVSWWMTGRSRAAEGTRWVMWFGDGKFSVVCVEKLMPLSSFCSAFHQATYNKQPMYRKAIYEVLQVASSRAGKLFPVCHDSDESDTAKAVEVQNKPMIEWALGGFQPSGPKGLEPPEEEKNPYKEVYTDMWVEPEAAAYAPPPPAKKPRKSTAEKPKVKEIIDERTRERLVYEVRQKCRNIEDICISCGSLNVTLEHPLFVGGMCQNCKNCFLECAYQYDDDGYQSYCTICCGGREVLMCGNNNCCRCFCVECVDLLVGPGAAQAALRKIMYVGDVRSVTQKHIQEWGPFDLVIGGSPCNDLSIVNPARKGLYEGTGRLFFEFYRLLHDARPKEGDDRPFFWLFENVVAMGVSDKRDISRFLESNPVMIDAKEVSAAHRARYFWGNLPGMNRPLASTVNDKLELQECLEHGRIAKFSKVRTITTRSNSIKQGKDQHFPVFMNEKEDILWCTEMERVFGFPVHYTDVSNMSRLARQRLLGRSWSVPVIRHLFAPLKEYFACV

SEQ ID NO: 893012 - protein, 622 aa, Homo sapiens
MNAVEENQGPGESQKVEEASPPAVQQPTDPASPTVATTPEPVGSDAGDKNATKAGDDEPEYEDGRGFGIGELVWGKLRGFSWWPGRIVSWWMTGRSRAAEGTRWVMWFGDGKFSVVCVEKLMPLSSFCSAFHQATYNKQPMYRKAIYEVLQVASSRAGKLFPVCHDSDESDTAKAVEVQNKPMIEWALGGFQPSGPKGLEPPEEEKNPYKEVYTDMWVEPEAAAYAPPPPAKKPRKSTAEKPKVKEIIDERTRERLVYEVRQKCRNIEDICISCGSLNVTLEHPLFVGGMCQNCKNCFLECAYQYDDDGYQSYCTICCGGREVLMCGNNNCCRCFCVECVDLLVGPGAAQAAIKEDPWNCYMCGHKGTYGLLRRREDWPSRLQMFFANNHDQEFDPPKVYPPVPAEKRKPIRVLSLFDGIATGLLVLKDLGIQVDRYIASEVCEDSITVGMVRHQGKIMYVGDVRSVTQKHIQEWGPFDLVIGGSPCNDLSIVNPARKGLYEGTGRLFFEFYRLLHDARPKEGDDRPFFWLFENVVAMGVSDKRDISRFLESNPVMIDAKEVSAAHRARYFWGNLPGMNRPLASTVNDKLELQECLEHGRIAKFTKVRLLLSSLIPSPSKYS

SEQ ID NO: 893013 - protein, 625 aa, Homo sapiens
MNAVEENQGPGESQKVEEASPPAVQQPTDPASPTVATTPEPVGSDAGDKNATKAGDDEPEYEDGRGFGIGELVWGKLRGFSWWPGRIVSWWMTGRSRAAEGTRWVMWFGDGKFSVVCVEKLMPLSSFCSAFHQATYNKQPMYRKAIYEVLQVASSRAGKLFPVCHDSDESDTAKAVEVQNKPMIEWALGGFQPSGPKGLEPPEEEKNPYKEVYTDMWVEPEAAAYAPPPPAKKPRKSTAEKPKVKEIIDERTRERLVYEVRQKCRNIEDICISCGSLNVTLEHPLFVGGMCQNCKNCFLECAYQYDDDGYQSYCTICCGGREVLMCGNNNCCRCFCVECVDLLVGPGAAQAAIKEDPWNCYMCGHKGTYGLLRRREDWPSRLQMFFANNHDQEFDPPKVYPPVPAEKRKPIRVLSLFDGIATGLLVLKDLGIQVDRYIASEVCEDSITVGMVRHQGKIMYVGDVRSVTQKHIQEWGPFDLVIGGSPCNDLSIVNPARKGLYEGTGRLFFEFYRLLHDARPKEGDDRPFFWLFENVVAMGVSDKRDISRFLESNPVMIDAKEVSAAHRARYFWGNLPGMNRPLASTVNDKLELQECLEHGRIAKFSKVRTITTEVKSIAKVTSRVA

SEQ ID NO: 893014 - protein, 558 aa, Homo sapiens
MNAVEENQGPGESQKVEEASPPAVQQPTDPASPTVATTPEPVGSDAGDKNATKAGDDEPEYEDGRGFGIGELVWGKLRGFSWWPGRIVSWWMTGRSRAAEGTRWVMWFGDGKFSVVCVEKLMPLSSFCSAFHQATYNKQPMYRKAIYEVLQVASSRAGKLFPVCHDSDESDTAKAVEVQNKPMIEWALGGFQPSGPKGLEPPEEEKNPYKEVYTDMWVEPEAAAYAPPPPAKKPRKSTAEKPKVKEIIDERTRERLVYEVRQKCRNIEDICISCGSLNVTLEHPLFVGGMCQNCKNCFLECAYQYDDDGYQSYCTICCGGREVLMCGNNNCCRCFCVECVDLLVGPGAAQAAIKEDPWNCYMCGHKGTYGLLRRREDWPSRLQMFFANNHDQEFDPPKVYPPVPAEKRKPIRVLSLFDGIATGLLVLKDLGIQVDRYIASEVCEDSITVGMVRHQGKIMYVGDVRSVTQKHIQEWGPFDLVIGGSPCNDLSIVNPARKGLYEGTGRLFFEFYRLLHDARPKEGDDRPFFWLFENVVAMGVSDKRDISRFLEVQNSHLY

SEQ ID NO: 893015 - protein, 576 aa, Homo sapiens
MNAVEENQGPGESQKVEEASPPAVQQPTDPASPTVATTPEPVGSDAGDKNATKAGDDEPEYEDGRGFGIGELVWGKLRGFSWWPGRIVSWWMTGRSRAAEGTRWVMWFGDGKFSVVCVEKLMPLSSFCSAFHQATYNKQPMYRKAIYEVLQVASSRAGKLFPVCHDSDESDTAKAVEVQNKPMIEWALGGFQPSGPKGLEPPEEEKNPYKEVYTDMWVEPEAAAYAPPPPAKKPRKSTAEKPKVKEIIDERTRERLVYEVRQKCRNIEDICISCGSLNVTLEHPLFVGGMCQNCKNCFLECAYQYDDDGYQSYCTICCGGREVLMCGNNNCCRCFCVECVDLLVGPGAAQAALRKTPGTATCAGTRVPTGCCGGERTGPPGSRCSSLITTTRNLTLQRFTHLSQLRRGSPSGCCLSLMESLQIQEWGPFDLVIGGSPCNDLSIVNPARKGLYEGTGRLFFEFYRLLHDARPKEGDDRPFFWLFENVVAMGVSDKRDISRFLESNPVMIDAKEVSAAHRARYFWGNLPGMNRPLASTVNDKLELQECLEHGRIAKFSKVRTITTEVKSIAKVTSRVA

SEQ ID NO: 893016 - protein, 361 aa, Homo sapiens
MSKQQPTQFINPETPGYVGFANLPNQVHRKSVKKGFEFTLMVVGESGLGKSTLINSLFLTDLYPERVIPGAAEKIERTVQIEASTVEIEERGVKLRLTVVDTPGYGDAINCRDCFKTIISYIDEQFERYLHDESGLNRRHIIDNRVHCCFYFISPFGHGLKPLDVAFMKAIHNKVNIVPVIAKADTLTLKERERLKKRILDEIEEHNIKIYHLPDAESDEDEDFKEQTRLLKASIPFSVVGSNQLIEAKGKKVRGRLYPWGVVEVENPEHNDFLKLRTMLITHMQDLQEVTQDLHYENFRSERLKRGGRKVENEDMNKDQILLEKEAELRRMQEMIARMQAQMQMQMQGGDGDGGALGHHV

SEQ ID NO: 893017 - protein, 361 aa, Homo sapiens; identical to SEQ ID NO: 893016

SEQ ID NO: 893018 - protein, 387 aa, Homo sapiens
  misc_feature (3)..(3): Xaa can be any naturally occurring amino acid
RDXGRVRGAVGRRLFSGCLADEASQKMSKQQPTQFINPETPGYVGFANLPNQVHRKSVKKGFEFTLMVVGESGLGKSTLINSLFLTDLYPERVIPGAAEKIERTVQIEASTVEIEERGVKLRLTVVDTPGYGDAINCRDCFKTIISYIDEQFERYLHDESGLNRRHIIDNRVHCCFYFISPFGHGLKPLDVAFMKAIHNKVNIVPVIAKADTLTLKERERLKKRILDEIEEHNIKIYHLPDAESDEDEDFKEQTRLLKASIPFSVVGSNQLIEAKGKKVRGRLYPWGVVEVENPEHNDFLKLRTMLITHMQDLQEVTQDLHYENFRSERLKRGGRKVENEDMNKDQILLEKEAELRRMQEMIARMQAQMQMQMQGGDGDGGALGHHV

SEQ ID NO: 893019 - protein, 387 aa, Homo sapiens; identical to SEQ ID NO: 893018
  misc_feature (3)..(3): Xaa can be any naturally occurring amino acid

SEQ ID NO: 893020 - protein, 387 aa, Homo sapiens; identical to SEQ ID NO: 893018
  misc_feature (3)..(3): Xaa can be any naturally occurring amino acid

SEQ ID NO: 893021 - protein, 387 aa, Homo sapiens; identical to SEQ ID NO: 893018
  misc_feature (3)..(3): Xaa can be any naturally occurring amino acid

SEQ ID NO: 893022 - protein, 387 aa, Homo sapiens; identical to SEQ ID NO: 893018
  misc_feature (3)..(3): Xaa can be any naturally occurring amino acid

SEQ ID NO: 893023 - protein, 69 aa, Homo sapiens
PQIVDALHALLDRLQALIGTRFVTTPGLFSVHCSLSVTFLLVSPYGTLQRLPFLSFLLKLGNSTPEIDR

SEQ ID NO: 893024 - protein, 387 aa, Homo sapiens; identical to SEQ ID NO: 893018
  misc_feature (3)..(3): Xaa can be any naturally occurring amino acid

SEQ ID NO: 893025 - protein, 387 aa, Homo sapiens; identical to SEQ ID NO: 893018
  misc_feature (3)..(3): Xaa can be any naturally occurring amino acid

SEQ ID NO: 893026 - protein, 387 aa, Homo sapiens; identical to SEQ ID NO: 893018
  misc_feature (3)..(3): Xaa can be any naturally occurring amino acid

SEQ ID NO: 893027 - protein, 387 aa, Homo sapiens; identical to SEQ ID NO: 893018
  misc_feature (3)..(3): Xaa can be any naturally occurring amino acid

SEQ ID NO: 893028 - protein, 354 aa, Homo sapiens
  misc_feature (3)..(3): Xaa can be any naturally occurring amino acid
RDXGRVRGAVGRRLFSGCLADEASQKMSKQQPTQFINPETPGYVGFANLPNQVHRKSVKKGFEFTLMVVGESGLGKSTLINSLFLTDLYPERVIPGAAEKIERTVQIEASTVEIEERGVKLRLTVVDTPGYGDAINCRDCFKTIISYIDEQFERYLHDESGLNRRHIIDNRVHCCFYFISPFGHGLKPLDVAFMKAIHNKVNIVPVIAKADTLTLKERERLKKRILDEIEEHNIKIYHLPDAESDEDEDFKEQTRLLKASIPFSVVGSNQLIEAKGKKDLQEVTQDLHYENFRSERLKRGGRKVENEDMNKDQILLEKEAELRRMQEMIARMQAQMQMQMQGGDGDGGALGHHV

SEQ ID NO: 893029 - protein, 317 aa, Homo sapiens
  misc_feature (3)..(3): Xaa can be any naturally occurring amino acid
RDXGRVRGAVGRRLFSGCLADEASQKMSKQQPTQFINPETPGYVGFANLPNQVHRKSVKKGFEFTLMVVGESGLGKSTLINSLFLTDLYPERVIPGAAEKIERTVQIEASTVEIEERGVKLRLTVVDTPGYGDAINCRDCFKTIISYIDEQFERYLHDESGLNRRHIIDNRVHCCFYFISPFGHGLKPLDVAFMKAIHNKVNIVPVIAKADTLTLKERERLKKRILDEIEEHNIKIYHLPDAESDEDEDFKEQTRLLKASIPFSVVGSNQLIEAKGKKVRGRLYPWGVVEVENPEHNDFLKLRTMLITHMRKWRMRT

SEQ ID NO: 893030 - protein, 387 aa, Homo sapiens; identical to SEQ ID NO: 893018
  misc_feature (3)..(3): Xaa can be any naturally occurring amino acid

SEQ ID NO: 893031 - protein, 96 aa, Homo sapiens
  misc_feature (3)..(3): Xaa can be any naturally occurring amino acid
RDXGRVRGAVGRRLFSGCLADEASQKMSKQQPTQFINPETPGYVGFANLPNQVHRKSVKKGFEFTLMVVGESGLGKSTLINSLFLCLPGSPDLSFL

SEQ ID NO: 893032 - protein, 387 aa, Homo sapiens; identical to SEQ ID NO: 893018
  misc_feature (3)..(3): Xaa can be any naturally occurring amino acid

SEQ ID NO: 893033 - protein, 387 aa, Homo sapiens; identical to SEQ ID NO: 893018
  misc_feature (3)..(3): Xaa can be any naturally occurring amino acid

SEQ ID NO: 893034 - protein, 387 aa, Homo sapiens; identical to SEQ ID NO: 893018
  misc_feature (3)..(3): Xaa can be any naturally occurring amino acid

SEQ ID NO: 893035 - protein, 387 aa, Homo sapiens; identical to SEQ ID NO: 893018
  misc_feature (3)..(3): Xaa can be any naturally occurring amino acid

SEQ ID NO: 893036 - protein, 185 aa, Homo sapiens
MMEEIDRFQVPTAHSEMQPLDPAAASISDGDCDAREGESVAMNYKPSPLQVKLEKQRELARKGSLKNGSMGSPVNQQPKKNNVMARTRLVVPNKGYSSLDQSPDEKPLVALDTDSDDDFDMSRYSSSGYSSAEQINQDLNIQLLKDGYRLDEIPDDEDLDLIPPKSVNPTCMCCQATSSTACHIQ

SEQ ID NO: 893037 - protein, 168 aa, Homo sapiens
MMEEIDRFQVPTAHSEMQPLDPAAASISDGDCDAREEKQRELARKGSLKNGSMGSPVNQQPKKNNVMARTRLVVPNKGYSSLDQSPDEKPLVALDTDSDDDFDMSRYSSSGYSSAEQINQDLNIQLLKDGYRLDEIPDDEDLDLIPPKSVNPTCMCCQATSSTACHIQ

SEQ ID NO: 893038 - protein, 185 aa, Homo sapiens; identical to SEQ ID NO: 893036

SEQ ID NO: 893039 - protein, 185 aa, Homo sapiens; identical to SEQ ID NO: 893036

SEQ ID NO: 893040 - protein, 185 aa, Homo sapiens; identical to SEQ ID NO: 893036

SEQ ID NO: 893041 - protein, 157 aa, Homo sapiens
MMEEIDRFQVPTAHSEMQPLDPAAASISDGDCDAREGESVAMNYKPSPLQVKLEKQRELARKGSLKNGSMGSPVNQQPKKNNVMARTRLVVPNKGYSSLDQSPDEKPLVALDTDRCVWGLGGSWAAQRNLYSTSGLYRPHLLYCQNWDILQPESLQG

SEQ ID NO: 893042 - protein, 161 aa, Homo sapiens
MMEEIDRFQDPAAASISDGDCDAREEKQRELARKGSLKNGSMGSPVNQQPKKNNVMARTRLVVPNKGYSSLDQSPDEKPLVALDTDSDDKLMNMSRYIAPSGLTPLAEQDSTQDLNIQTARGTATGLRSRIPENEDHRLIPPSQKPTAIVPGRSPRMKSIR

SEQ ID NO: 893043 - protein, 116 aa, Homo sapiens
MGSPVNQQPKKNNVMARTRLVVPNKGYSSLDQSPDEKPLVALDTDSDDDFDMSRYSSSGYSSAEQINQDLNIQLLKDGYRLDEIPDDEDLDLIPPKSVNPTCMCCQATSSTACHIQ

SEQ ID NO: 893044 - protein, 174 aa, Homo sapiens
MMEEIDRFQDPAAASISDGDCDAREGESVAMNYKPSPLQVKLEKQRELARKGSLKNGSMGSPVNQQPKKNNVMARTRLVVPNKGYSSLDQSPDEKPLVALDTDSDDDFDMSRYSSSGYSSAEQINQDLNIQLLKDGYRLDEIPDDEDLDLIPPKSVNPTCMCCQATSSTACHIQ

SEQ ID NO: 893045 - protein, 185 aa, Homo sapiens; identical to SEQ ID NO: 893036

SEQ ID NO: 893046 - protein, 205 aa, Homo sapiens
RESAAVAELLTGGGSGVGGEARPAARPGHSRGSARQAHGVTPASASLRTSRPRPPLHPPGPCPPEWSGEAYVCTTRRAPGAAAPRGPVGVRGRARPLARSPAGTMMEEIDRFQVPTAHSEMQPLDPAAASISDGDCDAREGESVAMNYKPSPLQVKLVWLYRVSVDQDVYTAASAIAGLGEGTGKLRLKIKREEVRKAHPWGWAV

SEQ ID NO: 893047 - protein, 1063 aa, Homo sapiens
PALVCLFSTRAPAAVTWLSGWSLRTQGGFVTGRLETVGTAMAPVLSKDSADIESILALNPRTQTHATLCSTSAKKLDKKHWKRNPDKNCFNCEKLENNFDDIKHTTLGERGALREAMRCLKCADAPCQKSCPTNLDIKSFITSIANKNYYGAAKMIFSDNPLGLTCGMVCPTSDLCVGGCNLYATEEGPINIGGLQQFATEVFKAMSIPQIRNPSLPPPEKMSEAYSAKIALFGAGPASISCASFLARLGYSDITIFEKQEYVGGLSTSEIPQFRLPYDVVNFEIELMKDLGVKIICGKSLSVNEMTLSTLKEKGYKAAFIGIGLPEPNKDAIFQGLTQDQGFYTSKDFLPLVAKGSKAGMCACHSPLPSIRGVVIVLGAGDTAFDCATSALRCGARRVFIVFRKGFVNIRAVPMELAKEEKCEFLPFLSPRKVIVKGGRIVAMQFVRTEQDETGKWNEDEDQMVHLKADVVISAFGSVLSDPKVKEALSPIKFNRWGLPEVDPETMQTSEAWVFAGGDVVGLANTTVESVNDGKQASWYIHKYVQSQYGASVSAKPELPLFYTPIDLVDISVEMAGLKFINPFGLASATPATSTSMIRRAFEAGWGFALTKTFSLDKDIVTNVSPRIIRGTTSGPMYGPGQSSFLNIELISEKTAAYWCQSVTELKADFPDNIVIASIMCSYNKNDWTELAKKSEDSGADALELNLSCPHGMGERGMGLACGQDPELVRNICRWVRQAVQIPFFAKLTPNVTDIVSIARAAKEGGANGVTATNTVSGLMGLKSDGTPWPAVGIAKRTTYGGVSGTAIRPIALRAVTSIARALPGFPILATGGIDSAESGLQFLHSGASVLQVCSAIQNQDFTVIEDYCTGLKALLYLKSIEELQDWDGQSPATVSHQKGKPVPRIAELMDKKLPSFGPYLEQRKKIIAENKIRLKEQNVAFSPLKRNCFIPKRPIPTIKDVIGKALQYLGTFGELSNVEQVVAMIDEEMCINCGKCYMTCNDSGYQAIQFDPETHLPTITDTCTGCTLCLSVCPIVDCIKMVSRTTPYEPKRGVPLSVNPVC

SEQ ID NO: 893048 - protein, 213 aa, Homo sapiens
PALVCLFSTRAPAAVTWLSGWSLRTQGGFVTGRLETVGTAMAPVLSKDSADIESILALNPRTQTHATLCSTSAKKLDKKHWKRNPDKNCFNCEKLENNFDDIKHTTLGERGALREAMRCLKCADAPCQKSCPTNLDIKSFITSIANKNYYGAAKMIFSDNPLGLTCGMVCPTSDLCVGGCNLYATEEGPINIGGLQQFATETLILAFSLMNHL

SEQ ID NO: 893049 - protein, 136 aa, Homo sapiens
MAPVLSKDSADIESILALNPRTQTHATLCSTSAKKLDKKHWKRNPDKNCFKLQGPVPGLRASGSTTVTCHSSSRTSLTQSTMANNTVLCDSRRPLLSYLKVRQESLAYHYELFENTRIQFLLWNRNKCLAIEDRPQ

SEQ ID NO: 893050 - protein, 454 aa, Homo sapiens
PALVCLFSTRAPAAVTWLSGWSLRTQGGFVTGRLETVGTAMAPVLSKDSADIESILALNPRTQTHATLCSTSAKKLDKKHWKRNPDKNCFNCEKLENNFDDIKHTTLGERGALREAMRCLKCADAPCQKSCPTNLDIKSFITSIANKNYYGAAKMIFSDNPLGLTCGMVCPTSDLCVGGCNLYATEEGPINIGGLQQFATEVFKAMSIPQIRNPSLPPPEKMSEAYSAKIALFGAGPASISCASFLARLGYSDITIFEKQEYVGGLSTSEIPQFRLPYDVVNFEIELMKDLGVKIICGKSLSVNEMTLSTLKEKGYKAAFIGIGLPEPNKDAIFQGLTQDQGFYTSKDFLPLVAKGSKAGMCACHSPLPSIRGVVIVLGAGDTAFDCATSALRCGARRVFIVFRKGFVNIRAVPLLWFFLAVRSHKGVELPFGHCLAIIESGKRSVCSTSFIFR

SEQ ID NO: 893051 - protein, 417 aa, Homo sapiens
PALVCLFSTRAPAAVTWLSGWSLRTQGGFVTGRLETVGTAMAPVLSKDSADIESILALNPRTQTHATLCSTSAKKLDKKHWKRNPDKNCFNCEKLENNFDDIKHTTLGERGALREAMRCLKCADAPCQKSCPTNLDIKSFITSIANKNYYGAAKMIFSDNPLGLTCGMVCPTSDLCVGGCNLYATEEGPINIGGLQQFATEVFKAMSIPQIRNPSLPPPEKMSEAYSAKIALFGAGPASISCASFLARLGYSDITIFEKQEYVGGLSTSEIPQFRLPYDVVNFEIELMKDLGVKIICGKSLSVNEMTLSTLKEKGYKAAFIGIGLPEPNKDAIFQGLTQDQGFYTSKDFLPLVAKGSKAGMCACHSPLPSIRGVVIVLGAGDTAFDCATSALRCGARRVFIVFRKGFVNIRAVPSSA

SEQ ID NO: 893052 - protein, 207 aa, Homo sapiens
PALVCLFSTRAPAAVTWLSGWSLRTQGGFVTGRLETVGTAMAPVLSKDSADIESILALNPRTQTHATLCSTSAKKLDKKHWKRNPDKNCFNCEKLENNFDDIKHTTLGERGALREAMRCLKCADAPCQKSCPTNLDIKSFITSIANKNYYGAAKMIFSDNPLGLTCGMVCPTSDLCVGGCNLYATEEGPINIGGLQQFATEVCMIYT

SEQ ID NO: 893053 - protein, 165 aa, Homo sapiens
PALVCLFSTRAPAAVTWLSGWSLRTQGGFVTGRLETVGTAMAPVLSKDSADIESILALNPRTQTHATLCSTSAKKLDKKHWKRNPDKNCFNCEKLENNFDDIKHTTLGERGALREAMRCLKCADAPCQKSCPTNLDIKSFITSIANKMESCSVARLECSGTISAH

SEQ ID NO: 893054 - protein, 1045 aa, Homo sapiens
PALVCLFSTRAPAAVTWLSGWSLRTQGGFVTGRLETVGTAMAPVLSKDSADIESILALNPRTQTHATLCSTSAKKLDKKHWDDIKHTTLGERGALREAMRCLKCADAPCQKSCPTNLDIKSFITSIANKNYYGAAKMIFSDNPLGLTCGMVCPTSDLCVGGCNLYATEEGPINIGGLQQFATEVFKAMSIPQIRNPSLPPPEKMSEAYSAKIALFGAGPASISCASFLARLGYSDITIFEKQEYVGGLSTSEIPQFRLPYDVVNFEIELMKDLGVKIICGKSLSVNEMTLSTLKEKGYKAAFIGIGLPEPNKDAIFQGLTQDQGFYTSKDFLPLVAKGSKAGMCACHSPLPSIRGVVIVLGAGDTAFDCATSALRCGARRVFIVFRKGFVNIRAVPMELAKEEKCEFLPFLSPRKVIVKGGRIVAMQFVRTEQDETGKWNEDEDQMVHLKADVVISAFGSVLSDPKVKEALSPIKFNRWGLPEVDPETMQTSEAWVFAGGDVVGLANTTVESVNDGKQASWYIHKYVQSQYGASVSAKPELPLFYTPIDLVDISVEMAGLKFINPFGLASATPATSTSMIRRAFEAGWGFALTKTFSLDKDIVTNVSPRIIRGTTSGPMYGPGQSSFLNIELISEKTAAYWCQSVTELKADFPDNIVIASIMCSYNKNDWTELAKKSEDSGADALELNLSCPHGMGERGMGLACGQDPELVRNICRWVRQAVQIPFFAKLTPNVTDIVSIARAAKEGGANGVTATNTVSGLMGLKSDGTPWPAVGIAKRTTYGGVSGTAIRPIALRAVTSIARALPGFPILATGGIDSAESGLQFLHSGASVLQVCSAIQNQDFTVIEDYCTGLKALLYLKSIEELQDWDGQSPATVSHQKGKPVPRIAELMDKKLPSFGPYLEQRKKIIAENKIRLKEQNVAFSPLKRNCFIPKRPIPTIKDVIGKALQYLGTFGELSNVEQVVAMIDEEMCINCGKCYMTCNDSGYQAIQFDPETHLPTITDTCTGCTLCLSVCPIVDCIKMVSRTTPYEPKRGVPLSVNPVC

SEQ ID NO: 893055 - protein, 554 aa, Homo sapiens
PIFDIPGRLYPVREKFCNLIGPRDRENTAYIQAIVKVTMDIHLNEMAGDILVFLTGQFEIEKSCELLFQMAESVDYDYDVQDTTLDGLLILPCYGSMTTDQQRRIFLPPPPGIRKCVISTNISATSLTIDGIRYVVDGGFVKQLNHNPRLGLDILEVVPISKSEALQRSGRAGRTSSGKCFRIYSKDFWNQCMPDHVIPEIKRTSLTSVVLTLKCLAIHDVIRFPYLDPPNERLILEALKQLYQCDAIDRSGHVTRLGLSMVEFPLPPHLTCAVIKAASLDCEDLLLPIAAMLSVENVFIRPVDPEYQKEAEQRHRELAAKAGGFNDFATLAVIFEQCKSSGAPASWCQKHWIHWRCLFSAFRVEAQLRELIRKLKQQSDFPKETFEGPKHEVLRRCLCAGYFKNVARRSVGRTFCTMDGRGSPVHIHPSSALHEQETKLEWIIFHEVLVTTKVYARIVCPIRYEWVRDLLPKLHEFNAHDLSSVARREVREDARRRWTNKENVKQLKDGISKDVLKKMQRRNDDKSISDARARFLERKQQRTQDHSDTRKETG

SEQ ID NO: 893056 - protein, 444 aa, Homo sapiens
PIFDIPGRLYPVREKFCNLIGPRDRENTAYIQAIVKVTMDIHLNEMAGDILVFLTGQFEIEKSCELLFQMAESVDYDYDVQDTTLDGLLILPCYGSMTTDQQRRIFLPPPPGIRKCVISTNISATSLTIDGIRYVVDGGFVKQLNHNPRLGLDILEVVPISKSEALQRSGRAGRTSSGKCFRIYSKDFWNQCMPDHVIPEIKRTSLTSVVLTLKCLAIHDVIRFPYLDPPNERLILEALKQLYQCDAIDRSGHVTRLGLSMVEFPLPPHLTCAVIKAASLDCEDLLLPIAAMLSVENVFIRPVDPEYQKEAEQRHRELAAKAGGFNDFATLAVIFEQCKSSGAPASWCQKHWIHWRCLFSAFRVEAQLRELIRKLKQQSDFPKETFEGPKHEVLRRCLCAGYFKNVARRSVGRTFCTMDGRGSPVHIHPSSAVSTSFLIKGRNL

SEQ ID NO: 893057 - protein, 554 aa, Homo sapiens; identical to SEQ ID NO: 893055

SEQ ID NO: 893058 - protein, 510 aa, Homo sapiens
PIFDIPGRLYPVREKFCNLIGPRDRENTAYIQAIVKVTMDIHLNEMAGDILVFLTGQFEIEKSCELLFQMAESVDYDYDVQDTTLDGLLILPCYGSMTTDQQRRIFLPPPPGIRKCVISTNISATSLTIDGIRYVVDGGFVKQLNHNPRLGLDILEVVPISKSEALQRSGRAGRTSSGKCFRIYSKDFWNQCMPDHVIPEIKRTSLTSVVLTLKCLAIHDVIRFPYLDPPNERLILEALKQLYQCDAIDRSGHVTRLGLSMVEFPLPPHLTCAVIKAASLDCEDLLLPIAAMLSVENVFIRPVDPEYQKEAEQRHRELAAKAGGFNDFATLAVIFEQCKSSGAPASWCQKHWIHWRCLFSAFRVEAQLRELIRKLKQQSDFPKETFEGPKHEVLRRCLCAGYFKNVARRSVGRTFCTMDGRGSPVHIHPSSALHEQETKLEWIIFHEVLVTTKVYARIVCPIRYEWVRDLLPKLHEFNAHDLSSVARREVREDARRRWTNKENVKQLKGE

SEQ ID NO: 893059 - protein, 516 aa, Homo sapiens
PIFDIPGRLYPVREKFCNLIGPRDRENTAYIQAIVKVTMDIHLNEMAGDILVFLTGQFEIEKSCELLFQMAESVDYDYDVQDTTLDGLLILPCYGSMTTDQQRRIFLPPPPGIRKCVISTNISATSLTIDGIRYVVDGGFVKQLNHNPRLGLDILEVVPISKSEALQRSGRAGRTSSGKCFRIYSKDFWNQCMPDHVIPEIKRTSLTSVVLTLKCLAIHDVIRFPYLDPPNERLILEALKQLYQCDAIDRSGHVTRLGLSMVEFPLPPHLTCAVIKAASLDCEDLLLPIAAMLSVENVFIRPVDPEYQKEAEQRHRELAAKAGGFNDFATLAVIFEQCKSSGAPASWCQKHWIHWRCLFSAFRVEAQLRELIRKLKQQSDFPKETFEGPKHEVLRRCLCAGYFKNVARRSVGRTFCTMDGRGSPVHIHPSSALHEQETKLEWIIFHEVLVTTKVYARIVCPIRYEWVRDLLPKLHEFNAHDLSSVARREVREDARRRWTNKVTIKQFKDRISRVHH

SEQ ID NO: 893060 - protein, 294 aa, Homo sapiens
MVEFPLPPHLTCAVIKAASLDCEDLLLPIAAMLSVENVFIRPVDPEYQKEAEQRHRELAAKAGGFNDFATLAVIFEQCKSSGAPASWCQKHWIHWRCLFSAFRVEAQLRELIRKLKQQSDFPKETFEGPKHEVLRRCLCAGYFKNVARRSVGRTFCTMDGRGSPVHIHPSSALHEQETKLEWIIFHEVLVTTKVYARIVCPIRYEWVRDLLPKLHEFNAHDLSSVARREVREDARRRWTNKENVKQLKDGISKDVLKKMQRRNDDKSISDARARFLERKQQRTQDHSDTRKETG

SEQ ID NO: 893061 - protein, 444 aa, Homo sapiens; identical to SEQ ID NO: 893056

SEQ ID NO: 893062 - protein, 554 aa, Homo sapiens; identical to SEQ ID NO: 893055

SEQ ID NO: 893063 - protein, 417 aa, Homo sapiens
MPLYEGLGSGGEKTAVVIDLGEAFTKCGFAGETGPRCIIPSVIKRAGMPKPVRVVQYNINTEELYSYLKEFIHILYFRHLLVNPRDRRVVIIESVLCPSHFRETLTRVLFKYFEVPSVLLAPSHLMALLTLGINSAMVLDCGYRESLVLPIYEGIPVLNCWGALPLGGKALHKELETQLLEQCTVDTSVAKEQSLPSVMGSVPEGVLEDIKARTCFVSDLKRGLKIQAAKFNIDGNNERPSPPPNVDYPLDGEKILHILGSIRDSVVEILFEQDNEEQSVATLILDSLIQCPIDTRKQLAENLVVIGGTSMLPGFLHRLLAEIRYLVEKPKYKKALGTKTFRIHTPPAKANCVAWLGGAIFGALQDILGSRSVSKEYYNQTGRIPDWCSLNNPPLEMMFDVGKTQPPLMKRAFSTEK

SEQ ID NO: 893064 - protein, 280 aa, Homo sapiens
MALLTLGINSAMVLDCGYRESLVLPIYEGIPVLNCWGALPLGGKALHKELETQLLEQCTVDTSVAKEQSLPSVMARTCFVSDLKRGLKIQAAKFNIDGNNERPSPPPNVDYPLDGEKILHILGSIRDSVVEILFEQDNEEQSVATLILDSLIQCPIDTRKQLAENLVVIGGTSMLPGFLHRLLAEIRYLVEKPKYKKALGTKTFRIHTPPAKANCVAWLGGAIFGALQDILGSRSVSKEYYNQTGRIPDWCSLNNPPLEMMFDVGKTQPPLMKRAFSTEK

SEQ ID NO: 893065 - protein, 265 aa, Homo sapiens
MPLYEGLGSGGEKTAVVIDLGEAFTKCGFAGETGPRCIIPSVIKRAGMPKPVRVVQYNINTEELYSYLKEFIHILYFRHLLVNPRDRRVVIIESVLCPSHFRETLTRVLFKYFEVPSVLLAPSHLMALLTLGINSAMVLDCGYRESLVLPIYEGIPVLNCWGALPLGGKALHKELETQLLEQCTVDTSVAKEQSLPSVMGSVPEGVLEDIKARTCFVSDLKRGLKIQAAKFNIDGNNERPSPPPNVDYPLDGEKILHILGSISVR

SEQ ID NO: 893066 - protein, 392 aa, Homo sapiens
MCGFAGETGPRCIIPSVIKRAGMPKPVRVVQYNINTEELYSYLKEFIHILYFRHLLVNPRDRRVVIIESVLCPSHFRETLTRVLFKYFEVPSVLLAPSHLMALLTLGINSAMVLDCGYRESLVLPIYEGIPVLNCWGALPLGGKALHKELETQLLEQCTVDTSVAKEQSLPSVMGSVPEGVLEDIKARTCFVSDLKRGLKIQAAKFNIDGNNERPSPPPNVDYPLDGEKILHILGSIRDSVVEILFEQDNEEQSVATLILDSLIQCPIDTRKQLAENLVVIGGTSMLPGFLHRLLAEIRYLVEKPKYKKALGTKTFRIHTPPAKANCVAWLGGAIFGALQDILGSRSVSKEYYNQTGRIPDWCSLNNPPLEMMFDVGKTQPPLMKRAFSTEK

SEQ ID NO: 893067 - protein, 292 aa, Homo sapiens
MALLTLGINSAMVLDCGYRESLVLPIYEGIPVLNCWGALPLGGKALHKELETQLLEQCTVDTSVAKEQSLPSVMGSVPEGVLEDIKARTCFVSDLKRGLKIQAAKFNIDGNNERPSPPPNVDYPLDGEKILHILGSIRDSVVEILFEQDNEEQSVATLILDSLIQCPIDTRKQLAENLVVIGGTSMLPGFLHRLLAEIRYLVEKPKYKKALGTKTFRIHTPPAKANCVAWLGGAIFGALQDILGSRSVSKEYYNQTGRIPDWCSLNNPPLEMMFDVGKTQPPLMKRAFSTEK

SEQ ID NO: 893068 - protein, 384 aa, Homo sapiens
MMSNVNLRAALPPNLSRIGTGISFVHTCNHIVIYKMKCIEDAILQHLLVNPRDRRVVIIESVLCPSHFRETLTRVLFKYFEVPSVLLAPSHLMALLTLGINSAMVLDCGYRESLVLPIYEGIPVLNCWGALPLGGKALHKELETQLLEQCTVDTSVAKEQSLPSVMGSVPEGVLEDIKARTCFVSDLKRGLKIQAAKFNIDGNNERPSPPPNVDYPLDGEKILHILGSIRDSVVEILFEQDNEEQSVATLILDSLIQCPIDTRKQLAENLVVIGGTSMLPGFLHRLLAEIRYLVEKPKYKKALGTKTFRIHTPPAKANCVAWLGGAIFGALQDILGSRSVSKEYYNQTGRIPDWCSLNNPPLEMMFDVGKTQPPLMKRAFSTEK

SEQ ID NO: 893069 - protein, 219 aa, Homo sapiens
MGSVPEGVLEDIKARTCFVSDLKRGLKIQAAKFNIDGNNERPSPPPNVDYPLDGEKILHILGSIRDSVVEILFEQDNEEQSVATLILDSLIQCPIDTRKQLAENLVVIGGTSMLPGFLHRLLAEIRYLVEKPKYKKALGTKTFRIHTPPAKANCVAWLGGAIFGALQDILGSRSVSKEYYNQTGRIPDWCSLNNPPLEMMFDVGKTQPPLMKRAFSTEK

SEQ ID NO: 893070 - protein, 325 aa, Homo sapiens
MPLYEGLGSGGEKTAVVIDLGEAFTKCGFAGETGPRCIIPSVIKRAGMPKPVRVVQYNINTEELYSYLKEFIHILYFRHLLVNPRDRRVVIIESVLCPSHFRETLTRVLFKYFEVPSVLLAPSHLMALLTLGINSAMVLDCGYRESLVLPIYEGIPVLNCWGALPLGGKALHKELETQLLEQCTVDTSVAKEQSLPSVMGSVPEGVLEDIKARTCFVSDLKRGLKIQAAKFNIDGNNERPSPPPNVDYPLDGEKILHILGSIRDSVVEILFEQDNEEQSVATLILDSLIQCPIDTRKQLAENLEMMFDVGKTQPPLMKRAFSTEK

SEQ ID NO: 893071 - protein, 191 aa, Homo sapiens
MCGLMFMIFIFQRPSPPPNVDYPLDGEKILHILGSIRDSVVEILFEQDNEEQSVATLILDSLIQCPIDTRKQLAENLVVIGGTSMLPGFLHRLLAEIRYLVEKPKYKKALGTKTFRIHTPPAKANCVAWLGGAIFGALQDILGSRSVSKEYYNQTGRIPDWCSLNNPPLEMMFDVGKTQPPLMKRAFSTEK

SEQ ID NO: 893072 - protein, 263 aa, Homo sapiens
MPLYEGLGSGGEKTAVVIDLGEAFTKCGFAGETGPRCIIPSVIKRAGMPKPVRVVQYNINTEELYSYLKEFIHILYFRHLLVNPRDRRVVIIESVLCPSHFRETLTRVLFKYFEVPSVLLAPSHLMALLTLGINSAMVLDCGYRESLVLPIYEGIPVLNCWGALPLGGKALHKELETQLLEQCTVDTSVAKEQSLPSVMGSVPEGVLEDIKARTCFVSDLKRGLKIQAAKFNIDGNNERPSPPTTESLIDPRICKIFSPSNVD

SEQ ID NO: 893073 - protein, 81 aa, Homo sapiens
VAEPQALPGSSSPTRWAAPGLPFSSTSALANNSSYYFLPGRCESEDRGLTPREAQKASVELPSSPPLVITPNPTNPLGSSV

SEQ ID NO: 893074 - protein, 417 aa, Homo sapiens; identical to SEQ ID NO: 893063

SEQ ID NO: 893075 - protein, 159 aa, Homo sapiens
MGIMRDSVVEILFEQDNEEQSVATLILDSLIQCPIDTRKQLAENLVVIGGTSMLPGFLHRLLAEIRYLVEKPKYKKALGTKTFRIHTPPAKANCVAWLGGAIFGALQDILGSRSVSKEYYNQTGRIPDWCSLNNPPLEMMFDVGKTQPPLMKRAFSTEK

SEQ ID NO: 893076 - protein, 370 aa, Homo sapiens [sequence omitted]

SEQ ID NO: 893077 - protein, 399 aa, Homo sapiens
MPLYEGLGSGGEKTAVVIDLGEAFTKCGFAGETGPRCIIPSVIEELYSYLKEFIHILYFRHLLVNPRDRRVVIIESVLCPSHFRETLTRVLFKYFEVPSVLLAPSHLMALLTLGINSAMVLDCGYRESLVLPIYEGIPVLNCWGALPLGGKALHKELETQLLEQCTVDTSVAKEQSLPSVMGSVPEGVLEDIKARTCFVSDLKRGLKIQAAKFNIDGNNERPSPPPNVDYPLDGEKILHILGSIRDSVVEILFEQDNEEQSVATLILDSLIQCPIDTRKQLAENLVVIGGTSMLPGFLHRLLAEIRYLVEKPKYKKALGTKTFRIHTPPAKANCVAWLGGAIFGALQDILGSRSVSKEYYNQTGRIPDWCSLNNPPLEMMFDVGKTQPPLMKRAFSTEK

SEQ ID NO: 893078 - protein, 402 aa, Homo sapiens
MPLYEGLGSGGEKTAVVIDLGEAFTKCGFAGETGPRCIIPSVIKRAGMPKPVRVVQYNINTEELYSYLKEFIHILYFRHLLVNPRDRRVVIIESVLCPSHFRETLTRVLFKYFEVPSVLLAPSHLMALLTLGINSAMVLDCGYRESLVLPIYEGIPVLNCWGALPLGGKALHNVAKEQSLPSVMGSVPEGVLEDIKARTCFVSDLKRGLKIQAAKFNIDGNNERPSPPPNVDYPLDGEKILHILGSIRDSVVEILFEQDNEEQSVATLILDSLIQCPIDTRKQLAENLVVIGGTSMLPGFLHRLLAEIRYLVEKPKYKKALGTKTFRIHTPPAKANCVAWLGGAIFGALQDILGSRSVSKEYYNQTGRIPDWCSLNNPPLEMMFDVGKTQPPLMKRAFSTEK

SEQ ID NO: 893079 - protein, 219 aa, Homo sapiens; identical to SEQ ID NO: 893069

SEQ ID NO: 893080 - protein, 191 aa, Homo sapiens; identical to SEQ ID NO: 893071

SEQ ID NO: 893081 - protein, 126 aa, Homo sapiens
MPLYEGLGSGGEKTAVVIDLGEAFTKCGFAGETGPRCIIPSVIKRAGMPKPVRVVQYNINTEELYSYLKEFIHILYFRHLLVNPRDRRVVIIESVLCPSHFRETLTRVLFKYFERVGNSTIGTMYC

SEQ ID NO: 893082 - protein, 345 aa, Homo sapiens
MSLFGLLLLTSALAGQRQGTQAESNLSSKFQFSSNKEQNGVQDPQHERIITVSTNGSIHSPRFPHTYPRNTVLVWRLVAVEENVWIQLTFDERFGLEDPEDDICKYDFVEVEEPSDGTILGRWCGSGTVPGKQISKGNQIRIRFVSDEYFPSEPGFCIHYNIVMPQFTEAVSPSVLPPSALPLDLLNNAITAFSTLEDLIRYLEPERWQLDLEDLYRPTWQLLGKAFVFGRKSRVVDLNLLTEEVRLYSCTPRNFSVSIREELKRTDTIFWPGCLLVKRCGGNCACCLHNCNECQCVPSKVTKKYHEVLQLRPKTGVRGLHKSLTDVALEHHEECDCVCRGSTGG

SEQ ID NO: 893083 - protein, 182 aa, Homo sapiens
MPQFTEAVSPSVLPPSALPLDLLNNAITAFSTLEDLIRYLEPERWQLDLEDLYRPTWQLLGKAFVFGRKSRVVDLNLLTEEVRLYSCTPRNFSVSIREELKRTDTIFWPGCLLVKRCGGNCACCLHNCNECQCVPSKVTKKYHEVLQLRPKTGVRGLHKSLTDVALEHHEECDCVCRGSTGG

SEQ ID NO: 893084 - protein, 131 aa, Homo sapiens
ILAHLICVKKYPFFQFTEAVSPSVLPPSALPLDLLNNAITAFSTLEDLIRYLEPERWQLDLEDLYRPTWQLLGKAFVFGRKSRVVDLNLLTEEVVSWLNAVVGTVPVVSTIAMNVNVSQAKLLKNTTRSFS

SEQ ID NO: 893085 - protein, 345 aa, Homo sapiens; identical to SEQ ID NO: 893082

SEQ ID NO: 893086 - protein, 182 aa, Homo sapiens; identical to SEQ ID NO: 893083

SEQ ID NO: 893087 - protein, 142 aa, Homo sapiens
MPQFTEAVSPSVLPPSALPLDLLNNAITAFSTLEDLIRYLEPERWQLDLEDLYRPTWQLLGKAFVFGRKSRGDNYEKEKNLKTNFYKYLAEGNFFNIIIVKLFKKYPLVHYLSFFFSFFSLFAFPPQKYYTMFQECMTYDLT

SEQ ID NO: 893088 - protein, 411 aa, Homo sapiens
MAEAELHKERLQAIAEKRKRQTEIEGKRQQLDEQILLLQHSKSKVLREKWLLQGIPAGTAEEEEARRRQSEEDEFRVKQLEDNIQRLEQEIQTLESEESQISAKEQIILEKLKETEKSFKDFQKGFSSTDGDAVNYISSQLPDLPILCSRTAEPSPGQDGTSRAAAVYAMEINVEKDKQTGETKILSTSTIGPEGVHQKGVKVYDDGTKVVYEVRSGGTVVENGVHKLSTKDVEELIQKAGQSSLGGGHVSERTVIADGSLSHPKEHMLCKEAKLEMVHKSRKDHSSGNPGQQAQAPSAAGPEANLDQPVTMIFMGYQNIEDEEETKKVLGYDETIKAELVLIDEDDEKSLREKTVTDVSTIDGNAAELVSGRPVSDTTEPSSPEGKEESLATEPAPGTQKKKRCQCCVVM

SEQ ID NO: 893089 - protein, 1103 aa, Homo sapiens
MAEAELHKERLQAIAEKRKRQTEIEGKRQQLDEQILLLQHSKSKVLREKWLLQGIPAGTAEEEEARRRQSEEDEFRVKQLEDNIQRLEQEIQTLESEESQISAKEQIILEKLKETEKSFKDFQKGFSSTDGDAVNYISSQLPDLPILCSRTAEPSPGQDGTSRAAGVGWENVLLKEGESASNATETSGPDMTIKKPPQLSEDDIWLKSEGDNYSATLLEPAASSLSPDHKNMEIEVSVAECKSVPGITSTPHPMDHPSAFYSPPHNGLLTDHHESLDNDVAREIRYLDEVLEANCCDSAVDGTYNGTSSPEPGAVVLVGGLSPPVHEATQPEPTERTASRQAPPHIELSNSSPDPMAEAERTNGHSPSQPRDALGDSLQVPVSPSSTTSSRCSSRDGEFTLTTLKKEAKFELRAFHEDKKPSKLFEDDEHEKEQYCIRKVRPSEEMLELEKERRELIRSQAVKKNPGIAAKWWNPPQEKTIEEQLDEEHLESHKKYKERKERRAQQEQLLLQKQLQQQQQQPPSQLCTAPASSHERASMIDKAKEDIVTEQIDFSAARKQFQLMENSRQAVAKGQSTPRLFSIKPFYRPLGSVNSDKPLTNPRPPSVGGPPEDSGASAAKGQKSPGALETPSAAGSQGNTASQGKEGPYSEPSKRGPLSKLWAEDGEFTSARAVLTVVKDDDHGILDQFSRSVNVSLTQEELDSGLDELSVRSQDTTVLETLSNDFSMDNISDSGASNETTNALQENSLADFSLPQTPQTDNPSEGRGEGVSKSFSDHGFYSPSSTLGDSPLVDDPLEYQAGLLVQNAIQQAIAEQVDKAVSKTSRDGAEQQGPEATVEEAEAAAFGSEKPQSMFEPPQVSSPVQEKRDVLPKILPAEDRALRERGPPQPLPAVQPSGPINMEETRPEGSYFSKYSEAAELRSTASLLATQESDVMVGPFKLRSRKQRTLSMIEEEIRAAQEREEELKRQRQVLQSTQSPRTKNAPSLPSRTCYKTAPGKIEKVKPPPSPTTEGPSLQPDLAPEEAAGTQRPKNLMQTLMEDYETHKSKRRERMDDSSYTSKLLSCKVTSEVLEATRVNRRKSALALRWEAGIYANQEEEDNE

SEQ ID NO: 893090 - protein, 980 aa, Homo sapiens
EGKRGGGEGAGPRSRRAGLPALQRARRLPLPADALAPARGCRSPSPGVSWTPGVSWTPGAGGSGARRWTGAEPQDCAPGSGRPEKPPQLSEDDIWLKSEGDNYSATLLEPAASSLSPDHKNMEIEVSVAECKSVPGITSTPHPMDHPSAFYSPPHNGLLTDHHESLDNDVAREIRYLDEVLEANCCDSAVDGTYNGTSSPEPGAVVLVGGLSPPVHEATQPEPTERTASRQAPPHIELSNSSPDPMAEAERTNGHSPSQPRDALGDSLQVPVSPSSTTSSRCSSRDGEFTLTTLKKEAKFELRAFHEDKKPSKLFEDDEHEKEQYCIRKVRPSEEMLELEKERRELIRSQAVKKNPGIAAKWWNPPQEKTIEEQLDEEHLESHKKYKERKERRAQQEQLLLQKQLQQQQQQPPSQLCTAPASSHERASMIDKAKEDIVTEQIDFSAARKQFQLMENSRQAVAKGQSTPRLFSIKPFYRPLGSVNSDKPLTNPRPPSVGGPPEDSGASAAKGQKSPGALETPSAAGSQGNTASQGKEGPYSEPSKRGPLSKLWAEDGEFTSARAVLTVVKDDDHGILDQFSRSVNVSLTQEELDSGLDELSVRSQDTTVLETLSNDFSMDNISDSGASNETTNALQENSLADFSLPQTPQTDNPSEGRGEGVSKSFSDHGFYSPSSTLGDSPLVDDPLEYQAGLLVQNAIQQAIAEQVDKAVSKTSRDGAEQQGPEATVEEAEAAAFGSEKPQSMFEPPQVSSPVQEKRDVLPKILPAEDRALRERGPPQPLPAVQPSGPINMEETRPEGSYFSKYSEAAELRSTASLLATQESDVMVGPFKLRSRKQRTLSMIEEEIRAAQEREEELKRQRQVLQSTQSPRTKNAPSLPSRTCYKTAPGKIEKVKPPPSPTTEGPSLQPDLAPEEAAGTQRPKNLMQTLMEDYETHKSKRRERMDDSSVLEATRVNRRKSALALRWEAGIYANQEEEDNE

SEQ ID NO: 893091 - protein, 922 aa, Homo sapiens
SQGARRNLSGKRQFSLRRFEARALGRKPPQLSEDDIWLKSEGDNYSATLLEPAASSLSPDHKNMEIEVSVAECKSVPGITSTPHPMDHPSAFYSPPHNGLLTDHHESLDNDVAREIRYLDEVLEANCCDSAVDGTYNGTSSPEPGAVVLVGGLSPPVHEATQPEPTERTASRQAPPHIELSNSSPDPMAEAERTNGHSPSQPRDALGDSLQVPVSPSSTTSSRCSSRDGEFTLTTLKKEAKFELRAFHEDKKPSKLFEDDEHEKEQYCIRKVRPSEEMLELEKERRELIRSQAVKKNPGIAAKWWNPPQEKTIEEQLDEEHLESHKKYKERKERRAQQEQLLLQKQLQQQQQQPPSQLCTAPASSHERASMIDKAKEDIVTEQIDFSAARKQFQLMENSRQAVAKGQSTPRLFSIKPFYRPLGSVNSDKPLTNPRPPSVGGPPEDSGASAAKGQKSPGALETPSAAGSQGNTASQGKEGPYSEPSKRGPLSKLWAEDGEFTSARAVLTVVKDDDHGILDQFSRSVNVSLTQEELDSGLDELSVRSQDTTVLETLSNDFSMDNISDSGASNETTNALQENSLADFSLPQTPQTDNPSEGRGEGVSKSFSDHGFYSPSSTLGDSPLVDDPLEYQAGLLVQNAIQQAIAEQVDKAVSKTSRDGAEQQGPEATVEEAEAAAFGSEKPQSMFEPPQVSSPVQEKRDVLPKILPAEDRALRERGPPQPLPAVQPSGPINMEETRPEGSYFSKYSEAAELRSTASLLATQESDVMVGPFKLRSRKQRTLSMIEEEIRAAQEREEELKRQRQVLQSTQSPRTKNAPSLPSRTCYKTAPGKIEKVKPPPSPTTEGPSLQPDLAPEEAAGTQRPKNLMQTLMEDYETHKSKRRERMDDSSVLEATRVNRRKSALALRWEAGIYANQEEEDNE

SEQ ID NO: 893092 - protein, 924 aa, Homo sapiens
MTGPGFSCNRGAWPTTHMRRFEARALGRKPPQLSEDDIWLKSEGDNYSATLLEPAASSLSPDHKNMEIEVSVAECKSVPGITSTPHPMDHPSAFYSPPHNGLLTDHHESLDNDVAREIRYLDEVLEANCCDSAVDGTYNGTSSPEPGAVVLVGGLSPPVHEATQPEPTERTASRQAPPHIELSNSSPDPMAEAERTNGHSPSQPRDALGDSLQVPVSPSSTTSSRCSSRDGEFTLTTLKKEAKFELRAFHEDKKPSKLFEDDEHEKEQYCIRKVRPSEEMLELEKERRELIRSQAVKKNPGIAAKWWNPPQEKTIEEQLDEEHLESHKKYKERKERRAQQEQLLLQKQLQQQQQQPPSQLCTAPASSHERASMIDKAKEDIVTEQIDFSAARKQFQLMENSRQAVAKGQSTPRLFSIKPFYRPLGSVNSDKPLTNPRPPSVGGPPEDSGASAAKGQKSPGALETPSAAGSQGNTASQGKEGPYSEPSKRGPLSKLWAEDGEFTSARAVLTVVKDDDHGILDQFSRSVNVSLTQEELDSGLDELSVRSQDTTVLETLSNDFSMDNISDSGASNETTNALQENSLADFSLPQTPQTDNPSEGRGEGVSKSFSDHGFYSPSSTLGDSPLVDDPLEYQAGLLVQNAIQQAIAEQVDKAVSKTSRDGAEQQGPEATVEEAEAAAFGSEKPQSMFEPPQVSSPVQEKRDVLPKILPAEDRALRERGPPQPLPAVQPSGPINMEETRPEGSYFSKYSEAAELRSTASLLATQESDVMVGPFKLRSRKQRTLSMIEEEIRAAQEREEELKRQRQVLQSTQSPRTKNAPSLPSRTCYKTAPGKIEKVKPPPSPTTEGPSLQPDLAPEEAAGTQRPKNLMQTLMEDYETHKSKRRERMDDSSVLEATRVNRRKSALALRWEAGIYANQEEEDNE

SEQ ID NO: 893093 - protein, 355 aa, Homo sapiens
ARSPSFLSHEENSLADFSLPQTPQTDNPSEGRGEGVSKSFSDHGFYSPSSTLGDSPLVDDPLEYQAGLLVQNAIQQAIAEQVDKAVSKTSRDGAEQQGPEATVEEAEAAAFGSEKPQSMFEPPQVSSPVQEKRDVLPKILPAEDRALRERGPPQPLPAVQPSGPINMEETRPEGSYFSKYSEAAELRSTASLLATQESDVMVGPFKLRSRKQRTLSMIEEEIRAAQEREEELKRQRQVLQSTQSPRTKNAPSLPSRTCYKTAPGKIEKVKPPPSPTTEGPSLQPDLAPEEAAGTQRPKNLMQTLMEDYETHKSKRRERMDDSSVLEATRVNRRKSALALRWEAGIYANQEEEDNE

SEQ ID NO: 893094 - protein, 1237 aa, Homo sapiens
MAEAELHKERLQAIAEKRKRQTEIEGKRQQLDEQILLLQHSKSKVLREKWLLQGIPAGTAEEEEARRRQSEEDEFRVKQLEDNIQRLEQEIQTLESEESQISAKEQIILEKLKETEKSFKDFQKGFSSTDGDAVNYISSQLPDLPILCSRTAEPSPGQDGTSRAAAVYAMEINVEKDKQTGETKILSTSTIGPEGVHQKGVKVYDDGTKVVYEVRSGGTVVENGVHKLSTKDVEELIQKAGQSSLGGGHVSERTVIADGSLSHPKEHMLCKEAKLEMVHKSRKDHSSGNPGQQAQAPSAAGPEANLDQPVTMIFMGYQNIEDEEETKKVLGYDETIKAELVLIDEDDEKSLREKTVTDVSTIDGNAAELVSGRPVSDTTEPSSPEGKEESLATEPAPGVGWENVLLKEGESASNATETSGPDMTIKKPPQLSEDDIWLKSEGDNYSATLLEPAASSLSPDHKNMEIEVSVAECKSVPGITSTPHPMDHPSAFYSPPHNGLLTDHHESLDNDVAREIRYLDEVLEANCCDSAVDGTYNGTSSPEPGAVVLVGGLSPPVHEATQPEPTERTASRQAPPHIELSNSSPDPMAEAERTNGHSPSQPRDALGDSLQVPVSPSSTTSSRCSSRDGEFTLTTLKKEAKFELRAFHEDKKPSKLFEDDEHEKEQYCIRKVRPSEEMLELEKERRELIRSQAVKKNPGIAAKWWNPPQEKTIEEQLDEEHLESHKKYKERKERRAQQEQLLLQKQLQQQQQQPPSQLCTAPASSHERASMIDKAKEDIVTEQIDFSAARKQFQLMENSRQAVAKGQSTPRLFSIKPFYRPLGSVNSDKPLTNPRPPSVGGPPEDSGASAAKGQKSPGALETPSAAGSQGNTASQGKEGPYSEPSKRGPLSKLWAEDGEFTSARAVLTVVKDDDHGILDQFSRSVNVSLTQEELDSGLDELSVRSQDTTVLETLSNDFSMDNISDSGASNETTNALQENSLADFSLPQTPQTDNPSEGRGEGVSKSFSDHGFYSPSSTLGDSPLVDDPLEYQAGLLVQNAIQQAIAEQVDKAVSKTSRDGAEQQGPEATVEEAEAAAFGSEKPQSMFEPPQVSSPVQEKRDVLPKILPAEDRALRERGPPQPLPAVQPSGPINMEETRPEGSYFSKYSEAAELRSTASLLATQESDVMVGPFKLRSRKQRTLSMIEEEIRAAQEREEELKRQRQVLQSTQSPRTKNAPSLPSRTCYKTAPGPRGHTG

SEQ ID NO: 893095 - protein, 114 aa, Homo sapiens
TLSQCCVKKEVIEGGPGLGMSSGKIEKVKPPPSPTTEGPSLQPDLAPEEAAGTQRPKNLMQTLMEDYETHKSKRRERMDDSSVLEATRVNRRKSALALRWEAGIYANQEEEDNE

SEQ ID NO: 893096 - protein, 1103 aa, Homo sapiens; identical to SEQ ID NO: 893089

SEQ ID NO: 893097 - protein, 1322 aa, Homo sapiens
MAEAELHKERLQAIAEKRKRQTEIEGKRQQLDEQILLLQHSKSKVLREKWLLQGIPAGTAEEEEARRRQSEEDEFRVKQLEDNIQRLEQEIQTLESEESQISAKEQIILEKLKETEKSFKDFQKGFSSTDGDAVNYISSQLPDLPILCSRTAEPSPGQDGTSRAAAVYAMEINVEKDKQTGETKILSTSTIGPEGVHQKGVKVYDDGTKVVYEVRSGGTVVENGVHKLSTKDVEELIQKAGQSSLGGGHVSERTVIADGSLSHPKEHMLCKEAKLEMVHKSRKDHSSGNPGQQAQAPSAAGPEANLDQPVTMIFMGYQNIEDEEETKKVLGYDETIKAELVLIDEDDEKSLREKTVTDVSTIDGNAAELVSGRPVSDTTEPSSPEGKEESLATEPAPGVGWENVLLKEGESASNATETSGPDMTIKKPPQLSEDDIWLKSEGDNYSATLLEPAASSLSPDHKNMEIEVSVAECKSVPGITSTPHPMDHPSAFYSPPHNGLLTDHHESLDNDVAREIRYLDEVLEANCCDSAVDGTYNGTSSPEPGAVVLVGGLSPPVHEATQPEPTERTASRQAPPHIELSNSSPDPMAEAERTNGHSPSQPRDALGDSLQVPVSPSSTTSSRCSSRDGEFTLTTLKKEAKFELRAFHEDKKPSKLFEDDEHEKEQYCIRKVRPSEEMLELEKERRELIRSQAVKKNPGIAAKWWNPPQEKTIEEQLDEEHLESHKKYKERKERRAQQEQLLLQKQLQQQQQQPPSQLCTAPASSHERASMIDKAKEDIVTEQIDFSAARKQFQLMENSRQAVAKGQSTPRLFSIKPFYRPLGSVNSDKPLTNPRPPSVGGPPEDSGASAAKGQKSPGALETPSAAGSQGNTASQGKEGPYSEPSKRGPLSKLWAEDGEFTSARAVLTVVKDDDHGILDQFSRSVNVSLTQEELDSGLDELSVRSQDTTVLETLSNDFSMDNISDSGASNETTNALQENSLADFSLPQTPQTDNPSEGRGEGVSKSFSDHGFYSPSSTLGDSPLVDDPLEYQAGLLVQNAIQQAIAEQVDKAVSKTSRDGAEQQGPEATVEEAEAAAFGSEKPQSMFEPPQVSSPVQEKRDVLPKILPAEDRALRERGPPQPLPAVQPSGPINMEETRPEGSYFSKYSEAAELRSTASLLATQESDVMVGPFKLRSRKQRTLSMIEEEIRAAQEREEELKRQRQVLQSTQSPRTKNAPSLPSRTCYKTAPGKIEKVKPPPSPTTEGPSLQPDLAPEEAAGTQRPKNLMQTLMEDYETHKSKRRERMDDSSVLEATRVNRRKSALALRWEAGIYANQEEEDNE

SEQ ID NO: 893098 - protein, 1288 aa, Homo sapiens
MAEAELHKERLQAIAEKRKRQTEIEGKRQQLDEQILLLQHSKSKVLREKWLLQGIPAGTAEEEEARRRQSEEDEFRVKQLEDNIQRLEQEIQTLESEESQISAKEQIILEKLKETEKSFKDFQKGFSSTDGAVYAMEINVEKDKQTGETKILSTSTIGPEGVHQKGVKVYDDGTKVVYEVRSGGTVVENGVHKLSTKDVEELIQKAGQSSLGGGHVSERTVIADGSLSHPKEHMLCKEAKLEMVHKSRKDHSSGNPGQQAQAPSAAGPEANLDQPVTMIFMGYQNIEDEEETKKVLGYDETIKAELVLIDEDDEKSLREKTVTDVSTIDGNAAELVSGRPVSDTTEPSSPEGKEESLATEPAPGVGWENVLLKEGESASNATETSGPDMTIKKPPQLSEDDIWLKSEGDNYSATLLEPAASSLSPDHKNMEIEVSVAECKSVPGITSTPHPMDHPSAFYSPPHNGLLTDHHESLDNDVAREIRYLDEVLEANCCDSAVDGTYNGTSSPEPGAVVLVGGLSPPVHEATQPEPTERTASRQAPPHIELSNSSPDPMAEAERTNGHSPSQPRDALGDSLQVPVSPSSTTSSRCSSRDGEFTLTTLKKEAKFELRAFHEDKKPSKLFEDDEHEKEQYCIRKVRPSEEMLELEKERRELIRSQAVKKNPGIAAKWWNPPQEKTIEEQLDEEHLESHKKYKERKERRAQQEQLLLQKQLQQQQQQPPSQLCTAPASSHERASMIDKAKEDIVTEQIDFSAARKQFQLMENSRQAVAKGQSTPRLFSIKPFYRPLGSVNSDKPLTNPRPPSVGGPPEDSGASAAKGQKSPGALETPSAAGSQGNTASQGKEGPYSEPSKRGPLSKLWAEDGEFTSARAVLTVVKDDDHGILDQFSRSVNVSLTQEELDSGLDELSVRSQDTTVLETLSNDFSMDNISDSGASNETTNALQENSLADFSLPQTPQTDNPSEGRGEGVSKSFSDHGFYSPSSTLGDSPLVDDPLEYQAGLLVQNAIQQAIAEQVDKAVSKTSRDGAEQQGPEATVEEAEAAAFGSEKPQSMFEPPQVSSPVQEKRDVLPKILPAEDRALRERGPPQPLPAVQPSGPINMEETRPEGSYFSKYSEAAELRSTASLLATQESDVMVGPFKLRSRKQRTLSMIEEEIRAAQEREEELKRQRQVLQSTQSPRTKNAPSLPSRTCYKTAPGKIEKVKPPPSPTTEGPSLQPDLAPEEAAGTQRPKNLMQTLMEDYETHKSKRRERMDDSSVLEATRVNRRKSALALRWEAGIYANQEEEDNE

SEQ ID NO: 893099 - protein, 859 aa, Homo sapiens
MEIEVSVAECKSVPGITSTPHPMDHPSAFYSPPHNGLLTDHHESLDNDVAREIRYLDEVLEANCCDSAVDGTYNGTSSPEPGAVVLVGGLSPPVHEATQPEPTERTASRQAPPHIELSNSSPDPMAEAERTNGHSPSQPRDALGDSLQVPVSPSSTTSSRCSSRDGEFTLTTLKKEAKFELRAFHEDKKPSKLFEDDEHEKEQYCIRKVRPSEEMLELEKERRELIRSQAVKKNPGIAAKWWNPPQEKTIEEQLDEEHLESHKKYKERKERRAQQEQLLLQKQLQQQQQQPPSQLCTAPASSHERASMIDKAKEDIVTEQIDFSAARKQFQLMENSRQAVAKGQSTPRLFSIKPFYRPLGSVNSDKPLTNPRPPSVGGPPEDSGASAAKGQKSPGALETPSAAGSQGNTASQGKEGPYSEPSKRGPLSKLWAEDGEFTSARAVLTVVKDDDHGILDQFSRSVNVSLTQEELDSGLDELSVRSQDTTVLETLSNDFSMDNISDSGASNETTNALQENSLADFSLPQTPQTDNPSEGRGEGVSKSFSDHGFYSPSSTLGDSPLVDDPLEYQAGLLVQNAIQQAIAEQVDKAVSKTSRDGAEQQGPEATVEEAEAAAFGSEKPQSMFEPPQVSSPVQEKRDVLPKILPAEDRALRERGPPQPLPAVQPSGPINMEETRPEGSYFSKYSEAAELRSTASLLATQESDVMVGPFKLRSRKQRTLSMIEEEIRAAQEREEELKRQRQVLQSTQSPRTKNAPSLPSRTCYKTAPGKIEKVKPPPSPTTEGPSLQPDLAPEEAAGTQRPKNLMQTLMEDYETHKSKRRERMDDSSVLEATRVNRRKSALALRWEAGIYANQEEEDNE

SEQ ID NO: 893100 - protein, 1103 aa, Homo sapiens; identical to SEQ ID NO: 893089

SEQ ID NO: 893101 - protein, 99 aa, Homo sapiens
NMLQNCSRKIEKVKPPPSPTTEGPSLQPDLAPEEAAGTQRPKNLMQTLMEDYETHKSKRRERMDDSSVLEATRVNRRKSALALRWEAGIYANQEEEDNE

SEQ ID NO: 893102 - protein, 823 aa, Homo sapiens
MFYVIGGITVSVVAFFFTIKFLFELAARVVSFLQNEDRERRGDRTIYDYVRGNYLDPRSCKVSWDWKDPYEVGHSMAFRVHLFYKNGQPFPAHRPVGLRVHISHVELAVEIPVTQEVLQEPNSNVVKVAFTVRKAGRYEITVKLGGLNVAYSPYYKIFQPGMVVPSKTKIVCHFSTLVLTCGQPHTLQIVPRDEYDNPTNNSMSLRDEHNYTLSIHELGPQEEESTGVSFEKSVTSNRQTFQVFLRLTLHSRGCFHACISYQNQPINNGEFDIIVLSEDEKNIVERNVSTSGVSIYFEAYLYNATNCSSTPWHLPPMHMTSSQRRPSTAVDEEDEDSPSECHTPEKVKKPKKVYCYVSPKQFSVKEFYLKIIPWRLYTFRVCPGTKFSYLGPDPVHKLLTLVVDDGIQPPVELSCKERNILAATFIRSLHKNIGGSETFQDKVNFFQRELRQVHMKRPHSKVTLKVSRHALLESSLKATRNFSISDWSKNFEVVFQDEEALDWGGPRREWFELICKALFDTTNQLFTRFSDNNQALVHPNPNRPAHLRLKMYEFAGRLVGKCLYESSLGGAYKQLVRARFTRSFLAQIIGLRMHYKYFETDDPEFYKSKVCFILNNDMSEMELVFAEEKYNKSGQLDKVVELMTGGAQTPVTNANKIFYLNLLAQYRLASQVKEEVEHFLKGLNELVPENLLAIFDENELELLMCGTGDISVSDFKAHAVVVGGSWHFREKVMRWFWTVVSSLTQEELARLLQFTTGSSQLPPGGFAALCPSFQIIAAPTHSTLPTAHTCFNQLCLPTYDSYEEVHRMLQLAISEGCEGFGML

SEQ ID NO: 893103 - protein, 662 aa, Homo sapiens
MVVPSKTKIVCHFSTLVLTCGQPHTLQIVPRDEYDNPTNNSMSLRDEHNYTLSIHELGPQEEESTGVSFEKSVTSNRQTFQVFLRLTLHSRGCFHACISYQNQPINNGEFDIIVLSEDEKNIVERNVSTSGVSIYFEAYLYNATNCSSTPWHLPPMHMTSSQRRPSTAVDEEDEDSPSECHTPEKVKKPKKVYCYVSPKQFSVKEFYLKIIPWRLYTFRVCPGTKFSYLGPDPVHKLLTLVVDDGIQPPVELSCKERNILAATFIRSLHKNIGGSETFQDKVNFFQRELRQVHMKRPHSKVTLKVSRHALLESSLKATRNFSISDWSKNFEVVFQDEEALDWGGPRREWFELICKALFDTTNQLFTRFSDNNQALVHPNPNRPAHLRLKMYEFAGRLVGKCLYESSLGGAYKQLVRARFTRSFLAQIIGLRMHYKYFETDDPEFYKSKVCFILNNDMSEMELVFAEEKYNKSGQLDKVVELMTGGAQTPVTNANKIFYLNLLAQYRLASQVKEEVEHFLKGLNELVPENLLAIFDENELELLMCGTGDISVSDFKAHAVVVGGSWHFREKVMRWFWTVVSSLTQEELARLLQFTTGSSQLPPGGFAALCPSFQIIAAPTHSTLPTAHTCFNQLCLPTYDSYEEVHRMLQLAISEGCEGFGML

SEQ ID NO: 893104 - protein, 648 aa, Homo sapiens
MVVPSKTKIVCHFSTLVLTCGQPHTLQIVPRDEYDNPTNNSMSLRDEHNYTLSIHELGPQEEESTGVSFEKSVTSNRQTFQVFLRLTLHSRGCFHACISYQNQPINNGEFDIIVLSEDEKNIVERNVSTSGVSIYFEAYLYNATNCSSTPWHLPPMHMTSSQRRPSTAVDEEDEDSPSECHTPEKQFSVKEFYLKIIPWRLYTFRVCPGTKFSYLGPDPVHKLLTLVVDDGIQPPVELSCKERNILAATFIRSLHKNIGGSETFQDKVNFFQRELRQVHMKRPHSKVTLKVSRHALLESSLKATRNFSISDWSKNFEVVFQDEEALDWGGPRREWFELICKALFDTTNQLFTRFSDNNQALVHPNPNRPAHLRLKMYEFAGRLVGKCLYESSLGGAYKQLVRARFTRSFLAQIIGLRMHYKYFETDDPEFYKSKVCFILNNDMSEMELVFAEEKYNKSGQLDKVVELMTGGAQTPVTNANKIFYLNLLAQYRLASQVKEEVEHFLKGLNELVPENLLAIFDENELELLMCGTGDISVSDFKAHAVVVGGSWHFREKVMRWFWTVVSSLTQEELARLLQFTTGSSQLPPGGFAALCPSFQIIAAPTHSTLPTAHTCFNQLCLPTYDSYEEVHRMLQLAISEGCEGFGML

SEQ ID NO: 893105 - protein, 157 aa, Homo sapiens
VNTCQPLYSPLLHQLSGRRTKEGGSLLGSLLNELELLMCGTGDISVSDFKAHAVVVGGSWHFREKVMRWFWTVVSSLTQEELARLLQFTTGSSQLPPGGFAALCPSFQIIAAPTHSTLPTAHTCFNQLCLPTYDSYEEVHRMLQLAISEGCEGFGML

SEQ ID NO: 893106 - protein, 220 aa, Homo sapiens
MVVPSKTKIVCHFSTLVLTCGQPHTLQIVPRDEYDNPTNNSMSLRDEHNYTLSIHELGPQEEESTGVSFEKSVTSNRQTFQVFLRLTLHSRGCFHACISYQNQPINNGEFDIIVLSEDEKNIVERNVSTSGVSIYFEAYLYNATNCSSTPWHLPPMHMTSSQRRPSTAVDEEDEDSPSECHTPEKVKKPKKVYCYVSPKVGPSILDIKSPCLNLCVIGIW

SEQ ID NO: 893107 - protein, 662 aa, Homo sapiens; identical to SEQ ID NO: 893103

SEQ ID NO: 893108 - protein, 552 aa, Homo sapiens
IPYYTSEDEKNIVERNVSTSGVSIYFEAYLYNATNCSSTPWHLPPMHMTSSQRRPSTAVDEEDEDSPSECHTPEKVKKPKKVYCYVSPKQFSVKEFYLKIIPWRLYTFRVCPGTKFSYLGPDPVHKLLTLVVDDGIQPPVELSCKERNILAATFIRSLHKNIGGSETFQDKVNFFQRELRQVHMKRPHSKVTLKVSRHALLESSLKATRNFSISDWSKNFEVVFQDEEALDWGGPRREWFELICKALFDTTNQLFTRFSDNNQALVHPNPNRPAHLRLKMYEFAGRLVGKCLYESSLGGAYKQLVRARFTRSFLAQIIGLRMHYKYFETDDPEFYKSKVCFILNNDMSEMELVFAEEKYNKSGQLDKVVELMTGGAQTPVTNANKIFYLNLLAQYRLASQVKEEVEHFLKGLNELVPENLLAIFDENELELLMCGTGDISVSDFKAHAVVVGGSWHFREKVMRWFWTVVSSLTQEELARLLQFTTGSSQLPPGGFAALCPSFQIIAAPTHSTLPTAHTCFNQLCLPTYDSYEEVHRMLQLAISEGCEGFGML

SEQ ID NO: 893109 - protein, 662 aa, Homo sapiens; identical to SEQ ID NO: 893103

SEQ ID NO: 893110 - protein, 126 aa, Homo sapiens
ARKRKLLGERAIPRAGSQAGWRPTLGSVGGRVGSPSSAECCRPFPGQRRWNFVALQPPARVTFLSSLRQSPEDLPLPEFQREREEKGSWGVLWQSIAPCTREKSRNDIFLGCISLPWSSSSSSQKH

SEQ ID NO: 893111 - protein, 1128 aa, Homo sapiens
MVRYPAQERGRGGSPGGEALPTLSPAPNLQGDAVRRGKSIAETRGREMLMPSVTLLAGKLCPSPVPGSPQIAGLPNDTLSVENGVINQFSQRWTHFIDPQSQANKWIKNMEKDNGLDVFKLGDRDFLRSMENAIRFGKPCLLENVGEELDPALEPVLLKQTYKQQGSTVLKLGDTVIPYHEDFRMYITTKLPNPHYTPEISTKLTLINFTLSPSGLEDQLLGQVVAEERPDLEEAKNQLIISNAKMRQELKDIEDQILYRLSSSEGNPVDDMELIKVLEASKMKAAEIQAKVRIAEQTEKDIDLTRMEYIPVAIRTQILFFCVSDLANVDPMYQYSLEWFLNIFLSGIANSERADNLKKRISNINRYLTYSLYSNVCRSLFEKHKLMFAFLLCVRIMMNEGKINQSEWRYLLSGGSISIMTENPAPDWLSDRAWRDILALSNLPTFSSFSSDFVKHLSEFRVIFDSLEPHREPLPGIWDQYLDQFQKLLVLRCLRGDKVTNAMQDFVATNLEPRFIEPQTANLSVVFKDSNSTTPLIFVLSPGTDPAADLYKFAEEMKFSKKLSAISLGQGQGPRAEAMMRSSIERGKWVFFQNCHLAPSWMPALERLIEHINPDKVHRDFRLWLTSLPSNKFPVSILQNGSKMTIEPPRGVRANLLKSYSSLGEDFLNSCHKVMEFKSLLLSLCLFHGNALERRKFGPLGFNIPYEFTDGDLRICISQLKMFLDEYDDIPYKVLKYTAGEINYGGRVTDDWDRRCIMNILEDFYNPDVLSPEHSYSASGIYHQIPPTYDLHGYLSYIKSLPLNDMPEIFGLHDNANITFAQNETFALLGTIIQLQPKSSSAGSQGREEIVEDVTQNILLKVPEPINLQWVMAKYPVLYEESMNTVLVQEVIRYNRLLQVITQTLQDLLKALKGLVVMSSQLELMAASLYNNTVPELWSAKAYPSLKPLSSWVMDLLQRLDFLQAWIQDGIPAVFWISGFFFPQAFLTGTLQNFARKFVISIDTISFDFKVMFEAPSELTQRPQVGCYIHGLFLEGARWDPEAFQLAESQPKELYTEMAVIWLLPTPNRKAQDQDFYLCPIYKTLTRAGTLSTTGHSTNYVIAVEIPTHQPQRHWIKRGVALICALDY

SEQ ID NO: 893112 - protein, 1242 aa, Homo sapiens
MVRYPAQERGRGGSPGGEALPTLSPAPNLQGDAVRRGKSIAETRGREMLMPSVTLLAGKLCPSPVPGSPQIAGLPNDTLSVENGVINQFSQRWTHFIDPQSQANKWIKNMEKDNGLDVFKLGDRDFLRSMENAIRFGKPCLLENVGEELDPALEPVLLKQTYKQQGSTVLKLGDTVIPYHEDFRMYITTKLPNPHYTPEISTKLTLINFTLSPSGLEDQLLGQVVAEERPDLEEAKNQLIISNAKMRQELKDIEDQILYRLSSSEGNPVDDMELIKVLEASKMKAAEIQAKVRIAEQTEKDIDLTRMEYIPVAIRTQILFFCVSDLANVDPMYQYSLEWFLNIFLSGIANSERADNLKKRISNINRYLTYSLYSNVCRSLFEKHKLMFAFLLCVRIMMNEGKINQSEWRYLLSGGSISIMTENPAPDWLSDRAWRDILALSNLPTFSSFSSDFVKHLSEFRVIFDSLEPHREPLPGIWDQYLDQFQKLLVLRCLRGDKVTNAMQDFVATNLEPRFIEPQTANLSVVFKDSNSTTPLIFVLSPGTDPAADLYKFAEEMKFSKKLSAISLGQGQGPRAEAMMRSSIERGKWVFFQNCHLAPSWMPALERLIEHINPDKVHRDFRLWLTSLPSNKFPVSILQNGSKMTIEPPRGVRANLLKSYSSLGEDFLNSCHKVMEFKSLLLSLCLFHGNALERRKFGPLGFNIPYEFTDGDLRICISQLKMFLDEYDDIPYKVLKYTAGEINYGGRVTDDWDRRCIMNILEDFYNPDVLSPEHSYSASGIYHQIPPTYDLHGYLSYIKSLPLNDMPEIFGLHDNANITFAQNETFALLGTIIQLQPKSSSAGSQGREEIVEDVTQNILLKVPEPINLQWVMAKYPVLYEESMNTVLVQEVIRYNRLLQVITQTLQDLLKALKGLVVMSSQLELMAASLYNNTVPELWSAKAYPSLKPLSSWVMDLLQRLDFLQAWIQDGIPAVFWISGFFFPQAFLTGTLQNFARKFVISIDTISFDFKVWAQPGPGQVTGYGTAQGGEALRPRLVGSWGTPKPGHGKTQARRGHESQERVWAGSIRNPQGQGTDHRPWAKVVVRDDGQAGSIRQLSQKGVLCLLTQILGIVMCVGCVCVYPQVMFEAPSELTQRPQVGCYIHGLFLEGARWDPEAFQLAESQPKELYTEMAVIWLLPTPNRKAQDQDFYLCPIYKTLTRAGTLSTTGHSTNYVIAVEIPTHQPQRHWIKRGVALICALDY

SEQ ID NO: 893113 - protein, 1143 aa, Homo sapiens
MVRYPAQERGRGGSPGGEALPTLSPAPNLQGDAVRRGKSIAETRGREMLMPSVTLLAGKLCPSPVPGSPQIAGLPNDTLSVENGVINQFSQRWTHFIDPQSQANKWIKNMEKDNGLDVFKLGDRDFLRSMENAIRFGKPCLLENVGEELDPALEPVLLKQTYKQQGSTVLKLGDTVIPYHEDFRMYITTKLPNPHYTPEISTKLTLINFTLSPSGLEDQLLGQVVAEERPDLEEAKNQLIISNAKMRQELKDIEDQILYRLSSSEGNPVDDMELIKVLEASKMKAAEIQAKVRIAEQTEKDIDLTRMEYIPVAIRTQILFFCVSDLANVDPMYQYSLEWFLNIFLSGIANSERADNLKKRISNINRYLTYSLYSNVCRSLFEKHKLMFAFLLCVRIMMNEGKINQSEWRYLLSGGSISIMTENPAPDWLSDRAWRDILALSNLPTFSSFSSDFVKHLSEFRVIFDSLEPHREPLPGIWDQYLDQFQKLLVLRCLRGDKVTNAMQDFVATNLEPRFIEPQTANLSVVFKDSNSTTPLIFVLSPGTDPAADLYKFAEEMKFSKKLSAISLGQGQGPRAEAMMRSSIERGKWVFFQNCHLAPSWMPALERLIEHINPDKVHRDFRLWLTSLPSNKFPVSILQNGSKMTIEPPRGVRANLLKSYSSLGEDFLNSCHKVMEFKSLLLSLCLFHGNALERRKFGPLGFNIPYEFTDGDLRICISQLKMFLDEYDDIPYKVLKYTAGEINYGGRVTDDWDRRCIMNILEDFYNPDVLSPEHSYSASGIYHQIPPTYDLHGYLSYIKSLPLNDMPEIFGLHDNANITFAQNETFALLGTIIQLQPKSSSAGSQGREEIVEDVTQNILLKVPEPINLQWVMAKYPVLYEESMNTVLVQEVIRYNRLLQVITQTLQDLLKALKGLVVMSSQLELMAASLYNNTVPELWSAKAYPSLKPLSSWVMDLLQRLDFLQAWIQDGIPAVFWISGFFFPQAFLTGTLQNFARKFVISIDTISFDFKVMFEAPSELTQRPQVGCYIHGLFLEGARWDPEAFQLAESQPKELYTEMAVIWLLPTPNRKAQDQDFYLCPIYKTLTRAGMRPGMGAYTMGGDPGLTQPSPSQSLIQEHYQPQDTLPTMSLLWRSPPISPSDTG

SEQ ID NO: 893114 - protein, 76 aa, Homo sapiens
MEYIPVAIRTQILFFCVSDLANVDPMYQYSLEWFLNIFLSGIANSERAGSTGMPGSYPATDMTHVDTFPLWGTHKL

SEQ ID NO: 893115 - protein, 336 aa, Homo sapiens
MAVATAAAVLAALGGALWLAARRFVGPRVQRLRRGGDPGLMHGKTVLITGANSGLGRATAAELLRLGARVIMGCRDRARAEEAAGQLRRELRQAAECGPEPGVSGVGELIVRELDLASLRSVRAFCQEMLQEEPRLDVLINNAGIFQCPYMKTEDGFEMQFGVNHLGHFLLTNLLLGLLKSSAPSRIVVVSSKLYKYGDINFDDLNSEQSYNKSFCYSRSKLANILFTRELARRLEGTNVTVNVLHPGIVRTNLGRHIHIPLLVKPLFNLVSWAFFKTPVEGAQTSIYLASSPEVEGVSGRYFGDCKEEELLPKAMDESVARKLWDISEVMVGLLK

SEQ ID NO: 893116 - protein, 336 aa, Homo sapiens; identical to SEQ ID NO: 893115

SEQ ID NO: 893117 - protein, 224 aa, Homo sapiens
  misc_feature (7)..(8): Xaa can be any naturally occurring amino acid
  misc_feature (12)..(12): Xaa can be any naturally occurring amino acid
  misc_feature (16)..(16): Xaa can be any naturally occurring amino acid
  misc_feature (19)..(19): Xaa can be any naturally occurring amino acid
QGGRRGXXKVLXRLGXKDXEEPRLDVLINNAGIFQCPYMKTEDGFEMQFGVNHLGHFLLTNLLLGLLKSSAPSRIVVVSSKLYKYGDINFDDLNSEQSYNKSFCYSRSKLANILFTRELARRLEGTNVTVNVLHPGIVRTNLGRHIHIPLLVKPLFNLVSWAFFKTPVEGAQTSIYLASSPEVEGVSGRYFGDCKEEELLPKAMDESVARKLWDISEVMVGLLK

SEQ ID NO: 893118 - protein, 186 aa, Homo sapiens [sequence omitted]

SEQ ID NO: 893119 - protein, 386 aa, Homo sapiens
GFQAPLSVDPATCPIVPGQEMIIEISKGRSGLGLSIVGGKDTPLNAIVIHEVYEEGAAARDGRLWAGDQILEVNGVDLRNSSHEEAITALRQTPQKVRLVVYRDEAHYRDEENLEIFPVDLQKKAGRGLGLSIVGKRNGSGVFISDIVKGGAADLDGRLIQGDQILSVNGEDMRNASQETVATILKCAQGLVQLEIGRLRAGSWTSARTTSQNSQGSQQSAHSSCHPSFAPVITGLQNLVGTKRVSDPSQKNSGTDMEPRTVEINRELSDALGISIAGGRGSPLGDIPVFIAMIQASGVAARTQKLKVGDRIVSINGQPLDGLSHADVVNLLKNAYGRIILQVVADTNISAIAAQLENMSTGYHLGSPTAEHHPEDTEEQLQMTAD

SEQ ID NO: 893120 - protein, 386 aa, Homo sapiens; identical to SEQ ID NO: 893119

SEQ ID NO: 893121 - protein, 386 aa, Homo sapiens; identical to SEQ ID NO: 893119

SEQ ID NO: 893122 - protein, 386 aa, Homo sapiens; identical to SEQ ID NO: 893119

SEQ ID NO: 893123 - protein, 355 aa, Homo sapiens
GFQAPLSVDPATCPIVPGQEMIIEISKGRSGLGLSIVGGKDTPLNAIVIHEVYEEGAAARDGRLWAGDQILEVNGVDLRNSSHEEAITALRQTPQKVRLVVYRDEAHYRDEENLEIFPVDLQKKAGRGLGLSIVGKRNGSGVFISDIVKGGAADLDGRLIQGDQILSVNGEDMRNASQETVATILKCAQGLVQLEIGRLRAGSWTSARTTSQNSQGSQQSAHSSCHPSFAPVITGLQNLVGTKRVSDPSQKNSGTDMEPRTVEINRELSDALGISIAGGRGSPLGDIPVFIAMIQASGVAARTQKLKVGDRIVSINGQPLDGLSHADVVNLLKNAYGRIILQVLRSTEHAAVQGR

SEQ ID NO: 893124 - protein, 378 aa, Homo sapiens
GFQAPLSVDPATCPIVPGQEMIIEISKGRSGLGLSIVGGKDTPLNAIVIHEVYEEGAAARDGRLWAGDQILEVNGVDLRNSSHEEAITALRQTPQKVRLVVYRDEAHYRDEENLEIFPVDLQKKAGRGLGLSIVGKRNGSGVFISDIVKGGAADLDGRLIQGDQILSVNGEDMRNASQETVATILKCAQGLVQLEIGRLRAGSWTSARTTSQNSQGSQQSAHSSCHPSFAPVITGLQNLVGTKRVSDPSQKNSGTDMEPRTVEINRELSDALGISIAGGRGSPLGDIPVFIAMIQASGVAARTQKLKVGDRIVSINGQPLDGLSHADVVNLLKNAYGRIILQVVADTNISAIAAQLENMSTGYHLGSPTAEHHPEDTE

SEQ ID NO: 893125 - protein, 386 aa, Homo sapiens; identical to SEQ ID NO: 893119

SEQ ID NO: 893126 - protein, 137 aa, Homo sapiens
GFQAPLSVDPATCPIVPGQEMIIEISKGRSGLGLSIVGGKDTPLNAIVIHEVYEEGAAARDGRLWAGDQILEVNGVDLRNSSHEEAITALRQTPQKVRLVVYRDEAHYRDEENLEIFPVDLQKKAGRGLGLSIVGKR

SEQ ID NO: 893127 - protein, 313 aa, Homo sapiens
GFQAPLSVDPATCPIVPGQEMIIEISKGRSGLGLSIVGGKDTPLNAIVIHEVYEEGAAARDGRLWAGDQILEVNGVDLRNSSHEEAITALRQTPQKVRLVVYRDEAHYRDEENLEIFPVDLQKKAGRGLGLSIVGKRNGSGVFISDIVKGGAADLDGRLIQGDQILSVNGEDMRNASQETVATILKCAQGLVQLEIGRLRAGSWTSARTTSQNSQGSQQSAHSSCHPSFAPVITGLQNLVGTKRVSDPSQKNSGTDMEPRTVEINRELSDALGISIAGGRGSPLGDIPVFIAMIQASGVAARTQKLKVNERTG

SEQ ID NO: 893128 - protein, 223 aa, Homo sapiens
GFQAPLSVDPATCPIVPGQEMIIEISKGRSGLGLSIVGGKDTPLNAIVIHEVYEEGAAARDGRLWAGDQILEVNGVDLRNSSHEEAITALRQTPQKVRLVVYRDEAHYRDEENLEIFPVDLQKKAGRGLGLSIVGKRNGSGVFISDIVKGGAADLDGRLIQGDQILSVNGEDMRNASQETVATILKCAQGLVQLEIGRLRAGSWTSARTTSQNSQVVDGFSSD

SEQ ID NO: 893129 - protein, 137 aa, Homo sapiens; identical to SEQ ID NO: 893126

SEQ ID NO: 893130 - protein, 116 aa, Homo sapiens
GFQAPLSVDPATCPIVPGQEMIIEISKGRSGLGLSIVGGKDTPLNAIVIHEVYEEGAAARDGRLWAGDQILEVNGVDLRNSSHEEAITALRQTPQKVRLVGNTDRCCRQEVCMGND

SEQ ID NO: 893131 - protein, 99 aa, Homo sapiens
GVNRDSASARTKAGSCAGRRKAWGIRPSELGSVCDAAARSREPLPAERERGGAQNEAGRRPLFPWGHAQPEVAAAAENWRWGPPWTSRLKERIKFITPG

SEQ ID NO: 893132 - protein, 297 aa, Homo sapiens
MGTALDIKIKRANKVYHAGEVLSGVVVISSKDSVQHQGVSLTMEGTVNLQLSAKSVGVFEAFYNSVKPIQIINSTIEMVKPGKFPSGKTEIPFEFPLHLKGNKVLYETYHGVFVNIQYTLRCDMKRSLLAKDLTKTCEFIVHSAPQKGKFTPSPVDFTITPETLQNVKERALLPKFLLRGHLNSTNCVITQPLTGELVVESSEAAIRSVELQLVRVETCGCAEGYARDATEIQNIQIADGDVCRGLSVPIYMVFPRLFTCPTLETTNFKVEFEVNIVVLLHPDHLITENFPLKLCRI

SEQ ID NO: 893133 - protein, 121 aa, Homo sapiens
MGTALDIKIKRANKVYHAGEVLSGVVVISSKDSVQHQGVSLTMEGTVNLQLSAKSVGVFEAFYNSVKPIQIINSTIEMVKPGKFPSGKTEIPFEFPLHLKGNKVLYETYHGVFVNIQVRAS

SEQ ID NO: 893134 - protein, 297 aa, Homo sapiens; identical to SEQ ID NO: 893132

SEQ ID NO: 893135 - protein, 255 aa, Homo sapiens
MEGTVNLQLSAKSVGVFEAFYNSVKPIQIINSTIEMVKPGKFPSGKTEIPFEFPLHLKGNKVLYETYHGVFVNIQYTLRCDMKRSLLAKDLTKTCEFIVHSAPQKGKFTPSPVDFTITPETLQNVKERALLPKFLLRGHLNSTNCVITQPLTGELVVESSEAAIRSVELQLVRVETCGCAEGYARDATEIQNIQIADGDVCRGLSVPIYMVFPRLFTCPTLETTNFKVEFEVNIVVLLHPDHLITENFPLKLCRI

SEQ ID NO: 893136 - protein, 297 aa, Homo sapiens; identical to SEQ ID NO: 893132

SEQ ID NO: 893137 - protein, 270 aa, Homo sapiens
MGTALDIKIKRANKVYHAGEVLSGVVVISSKDSVQHQGVSLTMEGTVNLQLSAKSVGVFEAFYNSVKPIQIINSTIEMVKPGKFPSGKTEIPFEFPLHLKGNKVLYETYHGVFVNIQPQKGKFTPSPVDFTITPETLQNVKERALLPKFLLRGHLNSTNCVITQPLTGELVVESSEAAIRSVELQLVRVETCGCAEGYARDATEIQNIQIADGDVCRGLSVPIYMVFPRLFTCPTLETTNFKVEFEVNIVVLLHPDHLITENFPLKLCRI

SEQ ID NO: 893138 - protein, 172 aa, Homo sapiens
MGTALDIKIKRANKVYHAGPQKGKFTPSPVDFTITPETLQNVKERALLPKFLLRGHLNSTNCVITQPLTGELVVESSEAAIRSVELQLVRVETCGCAEGYARDATEIQNIQIADGDVCRGLSVPIYMVFPRLFTCPTLETTNFKVEFEVNIVVLLHPDHLITENFPLKLCRI

SEQ ID NO: 893139 - protein, 72 aa, Homo sapiens
FLMSYDISRRYPIFTPIAKRPIARYNSPGRDSFGQSLCTTPVPAWNGSGHLEIQLVIQILRGATASGIYLFL

SEQ ID NO: 893140 - protein, 120 aa, Homo sapiens
GVNRDSASARTKAGSCAGRRKAWGIRPSELGSVCDAAARSREPLPAERERGGAQNEAGRRPLFPWGHAQPEVAAAAENWRWGPPWTSRLKERIKFITPGKCSLAWWSYRVRIQSNTRECL

SEQ ID NO: 893141 - protein, 297 aa, Homo sapiens; identical to SEQ ID NO: 893132

SEQ ID NO: 893142 - protein, 297 aa, Homo sapiens; identical to SEQ ID NO: 893132

SEQ ID NO: 893143 - protein, 297 aa, Homo sapiens; identical to SEQ ID NO: 893132

SEQ ID NO: 893144 - protein, 121 aa, Homo sapiens; identical to SEQ ID NO: 893133

SEQ ID NO: 893145 - protein, 827 aa, Homo sapiens
WPESRAPAAAGAARRVSVRCGRSGPGPGRGAAGLSPADIALASEQGASCSVRAPERKLRMKLLWQAKMSSIQDWGEEVEEGAVYHVTLKRVQIQQAANKGARWLGVEGDQLPPGHTVSQYETCKIRTIKAGTLEKLVENLLTAFGDNDFTYISIFLSTYRGFASTKEVLELLLDRYGNLTSPNCEEDGSQSSSESKMVIRNAIASILRAWLDQCAEDFREPPHFPCLQKLLDYLTRMMPGSDPERRAQNLLEQFQKQEVETDNGLPNTISFSLEEEEELEGGESAEFTCFSEDLVAEQLTYMDAQLFKKVVPHHCLGCIWSRRDKKENKHLAPTIRATISQFNTLTKCVVSTILGGKELKTQQRAKIIEKWINIAHECRLLKNFSSLRAIVSALQSNSIYRLKKTWAAVPRDRMLMFEELSDIFSDHNNHLTSRELLMKEGTSKFANLDSSVKENQKRTQRRLQLQKDMGVMQGTVPYLGTFLTDLTMLDTALQDYIEGGLINFEKRRREFEVIAQIKLLQSACNSYCMTPDQKFIQWFQRQQLLTEEESYALSCEIEAAADASTTSPKPRKSMVKRLSLLFLGSDMITSPTPTKEQPKSTASGSSGESMDSVSVSSCESNHSEAEEGSITPMDTPDEPQKKLSESSSSCSSIHSMDTNSSGMSSLINPLSSPPSCNNNPKIHKRSVSVTSITSTVLPPVYNQQNEDTCIIRISVEDNNGNMYKSIMLTSQDKTPAVIQRAMLKHNLDSDPAEEYELVQVISEDKELVIPDSANVFYAMNSQVNFDFILRKKNSMEEQVKLRSRTSLTLPRTAKRGCWSNRHSKITL

SEQ ID NO: 893146 - protein, 109 aa, Homo sapiens
MHTRAPSIVLIAGDIASDCALLEAAFLSRKPVSWDWNYPSWPAGSPQGRSRKVKSYLSVLCDSIATGSAEPELGIKSIGREGNVSGQALGSGGNNWGEFVEFGKGSLTS

SEQ ID NO: 893147 - protein, 105 aa, Homo sapiens
MHTRAPSIVLIAGDIASDCALLEAAFLSRKPVSWDWNYPSWPAGSPQGRSRKVKSYLSVLCDSIATGSAEPELVCSFLKGRDFVHLVHYYMPSVWNSLHGGMVPE

SEQ ID NO: 893148 - protein, 803 aa, Homo sapiens
MEVKPVGEPTQEVSKFKLSTKVESTGHWLVEDHVRIWEVLKTEESSIQDWGEEVEEGAVYHVTLKRVQIQQAANKGARWLGVEGDQLPPGHTVSQYETCKIRTIKAGTLEKLVENLLTAFGDNDFTYISIFLSTYRGFASTKEVLELLLDRYGNLTSPNCEEDGSQSSSESKMVIRNAIASILRAWLDQCAEDFREPPHFPCLQKLLDYLTRMMPGSDPERRAQNLLEQFQKQEVETDNGLPNTISFSLEEEEELEGGESAEFTCFSEDLVAEQLTYMDAQLFKKVVPHHCLGCIWSRRDKKENKHLAPTIRATISQFNTLTKCVVSTILGGKELKTQQRAKIIEKWINIAHECRLLKNFSSLRAIVSALQSNSIYRLKKTWAAVPRDRMLMFEELSDIFSDHNNHLTSRELLMKEGTSKFANLDSSVKENQKRTQRRLQLQKDMGVMQGTVPYLGTFLTDLTMLDTALQDYIEGGLINFEKRRREFEVIAQIKLLQSACNSYCMTPDQKFIQWFQRQQLLTEEESYALSCEIEAAADASTTSPKPRKSMVKRLSLLFLGSDMITSPTPTKEQPKSTASGSSGESMDSVSVSSCESNHSEAEEGSITPMDTPDEPQKKLSESSSSCSSIHSMDTNSSGMSSLINPLSSPPSCNNNPKIHKRSVSVTSITSTVLPPVYNQQNEDTCIIRISVEDNNGNMYKSIMLTSQDKTPAVIQRAMLKHNLDSDPAEEYELVQVISEDKELVIPDSANVFYAMNSQVNFDFILRKKNSMEEQVKLRSRTSLTLPRTAKRGCWSNRHSKITL

SEQ ID NO: 893149 - protein, 101 aa, Homo sapiens
AVAAHTWPLCRLLPARPPLPTLTHLPWTGPPSPRSRACGTPMKMTSRKSARSCQVNTSGTRASPSPSACTRSRASAWRRTPKMCGTTTSLSSPTPSQARPG

SEQ ID NO: 893150 - protein, 67 aa, Homo sapiens
EDPLIWILKMTSRKSARSCQVNTSGTRASPSPSACTRSRASAWRRTPKMCGTTTSLSSPTPSQARPG

SEQ ID NO: 893151 - protein, 101 aa, Homo sapiens; identical to SEQ ID NO: 893149

SEQ ID NO: 893152 - protein, 67 aa, Homo sapiens; identical to SEQ ID NO: 893150

SEQ ID NO: 893153 - protein, 350 aa, Homo sapiens [sequence omitted]

SEQ ID NO: 893154 - protein, 358 aa, Homo sapiens
WGGAARPGGAGSGGAAARLRCARARAGRGRRWASGAPTRPPWGGRNGRRCGARALSRRGLTRRCFGRRPARGAGGAAMGSQGSPVKSYDYLLKFLLVGDSDVGKGEILESLQDGAAESPYAYSNGIDYKTTTILLDGRRVKLELWDTSGQGRFCTIFRSYSRGAQGILLVYDITNRWSFDGIDRWIKEIDEHAPGVPRILVGNRLHLAFKRQVPTEQARAYAEKNCMTFFEVSPLCNFNVIESFTELSRIVLMRHGMEKIWRPNRVFSLQDLCCRAIVSCTPVHLIDKLPLPVTIKSHLKSFSMANGMNAVMMHGRSYSLASGAGGGGSKGNSLKRSKSIRPPQSPPQNCSRSNCKIS

SEQ ID NO: 893155 - protein, 281 aa, Homo sapiens
MGSQGSPVKSYDYLLKFLLVGDSDVGKGEILESLQDGAAESPYAYSNGIDYKTTTILLDGRRVKLELWDTSGQGRFCTIFRSYSRGAQGILLVYDITNRWSFDGIDRWIKEIDEHAPGVPRILVGNRLHLAFKRQVPTEQARAYAEKNCMTFFEVSPLCNFNVIESFTELSRIVLMRHGMEKIWRPNRVFSLQDLCCRAIVSCTPVHLIDKLPLPVTIKSHLKSFSMANGMNAVMMHGRSYSLASGAGGGGSKGNSLKRSKSIRPPQSPPQNCSRSNCKIS

SEQ ID NO: 893156 - protein, 132 aa, Homo sapiens [sequence omitted]

SEQ ID NO: 893157 - protein, 132 aa, Homo sapiens [sequence omitted]

SEQ ID NO: 893158 - protein, 219 aa, Homo sapiens
MAPGEGGEAAFLTPWKAPTPLLQSCQGILLVYDITNRWSFDGIDRWIKEIDEHAPGVPRILVGNRLHLAFKRQVPTEQARAYAEKNCMTFFEVSPLCNFNVIESFTELSRIVLMRHGMEKIWRPNRVFSLQDLCCRAIVSCTPVHLIDKLPLPVTIKSHLKSFSMANGMNAVMMHGRSYSLASGAGGGGSKGNSLKRSKSIRPPQSPPQNCSRSNCKIS

SEQ ID NO: 893159 - protein, 262 aa, Homo sapiens
MGSQGSPVKSYDYLLKFLLVGDSDVGKGEILESLQDGAAESPYAYSNGIDYKTTTILLDGRRVKLELWDTSGQGRFCTIFRSYSRGAQGILLVYDITNRWSFDGIDRWIKEIDERQVPTEQARAYAEKNCMTFFEVSPLCNFNVIESFTELSRIVLMRHGMEKIWRPNRVFSLQDLCCRAIVSCTPVHLIDKLPLPVTIKSHLKSFSMANGMNAVMMHGRSYSLASGAGGGGSKGNSLKRSKSIRPPQSPPQNCSRSNCKIS

SEQ ID NO: 893160 - protein, 132 aa, Homo sapiens [sequence omitted]

SEQ ID NO: 893161 - protein, 358 aa, Homo sapiens; identical to SEQ ID NO: 893154

SEQ ID NO: 893162 - protein, 132 aa, Homo sapiens
MPAPAAPLHGHHRLGLPTALVLTSTSCPQAVRHDMASTQKEPSRDPGPPVVDSAAHASQGGPTEGVTGHQWTRPMARSWEMRAVACMNYQMSKGTPGRRPCHSPQRHWPPAPASLSWPHLSCCCQQGPCLGL

SEQ ID NO: 893163 - protein, 281 aa, Homo sapiens; identical to SEQ ID NO: 893155

SEQ ID NO: 893164 - protein, 311 aa, Homo sapiens
WGGAARPGGAGSGGAAARLRRPARGAGGAAMGSQGSPVKSYDYLLKFLLVGDSDVGKGEILESLQDGAAESPYAYSNGIDYKTTTILLDGRRVKLELWDTSGQGRFCTIFRSYSRGAQGILLVYDITNRWSFDGIDRWIKEIDEHAPGVPRILVGNRLHLAFKRQVPTEQARAYAEKNCMTFFEVSPLCNFNVIESFTELSRIVLMRHGMEKIWRPNRVFSLQDLCCRAIVSCTPVHLIDKLPLPVTIKSHLKSFSMANGMNAVMMHGRSYSLASGAGGGGSKGNSLKRSKSIRPPQSPPQNCSRSNCKIS

SEQ ID NO: 893165 - protein, 132 aa, Homo sapiens [sequence omitted]

SEQ ID NO: 893166 - protein, 198 aa, Homo sapiens
KSLLQGILLVYDITNRWSFDGIDRWIKEIDEHAPGVPRILVGNRLHLAFKRQVPTEQARAYAEKNCMTFFEVSPLCNFNVIESFTELSRIVLMRHGMEKIWRPNRVFSLQDLCCRAIVSCTPVHLIDKLPLPVTIKSHLKSFSMANGMNAVMMHGRSYSLASGAGGGGSKGNSLKRSKSIRPPQSPPQNCSRSNCKIS

SEQ ID NO: 893167 - protein, 408 aa, Homo sapiens
WGGAARPGGAGSGGAAARLRCARARAGRGRRWASGAPTRPPWGGRNGRRCGARALSRRGLTRRCFGRRPARGAGGAAMGSQGSPVKSYDYLLKFLLVGDSDVGKGEILESLQDGAAESPYAYSNGIDYKTTTILLDGRRVKLELWDTSGQGRFCTIFRSYSRGAQLCPRYSRGDSLMELAERTLSFHSCTSPGCQNPASACPGNFHRLMAPGEGGEAAFLTPWKAPTPLLQSCQGILLVYDITNRWSFDGIDRWIKEIDERQVPTEQARAYAEKNCMTFFEVSPLCNFNVIESFTELSRIVLMRHGMEKIWRPNRVFSLQDLCCRAIVSCTPVHLIDKLPLPVTIKSHLKSFSMANGMNAVMMHGRSYSLASGAGGGGSKGNSLKRSKSIRPPQSPPQNCSRSNCKIS

SEQ ID NO: 893168 - protein, 388 aa, Homo sapiens
WGGAARPGGAGSGGAAARLRCARARAGRGRRWASGAPTRPPWGGRNGRRCGARALSRRGLTRRCFGRRPARGAGGAAMGSQGSPVKSYDYLLKFLLVGDSDVGKGEILESLQDGAAESPYAYSNGIDYKTTTILLDGRRVKLELWDTSGQGRFCTIFRSYSRGAQGILLVYDITNRWSFDGIDRWIKEIDEHAPGVPRILVGNRLHLAFKRQVPTEQARAYAEKNCMTFFEVSPLCNFNVIESFTELSRIVLMRHGMEKIWRPNRVFSLQDLCCRAIVSCTPVHLIDKLPLPVTIKSHLKSFSMANGMNAVMMHGRSVTIAWACPQHWCSPLPPVLRPCGTTWPARRRSPPGTQDPPWWTPRHMLPKVVPRRVLLGTSGLAPWPVPGR

SEQ ID NO: 893169 - protein, 1568 aa, Homo sapiens
SEWNKSGTFKMLPCKKRRTTVTESLQHKGNQEENNVDLESAVKPESDQVKDLSSVSLSWDPSHGRVAGFEVQSLQDAGNQLGMEDTSLSSGMLTQNTNVPILEGVDVAISQGITLPSLESFHPLNIHIGKGKLHATGSKRGKKMTLRPGPVTQEDRCDHLTLKEPFSGEPSEEVKEEGGEVIIIHCNLQFLALNDPAASAFQSAGLTGKPQMNSEGEIPSLPSGSQSAKPVSQPRKSTQPDVCASPQEKPLRTLFHQPEEEIEDGGLFIPMEEQDNEESEKRRKKKKGTKRKRDGRGQEGTLAYDLKLDDMLDRTLEDGAKQHNLTAVNVRNILHEVITNEHVVAMMKAAISETEDMPMFEPKMTRSKLKEVVEKGVVIPTWNISPIKKANEIKPPQFVDIHLEEDDSSDEEYQPDDEEEDDTAEESLLESDVESTASSPRGAKKSRLRQSSEMTETDEESGILSEAEKVTTPAIRHISAEVVPMGPPPPPKPKQTRDSTFMEKLHAVDEELASSPVCMDSFQPMDDSLIAFRTRSKMPLKDVPLGQLEAELQAPDITPDMYDPNTADDEDWKMWLGGLMNDDVGNEDEADDDDDPEYNFLEDLDEPDTEDFRTDRAVRITKKEVNELMEELFETFQDEMGFSNMEDDGPEEEECVAEPRPNFNTPQALRFEEPLANLLNEQHRTVKELFEQLKMKKSSAKQLQEVEKVKPQSEKVHQTLILDPAQRKRLQQQMQQHVQLLTQIHLLATCNPNLNPEATTTRIFLKELGTFAQSSIALHHQYNPKFQTLFQPCNLMGAMQLIEDFSTHVSIDCSPHKTVKKTANEFPCLPKQVAWILATSKVFMYPELLPVCSLKAKNPQDKIVFTKAEDNLLALGLKHFEGTEFPNPLISKYLLTCKTAHQLTVRIKNLNMNRAPDNIIKFYKKTKQLPVLGKCCEEIQPHQWKPPIEREEHRLPFWLKASLPSIQEELRHMADGAREVGNMTGTTEINSDRSLEKDNLELGSESRYPLLLPKGVVLKLKPVATRFPRKAWRQKRSSVLKPLLIQPSPSLQPSFNPGKTPARSTHSEAPPSKMVLRIPHPIQPATVLQTVPGVPPLGVSGGESFESPAALPAVPPEARTSFPLSESQTLLSSAPVPKVMLPSLAPSKFRKPYVRRRPSKRRGVKASPCMKPAPVIHHPASVIFTVPATTVKIVSLGGGCNMIQPVNAAVAQSPQTIPITTLLVNPTSFPCPLNQSLVASSVSPLIVSGNSVNLPIPSTPEDKAHVNVDIACAVADGENAFQGLEPKLEPQELSPLSATVFPKVEHSPGPPLADAECQEGLSENSACRWTVVKTEEGRQALEPLPQGIQESLNNPTPGDLEEIVKMEPEEAREEISGSPERDICDDIKVEHAVELDTGAPSEELSSAGEVTKQTVLQKEEERSQPTKTPSSSQEPPDEGTSGTDVNKGSSKNALSSMDPEVRLSSPPGKPEDSSSVDGQSVGTPVGPETGGEKNGPEEEEEEDFDDLTQDEEDEMSSASEESVLSVPELQVRAGEYSQVFRGLSNMYHLLICHLLACCTMDSPKIICI

SEQ ID NO: 893170 - protein, 929 aa, Homo sapiens
MGFSNMEDDGPEEEECVAEPRPNFNTPQALRFEEPLANLLNEQHRTVKELFEQLKMKKSSAKQLQEVEKVKPQSEKVHQTLILDPAQRKRLQQQMQQHVQLLTQIHLLATCNPNLNPEATTTRIFLKELGTFAQSSIALHHQYNPKFQTLFQPCNLMGAMQLIEDFSTHVSIDCSPHKTVKKTANEFPCLPKQVAWILATSKVFMYPELLPVCSLKAKNPQDKIVFTKAEDNLLALGLKHFEGTEFPNPLISKYLLTCKTAHQLTVRIKNLNMNRAPDNIIKFYKKTKQLPVLGKCCEEIQPHQWKPPIEREEHRLPFWLKASLPSIQEELRHMADGAREVGNMTGTTEINSDRSLEKDNLELGSESRYPLLLPKGVVLKLKPVATRFPRKAWRQKRSSVLKPLLIQPSPSLQPSFNPGKTPARSTHSEAPPSKMVLRIPHPIQPATVLQTVPGVPPLGVSGGESFESPAALPAVPPEARTSFPLSESQTLLSSAPVPKVMLPSLAPSKFRKPYVRRRPSKRRGVKASPCMKPAPVIHHPASVIFTVPATTVKIVSLGGGCNMIQPVNAAVAQSPQTIPITTLLVNPTSFPCPLNQSLVASSVSPLIVSGNSVNLPIPSTPEDKAHVNVDIACAVADGENAFQGLEPKLEPQELSPLSATVFPKVEHSPGPPLADAECQEGLSENSACRWTVVKTEEGRQALEPLPQGIQESLNNPTPGDLEEIVKMEPEEAREEISGSPERDICDDIKVEHAVELDTGAPSEELSSAGEVTKQTVLQKEEERSQPTKTPSSSQEPPDEGTSGTDVNKGSSKNALSSMDPEVRLSSPPGKPEDSSSVDGQSVGTPVGPETGGEKNGPEEEEEEDFDDLTQDEEDEMSSASEESVLSVPELQVRAGEYSQVFRGLSNMYHLLICHLLACCTMDSPKIICI

SEQ ID NO: 893171 - protein, 660 aa, Homo sapiens
SEWNKSGTFKMLPCKKRRTTVTESLQHKGNQEENNVDLESAVKPESDQVKDLSSVSLSWDPSHGRVAGFEVQSLQDAGNQLGMEDTSLSSGMLTQNTNVPILEGVDVAISQGITLPSLESFHPLNIHIGKGKLHATGSKRGKKMTLRPGPVTQEDRCDHLTLKEPFSGEPSEEVKEEGGKPQMNSEGEIPSLPSGSQSAKPVSQPRKSTQPDVCASPQEKPLRTLFHQPEEEIEDGGLFIPMEEQDNEESEKRRKKKKGTKRKRDGRGQEGTLAYDLKLDDMLDRTLEDGAKQHNLTAVNVRNILHEVITNEHVVAMMKAAISETEDMPMFEPKMTRSKLKEVVEKGVVIPTWNISPIKKANEIKPPQFVDIHLEEDDSSDEEYQPDDEEEDDTAEESLLESDVESTASSPRGAKKSRLRQSSEMTETDEESGILSEAEKVTTPAIRHISAEVVPMGPPPPPKPKQTRDSTFMEKLHAVDEELASSPVCMDSFQPMDDSLIAFRTRSKMPLKDVPLGQLEAELQAPDITPDMYDPNTADDEDWKMWLGGLMNDDVGNEDEADDDDDPEYNFLEDLDEPDTEDFRTDRAVRITKKEVNELMEELFETVSNDPRVRTWDFKSVLQQDVSFGLCDAPSRRGGLTEPILLLVYLGKNIMTREFC

SEQ ID NO: 893172 - protein, 596 aa, Homo sapiens [sequence omitted]

SEQ ID NO: 893173 - protein, 772 aa, Homo sapiens
SEWNKSGTFKMLPCKKRRTTVTESLQHKGNQEENNVDLESAVKPESDQVKDLSSVSLSWDPSHGRVAGFEVQSLQDAGNQLGMEDTSLSSGMLTQNTNVPILEGVDVAISQGITLPSLESFHPLNIHIGKGKLHATGSKRGKKMTLRPGPVTQEDRCDHLTLKEPFSGEPSEEVKEEGGKPQMNSEGEIPSLPSGSQSAKPVSQPRKSTQPDVCASPQEKPLRTLFHQPEEEIEDGGLFIPMEEQDNEESEKRRKKKKGTKRKRDGRGQEGTLAYDLKLDDMLDRTLEDGAKQHNLTAVNVRNILHEVITNEHVVAMMKAAISETEDMPMFEPKMTRSKLKEVVEKGVVIPTWNISPIKKANEIKPPQFVDIHLEEDDSSDEEYQPDDEEEDDTAEESLLESDVESTASSPRGAKKSRLRQSSEMTETDEESGILSEAEKVTTPAIRHISAEVVPMGPPPPPKPKQTRDSTFMEKLHAVDEELASSPVCMDSFQPMDDSLIAFRTRSKMPLKDVPLGQLEAELQAPDITPDMYDPNTADDEDWKMWLGGLMNDDVGNEDEADDDDDPEYNFLEDLDEPDTEDFRTDRAVRITKKEVNELMEELFETFQDEMGFSNMEDDGPEEEECVAEPRPNFNTPQALRFEEPLANLLNEQHRTVKELFEQLKMKKSSAKQLQEVEKVKPQSEKVHQTLILDPAQRKRLQQQMQQKELGTFAQSSIALHHQYNPKFQTLFQPCNLMGAMQLIEDFSTHVSIDCSPHKTVKKTGRRQMCQL

SEQ ID NO: 893174 - protein, 1539 aa, Homo sapiens
SEWNKSGTFKMLPCKKRRTTVTESLQHKGNQEENNVDLESAVKPESDQVKDLSSVSLSWDPSHGRVAGFEVQSLQDAGNQLGMEDTSLSSGMLTQNTNVPILEGVDVAISQGITLPSLESFHPLNIHIGKGKLHATGSKRGKKMTLRPGPVTQEDRCDHLTLKEPFSGEPSEEVKEEGGKPQMNSEGEIPSLPSGSQSAKPVSQPRKSTQPDVCASPQEKPLRTLFHQPEEEIEDGGLFIPMEEQDNEESEKRRKKKKGTKRKRDGRGQEGTLAYDLKLDDMLDRTLEDGAKQHNLTAVNVRNILHEVITNEHVVAMMKAAISETEDMPMFEPKMTRSKLKEVVEKGVVIPTWNISPIKKANEIKPPQFVDIHLEEDDSSDEEYQPDDEEEDDTAEESLLESDVESTASSPRGAKKSRLRQSSEMTETDEESGILSEAEKVTTPAIRHISAEVVPMGPPPPPKPKQTRDSTFMEKLHAVDEELASSPVCMDSFQPMDDSLIAFRTRSKMPLKDVPLGQLEAELQAPDITPDMYDPNTADDEDWKMWLGGLMNDDVGNEDEADDDDDPEYNFLEDLDEPDTEDFRTDRAVRITKKEVNELMEELFETFQDEMGFSNMEDDGPEEEECVAEPRPNFNTPQALRFEEPLANLLNEQHRTVKELFEQLKMKKSSAKQLQEVEKVKPQSEKVHQTLILDPAQRKRLQQQMQQHVQLLTQIHLLATCNPNLNPEATTTRIFLKELGTFAQSSIALHHQYNPKFQTLFQPCNLMGAMQLIEDFSTHVSIDCSPHKTVKKTANEFPCLPKQVAWILATSKVFMYPELLPVCSLKAKNPQDKIVFTKAEDNLLALGLKHFEGTEFPNPLISKYLLTCKTAHQLTVRIKNLNMNRAPDNIIKFYKKTKQLPVLGKCCEEIQPHQWKPPIEREEHRLPFWLKASLPSIQEELRHMADGAREVGNMTGTTEINSDRSLEKDNLELGSESRYPLLLPKGVVLKLKPVATRFPRKAWRQKRSSVLKPLLIQPSPSLQPSFNPGKTPARSTHSEAPPSKMVLRIPHPIQPATVLQTVPGVPPLGVSGGESFESPAALPAVPPEARTSFPLSESQTLLSSAPVPKVMLPSLAPSKFRKPYVRRRPSKRRGVKASPCMKPAPVIHHPASVIFTVPATTVKIVSLGGGCNMIQPVNAAVAQSPQTIPITTLLVNPTSFPCPLNQSLVASSVSPLIVSGNSVNLPIPSTPEDKAHVNVDIACAVADGENAFQGLEPKLEPQELSPLSATVFPKVEHSPGPPLADAECQEGLSENSACRWTVVKTEEGRQALEPLPQGIQESLNNPTPGDLEEIVKMEPEEAREEISGSPERDICDDIKVEHAVELDTGAPSEELSSAGEVTKQTVLQKEEERSQPTKTPSSSQEPPDEGTSGTDVNKGSSKNALSSMDPEVRLSSPPGKPEDSSSVDGQSVGTPVGPETGGEKNGPEEEEEEDFDDLTQDEEDEMSSASEESVLSVPELQVRAGEYSQVFRGLSNMYHLLICHLLACCTMDSPKIICI

SEQ ID NO: 893175 - protein, 1539 aa, Homo sapiens; identical to SEQ ID NO: 893174

SEQ ID NO: 893176 - protein, 1431 aa, Homo sapiens
SEWNKSGTFKMLPCKKRRTTVTESLQHKGNQEENNVDLESAVKPESDQVKDLSSVSLSWDPSHGRVAGFEVQSLQDAGNQLGMEDTSLSSGMLTQNTNVPILEGVDVAISQGITLPSLESFHPLNIHIGKGKLHATGSKRGKKMTLRPGPVTQEDRCDHLTLKEPFSGEPSEEVKEEGGKPQMNSEGEIPSLPSGSQSAKPVSQPRKSTQPDVCASPQEKPLRTLFHQPEEEIEDGGLFIPMEEQDNEESEKRRKKKKGTKRKRDGRGQEGTLAYDLKLDDMLDRTLEDGAKQHNLTAVNVRNILHEVITNEHVVAMMKAAISETEDMPMFEPKMTRSKLKEVVEKGVVIPTWNISPIKKANEIKPPQFVDIHLEEDDSSDEEYQPDDEEEDDTAEESLLESDVESTASSPRGAKKSRLRQSSEMTETDEESGILSEAEKVTTPAIRHISAEVVPMGPPPPPKPKQTRDSTFMEKLHAVDEELASSPVCMDSFQPMDDSLIAFRTRSKMPLKDVPLGQLEAELQAPDITPDMYDPNTADDEDWKMWLGGLMNDDVGNEDEADDDDDPEYNFLEDLDEPDTEDFRTDRAVRITKKEVNELMEELFETFQDEMGFSNMEDDGPEEEECVAEPRPNFNTPQALRFEEPLANLLNEQHRTVKELFEQLKMKKSSAKQLQEVEKVKPQSEKVHQTLILDPAQRKRLQQQMQQHVQLLTQIHLLATCNPNLNPEATTTRIFLKELGTFAQSSIALHHQYNPKFQTLFQPCNLMGAMQLIEDFSTHVSIDCSPHKTVKKTANEFPCLPKQVAWILATSKVFMYPELLPVCSLKAKNPQDKIVFTKAEDNLLALGLKHFEGTEFPNPLISKYLLTCKTAHQLTVRIKNLNMNRAPDNIIKFYKKTKQLPVLGKCCEEIQPHQWKPPIEREEHRLPFWLKASLPSIQEELRHMADGAREVGNMTGTTEINSDRSLEKDNLELGSESRYPLLLPKGVVLKLKPVATRFPRKAWRQKRSSVLKPLLIQPSPSLQPSFNPGKTPARSTHSEAPPSKMVLRIPHPIQPATVLQTVPGVPPLGVSGGESFESPAALPAVPPEARTSFPLSESQTLLSSAPVPKVMLPSLAPSKFRKPYVRRRPSKRRGVKASPCMKPAPVIHHPASVIFTVPATTVKIVSLGGGCNMIQPVNAAVAQSPQTIPITTLLVNPTSFPCPLNQSLVASSVSPLIVSGNSVNLPIPSTPEDKAHVNVDIACAVADGENAFQGLEPKLEPQELSPLSATVFPKVEHSPGPPLADAECQEGLSENSACRWTVVKTEEGRQALEPLPQGIQESLNNPTPGDLEEIVKMEPEEAREEISGSPERDICDDIKVEHAVELDTGAPSEELSSAGEVTKQTVLQKLEERRMGQKKRKKRTLMTSPKMRKMKCHQLLRNLCFLSQNSR

SEQ ID NO: 893177 - protein, 801 aa, Homo sapiens
SEWNKSGTFKMLPCKKRRTTVTESLQHKGNQEENNVDLESAVKPESDQVKDLSSVSLSWDPSHGRVAGFEVQSLQDAGNQLGMEDTSLSSGMLTQNTNVPILEGVDVAISQGITLPSLESFHPLNIHIGKGKLHATGSKRGKKMTLRPGPVTQEDRCDHLTLKEPFSGEPSEEVKEEGGKPQMNSEGEIPSLPSGSQSAKPVSQPRKSTQPDVCASPQEKPLRTLFHQPEEEIEDGGLFIPMEEQDNEESEKRRKKKKGTKRKRDGRGQEGTLAYDLKLDDMLDRTLEDGAKQHNLTAVNVRNILHEVITNEHVVAMMKAAISETEDMPMFEPKMTRSKLKEVVEKGVVIPTWNISPIKKANEIKPPQFVDIHLEEDDSSDEEYQPDDEEEDDTAEESLLESDVESTASSPRGAKKSRLRQSSEMTETDEESGILSEAEKVTTPAIRHISAEVVPMGPPPPPKPKQTRDSTFMEKLHAVDEELASSPVCMDSFQPMDDSLIAFRTRSKMPLKDVPLGQLEAELQAPDITPDMYDPNTADDEDWKMWLGGLMNDDVGNEDEADDDDDPEYNFLEDLDEPDTEDFRTDRAVRITKKEVNELMEELFETFQDEMGFSNMEDDGPEEEECVAEPRPNFNTPQALRFEEPLANLLNEQHRTVKELFEQLKMKKSSAKQLQEVEKVKPQSEKVHQTLILDPAQRKRLQQQMQQHVQLLTQIHLLATCNPNLNPEATTTRIFLKELGTFAQSSIALHHQYNPKFQTLFQPCNLMGAMQLIEDFSTHVSIDCSPHKTVKKTGRRQMCQL

SEQ ID NO: 893178 - protein, 476 aa, Homo sapiens
MISLALGNYSTSGTRISSSAMPPGPWESCFWVGGLILWLSVGSSGDAPPTPQPKCADFQSANLFEGTDLKVQFLLFVPSNPSCGQLVEGSSDLQNSGFNATLGTKLIIHGFRVLGTKPSWIDTFIRTLLRATNANVIAVDWIYGSTGVYFSAVKNVIKLSLEISLFLNKLLVLGVSESSIHIIGVSLGAHVGGMVGQLFGGQLGQITGLDPAGPEYTRASVEERLDAGDALFVEAIHTDTDNLGIRIPVGHVDYFVNGGQDQPGCPTFFYAGYSYLICDHMRAVHLYISALENSCPLMAFPCASYKAFLAGRCLDCFNPFLLSCPRIGLVEQGGVKIEPLPKEVKVYLLTTSSAPYCMHHSLVEFHLKELRNKDTNIEVTFLSSNITSSSKITIPKQQRYGKGIIAHATPQCQINQVKFKFQSSNRVWKKDRTTIIGKFCTALLPVNDREKMVCLPEPVNLQASVTVSCDLKIACV

SEQ ID NO: 893179 - protein, 103 aa, Homo sapiens
LLWVLRSSQKTPSHYGDAPPTPQPKCADFQSANLFEGTDLKVQFLLFVPSNPSCGQLVEGSSDLQNSGFNATLGTKLIIHGFRWELNNQQDFSTKNDQVTIIP

SEQ ID NO: 893180 - protein, 378 aa, Homo sapiens
MISLALGNYSTSGTRISSSAMPPGPWESCFWVGGLILWLSVGSSGDAPPTPQPKCADFQSANLFEGTDLKVQFLLFVPSNPSCGQLVEGSSDLQNSGFNATLGTKLIIHGFRVLGTKPSWIDTFIRTLLRATNANVIAVDWIYGSTGVYFSAVKNVIKLSLEISLFLNKLLVLGVSESSIHIIGVSLGAHVGGMVGQLFGGQLGQITGLDPAGPEYTRASVEERLDAGDALFVEAIHTDTDNLGIRIPVGHVDYFVNGGQDQPGCPTFFYAGYSYLICDHMRAVHLYISALENSCPLMAFPCASYKAFLAGRCLDCFNPFLLSCPRIGLVEQGGVKIEPLPKEVKVYLLTTSSAPYCNAFQLLTVAPNRGISLKLGCW

SEQ ID NO: 893181 - protein, 442 aa, Homo sapiens
MISLALGNYSTSGTRISSSAMPPGPWESCFWVGGLILWLSVGSSGDAPPTPQPKCADFQSANLFEGTDLKVQFLLFVPSNPSCGQLVEGSSDLQNSGFNATLGTKLIIHGFRVLGTKPSWIDTFIRTLLRATNANVIAVDWIYGSTGVYFSAVKNVIKLSLEISLFLNKLLVLGVSESSIHIIGVSLGAHVGGMVGQLFGGQLGQITDLGIRIPVGHVDYFVNGGQDQPGCPTFFYAGYSYLICDHMRAVHLYISALENSCPLMAFPCASYKAFLAGRCLDCFNPFLLSCPRIGLVEQGGVKIEPLPKEVKVYLLTTSSAPYCMHHSLVEFHLKELRNKDTNIEVTFLSSNITSSSKITIPKQQRYGKGIIAHATPQCQINQVKFKFQSSNRVWKKDRTTIIGKFCTALLPVNDREKMVCLPEPVNLQASVTVSCDLKIACV

SEQ ID NO: 893182 - protein, 283 aa, Homo sapiens
MVGQLFGGQLGQITGLDPAGPEYTRASVEERLDAGDALFVEAIHTDTDNLGIRIPVGHVDYFVNGGQDQPGCPTFFYAGYSYLICDHMRAVHLYISALENSCPLMAFPCASYKAFLAGRCLDCFNPFLLSCPRIGLVEQGGVKIEPLPKEVKVYLLTTSSAPYCMHHSLVEFHLKELRNKDTNIEVTFLSSNITSSSKITIPKQQRYGKGIIAHATPQCQINQVKFKFQSSNRVWKKDRTTIIGKFCTALLPVNDREKMVCLPEPVNLQASVTVSCDLKIACV

SEQ ID NO: 893183 - protein, 406 aa, Homo sapiens
MAENGKNCDQRRVAMNKEHHNGNFTDPSSVNEKKRREREERQNIVLWRQPLITLQYFSLEILVILKEWTSKLWHRQSIVVSFLLLLAVLIATYYVEGVHQQYVQRIEKQFLLYAYWIGLGILSSVGLGTGLHTFLLYLGPHIASVTLAAYECNSVNFPEPPYPDQIICPDEEGTEGTISLWSIISKVRIEACMWGIGTAIGELPPYFMARAARLSGAEPDDEEYQEFEEMLEHAESAQDFASRAKLAVQKLVQKVGFFGILACASIPNPLFDLAGITCGHFLVPFWTFFGATLIGKAIIKMHIQKIFVIITFSKHIVEQMVAFIGAVPGIGPSLQKPFQEYLEAQRQKLHHKSEMGTPQGENWLSWMFEKLVVVMVCYFILSIINSMAQSYAKRIQQRLNSEEKTK

SEQ ID NO: 893184 - protein, 406 aa, Homo sapiens; identical to SEQ ID NO: 893183

SEQ ID NO: 893185 - protein, 362 aa, Homo sapiens [sequence omitted]

SEQ ID NO: 893186 - protein, 362 aa, Homo sapiens [sequence omitted]

SEQ ID NO: 893187 - protein, 406 aa, Homo sapiens; identical to SEQ ID NO: 893183

SEQ ID NO: 893188 - protein, 406 aa, Homo sapiens; identical to SEQ ID NO: 893183

SEQ ID NO: 893189 - protein, 419 aa, Homo sapiens
MAENGKNCDQRRVAMNKEHHNGNFTDPSSVNEKKRREREERQNIVLWRQPLITLQYFSLEILVILKEWTSKLWHRQSIVVSFLLLLAVLIATYYVEGVHQQYVQRIEKQFLLYAYWIGLGILSSVGLGTGLHTFLLYLGPHIASVTLAAYECNSVNFPEPPYPDQIICPDEEGTEGTISLWSIISKVRIEACMWGIGTAIGELPPYFMARAARLSGAEPDDEEYQEFEEMLEHAESAQDFASRAKLAVQKLVQKVGFFGILACASIPNPLFDLAGITCGHFLVPFWTFFGATLIGKAIIKMHIQKIFVIITFSKHIVEQMVAFIGLEDNGALQPPPPSAVPGIGPSLQKPFQEYLEAQRQKLHHKSEMGTPQGENWLSWMFEKLVVVMVCYFILSIINSMAQSYAKRIQQRLNSEEKTK

SEQ ID NO: 893190 - protein, 338 aa, Homo sapiens
QRIPLFVLHIVVSFLLLLAVLIATYYVEGVHQQYVQRIEKQFLLYAYWIGLGILSSVGLGTGLHTFLLYLGPHIASVTLAAYECNSVNFPEPPYPDQIICPDEEGTEGTISLWSIISKVRIEACMWGIGTAIGELPPYFMARAARLSGAEPDDEEYQEFEEMLEHAESAQDFASRAKLAVQKLVQKVGFFGILACASIPNPLFDLAGITCGHFLVPFWTFFGATLIGKAIIKMHIQKIFVIITFSKHIVEQMVAFIGAVPGIGPSLQKPFQEYLEAQRQKLHHKSEMGTPQGENWLSWMFEKLVVVMVCYFILSIINSMAQSYAKRIQQRLNSEEKTK

SEQ ID NO: 893191 - protein, 309 aa, Homo sapiens
MDLKYVQRIEKQFLLYAYWIGLGILSSVGLGTGLHTFLLYLGPHIASVTLAAYECNSVNFPEPPYPDQIICPDEEGTEGTISLWSIISKVRIEACMWGIGTAIGELPPYFMARAARLSGAEPDDEEYQEFEEMLEHAESAQDFASRAKLAVQKLVQKVGFFGILACASIPNPLFDLAGITCGHFLVPFWTFFGATLIGKAIIKMHIQKIFVIITFSKHIVEQMVAFIGAVPGIGPSLQKPFQEYLEAQRQKLHHKSEMGTPQGENWLSWMFEKLVVVMVCYFILSIINSMAQSYAKRIQQRLNSEEKTK

SEQ ID NO: 893192 - protein, 406 aa, Homo sapiens; identical to SEQ ID NO: 893183

SEQ ID NO: 893193 - protein, 272 aa, Homo sapiens
MDLKGPHIASVTLAAYECNSVNFPEPPYPDQIICPDEEGTEGTISLWSIISKVRIEACMWGIGTAIGELPPYFMARAARLSGAEPDDEEYQEFEEMLEHAESAQDFASRAKLAVQKLVQKVGFFGILACASIPNPLFDLAGITCGHFLVPFWTFFGATLIGKAIIKMHIQKIFVIITFSKHIVEQMVAFIGAVPGIGPSLQKPFQEYLEAQRQKLHHKSEMGTPQGENWLSWMFEKLVVVMVCYFILSIINSMAQSYAKRIQQRLNSEEKTK

SEQ ID NO: 893194 - protein, 172 aa, Homo sapiens
MDLKDFASRAKLAVQKLVQKVGFFGILACASIPNPLFDLAGITCGHFLVPFWTFFGATLIGKAIIKMHIQKIFVIITFSKHIVEQMVAFIGAVPGIGPSLQKPFQEYLEAQRQKLHHKSEMGTPQGENWLSWMFEKLVVVMVCYFILSIINSMAQSYAKRIQQRLNSEEKTK

SEQ ID NO: 893195 - protein, 406 aa, Homo sapiens; identical to SEQ ID NO: 893183

SEQ ID NO: 893196 - protein, 106 aa, Homo sapiens [sequence omitted]

SEQ ID NO: 893197 - protein, 107 aa, Homo sapiens
DFYQPLAFPVALAHWHAGLGSSTHNACSPPPCGCQAKPPATFITKLHSLLPGILFPSFTTKSKWAHHREKTGCPGCLKSWSLSWCVTSSYLSLTPWHKVMPNESSSG

SEQ ID NO: 893198 - protein, 406 aa, Homo sapiens; identical to SEQ ID NO: 893183

SEQ ID NO: 893199 - protein, 406 aa, Homo sapiens; identical to SEQ ID NO: 893183

SEQ ID NO: 893200 - protein, 362 aa, Homo sapiens [sequence omitted]

SEQ ID NO: 893201 - protein, 362 aa, Homo sapiens [sequence omitted]

SEQ ID NO: 893202 - protein, 362 aa, Homo sapiens [sequence omitted]

SEQ ID NO: 893203 - protein, 362 aa, Homo sapiens [sequence omitted]

SEQ ID NO: 893204 - protein, 483 aa, Homo sapiens
MKAFHTFCVVLLVFGSVSEAKFDDFEDEEDIVEYDDNDFAEFEDVMEDSVTESPQRVIITEDDEDETTVELEGQDENQEGDFEDADTQEGDTESEPYDDEEFEGYEDKPDTSSSKNKDPITIVDVPAHLQNSWESYYLEILMVTGLLAYIMNYIIGKNKNSRLAQAWFNTHRELLESNFTLVGDDGTNKEATSTGKLNQENEHIYNLWCSGRVCCEGMLIQLRFLKRQDLLNVLARMMRPVSDQVQIKVTMNDEDMDTYVFAVGTRKALVRLQKEMQDLSEFCSDKPKSGAKYGLPDSLAILSEMGEVTDGMMDTKMVHFLTHYADKIESVHFSDQFSGPKIMQEEGQPLKLPDTKRTLLFTFNVPGSGNTYPKDMEALLPLMNMVIYSIDKAKKFRLNREGKQKADKNRARVEENFLKLTHVQRQEAAQSRREEKKRAEKERIMNEEDPEKQRRLEEAALRREQKKLEKKQMKMKQIKVKAM

SEQ ID NO: 893205 - protein, 480 aa, Homo sapiens
MKAFHTFCVVLLVFGSVSEAKFDDFEDEEDIVEYDDNDFAEFEDVMEDSVTESPQRVIITEDDEDETTVELEGQDENQEGDFEDADTQEGDTESEPYDDEEFEGYEDKPDTSSSKNKDPITIVDVPAHLQNSWESYYLEILMVTGLLAYIMNYIIGKNKNSRLAQAWFNTHRELLESNFTLVGDDGTNKEATSTGKLNQENEHIYNLWCSGRVCCEGMLIQLRFLKRQDLLNVLARMMRPVSDQVQIKVTMNDEDMDTYVFAVGTRKALVRLQKEMQDLSEFCSDKPKSGAKYGLPDSLAILSEMGEVTDGMMDTKMVHFLTHYADKIESVHFSDQFSGPKIMQEEGQPLKLPDTKRTLLFTFNVPGSGNTYPKDMEALLPLMNMVIYSIDKAKKFRLNREGKQKADKNRARVEENFLKLTHVQRQEAAQSRREEKKRAEKERIMNEEDPEKQRRLEVRQTYHWGKTTICKDDCLCSVGC

SEQ ID NO: 893206 - protein, 483 aa, Homo sapiens; identical to SEQ ID NO: 893204

SEQ ID NO: 893207 - protein, 342 aa, Homo sapiens [sequence omitted]

SEQ ID NO: 893208 - protein, 483 aa, Homo sapiens; identical to SEQ ID NO: 893204

SEQ ID NO: 893209 - protein, 483 aa, Homo sapiens; identical to SEQ ID NO: 893204

SEQ ID NO: 893210 - protein, 463 aa, Homo sapiens
MKAFHTFCVVLLVFGSVSEAKFDDFEDEEDIVEYDDNDFAEFEDVMEDSVTESPQRVIITEDDEDETTVELEGQDENQEGDFEDADTQEGDTESEPYDDEEFEGYEDKPDTSSSKNKDPITIVDVPAHLQNSWESYYLEILMVTGLLAYIMNYIIGKNKNSRLAQAWFNTHRELLESNFTLVGDDGTNKEATSTGKLNQENEHIYNLWCSGRVCCEGMLIQLRFLKRQDLLNVLARMMRPVSDQVQIKVTMNDEDMDTYVFAVGTRKALVRLQKEMQDLSEFCSDKPKSGAKYGLPDSLAILSEMGEVTDGMMDTKMVHFLTHYADKIESVHFSDQFSGPKIMQEEGQPLKLPDTKRTLLFTFNVPGSGNTYPKDMEALLPLMNMVIYSIDKAKKFRLNREGKQKADKNRARVEENFLKLTHVQRQEAAQSRREEKKRAEKERIMNEEDPEKQRRLEEAALRR

SEQ ID NO: 893211 - protein, 391 aa, Homo sapiens
  misc_feature (369)..(369): Xaa can be any naturally occurring amino acid
  misc_feature (375)..(375): Xaa can be any naturally occurring amino acid
  misc_feature (381)..(381): Xaa can be any naturally occurring amino acid
  misc_feature (386)..(386): Xaa can be any naturally occurring amino acid
MKAFHTFCVVLLVFGSVSEAKFDDFEDEEDIVEYDDNDFAEFEDVMEDSVTESPQRVIITEDDEDETTVELEGQDENQEGDFEDADTQEGDTESEPYDDEEFEGYEDKPDTSSSKNKDPITIVDVPAHLQNSWESYYLEILMVTGLLAYIMNYIIGKNKNSRLAQAWFNTHRELLESNFTLVGDDGTNKEATSTGKLNQENEHIYNLWCSGRVCCEGMLIQLRFLKRQDLLNVLARMMRPVSDQVQIKVTMNDEDMDTYVFAVGTRKALVRLQKEMQDLSEFCSDKPKSGAKYGLPDSLAILSEMGEVTDGMMDTKMVHFLTHYADKIESVHFSDQFSGPKIMQEEGQPLKLPDTKRTLLFTFNGAWAXVTTLPXIWEALXTPLDXTMGGF

SEQ ID NO: 893212 - protein, 147 aa, Homo sapiens
MKAFHTFCVVLLVFGSVSEAKFDDFEDEEDIVEYDDNDFAEFEDVMEDSVTESPQRVIITEDDEDETTVELEGQDENQEGDFEDADTQEGDTESEPYDDEEFEGYEDKPDTSSSKNKDPITIVDVGIQDSEFPTKQQNVLSSIPEIK

SEQ ID NO: 893213 - protein, 483 aa, Homo sapiens; identical to SEQ ID NO: 893204

SEQ ID NO: 893214 - protein, 483 aa, Homo sapiens; identical to SEQ ID NO: 893204

SEQ ID NO: 893215 - protein, 483 aa, Homo sapiens; identical to SEQ ID NO: 893204

SEQ ID NO: 893216 - protein, 402 aa, Homo sapiens
MKAFHTFCVVLLVFGSVSEAKFDDFEDEEDIVEYDDNDFAEFEDVMEDSVTESPQRVIITEDDEDETTVELEGQDENQEGDFEDADTQEGDTESEPYDDEEFEGYEDKPDTSSSKNKDPITIVDVPAHLQNSWESYYLEILMVTGLLAYIMNYIIGKNKNSRLAQAWFNTHRELLESNFTLVGDDGTNKEATSTGKLNQENEHIYNLWCSGRVCCEGMLIQLRFLKRQDLLNVLARMMRPVSDQVQIKVTMNDEDMDTYVFAVGTRKALVRLQKEMQDLSEFCSDKPKSGAKYGLPDSLAILSEMGEVTDGMMDTKMVHFLTHYADKIESVHFSDQFSGPKIMQEEGQPLKLPDTKRTLLFTFNVPGSGNTYPKDMEALLPLMNMVIYSIDKAKKFRLNREL

SEQ ID NO: 893217 - protein, 286 aa, Homo sapiens
PEDGPLSLPPYPSLPIAPIPINDNLPLISPASRKSANNIESRPVSDQVQIKVTMNDEDMDTYVFAVGTRKALVRLQKEMQDLSEFCSDKPKSGAKYGLPDSLAILSEMGEVTDGMMDTKMVHFLTHYADKIESVHFSDQFSGPKIMQEEGQPLKLPDTKRTLLFTFNVPGSGNTYPKDMEALLPLMNMVIYSIDKAKKFRLNREGKQKADKNRARVEENFLKLTHVQRQEAAQSRREEKKRAEKERIMNEEDPEKQRRLEEAALRREQKKLEKKQMKMKQIKVKAM

SEQ ID NO: 893218 - protein, 483 aa, Homo sapiens; identical to SEQ ID NO: 893204

SEQ ID NO: 893219 - protein, 298 aa, Homo sapiens
MKAFHTFCVVLLVFGSVSEAKFDDFEDEEDIVEYDDNDFAEFEDVMEDSVTESPQRVIITEDDEDETTVELEGQDENQEGDFEDADTQEGDTESEPYDDEEFEGYEDKPDTSSSKNKDPITIVDVPAHLQNSWESYYLEILMVTGLLAYIMNYIIGKNKNSRLAQAWFNTHRELLESNFTLVGDDGTNKEATSTGKLNQENEHIYNLWCSGRVCCEGMLIQLRFLKRQDLLNVLARMMRPVSDQVQIKVTMNDEDMDTYVFAVGTRKALVRLQKEMQDLSKSCLLRNLSWISMPSQNT

SEQ ID NO: 893220 - protein, 69 aa, Homo sapiens
MKAFHTFCVVLLVFGSVSEAKFDDFEDEEDIVEYDDNDFAEFEDVMEDSVTESPQRVIITEDDEDETTV

SEQ ID NO: 893221 - protein, 1139 aa, Homo sapiens
AAAAPGCALSRRPPERHGRSCGGGIMAPTLLQKLFNKRGSSGSSAAASAQGRAPKEGPAFSWSCSEFDLNEIRLIVYQDCDRRGRQVLFDSKAVQKIEEVTAQKTEDVPIKISAKCCQGSSSVSSSSSSSISSHSSSGGSSHHAKEQLPKYQYTRPASDVNMLGEMMFGSVAMSYKGSTLKIHYIRSPPQLMISKVFSARMGSFCGSTNNLQDSFEYINQDPNLGKLNTNQNSLGPCRTGSNLAHSTPVDMPSRGQNEDRDSGIARSASLSSLLITPFPSPSSSTSSSSSYQRRWLRSQTTSLENGIIPRRSTDETFSLAEETCSSNPAMVRRKKIAISIIFSLCEKEEAQRNFQDFFFSHFPLFESHMNRLKSAIEKAMISCRKIAESSLRVQFYVSRLMEALGEFRGTIWNLYSVPRIAEPVWLTMMSGTLEKNQLCQRFLKEFTLLIEQINKNQFFAALLTAVLTYHLAWVPTVMPVDHPPIKAFSEKRTSQSVNMLAKTHPYNPLWAQLGDLYGAIGSPVRLTRTVVVGKQKDLVQRILYVLTYFLRCSELQENQLTWSGNHGEGDQVLNGSKIITALEKGEVEESEYVVITVRNEPALVPPILPPTAAERHNPWPTGFPECPEGTDSRDLGLKPDKEANRRPEQGSEACSAGCLGPASDASWKPQNAFCGDEKNKEAPQDGSSRLPSCEVLGAGMKMDQQAVCELLKVEMPTRLPDRSVAWPCPDRHLREKPSLEKVTFQIGSFASPESDFESRMKKMEERVKACGPSLEASEAADVAQDPQVSRSPFKPGFQENVCCPQNRLSEGDEGESDKGFAEDRGSRNDMAADIAGQLSHAADLGTASHGAGGTGGRRLEATRGLYVKAAEGPVLEPVAPRCVQRGPGLVAGANIPCGDDNKKANFRTEGDIPRNESSDSALGDSDDEACASAMLDLGHGGDRTGGSLEVELPLPRSQSISTQNVRNFGRSLLAGYCPTYMPDLVLHGTGSDEKLKQCLVADLVHTVHHPVLDEPIAEAVCIIADTDKWSVQVATSQRKVTDNMKLGQDVLVSSQVSSLLQSILQLYKLHLPADFCIMHLEDRLQEMYLKSKMLSEYLRGHTRVHVKELGVVLGIESNDLPLLTAIASTHSPYVAQILL

SEQ ID NO: 893222 - protein, 1188 aa, Homo sapiens
AFLTYCIGSEMMFRTAGHYRMFLTEQRNFRIVSKSMFMVRINQKNIKPVQEMCGGTANTTNQPESWQDSARCVSDAVPGAGRIYRALLCTKIKKHTGVDRSTDHTELDNSWSCSEFDLNEIRLIVYQDCDRRGRQVLFDSKAVQKIEEVTAQKTEDVPIKISAKCCQGSSSVSSSSSSSISSHSSSGGSSHHAKEQLPKYQYTRPASDVNMLGEMMFGSVAMSYKGSTLKIHYIRSPPQLMISKVFSARMGSFCGSTNNLQDSFEYINQDPNLGKLNTNQNSLGPCRTGSNLAHSTPVDMPSRGQNEDRDSGIARSASLSSLLITPFPSPSSSTSSSSSYQRRWLRSQTTSLENGIIPRRSTDETFSLAEETCSSNPAMVRRKKIAISIIFSLCEKEEAQRNFQDFFFSHFPLFESHMNRLKSAIEKAMISCRKIAESSLRVQFYVSRLMEALGEFRGTIWNLYSVPRIAEPVWLTMMSGTLEKNQLCQRFLKEFTLLIEQINKNQFFAALLTAVLTYHLAWVPTVMPVDHPPIKAFSEKRTSQSVNMLAKTHPYNPLWAQLGDLYGAIGSPVRLTRTVVVGKQKDLVQRILYVLTYFLRCSELQENQLTWSGNHGEGDQVLNGSKIITALEKGEVEESEYVVITVRNEPALVPPILPPTAAERHNPWPTGFPECPEGTDSRDLGLKPDKEANRRPEQGSEACSAGCLGPASDASWKPQNAFCGDEKNKEAPQDGSSRLPSCEVLGAGMKMDQQAVCELLKVEMPTRLPDRSVAWPCPDRHLREKPSLEKVTFQIGSFASPESDFESRMKKMEERVKACGPSLEASEAADVAQDPQVSRSPFKPGFQENVCCPQNRLSEGDEGESDKGFAEDRGSRNDMAADIAGQLSHAADLGTASHGAGGTGGRRLEATRGLYVKAAEGPVLEPVAPRCVQRGPGLVAGANIPCGDDNKKANFRTEGDIPRNESSDSALGDSDDEACASAMLDLGHGGDRTGGSLEVELPLPRSQSISTQNVRNFGRSLLAGYCPTYMPDLVLHGTGSDEKLKQCLVADLVHTVHHPVLDEPIAEAVCIIADTDKWSVQVATSQRKVTDNMKLGQDVLVSSQVSSLLQSILQLYKLHLPADFCIMHLEDRLQEMYLKSKMLSEYLRGHTRVHVKELGVVLGIESNDLPLLTAIASTHSPYVAQILL

SEQ ID NO: 893223 - protein, 1169 aa, Homo sapiens
AAAAPGCALSRRPPERHGRSCGGGIMAPTLLQKLFNKRGSSGSSAAASAQGRAPKEGPAFSWSCSEFDLNEIRLIVYQDCDRRGRQVLFDSKAVQKIEEVTAQKTEDVPIKISAKCCQGSSSVSSSSSSSISSHSSSGGSSHHAKEQLPKYQYTRPASDVNMLGEMMFGSVAMSYKGSTLKIHYIRSPPQLMISKVFSARMGSFCGSTNNLQDSFEYINQDPNLGKLNTNQNSLGPCRTGSNLGLLQACSSKLLQGVAEGGPLRLTRSASFFAAHSTPVDMPSRGQNEDRDSGIARSASLSSLLITPFPSPSSSTSSSSSYQRRWLRSQTTSLENGIIPRRSTDETFSLAEETCSSNPAMVRRKKIAISIIFSLCEKEEAQRNFQDFFFSHFPLFESHMNRLKSAIEKAMISCRKIAESSLRVQFYVSRLMEALGEFRGTIWNLYSVPRIAEPVWLTMMSGTLEKNQLCQRFLKEFTLLIEQINKNQFFAALLTAVLTYHLAWVPTVMPVDHPPIKAFSEKRTSQSVNMLAKTHPYNPLWAQLGDLYGAIGSPVRLTRTVVVGKQKDLVQRILYVLTYFLRCSELQENQLTWSGNHGEGDQVLNGSKIITALEKGEVEESEYVVITVRNEPALVPPILPPTAAERHNPWPTGFPECPEGTDSRDLGLKPDKEANRRPEQGSEACSAGCLGPASDASWKPQNAFCGDEKNKEAPQDGSSRLPSCEVLGAGMKMDQQAVCELLKVEMPTRLPDRSVAWPCPDRHLREKPSLEKVTFQIGSFASPESDFESRMKKMEERVKACGPSLEASEAADVAQDPQVSRSPFKPGFQENVCCPQNRLSEGDEGESDKGFAEDRGSRNDMAADIAGQLSHAADLGTASHGAGGTGGRRLEATRGLYVKAAEGPVLEPVAPRCVQRGPGLVAGANIPCGDDNKKANFRTEGDIPRNESSDSALGDSDDEACASAMLDLGHGGDRTGGSLEVELPLPRSQSISTQNVRNFGRSLLAGYCPTYMPDLVLHGTGSDEKLKQCLVADLVHTVHHPVLDEPIAEAVCIIADTDKWSVQVATSQRKVTDNMKLGQDVLVSSQVSSLLQSILQLYKLHLPADFCIMHLEDRLQEMYLKSKMLSEYLRGHTRVHVKELGVVLGIESNDLPLLTAIASTHSPYVAQILL

SEQ ID NO: 893224 - protein, 1008 aa, Homo sapiens
AAAAPGCALSRRPPERHGRSCGGGIMAPTLLQKLFNKRGSSGSSAAASAQGRAPKEGPAFSWSCSEFDLNEIRLIVYQDCDRRGRQVLFDSKAVQKIEEVTAQKTEDVPIKISAKCCQGSSSVSSSSSSSISSHSSSGGSSHHAKEQLPKYQYTRPASDVNMLGEMMFGSVAMSYKGSTLKIHYIRSPPQLMISKVFSARMGSFCGSTNNLQDSFEYINQDPNLGKLNTNQNSLGPCRTGSNLAHSTPVDMPSRGQNEDRDSGIARSASLSSLLITPFPSPSSSTSSSSSYQRRWLRSQTTSLENGIIPRRSTDETFSLAEETCSSNPAMVRRKKIAISIIFSLCEKEEAQRNFQDFFFSHFPLFESHMNRLKSAIEKAMISCRKIAESSLRVQFYVSRLMEALGEFRGTIWNLYSVPRIAEPVWLTMMSGTLEKNQLCQRFLKEFTLLIEQINKNQFFAALLTAVLTYHLAWVPTVMPVDHPPIKAFSEKRTSQSVNMLAKTHPYNPLWAQLGDLYGAIGSPVRLTRTVVVGKQKDLVQRILYVLTYFLRCSELQENQLTWSGNHGEGDQVLNGSKIITALEKGEVEESEYVVITVRNEPALVPPILPPTAAERHNPWPTGFPECPEGTDSRDLGLKPDKEANRRPEQGSEACSAGCLGPASDASWKPQNAFCGDEKNKEAPQDGSSRLPSCEVLGAGMKMDQQAVCELLKVEMPTRLPDRSVAWPCPDRHLREKPSLEKVTFQIGSFASPESDFESRMKKMEERVKACGPSLEASEAADVAQDPQVSRSPFKPGFQENVCCPQNRLSEGDEGESDKGFAEDRGSRNDMAADIAGQLSHAADLGTASHGAGGTGGRRLEATRGLYVKAAEGPVLEPVAPRCVQRGPGLVAGANIPCGDDNKKANFRTEGDIPRNESSDSALGDSDDEACASAMLDLGHGGDRTGGSLEVELPLPRSQSISTQNVRNFGRSLLAGYCPTYMPDLVLHGTGSDEKLKQCLVADLVHTVH

SEQ ID NO: 893225 - protein, 98 aa, Homo sapiens
PTQGCCYGAGRPCGAAARPTNVAQGGFLGGGVRGWSRARASAAGRAAASRRSSVLPGLPDPKLCPRPAQRAWAGGAGGGDGQRGTPRIGRGRSYWSQV

SEQ ID NO: 893226 - protein, 240 aa, Homo sapiens
RRKAAAMGPGGRVARLLAPLMWRRAVSSVAGSAVGAEPGLRLLAVQRLPVGAAFCRACQTPNFVRGLHSEPGLEERAEGTVNEGRPESDAADHTGPKFDIDMMVSLLRQENARDICVIQVPPEMRYTDYFVIVSGTSTRHLHAMAFYVVKMYKHLKCKRDPHVKIEGKDTDDWLCVDFGSMVIHLMLPETREIYELEKLWTLRSYDDQLAQIAPETVPEDFILGIEDDTSSVTPVELKCE

SEQ ID NO: 893227 - protein, 240 aa, Homo sapiens; identical to SEQ ID NO: 893226

SEQ ID NO: 893228 - protein, 113 aa, Homo sapiens
MAAPAVSGLSRQVRCFSTSVVRPFAKLVRPPVQVYGIEGRYATALYSAASKQNKLEQVEKELLRVAQILKEPKVAASVLNPYVKRSIKVKSLNDITAKERFSPPHYQPDQFAC

SEQ ID NO: 893229 - protein, 113 aa, Homo sapiens; identical to SEQ ID NO: 893228

SEQ ID NO: 893230 - protein, 77 aa, Homo sapiens
GDEVACPKSYEPLEEATLSELKTVLKSFLSQGQVLKLEAKTDPSILGGMIVRIGEKYVDMSVKTKIQKLGRAMREIV

SEQ ID NO: 893231 - protein, 113 aa, Homo sapiens; identical to SEQ ID NO: 893228

SEQ ID NO: 893232 - protein, 128 aa, Homo sapiens
PREPSGYANARVRPCAFLSSHSGLTYSRPGEDGCPSSVRALPAGERKVVLRASGRIPPGMTGTKPRAPGCDASAGEVWQSSRLWDLASGSDSGRPSVCPPGCLRGSRRGAARAVTLASSEHSPWKLLA

SEQ ID NO: 893233 - protein, 129 aa, Homo sapiens
RERERERERERERERERERAAVSGLSRQVRCFSTSVVRPFAKLVRPPVQVYGIEGRYATALYSAASKQNKLEQVEKELLRVAQILKEPKVAASVLNPYVKRSIKVKSLNDITAKERFSPPHYQPDQFAC

SEQ ID NO: 893234 - protein, 113 aa, Homo sapiens; identical to SEQ ID NO: 893228

SEQ ID NO: 893235 - protein, 113 aa, Homo sapiens; identical to SEQ ID NO: 893228

SEQ ID NO: 893236 - protein, 113 aa, Homo sapiens; identical to SEQ ID NO: 893228

SEQ ID NO: 893237 - protein, 113 aa, Homo sapiens; identical to SEQ ID NO: 893228

SEQ ID NO: 893238 - protein, 128 aa, Homo sapiens; identical to SEQ ID NO: 893232

SEQ ID NO: 893239 - protein, 113 aa, Homo sapiens; identical to SEQ ID NO: 893228

SEQ ID NO: 893240 - protein, 113 aa, Homo sapiens; identical to SEQ ID NO: 893228

SEQ ID NO: 893241 - protein, 113 aa, Homo sapiens; identical to SEQ ID NO: 893228

SEQ ID NO: 893242 - protein, 113 aa, Homo sapiens; identical to SEQ ID NO: 893228

SEQ ID NO: 893243 - protein, 196 aa, Homo sapiens
MAAPAVSGLSRQVRCFSTSVVRPFAKLVRPPVQVYGIEGRYATALYSAASKQNKLEQVEKELLRVAQILKEPKVAASVLNPYVKRSIKVKSLNDITAKERFSPPHYQPDHFSTMMSVHRGEVPCTVTSASPLEEATLSELKTVLKSFLSQGQVLKLEAKTDPSILGGMIVRIGEKYVDMSVKTKIQKLGRAMREIV

SEQ ID NO: 893244 - protein, 68 aa, Homo sapiens
PREPSGYANARVRPCAFLSSHSGLTYSRPGEDGCPSSVRALPAGAMLQYLCGQTICQACEASCSGIRY

SEQ ID NO: 893245 - protein, 113 aa, Homo sapiens; identical to SEQ ID NO: 893228

SEQ ID NO: 893246 - protein, 68 aa, Homo sapiens; identical to SEQ ID NO: 893244

SEQ ID NO: 893247 - protein, 113 aa, Homo sapiens; identical to SEQ ID NO: 893228

SEQ ID NO: 893248 - protein, 113 aa, Homo sapiens; identical to SEQ ID NO: 893228

SEQ ID NO: 893249 - protein, 68 aa, Homo sapiens; identical to SEQ ID NO: 893244

SEQ ID NO: 893250 - protein, 102 aa, Homo sapiens
SRPGEDGCPSSVRALPAGERKVVLRASGRIPPGMTGTKPRAPGCDASAGEVWQSSRLWDLASGSDSGRPSVCPPGCLRGSRRGAARAVTLASSEHSPWKLLA

SEQ ID NO: 893251 - protein, 361 aa, Homo sapiens
METGAAELYDQALLGILQHVGNVQDFLRVLFGFLYRKTDFYRLLRHPSDRMGFPPGAAQALVLQVFKTFDHMARQDDEKRRQELEEKIRRKEEEEAKTVSAAAAEKEPVPVPVQEIEIDSTTELDGHQEVEKVQPPGPVKEMAHGSQEAEAPGAVAGAAEVPREPPILPRIQEQFQKNPDSYNGAVRENYTWSQDYTDLEVRVPVPKHVVKGKQVSVALSSSSIRVAMLEENGERVLMEGKLTHKINTESSLWSLEPGKCVLVNLSKVGEYWWNAILEGEEPIDIDKINKERSMATVDEEEQAVLDRLTFDYHQKLQGKPQSHELKVHEMLKKGWDAEGSPFRGQRFDPAMFNISPGAVQF

SEQ ID NO: 893252 - protein, 361 aa, Homo sapiens; identical to SEQ ID NO: 893251

SEQ ID NO: 893253 - protein, 200 aa, Homo sapiens
METGAAELYDQALLGILQHVGNVQDFLRVLFGFLYRKTDFYRLLRHPSDRMGFPPGAAQALVLQVFKTFDHMARQDDEKRRQELEEKIRRKEEEEAKTVSAAAAEKEPVPVPVQEIEIDSTTELDGHQEVEKVQPPGPVKEMAHGSQEAEAPGAVAGAAEVPREPPILPRYIYQFLEKIVETTLRNLLNISTSYSFMEVA

SEQ ID NO: 893254 - protein, 361 aa, Homo sapiens; identical to SEQ ID NO: 893251

SEQ ID NO: 893255 - protein, 446 aa, Homo sapiens
METGAAELYDQALLGILQHVGNVQDFLRVLFGFLYRKTDFYRLLRHPSDRMGFPPGAAQALVLQVFKTFDHMARQDDEKRRQELEEKIRRKEEEEAKTVSAAAAEKEPVPVPVQEIEIDSTTELDGHQEVEKVQPPGPVKEMAHGSQEAEAPGAVAGAAEVPREPPILPRIQEQFQKNPDSYNGAVRENYTWSQDYTDLEVRVPVPKHVVKGKQVMGETHVKPHPVLRGKAKNPGHSDEVDGQACVLWGSSMEQGAMSYKYRMLTDCATGATPCHDVPVTFQLEFQTLKFLKPPSNEFEVSVALSSSSIRVAMLEENGERVLMEGKLTHKINTESSLWSLEPGKCVLVNLSKVGEYWWNAILEGEEPIDIDKINKERSMATVDEEEQAVLDRLTFDYHQKLQGKPQSHELKVHEMLKKGWDAEGSPFRGQRFDPAMFNISPGAVQF

SEQ ID NO: 893256 - protein, 361 aa, Homo sapiens; identical to SEQ ID NO: 893251

SEQ ID NO: 893257 - protein, 361 aa, Homo sapiens; identical to SEQ ID NO: 893251

SEQ ID NO: 893258 - protein, 211 aa, Homo sapiens
MLLDVCCMSHKGTKQIRCARIQEQFQKNPDSYNGAVRENYTWSQDYTDLEVRVPVPKHVVKGKQVSVALSSSSIRVAMLEENGERVLMEGKLTHKINTESSLWSLEPGKCVLVNLSKVGEYWWNAILEGEEPIDIDKINKERSMATVDEEEQAVLDRLTFDYHQKLQGKPQSHELKVHEMLKKGWDAEGSPFRGQRFDPAMFNISPGAVQF

SEQ ID NO: 893259 - protein, 134 aa, Homo sapiens [sequence omitted]

SEQ ID NO: 893260 - protein, 117 aa, Homo sapiens
MEQVTMLSSWFPLSEELLVNLSKVGEYWWNAILEGEEPIDIDKINKERSMATVDEEEQAVLDRLTFDYHQKLQGKPQSHELKVHEMLKKGWDAEGSPFRGQRFDPAMFNISPGAVQF

SEQ ID NO: 893261 - protein, 186 aa, Homo sapiens
SVPTTGVLYGGSGDGFQGTWLHTSGHPDRRDDFLLLCPQVSVALSSSSIRVAMLEENGERVLMEGKLTHKINTESSLWSLEPGKCVLVNLSKVGEYWWNAILEGEEPIDIDKINKERSMATVDEEEQAVLDRLTFDYHQKLQGKPQSHELKVHEMLKKGWDAEGSPFRGQRFDPAMFNISPGAVQF

SEQ ID NO: 893262 - protein, 141 aa, Homo sapiens
SGGGGRSAGASGGRGERGPGRDATQRDNAESLSGVRSPGRALVNLSKVGEYWWNAILEGEEPIDIDKINKERSMATVDEEEQAVLDRLTFDYHQKLQGKPQSHELKVHEMLKKGWDAEGSPFRGQRFDPAMFNISPGAVQF

SEQ ID NO: 893263 - protein, 140 aa, Homo sapiens
MRQVLRPVFQVLTGALGAHRREYGSAATGTVHLPVCQAQSMDKPHSRAVHPGTMHGQQESRPADAKRAYCQGKVPAPAHSLWILGLWGLSWRVSLWFVSGLQWWLTPLVRKHSWEVFCGSKHVAPIITGEQKALDTPFGM

SEQ ID NO: 893264 - protein, 361 aa, Homo sapiens; identical to SEQ ID NO: 893251

SEQ ID NO: 893265 - protein, 361 aa, Homo sapiens; identical to SEQ ID NO: 893251

SEQ ID NO: 893266 - protein, 361 aa, Homo sapiens; identical to SEQ ID NO: 893251

SEQ ID NO: 893267 - protein, 361 aa, Homo sapiens; identical to SEQ ID NO: 893251

SEQ ID NO: 893268 - protein, 361 aa, Homo sapiens; identical to SEQ ID NO: 893251

SEQ ID NO: 893269 - protein, 140 aa, Homo sapiens; identical to SEQ ID NO: 893263

SEQ ID NO: 893270 - protein, 140 aa, Homo sapiens; identical to SEQ ID NO: 893263

SEQ ID NO: 893271 - protein, 140 aa, Homo sapiens; identical to SEQ ID NO: 893263

SEQ ID NO: 893272 - protein, 85 aa, Homo sapiens
PGLQEFGTSPRSCTLSMDTWVVGALLESKFVVCFWFTVVADTPCKKAFLGSLLWVQTCCSDHHRRAKGPRYPLWNVRVLLSDICH

SEQ ID NO: 893273 - protein, 339 aa, Homo sapiens
METGAAELYDQALLGILQHVGNVQDFLRVLFGFLYRKTDFYRLLRHPSDRMGFPPGAAQALVLQVFKTFDHMARQDDEKRRQELEEKIRRKEEEEAKTVSAAAAEKEPVPVPVQEIEIDSTTELDGHQEVEKVQPPGPVKEMAHGSQEAEAPGAVAGAAEVPREPPILPRIQEQFQKNPDSYNGAVRENYTWSQDYTDLEVRVPVPKHVVKGKQVSVALSSSSIRVAMLEENGERVLMEGKLTHKINTESSLWSLEPGKCVLVNLSKVGEYWWNAILEGEEPIDIDKINKERSMATVDEEEQAVLDRLTFDYHQKLQGKPQSHELTQQPQFGQPLSPTS

SEQ ID NO: 893274 - protein, 70 aa, Homo sapiens
FLPVPGCYLLPVPGYYLLSISGHHLIPIPCVHLHLIIRSPGCHIPNLLVSGARAQAGLWNVRVLLSDICH

SEQ ID NO: 893275 - protein, 368 aa, Homo sapiens
METGAAELYDQALLGILQHVGNVQDFLRVLFGFLYRKTDFYRLLRHPSDRMGFPPGAAQALVLQVFKTFDHMARQDDEKRRQELEEKIRRKEEEEAKTVSAAAAEKEPVPVPVQEIEIDSTTELDGHQEVEKVQPPGPVKEMAHGSQEAEAPGAVAGAAEVPREPPILPRIQEQFQKNPDSYNGAVRENYTWSQDYTDLEVRVPVPKHVVKGKQVSVALSSSSIRVAMLEENGERVLMEGKLTHKINTESSLWSLEPGKCVLVNLSKVGEYWWNAILEGEEPIDIDKINKERSMATVDEEEQAVLDRLTFDYHQKLQGKPQSHELVRAWQSWRVHPLGPCAGDKADSGRGVGDDGGEEGCVDQLPAMS

SEQ ID NO: 893276 - protein, 250 aa, Homo sapiens
METGAAELYDQALLGILQHVGNVQDFLRVLFGFLYRKTDFYRLLRHPSDRMGFPPGAAQALVLQVFKTFDHMARQDDEKRRQELEEKIRRKEEEEAKTVSAAAAEKEPVPVPVQEIEIDSTTELDGHQEVEKVQPPGPVKEMAHGSQEAEAPGAVAGAAEVPREPPILPRIQEQFQKNPDSYNGAVRENYTWSQDYTDLEVRVPVPKHVVKGKQVSVALSSSSIRVAMLEENGERVLMEGKLTHKINTEK

SEQ ID NO: 893277 - protein, 177 aa, Homo sapiens
METGAAELYDQALLGILQHVGNVQDFLRVLFGFLYRKTDFYRLLRHPSDRMGFPPGAAQALVLQVFKTFDHMARQDDEKRRQELEEKIRRKEEEEAKTVSAAAAEKEPVPVPVQEIEIDSTTELDGHQEVEKVQPPGPVKEMAHGSQEAEAPGAVAGAAEVPREPPILPRSTARICS

SEQ ID NO: 893278 - protein, 103 aa, Homo sapiens [sequence omitted]

SEQ ID NO: 893279 - protein, 103 aa, Homo sapiens [sequence omitted]

SEQ ID NO: 893280 - protein, 494 aa, Homo sapiens
MAGLKRRVPLHSLRYFISMVGLFSKPGLLPWYARNPPGWSQLFLGTVCKGDFTRVIATKCQKGQKSQKKPSHLGPLDGSWQERLADVVTPLWRLSYEEQLKVKFAAQKKILQRLESYIQMLNGVSVTTAVPKSERLSCLLHPIIPSPVINGYRNKSTFSVNRGPDGNPKTVGFYLGTWRDGNVVCVQSNHLKNIPEKHSQVAQYYEVFLRQSPLEPCLVFHEGGYWRELTVRTNSQGHTMAIITFHPQKLSQEELHVQKEIVKEFFIRGPGAACGLTSLYFQESTMTRCSHQQSPYQLLFGEPYIFEELLSLKIRISPDAFFQINTAGAEMLYRTVGELTGVNSDTILLDICCGTGVIGLSLAQHTSRVLGIELLEQAVEDARWTAAFNGITNSEFHTGQAEKILPGLLKSKEDGQSIVAVVNPARAGLHYKVIQAIRNFRAIHTLVFVSCKLHGESTRNVIERSLILLECSGMVSAHCSLHLPGSSDSPASAS

SEQ ID NO: 893281 - protein, 186 aa, Homo sapiens
  misc_feature (148)..(148): Xaa can be any naturally occurring amino acid
MAGLKRRVPLHSLRYFISMVGLFSKPGLLPWYARNPPGWSQLFLGTVCKGDFTRVIATKCQKGQKSQKKPSHLGPLDGSWQERLADVVTPLWRLSYEEQLKETSQSRRTFPRLESYIPNAPGVRRAPGWSQSGGAPWFPSFLSLSCGXRLPVGPSSVNPGPRRTPPSEGDSPAKPEKVRNSEDRNT

SEQ ID NO: 893282 - protein, 504 aa, Homo sapiens
MAGLKRRVPLHSLRYFISMVGLFSKPGLLPWYARNPPGWSQLFLGTVCKGDFTRVIATKCQKGQKSQKKPSHLGPLDGSWQERLADVVTPLWRLSYEEQLKVKFAAQKKILQRLESYIQMLNGVSVTTAVPKSERLSCLLHPIIPSPVINGYRNKSTFSVNRGPDGNPKTVGFYLGTWRDGNVVCVQSNHLKNIPEKHSQVAQYYEVFLRQSPLEPCLVFHEGGYWRELTVRTNSQGHTMAIITFHPQKLSQEELHVQKEIVKEFFIRGPGAACGLTSLYFQESTMTRCSHQQSPYQLLFGEPYIFEELLSLKIRISPDAFFQINTAGAEMLYRTVGELTGVNSDTILLDICCGTGVIGLSLAQHTSRVLGIELLEQAVEDARWTAAFNGITNSEFHTGQAEKILPGLLKSKEDGQSIVAVVNPARAGLHYKVIQAIRNFRAIHTLVFVSCKLHGESTRNVIELCCPPDPAKKLLGEPFVLQQAVPVDLFPHTPHCELVLLFTR

SEQ ID NO: 893283 - protein, 385 aa, Homo sapiens
MLNGVSVTTAVPKSERLSCLLHPIIPSPVINGYRNKSTFSVNRGPDGNPKTVGFYLGTWRDGNVVCVQSNHLKNIPEKHSQVAQYYEVFLRQSPLEPCLVFHEGGYWRELTVRTNSQGHTMAIITFHPQKLSQEELHVQKEIVKEFFIRGPGAACGLTSLYFQESTMTRCSHQQSPYQLLFGEPYIFEELLSLKIRISPDAFFQINTAGAEMLYRTVGELTGVNSDTILLDICCGTGVIGLSLAQHTSRVLGIELLEQAVEDARWTAAFNGITNSEFHTGQAEKILPGLLKSKEDGQSIVAVVNPARAGLHYKVIQAIRNFRAIHTLVFVSCKLHGESTRNVIELCCPPDPAKKLLGEPFVLQQAVPVDLFPHTPHCELVLLFTR

SEQ ID NO: 893284 - protein, 504 aa, Homo sapiens; identical to SEQ ID NO: 893282

SEQ ID NO: 893285 - protein, 385 aa, Homo sapiens; identical to SEQ ID NO: 893283

SEQ ID NO: 893286 - protein, 385 aa, Homo sapiens; identical to SEQ ID NO: 893283

SEQ ID NO: 893287 - protein, 265 aa, Homo sapiens
MAIITFHPQKLSQEELHVQKEIVKEFFIRGPGAACGLTSLYFQESTMTRCSHQQSPYQLLFGEPYIFEELLSLKIRISPDAFFQINTAGAEMLYRTVGELTGVNSDTILLDICCGTGVIGLSLAQHTSRVLGIELLEQAVEDARWTAAFNGITNSEFHTGQAEKILPGLLKSKEDGQSIVAVVNPARAGLHYKVIQAIRNFRAIHTLVFVSCKLHGESTRNVIELCCPPDPAKKLLGEPFVLQQAVPVDLFPHTPHCELVLLFTR

SEQ ID NO: 893288 - protein, 265 aa, Homo sapiens; identical to SEQ ID NO: 893287

SEQ ID NO: 893289 - protein, 504 aa, Homo sapiens; identical to SEQ ID NO: 893282

SEQ ID NO: 893290 - protein, 504 aa, Homo sapiens; identical to SEQ ID NO: 893282

SEQ ID NO: 893291 - protein, 219 aa, Homo sapiens [sequence omitted]

SEQ ID NO: 893292 - protein, 481 aa, Homo sapiens
MAGLKRRVPLHSLRYFISMVGLFSKPGLLPWYARNPPGWSQLFLGTVCKGDFTRVIATKCQKGQKSQKKPSHLGPLDGSWQERLADVVTPLWRLSYEEQLKVKFAAQKKILQRLESYIQMLNGVSVTTAVPKSERLSCLLHPIIPSPVINGYRNKSTFSVNRGPDGNPKTVGFYLGTWRDGNVVCVQSNHLKNIPEKHSQVAQYYEVFLRQSPLEPCLVFHEGGYWRELTVRTNSQGHTMAIITFHPQKLSQEELHVQKEIVKEFFIRGPGAACGLTSLYFQESTMTRCSHQQSPYQLLFGEPYIFEELLSLKIRISPDAFFQINTAGAEMLYRTVGELTGVNSDTILLDICCGTGVIGLSLAQHTSRVLGIELLEQAVEDARWTAAFNGITNSEFHTGQAEKILPGLLKSKEDGQSIVAVVNPARAGLHYKVIQAIRNFRAIHTLVFVSCKLHGESTRNVIDSLGDRVRHHLKKKKKKKM

SEQ ID NO: 893293 - protein, 180 aa, Homo sapiens
GKEICHRNISRDLNSFLEDRDYIFLISLFWEPKHTLHTVIQFCSTGLLLLSAVCQHSARRFSSIRVYKWMNGFDSCASISQPLYVTFHAGGFQCVLWMAGLKRRVPLHSLRYFISMVGLFSKPGLLPWYARNPPGWSQLFLGTVCKGDFTRVIATKCQKGQKSQKKPSHLGPLDGSWQER

SEQ ID NO: 893294 - protein, 280 aa, Homo sapiens
MLNGVSVTTAVPKSERLSCLLHPIIPSPVINGYRNKSTFSVNRGPDGNPKTVGFYLGTWRDGNVVCVQSNHLKNIPEKHSQVAQYYEVFLRQSPLEPCLVFHEGGYWRELTVRTNSQGHTMAIITFHPQKLSQEELHVQKEIVKEFFIRGPGAACGLTSLYFQESTMTRCSHQQSPYQLLFGEPYIFEELLSLKIRFFKDTFPRLTLFVPDSRIPNGEERNEETETTAEKLNRTATRRIGEKQPEHGHMSPTEATRRSIGTSSRSPSKRERRQSKPGEAD

SEQ ID NO: 893295 - protein, 504 aa, Homo sapiens; identical to SEQ ID NO: 893282

SEQ ID NO: 893296 - protein, 265 aa, Homo sapiens; identical to SEQ ID NO: 893287

SEQ ID NO: 893297 - protein, 385 aa, Homo sapiens; identical to SEQ ID NO: 893283

SEQ ID NO: 893298 - protein, 473 aa, Homo sapiens
DPRVGTHAYGRLRLVRGFIRLQKEKVDFSVFFGWQALREESHCTASDTSSPWLADVVTPLWRLSYEEQLKVKFAAQKKILQRLESYIQMLNGVSVTTAVPKSERLSCLLHPIIPSPVINGYRNKSTFSVNRGPDGNPKTVGFYLGTWRDGNVVCVQSNHLKNIPEKHSQVAQYYEVFLRQSPLEPCLVFHEGGYWRELTVRTNSQGHTMAIITFHPQKLSQEELHVQKEIVKEFFIRGPGAACGLTSLYFQESTMTRCSHQQSPYQLLFGEPYIFEELLSLKIRISPDAFFQINTAGAEMLYRTVGELTGVNSDTILLDICCGTGVIGLSLAQHTSRVLGIELLEQAVEDARWTAAFNGITNSEFHTGQAEKILPGLLKSKEDGQSIVAVVNPARAGLHYKVIQAIRNFRAIHTLVFVSCKLHGESTRNVIELCCPPDPAKKLLGEPFVLQQAVPVDLFPHTPHCELVLLFTR

SEQ ID NO: 893299 - protein, 265 aa, Homo sapiens; identical to SEQ ID NO: 893287

SEQ ID NO: 893300 - protein, 265 aa, Homo sapiens; identical to SEQ ID NO: 893287

SEQ ID NO: 893301 - protein, 219 aa, Homo sapiens [sequence omitted]

SEQ ID NO: 893302 - protein, 496 aa, Homo sapiens
MAGLKRRVPLHSLRYFISMVGLFSKPGLLPWYARNPPGWSQLFLGTVCKGDFTRVIATKCQKGQKSQKKPSHLGPLDGSWQERLADVVTPLWRLSYEEQLKVKFAAQKKILQRLESYIQMLNGVSVTTAVPKSERLSCLLHPIIPSPVINGYRNKSTFSVNRGPDGNPKTVGFYLGTWRDGNVVCVQSNHLKNIPEKHSQVAQYYEVFLRQSPLEPCLVFHEGGYWRELTVRTNSQGHTMAIITFHPQKLSQEELHVQKEIVKEFFIRGPGAACGLTSLYFQESTMTRCSHQQSPYQLLFGEPYIFEELLSLKIRISPDAFFQINTAGAEMLYRTVGELTGVNSDTILLDICCGTGVIGLSLAQHTSRVLGIELLEQAVEDARWTAAFNGITNSEFHTGQAEKILPGLLKSKEDGQSIVAVVNPARAGLHYKVIQAIRNFRAIHTLVFVSCKLHGESTRNVIERSLILLECSGMVSAHCSLHLPGESLEPGGRRLQ

SEQ ID NO: 893303 - protein, 139 aa, Homo sapiens
FLLLPRPASPASCFCRFLLLLLPASAKWLLPASGQAEKILPGLLKSKEDGQSIVAVVNPARAGLHYKVIQAIRNFRAIHTLVFVSCKLHGESTRNVIELCCPPDPAKKLLGEPFVLQQAVPVDLFPHTPHCELVLLFTR

SEQ ID NO: 893304 - protein, 854 aa, Homo sapiens
MAEAVEQETGSLEESTDESEEEESEEEPKLKYERLSNGVTEILQKDAASCMTVHDKFLALGTHYGKVYLLDVQGNITQKFDVSPVKINQISLDESGEHMGVCSEDGKVQVFGLYSGEEFHETFDCPIKIIAVHPHFVRSSCKQFVTGGKKLLLFERSWMNRWKSAVLHEGEGNIRSVKWRGHLIAWANNMGVKIFDIISKQRITNVPRDDISLRPDMYPCSLCWKDNVTLIIGWGTSVKVCSVKERHASEMRDLPSRYVEIVSQFETEFYISGLAPLCDQLVVLSYVKEISEKTEREYCARPRLDIIQPLSETCEEISSDALTVRGFQENECRDYHLEYSEGESLFYIVSPRDVVVAKERDQDDHIDWLLEKKKYEEALMAAEISQKNIKRHKILDIGLAYINHLVERGDYDIAARKCQKILGKNAALWEYEVYKFKEIGQLKAISPYLPRGDPVLKPLIYEMILHEFLESDYEGFATLIREWPGDLYNNSVIVQAVRDHLKKDSQNKTLLKTLAELYTYDKNYGNALEIYLTLRHKDVFQLIHKHNLFSSIKDKIVLLMDFDSEKAVDMLLDNEDKISIKKVVEELEDRPELQHVYLHKLFKRDHHKGQRYHEKQISLYAEYDRPNLLPFLRDSTHCPLEKALEICQQRNFVEETVYLLSRMGNSRSALKMIMEELHDVDKAIEFAKEQDDGELWEDLILYSIDKPPFITGLLNNIGTHVDPILLIHRIKEGMEIPNLRDSLVKILQDYNLQILLREGCKKILVADSLSLLKKMHRTQMKGVLVDEENICESCLSPILPSDAAKPFSVVVFHCRHMFHKECLPMPSMNSAAQFCNICSAKNRGPGSAILEMKK

SEQ ID NO: 893305 - protein, 934 aa, Homo sapiens
ANSETHIRNWKKRKAKRKKKDRKLRKNGEKERGSVKGNEKGEIVTGIEKGAQIVIRIAVDQEKKAEIVKGNESGKERERENESENENGSERESEEREREREKKKKKTEAEEQETGSLEESTDESEEEESEEEPKLKYERLSNGVTEILQKDAASCMTVHDKFLALGTHYGKVYLLDVQGNITQKFDVVQVFGLYSGEEFHETFDCPIKIIAVHPHFVRSSCKQFVTGGKKLLLFERSWMNRWKSAVLHEGEGNIRSVKWRGHLIAWANNMGVKIFDIISKQRITNVPRDDISLRPDMYPCSLCWKDNVTLIIGWGTSVKVCSVKERHASEMRDLPSRYVEIVSQFETEFYISGLAPLCDQLVVLSYVKEISEKTEREYCARPRLDIIQPLSETCEEISSDALTVRGFQENECRDYHLEYSEGESLFYIVSPRDVVVAKERDQDDHIDWLLEKKKYEEALMAAEISQKNIKRHKILDIGLAYINHLVERGDYDIAARKCQKILGKNAALWEYEVYKFKEIGQLKAISPYLPRGDPVLKPLIYEMILHEFLESDYEGFATLIREWPGDLYNNSVIVQAVRDHLKKDSQNKTLLKTLAELYTYDKNYGNALEIYLTLRHKDVFQLIHKHNLFSSIKDKIVLLMDFDSEKAVDMLLDNEDKISIKKVVEELEDRPELQHVYLHKLFKRDHHKGQRYHEKQISLYAEYDRPNLLPFLRDSTHCPLEKALEICQQRNFVEETVYLLSRMGNSRSALKMIMEELHDVDKAIEFAKEQDDGELWEDLILYSIDKPPFITGLLNNIGTHVDPILLIHRIKEGMEIPNLRDSLVKILQDYNLQILLREGCKKILVADSLSLLKKMHRTQMKGVLVDEENICESCLSPILPSDAAKPFSVVVFHCRHMFHKECLPMPSMNSAAQFCNICSAKNRGPGSAILEMKK

SEQ ID NO: 893306 - protein, 854 aa, Homo sapiens; identical to SEQ ID NO: 893304

SEQ ID NO: 893307 - protein, 854 aa, Homo sapiens; identical to SEQ ID NO: 893304

SEQ ID NO: 893308 - protein, 469 aa, Homo sapiens
LWGKCLLILSLFVFCFFNIYFLSAWDVFTASKCQKILGKNAALWEYEVYKFKEIGQLKAISPYLPRGDPVLKPLIYEMILHEFLESDYEGFATLIREWPGDLYNNSVIVQAVRDHLKKDSQNKTLLKTLAELYTYDKNYGNALEIYLTLRHKDVFQLIHKHNLFSSIKDKIVLLMDFDSEKAVDMLLDNEDKISIKKVVEELEDRPELQHVYLHKLFKRDHHKGQRYHEKQISLYAEYDRPNLLPFLRDSTHCPLEKALEICQQRNFVEETVYLLSRMGNSRSALKMIMEELHDVDKAIEFAKEQDDGELWEDLILYSIDKPPFITGLLNNIGTHVDPILLIHRIKEGMEIPNLRDSLVKILQDYNLQILLREGCKKILVADSLSLLKKMHRTQMKGVLVDEENICESCLSPILPSDAAKPFSVVVFHCRHMFHKECLPMPSMNSAAQFCNICSAKNRGPGSAILEMKK

SEQ ID NO: 893309 - protein, 192 aa, Homo sapiens [sequence omitted]

SEQ ID NO: 893310 - protein, 192 aa, Homo sapiens [sequence omitted]

SEQ ID NO: 893311 - protein, 192 aa, Homo sapiens [sequence omitted]

SEQ ID NO: 893312 - protein, 854 aa, Homo sapiens; identical to SEQ ID NO: 893304

SEQ ID NO: 893313 - protein, 802 aa, Homo sapiens
MAEAVEQETGSLEESTDESEEEESEEEPKLKYERLSNGVTEILQKDAASCMTVHDKFLALGTHYGKVYLLDVQGNITQKFDVSPVKINQISLDESGEHMGVCSEDGKVQVFGLYSGEEFHETFDCPIKIIAVHPHFVRSSCKQFVTGGKKLLLFERSWMNRWKSAVLHEGEGNIRSVKWRGHLIAWANNMGVKIFDIISKQRITNVPRDDISLRPDMYPCSLCWKDNVTLIIGWGTSVKVCSVKERHASEMRDLPSRYVEIVSQFETEFYISGLAPLCDQLVVLSYVKEISEKTEREYCARPRLDIIQPLSETCEEISSDALTVRGFQENECRDYHLEYSEGESLFYIVSPRDVVVAKERDQDDHIDWLLEKKKYEEALMAAEISQKNIKRHKILDIGLAYINHLVERGDYDIAARKCQKILGKNAALWEYEVYKFKEIGQLKAISPYLPRGDPVLKPLIYEMILHEFLESDYEGFATLIREWPGDLYNNSVIVQAVRDHLKKDSQNKTLLKTLAELYTYDKNYGNALEIYLTLRHKDVFQLIHKHNLFSSIKDKIVLLMDFDSEKAVDMLLDNEDKISIKKVVEELEDRPELQHVYLHKLFKRDHHKGQRYHEKQISLYAEYDRPNLLPFLRDSTHCPLEKALEICQQRNFVEETVYLLSRMGNSRSALKMIMEELHDVDKAIEFAKEQDDGELWEDLILYSIDKPPFITGLLNNIGTHVDPILLIHRIKEGMEIPNLRDSLVKILQDYNLQILLREGCKKILVADSLSLLKKMHRTQMKGVLVDEENICESCLSPILPSE

SEQ ID NO: 893314 - protein, 873 aa, Homo sapiens
MAEAVEQETGSLEESTDESEEEESEEEPKLKYERLSNGVTEILQKDAASCMTVHDKFLALGTHYGKVYLLDVQGNITQKFDVSPVKINQISLDESGEHMGVCSEDGKVQVFGLYSGEEFHETFDCPIKIIAVHPHFVRSSCKQFVTGGKKLLLFERSWMNRWKSAVLHEGEGNIRSVKWRGHLIAWANNMGVKIFDIISKQRITNVPRDDISLRPDMYPCSLCWKDNVTLIIGWGTSVKVCSVKERHASEMRDLPSRYVEIVSQFETEFYISGLAPLCDQLVVLSYVKEISEKTEREYCARPRLDIIQPLSETCEEISSDALTVRGFQENECRDYHLEYSEGESLFYIVSPRDVVVAKERDQDDHIDWLLEKKKYEEALMAAEISQKNIKRHKILDIGLAYINHLVERGDYDIAARKCQKILGKNAALWEYEVYKFKEIGQLKAISPYLPRGDPVLKPLIYEMILHEFLESDYEGFATLIREWPGDLYNNSVIVQAVRDHLKKDSQNKTLLKTLAELYTYDKNYGNALEIYLTLRHKDVFQLIHKHNLFSSIKDKIVLLMDFDSEKAVDMLLDNEDKISIKKVVEELEDRPELQHVYLHKLFKRDHHKGQRYHEKQISLYAEYDRPNLLPFLRDSTHCPLEKALEICQQRNFVEETVYLLSRMGNSRSALKMIMEELHDVDKAIEFAKEQDDGELWEDLILYSIDKPPFITGLLNNIGTHVDPILLIHRIKEGMEIPNLRDSLVKILQDYNLQILLREGCKKILVADSLSLLKKMHRTQMKGVLVDEENICESCLSPILPSDAAKPFSVVVFHCRHMFHKECLPMPSMVGTARIHLYMDFLLPLPPLRRQDQALPFLLLLSLLSMKTTEMKHL

SEQ ID NO: 893315 - protein, 826 aa, Homo sapiens
MAEAVEQETGSLEESTDESEEEESEEEPKLKYERLSNGVTEILQKDAASCMTVHDKFLALGTHYGKVYLLDVQGNITQKFDVSPVKINQISLDESGEHMGVCSEDGKVQVFGLYSGEEFHETFDCPIKIIAVHPHFVRSSCKQFVTGGKKLLLFERSWMNRWKSAVLHEGEGNIRSVKWRGHLIAWANNMGVKIFDIISKQRITNVPRDDISLRPDMYPCSLCWKDNVTLIIGWGTSVKVCSVKERHASEMRDLPSRYVEIVSQFETEFYISGLAPLCDQLVVLSYVKEISEKTEREYCARPRLDIIQPLSETCEEISSDALTVRGFQENECRDYHLEYSEGESLFYIVSPRDVVVAKERDQDDHIDWLLEKKKYEEALMAAEISQKNIKRHKILDIGLAYINHLVERGDYDIAARKCQKILGKNAALWEYEVYKFKEIGQLKAISPYLPRGDPVLKPLIYEMILHEFLESDYEGFATLIREWPGDLYNNSVIVQAVRDHLKKDSQNKTLLKTLAELYTYDKNYGNALEIYLTLRHKDVFQLIHKHNLFSSIKDKIVLLMDFDSEKAVDMLLDNEDKISIKKVVEELEDRPELQHVYLHKLFKRDHHKGQRYHEKQISLYAEYDRPNLLPFLRDSTHCPLEKALEICQQRNFVEETVYLLSRMGNSRSALKMIMEELHDVDKAIEFAKEQDDGELWEDLILYSIDKPPFITGLLNNIGTHVDPILLIHRIKEGMEIPNLRDSLVKILQDYNLQILLREGCKKILVADSLSLLKKMHRTQMKGVLVDEENICESCLSPILPSDAAENNGTGKSCLLEKKLIPTISLA

SEQ ID NO: 893316 - protein, 776 aa, Homo sapiens
MAEAVEQETGSLEESTDESEEEESEEEPKLKYERLSNGVTEILQKDAASCMTVHDKFLALGTHYGKVYLLDVQGNITQKFDVSPVKINQISLDESGEHMGVCSEDGKVQVFGLYSGEEFHETFDCPIKIIAVHPHFVRSSCKQFVTGGKKLLLFERSWMNRWKSAVLHEGEGNIRSVKWRGHLIAWANNMGVKIFDIISKQRITNVPRDDISLRPDMYPCSLCWKDNVTLIIGWGTSVKVCSVKERHASEMRDLPSRYVEIVSQFETEFYISGLAPLCDQLVVLSYVKEISEKTEREYCARPRLDIIQPLSETCEEISSDALTVRGFQENECRDYHLEYSEGESLFYIVSPRDVVVAKERDQDDHIDWLLEKKKYEEALMAAEISQKNIKRHKILDIGLAYINHLVERGDYDIAARKCQKILGKNAALWEYEVYKFKEIGQLKAISPYLPRGDPVLKPLIYEMILHEFLESDYEGFATLIREWPGDLYNNSVIVQAVRDHLKKDSQNKTLLKTLAELYTYDKNYGNALEIYLTLRHKDVFQLIHKHNLFSSIKDKIVLLMDFDSEKAVDMLLDNEDKISIKKVVEELEDRPELQHVYLHKLFKRDHHKGQRYHEKQISLYAEYDRPNLLPFLRDSTHCPLEKALEICQQRNFVEETVYLLSRMGNSRSALKMIMEELHDVDKAIEFAKEQDDGELWEDLILYSIDKPPFITGLLNNIGTHVDPILLIHRIKEGMEIPNLRDSLVKILQDYNLQQLLFFRMLVTSIELELKHFLKNS

SEQ ID NO: 893317 - protein, 517 aa, Homo sapiens
MAEAVEQETGSLEESTDESEEEESEEEPKLKYERLSNGVTEILQKDAASCMTVHDKFLALGTHYGKVYLLDVQGNITQKFDVSPVKINQISLDESGEHMGVCSEDGKVQVFGLYSGEEFHETFDCPIKIIAVHPHFVRSSCKQFVTGGKKLLLFERSWMNRWKSAVLHEGEGNIRSVKWRGHLIAWANNMGVKIFDIISKQRITNVPRDDISLRPDMYPCSLCWKDNVTLIIGWGTSVKVCSVKERHASEMRDLPSRYVEIVSQFETEFYISGLAPLCDQLVVLSYVKEISEKTEREYCARPRLDIIQPLSETCEEISSDALTVRGFQENECRDYHLEYSEGESLFYIVSPRDVVVAKERDQDDHIDWLLEKKKYEEALMAAEISQKNIKRHKILDIGLAYINHLVERGDYDIAARKCQKILGKNAALWEYEVYKFKEIGQLKAISPYLPRGDPVLKPLIYEMILHEFLESDYEGFATLIREWPGDLYNNSVIVQAVRDHLKKDSQNKTLLKTLAEL

SEQ ID NO: 893318 - protein, 415 aa, Homo sapiens
MAEAVEQETGSLEESTDESEEEESEEEPKLKYERLSNGVTEILQKDAASCMTVHDKFLALGTHYGKVYLLDVQGNITQKFDVSPVKINQISLDESGEHMGVCSEDGKVQVFGLYSGEEFHETFDCPIKIIAVHPHFVRSSCKQFVTGGKKLLLFERSWMNRWKSAVLHEGEGNIRSVKWRGHLIAWANNMGVKIFDIISKQRITNVPRDDISLRPDMYPCSLCWKDNVTLIIGWGTSVKVCSVKERHASEMRDLPSRYVEIVSQFETEFYISGLAPLCDQLVVLSYVKEISEKTEREYCARPRLDIIQPLSETCEEISSDALTVRGFQENECRDYHLEYSEGESLFYIVSPRDVVVAKERDQDDHIDWLLEKKKYEEALMAAEISQKNIKRHKILDIGLAYINHLDSEVRRGSSI

SEQ ID NO: 893319 - protein, 269 aa, Homo sapiens
MAEAVEQETGSLEESTDESEEEESEEEPKLKYERLSNGVTEILQKDAASCMTVHDKFLALGTHYGKVYLLDVQGNITQKFDVSPVKINQISLDESGEHMGVCSEDGKVQVFGLYSGEEFHETFDCPIKIIAVHPHFVRSSCKQFVTGGKKLLLFERSWMNRWKSAVLHEGEGNIRSVKWRGHLIAWANNMGVKIFDIISKQRITNVPRDDISLRPDMYPCSLCWKDNVTLIIGWGTSVKVCSVKERHASEMRDLPSRYVEIVSADPVVK

SEQ ID NO: 893320 - protein, 158 aa, Homo sapiens
MAEAVEQETGSLEESTDESEEEESEEEPKLKYERLSNGVTEILQKDAASCMTVHDKFLALGTHYGKVYLLDVQGNITQKFDVSPVKINQISLDESGEHMGVCSEDGKVQVFGLYSGEEFHETFDCPIKIIAVHPHFVRSSCKQFVTGGKKVSAVCLLP

SEQ ID NO: 893321 - protein, 198 aa, Homo sapiens
MDAILNYRSEDTEDYYTLLGCDELSSVEQILAEFKVRALECHPDKHPENPKAVETFQKLQKAKEILTNEESRARYDHWRRSQMSMPFQQWEALNDSVKTSMHWVVRGKKDLMLEESDKTHTTKMENEECNEQRERKKEELASTAEKTEQKEPKPLEKSVSPQNSDSSGFADVNGWHLRFRWSKDAPSELLRKFRNYEI

SEQ ID NO: 893322 - protein, 198 aa, Homo sapiens; identical to SEQ ID NO: 893321

SEQ ID NO: 893323 - protein, 198 aa, Homo sapiens; identical to SEQ ID NO: 893321

SEQ ID NO: 893324 - protein, 208 aa, Homo sapiens
MNYLRLNKSWQNLKSELWNVTQTSILKTPKLVDPGVKSECLARLPASFAPISLQNEISLPRTVETFQKLQKAKEILTNEESRARYDHWRRSQMSMPFQQWEALNDSVKTSMHWVVRGKKDLMLEESDKTHTTKMENEECNEQRERKKEELASTAEKTEQKEPKPLEKSVSPQNSDSSGFADVNGWHLRFRWSKDAPSELLRKFRNYEI

SEQ ID NO: 893325 - protein, 107 aa, Homo sapiens
MDAILNYRSEDTEDYYTLLGCDELSSVEQILAEFKVRALECHPDKHPENPKAVETFQKLQKAKEILTNEESRARYDHWRRSQMSMPFQQWEALNDSVKTVGFSLGAT

SEQ ID NO: 893326 - protein, 107 aa, Homo sapiens; identical to SEQ ID NO: 893325

SEQ ID NO: 893327 - protein, 293 aa, Homo sapiens [sequence omitted]

SEQ ID NO: 893328 - protein, 317 aa, Homo sapiens
  misc_feature (10)..(10): Xaa can be any naturally occurring amino acid
LRTSCWSTEXPQGVFKTEQYYTSSASWCGLSRWQRGRPGGPGMGNRGGFRGGFGSGIRGRGRGRGRGRGRGRGARGGKAEDKEWMPVTKLGRLVKDMKIKSLEEIYLFSLPIKESEIIDFFLGASLKDEVLKIMPVQKQTRAGQRTRFKAFVAIGDYNGHVGLGVKCSKEVATAIRGAIILAKLSIVPVRRGYWGNKIGKPHTVPCKVTGRCGSVLVRLIPAPRGTGIVSAPVPKKLLMMAGIDDCYTSARGCTATLGNFAKATFDAISKTYSYLTPDLWKETVFTKSPYQEFTDHLVKTHTRVSVQRTQAPAVATT

SEQ ID NO: 893329 - protein, 293 aa, Homo sapiens [sequence omitted]

SEQ ID NO: 893330 - protein, 293 aa, Homo sapiens [sequence omitted]

SEQ ID NO: 893331 - protein, 293 aa, Homo sapiens [sequence omitted]

SEQ ID NO: 893332 - protein, 285 aa, Homo sapiens [sequence omitted]

SEQ ID NO: 893333 - protein, 265 aa, Homo sapiens
SLTTFDAISKTYSYLPPDLWKETVCKAEDKEWMPVTKLGRLVKDMKIKSLEEIYLFSLPIKESEIIDFFLGASLKDEVLKIMPVQKQTRAGQRTRFKAFVAIGDYNGHVGLGVKCSKEVATAIRGAIILAKLSIVPVRRGYWGNKIGKPHTVPCKVTGRCGSVLVRLIPAPRGTGIVSAPVPKKLLMMAGIDDCYTSARGCTATLGNFAKATFDAISKTYSYLTPDLWKETVFTKSPYQEFTDHLVKTHTRVSVQRTQAPAVATT

SEQ ID NO: 893334 - protein, 184 aa, Homo sapiens
MPVQKQTRAGQRTRFKAFVAIGDYNGHVGLGVKCSKEVATAIRGAIILAKLSIVPVRRGYWGNKIGKPHTVPCKVTGRCGSVLVRLIPAPRGTGIVSAPVPKKLLMMAGIDDCYTSARGCTATLGNFAKATFDAISKTYSYLTPDLWKETVFTKSPYQEFTDHLVKTHTRVSVQRTQAPAVATT

SEQ ID NO: 893335 - protein, 262 aa, Homo sapiens
MTPVQRGGPGALVALGWGTAVASAEVSAVASGAGVAAVDGAGAEAAELAEARPRIRIKESEIIDFFLGASLKDEVLKIMPVQKQTRAGQRTRFKAFVAIGDYNGHVGLGVKCSKEVATAIRGAIILAKLSIVPVRRGYWGNKIGKPHTVPCKVTGRCGSVLVRLIPAPRGTGIVSAPVPKKLLMMAGIDDCYTSARGCTATLGNFAKATFDAISKTYSYLTPDLWKETVFTKSPYQEFTDHLVKTHTRVSVQRTQAPAVATT

SEQ ID NO: 893336 - protein, 104 aa, Homo sapiens
  misc_feature (92)..(93): Xaa can be any naturally occurring amino acid
MADDAGAAGGPGGPGGPGMGNRGGFRGGFGSGIRGRGRGRGRGRGRGRGARGGKAEDKEWMPVTKLGRLVKDMKIKSLEEIYLFSLPTPCPXXISDSLMGREKR

SEQ ID NO: 893337 - protein, 356 aa, Homo sapiens
MSKLWRRGSTSGAMEAPEPGEALELSLAGAHGHGVHKKKHKKHKKKHKKKHHQEEDAGPTQPSPAKPQLKLKIKLGGQVLGTKSVPTFTVIPEGPRSPSPLMVVDNEEEPMEGVPLEQYRAWLDEDSNLSPSPLRDLSGGLGGQEEEEEQRWLDALEKGELDDNGDLKKEINERLLTARQRALLQKARSQPSPMLPLPVAEGCPPPALTEEMLLKREERARKRRLQAARRAEEHKNQTIERLTKTAATSGRGGRGGARGERRGGRAAAPAPMVRYCSGAQGSTLSFPPGVPAPTAVSQRPSPSGPPPRCSVPGCPHPRRYACSRTGQALCSLQCYRINLQMRLGGPEGPGSPLLAT

SEQ ID NO: 893338 - protein, 356 aa, Homo sapiens; identical to SEQ ID NO: 893337

SEQ ID NO: 893339 - protein, 356 aa, Homo sapiens; identical to SEQ ID NO: 893337

SEQ ID NO: 893340 - protein, 255 aa, Homo sapiens
MVVDNEEEPMEGVPLEQYRAWLDEDSNLSPSPLRDLSGGLGGQEEEEEQRWLDALEKGELDDNGDLKKEINERLLTARQRALLQKARSQPSPMLPLPVAEGCPPPALTEEMLLKREERARKRRLQAARRAEEHKNQTIERLTKTAATSGRGGRGGARGERRGGRAAAPAPMVRYCSGAQGSTLSFPPGVPAPTAVSQRPSPSGPPPRCSVPGCPHPRRYACSRTGQALCSLQCYRINLQMRLGGPEGPGSPLLAT

SEQ ID NO: 893341 - protein, 255 aa, Homo sapiens; identical to SEQ ID NO: 893340

SEQ ID NO: 893342 - protein, 280 aa, Homo sapiens
MSKLWRRGSTSGAMEAPEPGEALELSLAGAHGHGVHKKKHKKHKKKHKKKHHQEEDAGPTQPSPAKPQLKLKIKLGGQVLGTKSVPTFTVIPEGPRSPSPLMVVDNEEEPMEGVPLEQYRAWLDEDSNLSPSPLRDLSGGLGGQEEEEEQRWLDALEKGELDDNGDLKKEINERLLTARQRALLQKARSQPSPMLPLPVAEGCPPPALTEEMLLKREERARKRRLQAARRAEEHKNQTIERLTKTAATSGRGGRGGARGERRGGRAAAPAPMVPPSHARS

SEQ ID NO: 893343 - protein, 194 aa, Homo sapiens
MSKLWRRGSTSGAMEAPEPGEALELSLAGAHGHGVHKKKHKKHKKKHKKKHHQEEDAGPTQPSPAKPQLKLKIKLGGQVLGTKSVPTFTVIPEGPRSPSPLMVVDNEEEPMEGVPLEQYRAWLDEDSNLSPSPLRDLSGGLGGQEEEEEQRWLDALEKGELDDNGDLRPAAALLCPRLSPSAPLRLLPHRPGTL

SEQ ID NO: 893344 - protein, 194 aa, Homo sapiens; identical to SEQ ID NO: 893343

SEQ ID NO: 893345 - protein, 105 aa, Homo sapiens
MVVDNEEEPMEGVPLEQYRAWLDEDSNLSPSPLRDLSGGLGGQEEEEEQRWLDALEKGELDDNGDLKKEINERLLTARQRALLQKARSQPSLGGPEGPGSPLLAT

SEQ ID NO: 893346 - protein, 168 aa, Homo sapiens
MTGMTADSRSQVQRARYEAANWKYKYGYEIPVDMLCKRIADISQVYTQNAEMRPLGCCMILIGIDEEQGPQVYKCDPAGYYCGFKATAAGVKQTESTSFLEKTSERRNLIGHLNRQWKTAITCLSTVLSIDFKPSEIEVGVVTVENPKFRILTEAEIDAHLVALAERD

SEQ ID NO: 893347 - protein, 145 aa, Homo sapiens
MSRGSSAGFDRHITIFSPEGRLYQVEYAFKAINQGGLTSVAVRGKDCAVIVTQKKVPDKLLDSSTVTHLFKITENIGCVMTGMTADSRSQVQRARYEAANWKYKYGYEIPVDMLCKRIADISQVYTQNAEMRPLGCCKYAKRSPK

SEQ ID NO: 893348 - protein, 247 aa, Homo sapiens
MSRGSSAGFDRHITIFSPEGRLYQVEYAFKAINQGGLTSVAVRGKDCAVIVTQKKVPDKLLDSSTVTHLFKITENIGCVMTGMTADSRSQVQRARYEAANWKYKYGYEIPVDMLCKRIADISQVYTQNAEMRPLGCCMILIGIDEEQGPQVYKCDPAGYYCGFKATAAGVKQTESTSFLEKTSERRNLIGHLNRQWKTAITCLSTVLSIDFKPSEIEVGVVTVENPKFRILTEAEIDAHLVALAERD

SEQ ID NO: 893349 - protein, 296 aa, Homo sapiens
ERGIDWDTRHDMLDGYSCCPTVVNSGDVPIVLVCLISEPRYSVISRCTNMSRGSSAGFDRHITIFSPEGRLYQVEYAFKAINQGGLTSVAVRGKDCAVIVTQKKVPDKLLDSSTVTHLFKITENIGCVMTGMTADSRSQVQRARYEAANWKYKYGYEIPVDMLCKRIADISQVYTQNAEMRPLGCCMILIGIDEEQGPQVYKCDPAGYYCGFKATAAGVKQTESTSFLEKTSERRNLIGHLNRQWKTAITCLSTVLSIDFKPSEIEVGVVTVENPKFRILTEAEIDAHLVALAERD

SEQ ID NO: 893350 - protein, 228 aa, Homo sapiens
MAGLRREYAFKAINQGGLTSVAVRGKDCAVIVTQKKVPDKLLDSSTVTHLFKITENIGCVMTGMTADSRSQVQRARYEAANWKYKYGYEIPVDMLCKRIADISQVYTQNAEMRPLGCCMILIGIDEEQGPQVYKCDPAGYYCGFKATAAGVKQTESTSFLEKTSERRNLIGHLNRQWKTAITCLSTVLSIDFKPSEIEVGVVTVENPKFRILTEAEIDAHLVALAERD

SEQ ID NO: 893351 - protein, 247 aa, Homo sapiens; identical to SEQ ID NO: 893348

SEQ ID NO: 893352 - protein, 168 aa, Homo sapiens
MTGMTADSRSQVQRARYEAANWKYKYGYEIPVDMLCKRIADISQVYTQNAEMRPLGCCMILIGIDEEQGPQVYKCDPAGYYCGFKATAAGVKQTESTSFLEKTSERRNLIGHLNRQWETAITCLSTVLSIDFKPSEIEVGVVTVENPKFRILTEAEIDAHLVALAERD

SEQ ID NO: 893353 - protein, 253 aa, Homo sapiens
MSRGSSAGFDRHITIFSPEGRLYQVEYAFKAINQGGLTSVAVRGKDCAVIVTQKKVPDKLLDSSTVTHLFKITENIGCVMTGMTADSRSQVQRARYEAANWKYKYGYEIPVDMLCKRIADISQVYTQNAEMRPLGCCMILIGIDEEQGPQVYKCDPAGYYCGFKATAAGVKQTESTSFLEKTSERRNLIGHLNRQWKTAITCLSTVLSIDFKPSEIEVGVVTVENPKFRILSQFLLLETSSSSSCFFLFIVIF

SEQ ID NO: 893354 - protein, 249 aa, Homo sapiens
MSRGSSAGFDRHITIFSPEGRLYQVEYAFKAINQGGLTSVAVRGKDCAVIVTQKKVPDKLLDSSTVTHLFKITENIGCVMTGMTADSRSQVQRARYEAANWKYKYGYEIPVDMLCKRIADISQVYTQNAEMRPLGCCMILIGIDEEQGPQVYKCDPAGYYCGFKATAAGVKQTESTSFLEKTSERRNLIGHLNRQWKTAITCLSTVLSIDFKPSEIEVGVVTVENPKFRILSRSRNWKQELARSRNWSF

SEQ ID NO: 893355 - protein, 210 aa, Homo sapiens
MSRGSSAGFDRHITIFSPEGRLYQVEYAFKAINQGGLTSVAVRGKDCAVIVTQKKVPDKLLDSSTVTHLFKITENIGCVMTGMTADSRSQVQRARYEAANWKYKYGYEIPVDMLCKRIADISQVYTQNAEMRPLGCCMILIGIDEEQGPQVYKCDPAGYYCGFKATAAGVKQTESTSFLEKTSERRNLIGHLNRQWKVSQPKGADFFYAI

SEQ ID NO: 893356 - protein, 197 aa, Homo sapiens
MSRGSSAGFDRHITIFSPEGRLYQVEYAFKAINQGGLTSVAVRGKDCAVIVTQKKVPDKLLDSSTVTHLFKITENIGCVMTGMTADSRSQVQRARYEAANWKYKYGYEIPVDMLCKRIADISQVYTQNAEMRPLGCCMILIGIDEEQGPQVYKCDPAGYYCGFKATAAGVKQTESTSFLGGDLMAIGTAGAALLPGS

SEQ ID NO: 893357 - protein, 67 aa, Homo sapiens
NSQIVNAQSTSTLKQPVTAITCLSTVLSIDFKPSEIEVGVVTVENPKFRILTEAEIDAHLVALAERD

SEQ ID NO: 893358 - protein, 197 aa, Homo sapiens
GLASALCWGGPFRRGGSGMAPRKIGDRLKKYEAAYGKQFTPCQLLADHATSPNKKFYQLSRPHASLSQCTNPRGGQGWFSNRVGEMRPLGGGMILIGIDEEQGPQVYKCDPAGYYCGFKATAAGVKQTESTSFLEKTSERRNLIGHLNRQWKTAITCLSTVLSIDFKPSEIEVGVVTVENPKFRILSRSRNWPVPAS

SEQ ID NO: 893359 - protein, 162 aa, Homo sapiens
MSRGSSAGFDRHITIFSPEGRLYQVEYAFKAINQGGLTSVAVRGKDCAVIVTQKKVPDKLLDSSTVTHLFKITENIGCVMTGMTADSRSQVQRARYEAANWKYKYGYEIPVDMLCKRIADISQVYTQNAEMRPLGCCMILIGIDEEQGPQVYKCDPAGYYCV

SEQ ID NO: 893360 - protein, 247 aa, Homo sapiens; identical to SEQ ID NO: 893348

SEQ ID NO: 893361 - protein, 247 aa, Homo sapiens; identical to SEQ ID NO: 893348

SEQ ID NO: 893362 - protein, 168 aa, Homo sapiens; identical to SEQ ID NO: 893346

SEQ ID NO: 893363 - protein, 247 aa, Homo sapiens; identical to SEQ ID NO: 893348

SEQ ID NO: 893364 - protein, 242 aa, Homo sapiens
MSRGSSAGFDRHITIFSPEGRLYQVEYAFKAINQGGLTSVAVRGKDCAVIVTQKKVPDKLLDSSTVTHLFKITENIGCVMTGMTADSRSQVQRARYEAANWKYKYGYEIPVDMLCKRIADISQVYTQNAEMRPLGCCMILIGIDEEQGPQVYKCDPAGYYCGFKATAAGVKQTESTSFLEKTSERRNLIGHLNRQWKTAITCLSTVLSIDFKPSEIEVGVVTVENPKFRILSRSRNWPVPAS

SEQ ID NO: 893365 - protein, 110 aa, Homo sapiens
MILIGIDEEQGPQVYKCDPAGYYCGFKATAAGVKQTESTSFLEKTSERRNLIGHLNRQWKTAITCLSTVLSIDFKPSEIEVGVVTVENPKFRILTEAEIDAHLVALAERD

SEQ ID NO: 893366 - protein, 191 aa, Homo sapiens
MSRGSSAGFDRHITIFSPEGRLYQVEYAFKAINQGGLTSVAVRGKDCAVIVTQKKVPDKLLDSSTVTHLFKITENIGCVMTGMTADSRSQVQRARYEAANWKYKYGYEIPVDMLCKRIADISQVYTQNAEMRPLGCCMILIGIDEEQGPQVYKCDPAGYYCGFKATAAGVKQTESTSFLDCNYMPVYCSIN

SEQ ID NO: 893367 - protein, 200 aa, Homo sapiens
MSRGSSAGFDRHITIFSPEGRLYQVEYAFKAINQGGLTSVAVRGKDCAVIVTQKKVPDKLLDSSTVTHLFKITENIGCVMTGMTADSRSQVQRARYEAANWKYKYGYEIPVDMLCKRIADISQVYTQNAEMRPLGCCMILIGIDEEQGPQTAITCLSTVLSIDFKPSEIEVGVVTVENPKFRILTEAEIDAHLVALAERD

SEQ ID NO: 893368 - protein, 491 aa, Homo sapiens [sequence omitted]

SEQ ID NO: 893369 - protein, 491 aa, Homo sapiens [sequence omitted]

SEQ ID NO: 893370 - protein, 540 aa, Homo sapiens
GPSGLPGAGARGSGLGAWASPASACPSLKRGLLAWSWDQLGNGPGDPQWRVSGAFPRASPARSPLPGQVTHYKQYPPNTSKVYSYFECREKKTENSKLRKVKYEETVFYGLQYILNKYLKGKVVTKEKIQEAKDVYKEHFQDDVFNEKGWNYILEKYDGHLPIEIKAVPEGFVIPRGNVLFTVENTDPECYWLTNWIETILVQSWYPITVATNSREQKKILAKYLLETSGNLDGLEYKLHDFGYRGVSSQETAGIGASAHLVNFKGTDTVAGLALIKKYYGTKDPVPGYSVPAAEHSTITAWGKDHEKDAFEHIVTQFSSVPVSVVSDSYDIYNACEKIWGEDLRHLIVSRSTQAPLIIRPDSGNPLDTVLKVLEILGKKFPVTENSKGYKLLPPYLRVIQGDGVDINTLQEIVEGMKQKMWSIENIAFGSGGGLLQKLTRDLLNCSFKCSYVVTNGLGINVFKDPVADPNKRSKKGRLSLHRTPAGNFVTLEEGKGDLEEYGQDLLHTVFKNGKVTKSYSFDEIRKNAQLNIELEAAHH

SEQ ID NO: 893371 - protein, 491 aa, Homo sapiens [sequence omitted]

SEQ ID NO: 893372 - protein, 454 aa, Homo sapiens
MSVSIEDTPGRNEEVKYEETVFYGLQYILNKYLKGKVVTKEKIQEAKDVYKEHFQDDVFNEKGWNYILEKYDGHLPIEIKAVPEGFVIPRGNVLFTVENTDPECYWLTNWIETILVQSWYPITVATNSREQKKILAKYLLETSGNLDGLEYKLHDFGYRGVSSQETAGIGASAHLVNFKGTDTVAGLALIKKYYGTKDPVPGYSVPAAEHSTITAWGKDHEKDAFEHIVTQFSSVPVSVVSDSYDIYNACEKIWGEDLRHLIVSRSTQAPLIIRPDSGNPLDTVLKVLEILGKKFPVTENSKGYKLLPPYLRVIQGDGVDINTLQEIVEGMKQKMWSIENIAFGSGGGLLQKLTRDLLNCSFKCSYVVTNGLGINVFKDPVADPNKRSKKGRLSLHRTPAGNFVTLEEGKGDLEEYGQDLLHTVFKNGKVTKSYSFDEIRKNAQLNIELEAAHH

SEQ ID NO: 893373 - protein, 476 aa, Homo sapiens
MNPAAEAEFNILLATDSYKVTHYKQYPPNTSKVYSYFECREKKTENSKLRKVKYEETVFYGLQYILNKYLKGKVVTKEKIQEAKDVYKEHFQDDVFNEKGWNYILEKYDGHLPIEIKAVPEGFVIPRGNVLFTVTILVQSWYPITVATNSREQKKILAKYLLETSGNLDGLEYKLHDFGYRGVSSQETAGIGASAHLVNFKGTDTVAGLALIKKYYGTKDPVPGYSVPAAEHSTITAWGKDHEKDAFEHIVTQFSSVPVSVVSDSYDIYNACEKIWGEDLRHLIVSRSTQAPLIIRPDSGNPLDTVLKVLEILGKKFPVTENSKGYKLLPPYLRVIQGDGVDINTLQEIVEGMKQKMWSIENIAFGSGGGLLQKLTRDLLNCSFKCSYVVTNGLGINVFKDPVADPNKRSKKGRLSLHRTPAGNFVTLEEGKGDLEEYGQDLLHTVFKNGKVTKSYSFDEIRKNAQLNIELEAAHH

SEQ ID NO: 893374 - protein, 124 aa, Homo sapiens
MKQKMWSIENIAFGSGGGLLQKLTRDLLNCSFKCSYVVTNGLGINVFKDPVADPNKRSKKGRLSLHRTPAGNFVTLEEGKGDLEEYGQDLLHTVFKNGKVTKSYSFDEIRKNAQLNIELEAAHH

SEQ ID NO: 893375 - protein, 491 aa, Homo sapiens [sequence omitted]

SEQ ID NO: 893376 - protein, 491 aa, Homo sapiens [sequence omitted]

SEQ ID NO: 893377 - protein, 491 aa, Homo sapiens [sequence omitted]

SEQ ID NO: 893378 - protein, 491 aa, Homo sapiens [sequence omitted]

SEQ ID NO: 893379 - protein, 464 aa, Homo sapiens
MNPAAEAEFNILLATDSYKVTHYKQYPPNTSKVYSYFECREKKTENSKLRKVKYEETVFYGLQYILNKYLKGKVVTKEKIQEAKDVYKEHFQDDVFNEKGWNYILEKYDGHLPIEIKAVPEGFVIPRGNVLFTVENTDPECYWLTNWIETILVQSWYPITVATNSREQKKILAKYLLETSGNLDGLEYKLHDFGYRGVSSQETAGIGASAHLVNFKGTDTVAGLALIKKYYGTKDPVPGYSVPAAEHSTITAWGKDHEKDAFEHIVTQFSSVPVSVVSDSYDIYNACEKIWGEDLRHLIVSRSTQAPLIIRPDSGNPLDTVLKVLEILGKKFPVTENSKGYKLLPPYLRVIQGDGVDINTLQEIVEGMKQKMWSIENIAFGSGGGLLQKLTRDLLNCSFKCSYVVTNGLGINVFKDPVADPNKRSKKGRLSLHRTPAGNFVTLEEGKGDLEEYGQVCIYADWFF

SEQ ID NO: 893380 - protein, 368 aa, Homo sapiens
MNPAAEAEFNILLATDSYKVTHYKQYPPNTSKVYSYFECREKKTENSKLRKVKYEETVFYGLQYILNKYLKGKVVTKEKIQEAKDVYKEHFQDDVFNEKGWNYILEKYDGHLPIEIKAVPEGFVIPRGNVLFTVENTDPECYWLTNWIETILVQSWYPITVATNSREQKKILAKYLLETSGNLDGLEYKLHDFGYRGVSSQETAGIGASAHLVNFKGTDTVAGLALIKKYYGTKDPVPGYSVPAAEHSTITAWGKDHEKDAFEHIVTQFSSVPVSVVSDSYDIYNACEKIWGEDLRHLIVSRSTQAPLIIRPDSGNPLDTVLKVLEILGKKFPVTENSKGYKLLPPYLRVIQGDGVDINTLQEVCVLY

SEQ ID NO: 893381 - protein, 422 aa, Homo sapiens
MNPAAEAEFNILLATDSYKVTHYKQYPPNTSKVYSYFECREKKTENSKLRKVKYEETVFYGLQYILNKYLKGKVVTKEKIQEAKDVYKEHFQDDVFNEKGWNYILEKYDGHLPIEIKAVPEGFVIPRGNVLFTVENTDPECYWLTNWIETILVQSWYPITVATNSREQKKILAKYLLETSGNLDGLEYKLHDFGYRGVSSQETAGIGASAHLVNFKGTDTVAGLALIKKYYGTKDPVPGYSVPAAEHSTITAWGKDHEKDAFEHIVTQFSSVPVSVVSDSYDIYNACEKIWGEDLRHLIVSRSTQAPLIIRPDSGNPLDTVLKVLEILGKKFPVTENSKGYKLLPPYLRVIQGDGVDINTLQEIVEGMKQKMWSIENIAFGSGGGLLQKLTRDLLNCSFKCSYVVTNGLGELTFLPREPHFA

SEQ ID NO: 893382 - protein, 368 aa, Homo sapiens; identical to SEQ ID NO: 893380

SEQ ID NO: 893383 - protein, 368 aa, Homo sapiens; identical to SEQ ID NO: 893380

SEQ ID NO: 893384 - protein, 248 aa, Homo sapiens [sequence omitted]

SEQ ID NO: 893385 - protein, 162 aa, Homo sapiens
MNPAAEAEFNILLATDSYKVTHYKQYPPNTSKVYSYFECREKKTENSKLRKVKYEETVFYGLQYILNKYLKGKVVTKEKIQEAKDVYKEHFQDDVFNEKGWNYILEKYDGHLPIEIKAVPEGFVIPRGNVLFTVENTDPECYWLTNWIEVNCFFNSYLTLIE

SEQ ID NO: 893386 - protein, 240 aa, Homo sapiens
MNPAAEAEFNILLATDSYKVTHYKQYPPNTSKVYSYFECREKKTENSKLRKVKYEETVFYGLQYILNKYLKGKVVTKEKIQEAKDVYKEHFQDDVFNEKGWNYILEKYDGHLPIEIKAVPEGFVIPRGNVLFTVTILVQSWYPITVATNSREQKKILAKYLLETSGNLDGLEYKLHDFGYRGVSSQETAGIGASAHLVNFKGTDTVAGLALIKKYYGTKDPVPGYSVPAAEHSRISILWI

SEQ ID NO: 893387 - protein, 124 aa, Homo sapiens
  misc_feature (84)..(84): Xaa can be any naturally occurring amino acid
VELQLQAPWGCTKLLNLTCFLKFCCLPLGRWVQQETLEHQMEKLFLPSPLPVHQKECIRNSRSEHLGFLRVRQCGAPVGRWVLXYPVWPPAPTAFQLWGFSLWKLLSKFDFSICKRRQVRVGMT

SEQ ID NO: 893388 - protein, 491 aa, Homo sapiens [sequence omitted]

SEQ ID NO: 893389 - protein, 491 aa, Homo sapiens [sequence omitted]

SEQ ID NO: 893390 - protein, 470 aa, Homo sapiens
MNPAAEAEFNILLATDSYKVTHYKQYPPNTSKVYSYFECREKKTENSKLRSKVVTKEKIQEAKDVYKEHFQDDVFNEKGWNYILEKYDGHLPIEIKAVPEGFVIPRGNVLFTVENTDPECYWLTNWIETILVQSWYPITVATNSREQKKILAKYLLETSGNLDGLEYKLHDFGYRGVSSQETAGIGASAHLVNFKGTDTVAGLALIKKYYGTKDPVPGYSVPAAEHSTITAWGKDHEKDAFEHIVTQFSSVPVSVVSDSYDIYNACEKIWGEDLRHLIVSRSTQAPLIIRPDSGNPLDTVLKVLEILGKKFPVTENSKGYKLLPPYLRVIQGDGVDINTLQEIVEGMKQKMWSIENIAFGSGGGLLQKLTRDLLNCSFKCSYVVTNGLGINVFKDPVADPNKRSKKGRLSLHRTPAGNFVTLEEGKGDLEEYGQDLLHTVFKNGKVTKSYSFDEIRKNAQLNIELEAAHH

SEQ ID NO: 893391 - protein, 124 aa, Homo sapiens; identical to SEQ ID NO: 893374

SEQ ID NO: 893392 - protein, 473 aa, Homo sapiens
MNPAAEAEFNILLATDSYKVTHYKQYPPNTSKVYSYFECREKKTENSKLRKVKYEETVFYGLQYILNKYLKGKVVTKEKIQEAKDVYKEHFQDDVFNEKGWNYILEKYDGHLPIEIKAVPEGFVIPRGNVLFTVENTDPECYWLTNWIETILVQSWYPITVATNSREQKYKLHDFGYRGVSSQETAGIGASAHLVNFKGTDTVAGLALIKKYYGTKDPVPGYSVPAAEHSTITAWGKDHEKDAFEHIVTQFSSVPVSVVSDSYDIYNACEKIWGEDLRHLIVSRSTQAPLIIRPDSGNPLDTVLKVLEILGKKFPVTENSKGYKLLPPYLRVIQGDGVDINTLQEIVEGMKQKMWSIENIAFGSGGGLLQKLTRDLLNCSFKCSYVVTNGLGINVFKDPVADPNKRSKKGRLSLHRTPAGNFVTLEEGKGDLEEYGQDLLHTVFKNGKVTKSYSFDEIRKNAQLNIELEAAHH

SEQ ID NO: 893393 - protein, 124 aa, Homo sapiens; identical to SEQ ID NO: 893374

SEQ ID NO: 893394 - protein, 137 aa, Homo sapiens
MTSALTQGLERIPDQLGYLVLSEGAVLASSGDLENDEQAASAISELVSTACGFRLHRGMNVPFKRLSGEPLPLPLVVVLGAGGYFQGLLGFSSSSLLPSPGVSGLATFLPLGLPGIRIVNEKARERRSSRGHSSSNL

SEQ ID NO: 893395 - protein, 164 aa, Homo sapiens
LQESSAFLRDLNPQGIRLPLPVPHCQTPRSEVMPPGYQTDLLEARELIEKLDSMSSLVSSGRLAMTTSALTQGLERIPDQLGYLVLSEGAVLASSGDLENDEQAASAISELVSTACGFRLHRGMNVPFKRLSVVFGEHTLLVTVSGQRVFVVKRQNRGREPIDV

SEQ ID NO: 893396 - protein, 114 aa, Homo sapiens
RAPPSPKIRLGTRLGGTSALTQGLERIPDQLGYLVLSEGAVLASSGDLENDEQAASAISELVSTACGFRLHRGMNVPFKRLSVVFGEHTLLVTVSGQRVFVVKRQNRGREPIDV

SEQ ID NO: 893397 - protein, 136 aa, Homo sapiens
MTSALTQGLERIPDQLGYLVLSEGAVLAVRSGKGRGSLSAHSPVTPSNIGPSFLGFYLVSCLASIRLVQKYLQFLQLLSVISLWNLILLTAAIYLFIVFETEFRSCCPSWSAVVRPRLTATSASGVQAILLPQPPE

SEQ ID NO: 893398 - protein, 135 aa, Homo sapiens
MNVPFKRLSVVFGEHTLLVTMGKVTKSMAGVVKSMDATLKTMNLEKISALMDKFEHQFETLDVQTQQMEDTMSSTTTLTTPQNQVDMLLQEMADEAGLDLNMELPQGQTGSVGTSVASAEQDELSQRLARLRDQV

SEQ ID NO: 893399 - protein, 125 aa, Homo sapiens
MVSEDACARGPAGGSASLLPSLCGFPLTSALTQGLERIPDQLGYLVLSEGAVLASSGDLENDEQAASAISELVSTACGFRLHRGMNVPFKRLSVVFGEHTLLVTVSGQRVFVVKRQNRGREPIDV

SEQ ID NO: 893400 - protein, 125 aa, Homo sapiens; identical to SEQ ID NO: 893399

SEQ ID NO: 893401 - protein, 193 aa, Homo sapiens
MTSALTQGLERIPDQLGYLVLSEGAVLASSGDLENDEQAASAISELVSTACGFRLHRGMNVPFKRLSVVFGEHTLLVTMGKVTKSMAGVVKSMDATLKTMNLEKISALMDKFEHQFETLDVQTQQMEDTMSSTTTLTTPQNQVDMLLQEMADEAGLDLNMELPQGQTGSVGTSVASAEQDELSQRLARLRDQV

SEQ ID NO: 893402 - protein, 617 aa, Homo sapiens
SEKTPNGGYKPKLNTLKLYRLLPMRAAKRPYKTYSQGAPEAPLSPTLNTPAPVAMPASPPPGPPPAPEPGPPPSVITFAHPAPSVIVHGGSSSGGGGSGTASTGGSQAASVITYTAPPRPPKKREYPPPPPEPAATPTSPATAVSPATAAGPAMATTTEEAKGRNPRAGRTLTYTAKPVGGIGGGGGPPTGAGRGPSQLQAPPPLCQITVRIGEEAIVKRRISETDLRPGELSGEEMEESEEDEEEEDEEEEEEDEEESKAGGEDQLWRPYYSYKPKRKAGAAGGASVGGSGLPRGRRPPRWRQKLERRSWEETPAAESPAGRARTERRHRCGDCAQTFTTLRKLRKHQEAHGGGSHSSRAGRRPSTRFTCPHCAKVCKTAAALSRHGQRHAAERPGGTPTPVIAYSKGSAGTRPGDVKEEAPQEMQVSSSSGEAGGGSTAAEEASETASLQDPIISGGEEPPVVASGGSYVYPPVQEFPLALIGGGREPGGGRGKSGSEGPVGAGEGDRMEGIGAAKVTFYPEPYPLVYGPQLLAAYPYNFSNLAALPVALNMVLPDEKGAGALPFLPGVFGYAVNPQAAPPAPPTPPPPTLPPPIPPKGEGERAGVERTQKGDVG

SEQ ID NO: 893403 - protein, 617 aa, Homo sapiens; identical to SEQ ID NO: 893402

SEQ ID NO: 893404 - protein, 617 aa, Homo sapiens; identical to SEQ ID NO: 893402

SEQ ID NO: 893405 - protein, 617 aa, Homo sapiens; identical to SEQ ID NO: 893402

SEQ ID NO: 893406 - protein, 617 aa, Homo sapiens; identical to SEQ ID NO: 893402

SEQ ID NO: 893407 - protein, 617 aa, Homo sapiens; identical to SEQ ID NO: 893402

SEQ ID NO: 893408 - protein, 617 aa, Homo sapiens; identical to SEQ ID NO: 893402

SEQ ID NO: 893409 - protein, 617 aa, Homo sapiens; identical to SEQ ID NO: 893402

SEQ ID NO: 893410 - protein, 416 aa, Homo sapiens
MPYLGSEDVVKELKKALCNPHIQADRLRYRNVIQRVIRYMTQGLDMSGVFMEMVKASATVDIVQKKLVYLYMCTYAPLKPDLALLAINTLCKDCSDPNPMVRGLALRSMCSLRMPGVQEYIQQPILNGLRDKASYVRRVAVLGCAKMHNLHGDSEVDGALVNELYSLLRDQDPIVVVNCLRSLEEILKQEGGVVINKPIAHHLLNRMSKLDQWGQAEVLNFLLRYQPRSEEELFDILNLLDSFLKSSSPGVVMGATKLFLILAKMFPHVQTDVLVRVKGPLLAACSSESRELCFVALCHVRQILHSLPGHFSSHYKKFFCSYSEPHYIKLQKVEVLCELVNDENVQQVLEELRGYCTDVSADFAQAAIFAIGGIARTYTDQMCSDFNRVAGSSTRAHYHSGGADFPRPGLVVSSVY

SEQ ID NO: 893411 - protein, 118 aa, Homo sapiens
MTVLKIPAYLEALILCSCTLACIVVVVQTFRDLVWLCPQCTEAVCQALPGCEENIQDSEVDCNSPLLLGRGRMLETLPFEMESNYSLYPVFEVGTLRIDCHLRFSFGYRWHINYKNKI

SEQ ID NO: 893412 - protein, 416 aa, Homo sapiens; identical to SEQ ID NO: 893410

SEQ ID NO: 893413 - protein, 416 aa, Homo sapiens; identical to SEQ ID NO: 893410

SEQ ID NO: 893414 - protein, 510 aa, Homo sapiens
MPYLGSEDVVKELKKALCNPHIQADRLRYRNVIQRVIRYMTQGLDMSGVFMEMVKASATVDIVQKKLVYLYMCTYAPLKPDLALLAINTLCKDCSDPNPMVRGLALRSMCSLRMPGVQEYIQQPILNGLRDKASYVRRVAVLGCAKMHNLHGDSEVDGALVNELYSLLRDQDPIVVVNCLRSLEEILKQEGGVVINKPIAHHLLNRMSKLDQWGQAEVLNFLLRYQPRSEEELFDILNLLDSFLKSSSPGVVMGATKLFLILAKMFPHVQTDVLVRVKGPLLAACSSESRELCFVALCHVRQILHSLPGHFSSHYKKFFCSYSEPHYIKLQKVEVLCELVNDENVQQVLEELRGYCTDVSADFAQAAIFAIGGIARTYTDQCVQILTELLGLRQEHITTVVVQTFRDLVWLCPQCTEAVCQALPGCEENIQDSEGKQALIWLLGVHGERIPNAPYVLEDFVENVKSETFPAVKMELLTALLRLFLSRPAECQDMLGRLLYYCIGGFFRRK

SEQ ID NO: 893415 - protein, 341 aa, Homo sapiens
MPYLGSEDVVKELKKALCNPHIQADRLRYRNVIQRVIRMPGVQEYIQQPILNGLRDKASYVRRVAVLGCAKMHNLHGDSEVDGALVNELYSLLRDQDPIVVVNCLRSLEEILKQEGGVVINKPIAHHLLNRMSKLDQWGQAEVLNFLLRYQPRSEEELFDILNLLDSFLKSSSPGVVMGATKLFLILAKMFPHVQTDVLVRVKGPLLAACSSESRELCFVALCHVRQILHSLPGHFSSHYKKFFCSYSEPHYIKLQKVEVLCELVNDENVQQVLEELRGYCTDVSADFAQAAIFAIGGIARTYTDQMCSDFNRVAGSSTRAHYHSGGADFPRPGLVVSSVY

SEQ ID NO: 893416 - protein, 282 aa, Homo sapiens
MVRGLALRSMCSLRMPGVQEYIQQPILNGLRDKASYVRRVAVLGCAKMHNLHGDSEVDGALVNELYSLLRDQDPIVVVNCLRSLEEILKQEGGVVINKPIAHHLLNRMSKLDQWGQAEVLNFLLRYQPRSEEELFDILNLLDSFLKSSSPGVVMGATKLFLILAKMFPHVQTDVLVRVKGPLLAACSSESRELCFVALCHVRQILHSLPGHFSSHYKKFFCSYSEPHYIKLQKVEVLCELVNDENVQQVLEELRGYCTDVSADFAQAAIFAIGGIARTYTDQ

SEQ ID NO: 893417 - protein, 366 aa, Homo sapiens
YGYYEAGVNRPRVSKKLVYLYMCTYAPLKPDLALLAINTLCKDCSDPNPMVRGLALRSMCSLRMPGVQEYIQQPILNGLRDKASYVRRVAVLGCAKMHNLHGDSEVDGALVNELYSLLRDQDPIVVVNCLRSLEEILKQEGGVVINKPIAHHLLNRMSKLDQWGQAEVLNFLLRYQPRSEEELFDILNLLDSFLKSSSPGVVMGATKLFLILAKMFPHVQTDVLVRVKGPLLAACSSESRELCFVALCHVRQILHSLPGHFSSHYKKFFCSYSEPHYIKLQKVEVLCELVNDENVQQVLEELRGYCTDVSADFAQAAIFAIGGIARTYTDQMCSDFNRVAGSSTRAHYHSGGADFPRPGLVVSSVY

SEQ ID NO: 893418 - protein, 615 aa, Homo sapiens
MPYLGSEDVVKELKKALCNPHIQADRLRYRNVIQRVIRYMTQGLDMSGVFMEMVKASATVDIVQKKLVYLYMCTYAPLKPDLALLAINTLCKDCSDPNPMVRGLALRSMCSLRMPGVQEYIQQPILNGLRDKASYVRRVAVLGCAKMHNLHGDSEVDGALVNELYSLLRDQDPIVVVNCLRSLEEILKQEGGVVINKPIAHHLLNRMSKLDQWGQAEVLNFLLRYQPRSEEELFDILNLLDSFLKSSSPGVVMGATKLFLILAKMFPHVQTDVLVRVKGPLLAACSSESRELCFVALCHVRQILHSLPGHFSSHYKKFFCSYSEPHYIKLQKVEVLCELVNDENVQQVLEELRGYCTDVSADFAQAAIFAIGGIARTYTDQCVQILTELLGLRQEHITTVVVQTFRDLVWLCPQCTEAVCQALPGCEENIQDSEGKQALIWLLGVHGERIPNAPYVLEDFVENVKSETFPAVKMELLTALLRLFLSRPAECQDMLGRLLYYCIEEEKDMAVRDRGLFYYRLLLVGIDEVKRILCSPKSDPTLGLLEDPAERPVNSWASDFNTLVPVYGKAHWATISKCQGAERCDPELPKTSSFAASGKNSPYLKSCHDKSLPFQ

SEQ ID NO: 893419 - protein, 69 aa, Homo sapiens
ARFGSTYTKIGTIQRRLAWPLRKDDTQIREAFQYFCSDFNRVAGSSTRAHYHSGGADFPRPGLVVSSVY

SEQ ID NO: 893420 - protein, 385 aa, Homo sapiens
MPYLGSEDVVKELKKALCNPHIQADRLRYRNVIQRVIRYMTQGLDMSGVFMEMVKASATVDIVQKKLVYLYMCTYAPLKPDLALLAINTLCKDCSDPNPMVRGLALRSMCSLRMPGVQEYIQQPILNGLRDKASYVRRVAVLGCAKMHNLHGDSEVDGALVNELYSLLRDQDPIVVVNCLRSLEEILKQEGGVVINKPIAHHLLNRMSKLDQWGQAEVLNFLLRYQPRSEEELFDILNLLDSFLKSSSPGVVMGATKLFLILAKMFPHVQTDVLVRVKGPLLAACSSESRELCFVALCHVRQILHSLPGHFSSHYKKFFCSYSEPHYIKLQKVEVLCELVNDENVQQVLEELRGYCTDVSADFAQAAIFAIDFFIVPCLEFERLE

SEQ ID NO: 893421 - protein, 301 aa, Homo sapiens
MTTLDDKLLGEKLQYYYSSSEDEDSDHEDKDRGRCAPASSSVPAEAELAGEGISVNTGPKGVINDWRRFKQLETEQREEQCREMERLIKKLSMTCRSHLDEEEEQQKQKDLQEKISGKMTLKEFAIMNEDQDDEEFLQQYRKQRMEEMRQQLHKGPQFKQVFEISSGEGFLDMIDKEQKSIVIMVHIYEDGIPGTEAMNGCMICLAAEYPAVKFCKVKSSVIGASSQFTRNALPALLIYKGGELIGNFVRVTDQLGDDFFAVDLEAFLQEFGLLPEKEVLVLTSVRNSATCHSEDSDLEID

SEQ ID NO: 893422 - protein, 301 aa, Homo sapiens; identical to SEQ ID NO: 893421

SEQ ID NO: 893423 - protein, 301 aa, Homo sapiens; identical to SEQ ID NO: 893421

SEQ ID NO: 893424 - protein, 362 aa, Homo sapiens
MTTLDDKLLGEKLQYYYSSSEDEDSDHEDKDRGRCAPASSSVPAEAELAGEGISVNTGPKGVINDWRRFKQLETEQREEQCREMERLIKKLSMTCRSHLDEEEEQQKQKDLQEKISGKEEMRLCHVGQAGLELLTSSDPLVSASQSARITGVSHRARPILTVITVFSFHIYAHLLVRLQMTLKEFAIMNEDQDDEEFLQQYRKQRMEEMRQQLHKGPQFKQVFEISSGEGFLDMIDKEQKSIVIMVHIYEDGIPGTEAMNGCMICLAAEYPAVKFCKVKSSVIGASSQFTRNALPALLIYKGGELIGNFVRVTDQLGDDFFAVDLEAFLQEFGLLPEKEVLVLTSVRNSATCHSEDSDLEID

SEQ ID NO: 893425 - protein, 183 aa, Homo sapiens [sequence omitted]

SEQ ID NO: 893426 - protein, 124 aa, Homo sapiens
MTTLDDKLLGEKLQYYYSSSEDEDSDHEDKDRGRCAPASSSVPAEAELAGEGISVNTGPKGVINDWRRFKQLETEQREEQCREMERLIKKLSMTCRSHLDEEEEQQKQKDLQEKISGKKSWAIL

SEQ ID NO: 893427 - protein, 204 aa, Homo sapiens
MGAVTDDEVIRKRLLIDGDGAGDDRRINLLVKSFIKWCNSGSQEEGYSQYQRMLSTLSQCEFSMGKTLLVYDMNLREMENYEKIYKEIECSIAGAHEKIAECKKQILQAKRIRKNRQEYDALAKVIQHHPDRHETLKELEALGKELEHLSHIKESVEDKLELRRKQFHVLLSTIHELQQTLENDEKLSEVEEAQEASMETDPKP

SEQ ID NO: 893428 - protein, 152 aa, Homo sapiens
MLSTLSQCEFSMGKTLLVYDMNLREMENYEKIYKEIECSIAGAHEKIAECKKQILQAKRIRKNRQEYDALAKVIQHHPDRHETLKELEALGKELEHLSHIKESVEDKLELRRKQFHVLLSTIHELQQTLENDEKLSEVEEAQEASMETDPKP

SEQ ID NO: 893429 - protein, 222 aa, Homo sapiens
SGTAASACAAAAAAAAHAMGAVTDDEVIRKRLLIDGDGAGDDRRINLLVKSFIKWCNSGSQEEGYSQYQRMLSTLSQCEFSMGKTLLVYDMNLREMENYEKIYKEIECSIAGAHEKIAECKKQILQAKRIRKNRQEYDALAKVIQHHPDRHETLKELEALGKELEHLSHIKESVEDKLELRRKQFHVLLSTIHELQQTLENDEKLSEVEEAQEASMETDPKP

SEQ ID NO: 893430 - protein, 204 aa, Homo sapiens; identical to SEQ ID NO: 893427

SEQ ID NO: 893431 - protein, 204 aa, Homo sapiens; identical to SEQ ID NO: 893427

SEQ ID NO: 893432 - protein, 152 aa, Homo sapiens; identical to SEQ ID NO: 893428

SEQ ID NO: 893433 - protein, 225 aa, Homo sapiens
RPPPGSTGSAGSAGPAAAAHAMGAVTDDEVIRKRLLIDGDGAGDDRRINLLVKSFIKWCNSGSQEEGYSQYQRMLSTLSQCEFSMGKTLLVYDMNLREMENYEKIYKEIECSIAGAHEKIAECKKQILQAKRIRKNRQEYDALAKVIQHHPDRHETLKELEALGKELEHLSHIKESVEDKLELRRKQFHVLLSTIHELQQTLENDEKLSEVEEAQEASMETDPKP

SEQ ID NO: 893434 - protein, 216 aa, Homo sapiens
DPDCGRPAAPAAPPQPWRHEVIRKRLLIDGDGAGDDRRINLLVKSFIKWCNSGSQEEGYSQYQRMLSTLSQCEFSMGKTLLVYDMNLREMENYEKIYKEIECSIAGAHEKIAECKKQILQAKRIRKNRQEYDALAKVIQHHPDRHETLKELEALGKELEHLSHIKESVEDKLELRRKQFHVLLSTIHELQQTLENDEKLSEVEEAQEASMETDPKP

SEQ ID NO: 893435 - protein, 204 aa, Homo sapiens; identical to SEQ ID NO: 893427

SEQ ID NO: 893436 - protein, 152 aa, Homo sapiens; identical to SEQ ID NO: 893428

SEQ ID NO: 893437 - protein, 302 aa, Homo sapiens
MALHDMEDFTFDGTKRLSVNYVKGILQPTDTCDIWDKIWNFQAKPDDLLISTYPKAGTTWTQEIVELIQNEGDVEKSKRAPTHQRFPFLEMKIPSLGSGLEQAHAMPSPRILKTHLPFHLLPPSLLEKNCKIIYVARNPKDNMVSYYHFQRMNKALPAPGTWEEYFETFLAGKVCWGSWHEHVKGWWEAKDKHRILYLFYEDMKKNPKHEIQKLAEFIGKKLDDKVLDKIVHYTSFDVMKQNPMANYSSIPAEIMDHSISPFMRKGAVGDWKKHFTVAQNERFDEDYKKKMTDTRLTFHFQF

SEQ ID NO: 893438 - protein, 102 aa, Homo sapiens
MALHDMEDFTFDGTKRLSVNYVKGILQPTDTCDIWDKIWNFQAKPDDLLISTYPKAGTTWTQEIVELIQNEGDVEKSKRAPTHQRFPFLEMKIPSLGSGEYK

SEQ ID NO: 893439 - protein, 227 aa, Homo sapiens
MALHDMEDFTFDGTKRLSVNYVKGILQPTDTCDIWDKIWNFQAKPDDLLISTYPKAGTTWTQEIVELIQNEGDVEKSKRAPTHQRFPFLEMKIPSLGSVCWGSWHEHVKGWWEAKDKHRILYLFYEDMKKNPKHEIQKLAEFIGKKLDDKVLDKIVHYTSFDVMKQNPMANYSSIPAEIMDHSISPFMRKGAVGDWKKHFTVAQNERFDEDYKKKMTDTRLTFHFQF

SEQ ID NO: 893440 - protein, 67 aa, Homo sapiens
PKHEIQKLAEFIGKKLDDKVLDKIVHYTSFDVMKQNPMANYSSIPAEIMDHSISPFMRKGFYSLFSL

SEQ ID NO: 893441 - protein, 80 aa, Homo sapiens
EVEPFLLTAASSLLLSLPRRRVHWLFKLPVLLRGVKKAGCARRLCYKLQFLFGVLTEKNTRKDRQDQCHGPALLLSFLKR

SEQ ID NO: 893442 - protein, 512 aa, Homo sapiens
MRAAKGRRRPRGSAGRRRPSVALQSRDDLGCRDAAVAGPSFPRPARARPRLSPESGYHRRLGSAPSGLFRRPAWHAGAAAAAAAAAAAAAAAGAAAWEAPRFRRPGLRRPGPRSLSLDPAPASAPPSGPEPRPGLRLGLASSPGTRPATAAAASPDAPPACAATMERPEAGGINSNECENVSRKKKMSEEFEANTMDSLVDMPFATVDIQDDCGITDEPQINLKRSQENEWVKSDQVKKRKKKRKDYQPNYFLSIPITNKEIIKGIKILQNAIIQQDERLAKAMVSDGSFHITLLVMQLLNEDEVNIGIDALLELKPFIEELLQGKHLTLPFQGIGTFGNQVGFVKLAEGDHVNSLLEIAETANRTFQEKGILVGESRSFKPHLTFMKLSKSPWLRKNGVKKIDPDLYEKFISHRFGEEILYRIDLCSMLKKKQSNGYYHCESSIVIGEKNGGEPDDAELVRLSKRLVENAVLKAVQQYLEETQNKNKPGEGSSVKTEAADQNGNDNENNRK

SEQ ID NO: 893443 - protein, 519 aa, Homo sapiens
RFPAQLNAKLRKRAVNMVRFPRMHFFMPGFAPLTSRGSQQYRALTVPELTQQMFDAKNMMAACDPRHGRYLTVAAVFRGRMSMKEVDEQMLNVQNKNSSYFVEWIPNNVKPAVCDIPPRGLKMSATFIGNSTAIQELFKQHLRLGLASSPGTRPATAAAASPDAPPACAATMERPEAGGINSNECENVSRKKKMSEEFEANTMDSLVDMPFATVDIQDDCGITDEPQINLKRSQENEWVKSDQVKKRKKKRKDYQPNYFLSIPITNKEIIKGIKILQNAIIQQDERLAKAMVSDGSFHITLLVMQLLNEDEVNIGIDALLELKPFIEELLQGKHLTLPFQGIGTFGNQVGFVKLAEGDHVNSLLEIAETANRTFQEKGILVGESRSFKPHLTFMKLSKSPWLRKNGVKKIDPDLYEKFISHRFGEEILYRIDLCSMLKKKQSNGYYHCESSIVIGEKNGGEPDDAELVRLSKRLVENAVLKAVQQYLEETQNKNKPGEGSSVKTEAADQNGNDNENNRK

SEQ ID NO: 893444 - protein, 367 aa, Homo sapiens
MRAAKGRRRPRGSAGRRRPSVALQSRDDLGCRDAAVAGPSFPRPARARPRLSPESGYHRRLGSAPSGLFRRPAWHAGAAAAAAAAAAAAAAAGAAAWEAPRFRRPGLRRPGPRSLSLDPAPASAPPSGPEPRPGLRLGLASSPGTRPATAAAASPDAPPACAATMERPEAGGINSNECENVSRKKKMSEEFEANTMDSLVDMPFATVDIQDDCGITDEPQINLKRSQENEWVKSDQVKKRKKKRKDYQPNYFLSIPITNKEIIKGIKILQNAIIQQDERLAKAMVSDGSFHITLLVMQLLNEDEVNIGIDALLELKPFIEELLQGKHLTLPFQGIGTFGNQVGFVKLAEGDHVNSLLEIAGSEKNRS

SEQ ID NO: 893445 - protein, 560 aa, Homo sapiens
MRAAKGRRRPRGSAGRRRPSVALQSRDDLGCRDAAVAGPSFPRPARARPRLSPESGYHRRLGSAPSGLFRRPAWHAGAAAAAAAAAAAAAAAGAAAWEAPRFRRPGLRRPGPRSLSLDPAPASAPPSGPEPRPGLRLGLASSPGTRPATAAAASPDAPPACAATMERPEAGGINSNECENVSRKKKMSEEFEANTMDSLVDMPFATVDIQDDCGITDEPQINLKRSQENEWVKSDQVKKRKKKRKDYQPNYFLSIPITNKEEEQVLREEGRWWTRSVGISPGCRFCFSNVCIWTSLQLFMECPSPQIIKGIKILQNAIIQQDERLAKAMVSDGSFHITLLVMQLLNEDEVNIGIDALLELKPFIEELLQGKHLTLPFQGIGTFGNQVGFVKLAEGDHVNSLLEIAETANRTFQEKGILVGESRSFKPHLTFMKLSKSPWLRKNGVKKIDPDLYEKFISHRFGEEILYRIDLCSMLKKKQSNGYYHCESSIVIGKKPIGIRDLINEALHRETMGLKSKVKQIKELLLKPETQARIRRELFEGRLINNSNSANDVDFSTTLT

SEQ ID NO: 893446 - protein, 80 aa, Homo sapiens; identical to SEQ ID NO: 893441

SEQ ID NO: 893447 - protein, 141 aa, Homo sapiens
SSCRSSRFPKDHLSAVASIKALEPGVKKIDPDLYEKFISHRFGEEILYRIDLCSMLKKKQSNGYYHCESSIVIGKKPIGIRDLINEALHRETMGLKSKVKQIKELLLKPETQARIRRELFEGRLINNSNSANDVDFSTTLT

SEQ ID NO: 893448 - protein, 104 aa, Homo sapiens
MGQLCCFPFSRDEGKISELESSSSAVLQRYSKDIPSWSSGEKNGGEPDDAELVRLSKRLVENAVLKAVQQYLEETQNKNKPGEGSSVKTEAADQNGNDNENNRK

SEQ ID NO: 893449 - protein, 80 aa, Homo sapiens; identical to SEQ ID NO: 893441

SEQ ID NO: 893450 - protein, 80 aa, Homo sapiens; identical to SEQ ID NO: 893441

SEQ ID NO: 893451 - protein, 578 aa, Homo sapiens [sequence omitted]

SEQ ID NO: 893452 - protein, 119 aa, Homo sapiens
MPDSNFAERSEEQVSGAKVIAQALKTQDVEYIFGIVGIPVTEIAIAAQQLGIKYIGMRNEQAACYAASAIGYLTSRPGVCLVVSGPGLIHALGGMANANMNCWLKLVDYIPSSLPAQAA

SEQ ID NO: 893453 - protein, 69 aa, Homo sapiens
FKAVGCPPVRQRCSTRGGVLPTSRLPCWMIPLVCRLRECLELFGGRCRTVTSQSAARSRCLVLKSSLRP

SEQ ID NO: 893454 - protein, 204 aa, Homo sapiens [sequence omitted]

SEQ ID NO: 893455 - protein, 130 aa, Homo sapiens
NITLFIGGFVVKKKRKKKGLVGYNLPIILLVVNNNGIYQGFDTDTWKEMLKFQDATAVVPPMCLLPNSHYEQVMTAFGGKGYFVQTPEELQKSLRQSLADTTKPSLINIMIEPQATRKAQDFHWLTRSNM

SEQ ID NO: 893456 - protein, 204 aa, Homo sapiens [sequence omitted]

SEQ ID NO: 893457 - protein, 578 aa, Homo sapiens [sequence omitted]

SEQ ID NO: 893458 - protein, 552 aa, Homo sapiens
MPDSNFAERSEEQVSGAKVIAQALKTQDVEYIFGIVGIPVTEIAIAAQQLGIKYIGMRNEQAACYAASAIGYLTSRPGVCLVVSGPGLIHALGGMANANMNCWPLLVIGGSSERNQETMGAFQEFPQAVRSSIYGRPGACYVDIPADFVNLQVNVNSIKYMERCMSPPISMAETSAVCTAASVIRNAKQPLLIIGKGAAYAHAEESIKKLVEQYKLPFLPTPMGKGVVPDNHPYCVGAARSRALQFADVIVLFGARLNWILHFGLPPRYQPDVKFIQVDICAEELGNNVKPAVTLLGNIHAVTKQLLEELDKTPWQYPPESKWWKTLREKMKSNEAASKELASKKSLPMNYYTVFYHVQEQLPRDCFVVSEGANTMDIGRTVLQNYLPRHRLDAGTFGTMGVGLGFAIAAAVVAKDRSPGQWIICVEGDSAFGFSGMEVETICRYNLPIILLVVNNNGIYQGFDTDTWKEMLKFQDATAVVPPMCLLPNSHYEQVMTAFGGKGYFVQTPEELQKSLRQSLADTTKPSLINIMIEPQATRKAQDFHWLTRSNM

SEQ ID NO: 893459 - protein, 562 aa, Homo sapiens
MPDSNFAERSEEQVSGAKVIAQALKTQDVEYIFGIVGIPVTEIAIAAQQLGIKYIGMRNEQAACYAASAIGYLTSRPGVCLVVSGPGLIHALGGMANANMNCWPLLVIGGSSERNQETMGAFQEFPQVEACRLYTKFSARPSSIEAIPFVIEKIPADFVNLQVNVNSIKYMERCMSPPISMAETSAVCTAASVIRNAKQPLLIIGKGAAYAHAEESIKKLVEQYKLPFLPTPMGKGVVPDNHPYCVGAARSRALQFADVIVLFGARLNWILHFGLPPRYQPDVKFIQVDICAEELGNNVKPAVTLLGNIHAVTKQLLEELDKTPWQYPPESKWWKTLREKMKSNEAASKELASKKSLPMNYYTVFYHVQEQLPRDCFVVSEGANTMDIGRTVLQNYLPRHRLDAGTFGTMGVGLGFAIAAAVVAKDRSPGQWIICVEGDSAFGFSGMEVETICRYNLPIILLVVNNNGIYQGFDTDTWKEMLKFQDATAVVPPMCLLPNSHYEQVMTAFGGKGYFVQTPEELQKSLRQSLADTTKPSLINIMIEPQATRKAQDFHWLTRSNM

SEQ ID NO: 893460 - protein, 566 aa, Homo sapiens
MVGPWEFTPLFFVPQDVEYIFGIVGIPVTEIAIAAQQLGIKYIGMRNEQAACYAASAIGYLTSRPGVCLVVSGPGLIHALGGMANANMNCWPLLVIGGSSERNQETMGAFQEFPQVEACRLYTKFSARPSSIEAIPFVIEKAVRSSIYGRPGACYVDIPADFVNLQVNVNSIKYMERCMSPPISMAETSAVCTAASVIRNAKQPLLIIGKGAAYAHAEESIKKLVEQYKLPFLPTPMGKGVVPDNHPYCVGAARSRALQFADVIVLFGARLNWILHFGLPPRYQPDVKFIQVDICAEELGNNVKPAVTLLGNIHAVTKQLLEELDKTPWQYPPESKWWKTLREKMKSNEAASKELASKKSLPMNYYTVFYHVQEQLPRDCFVVSEGANTMDIGRTVLQNYLPRHRLDAGTFGTMGVGLGFAIAAAVVAKDRSPGQWIICVEGDSAFGFSGMEVETICRYNLPIILLVVNNNGIYQGFDTDTWKEMLKFQDATAVVPPMCLLPNSHYEQVMTAFGGKGYFVQTPEELQKSLRQSLADTTKPSLINIMIEPQATRKAQDFHWLTRSNM

SEQ ID NO: 893461 - protein, 392 aa, Homo sapiens [sequence omitted]

SEQ ID NO: 893462 - protein, 392 aa, Homo sapiens [sequence omitted]

SEQ ID NO: 893463 - protein, 496 aa, Homo sapiens
MPDSNFAERSEEQVSGAKVIAQALKTQDVEYIFGIVGIPVTEIAIAAQQLGIKYIGMRNEQAACYAASAIGYLTSRPGVCLVVSGPGLIHALGGMANANMNCWYMERCMSPPISMAETSAVCTAASVIRNAKQPLLIIGKGAAYAHAEESIKKLVEQYKLPFLPTPMGKGVVPDNHPYCVGAARSRALQFADVIVLFGARLNWILHFGLPPRYQPDVKFIQVDICAEELGNNVKPAVTLLGNIHAVTKQLLEELDKTPWQYPPESKWWKTLREKMKSNEAASKELASKKSLPMNYYTVFYHVQEQLPRDCFVVSEGANTMDIGRTVLQNYLPRHRLDAGTFGTMGVGLGFAIAAAVVAKDRSPGQWIICVEGDSAFGFSGMEVETICRYNLPIILLVVNNNGIYQGFDTDTWKEMLKFQDATAVVPPMCLLPNSHYEQVMTAFGGKGYFVQTPEELQKSLRQSLADTTKPSLINIMIEPQATRKAQDFHWLTRSNM

SEQ ID NO: 893464 - protein, 324 aa, Homo sapiens
IELALICVGAARSRALQFADVIVLFGARLNWILHFGLPPRYQPDVKFIQVDICAEELGNNVKPAVTLLGNIHAVTKQLLEELDKTPWQYPPESKWWKTLREKMKSNEAASKELASKKSLPMNYYTVFYHVQEQLPRDCFVVSEGANTMDIGRTVLQNYLPRHRLDAGTFGTMGVGLGFAIAAAVVAKDRSPGQWIICVEGDSAFGFSGMEVETICRYNLPIILLVVNNNGIYQGFDTDTWKEMLKFQDATAVVPPMCLLPNSHYEQVMTAFGGKGYFVQTPEELQKSLRQSLADTTKPSLINIMIEPQATRKAQDFHWLTRSNM

SEQ ID NO: 893465 - protein, 577 aa, Homo sapiens
MPDSNFAERSEEQVSGAKVIAQALKTQDVEYIFGIVGIPVTEIAIAAQQLGIKYIGMRNEQAACYAASAIGYLTSRPGVCLVVSGPGLIHALGGMANANMNCWPLLVIGGSSERNQETMGAFQEFPQVEACRLYTKFSARPSSIEAIPFVIEKAVRSSIYGRPGACYVDIPADFVNLQVNVNSIKYMERCMSPPISMAETSAVCTAASVIRNAKQPLLIIGKGAAYAHAEESIKKLVEQYKLPFLPTPMGKGVVPDNHPYCVGAARSRALQFADVIVLFGARLNWILHFGLPPRYQPDVKFIQVDICAEELGNNVKPAVTLLGNIHAVTKQLLEELDKTPWQYPPESKWWKTLREKMKSNEAASKELASKKSLPMNYYTVFYHVQEQLPRDCFVVSEGANTMDIGRTVLQNYLPRHRLDAGTFGTMGVGLGFAIAAAVVAKDRSPGQWIICVEGDSAFGFSGMEVETICRYNLPIILLVVNNNGIYQGFDTDTWKEMLKFQDATAVVPPMCLLPNSHYEQVMTAFGGKGYFVQTPEELQKSLRQSLADTTKPSLINIMIEPQATRKAQGRLLRGGDS

SEQ ID NO: 893466 - protein, 632 aa, Homo sapiens
MPDSNFAERSEEQVSGAKVIAQALKTQDVEYIFGIVGIPVTEIAIAAQQLGIKYIGMRNEQAACYAASAIGYLTSRPGVCLVVSGPGLIHALGGMANANMNCWPLLVIGGSSERNQETMGAFQEFPQVEACRLYTKFSARPSSIEAIPFVIEKAVRSSIYGRPGACYVDIPADFVNLQVNVNSIKYMERCMSPPISMAETSAVCTAASVIRNAKQPLLIIGKGAAYAHAEESIKKLVEQYKLPFLPTPMGKGVVPDNHPYCVGAARSRALQFADVIVLFGARLNWILHFGLPPRYQPDVKFIQVDICAEELGNNVKPAVTLLGNIHAVTKQLLEELDKTPWQYPPESKWWKTLREKMKSNEAASKELASKKSLPMNYYTVFYHVQEQLPRDCFVVSEGANTMDIGRTVLQNYLPRHRLDAGTFGTMGVGLGFAIAAAVVAKDRSPGQWIICVEGDSAFGFSGMEVETICRYNLPIILLVVNNNGIYQGFDTDTWKEMLKFQDATAVVPPMCLLPNSHYEQVMTAFGGKGYFVQTPEELQKSLRQSLADTTKPSLINIMIEPQATRKAQELPPHCTVKLDSRSQTWFHLSPSFACAVSAVMLCTHPPIFAVWSWLYASRPSSTVHSSMKPSFL

SEQ ID NO: 893467 - protein, 577 aa, Homo sapiens; identical to SEQ ID NO: 893465

SEQ ID NO: 893468 - protein, 229 aa, Homo sapiens
MFAKSVVFMQKNRKPSELASKKSLPMNYYTVFYHVQEQLPRDCFVVSEGANTMDIGRTVLQNYLPRHRLDAGTFGTMGVGLGFAIAAAVVAKDRSPGQWIICVEGDSAFGFSGMEVETICRYNLPIILLVVNNNGIYQGFDTDTWKEMLKFQDATAVVPPMCLLPNSHYEQVMTAFGGKGYFVQTPEELQKSLRQSLADTTKPSLINIMIEPQATRKAQDFHWLTRSNM

SEQ ID NO: 893469 - protein, 133 aa, Homo sapiens
  misc_feature (6)..(6): Xaa can be any naturally occurring amino acid
PQPPPXHQPPHPTPHHKNLRPLAKLYNLPIILLVVNNNGIYQGFDTDTWKEMLKFQDATAVVPPMCLLPNSHYEQVMTAFGGKGYFVQTPEELQKSLRQSLADTTKPSLINIMIEPQATRKAQDFHWLTRSNM

SEQ ID NO: 893470 - protein, 69 aa, Homo sapiens; identical to SEQ ID NO: 893453

SEQ ID NO: 893471 - protein, 110 aa, Homo sapiens
RCLLTEFSLLESLGDCWHLNRISDPGALWPAAQNQTRIPALGHPSEGGQNHHRCCCAADRYMLVQRAAPEMAVRTMCLRRKIRMEGCPSYLEGLGSLGLAWERSAAKWKI

SEQ ID NO: 893472 - protein, 110 aa, Homo sapiens; identical to SEQ ID NO: 893471

SEQ ID NO: 893473 - protein, 110 aa, Homo sapiens; identical to SEQ ID NO: 893471

SEQ ID NO: 893474 - protein, 683 aa, Homo sapiens
MDDYKYQDNYGGYAPSDGYYRGNESNPEEDAQSDVTEGHDEEDEIYEGEYQGIPHPDDVKAKQAKMAPSRMDSLRGQTDLMAERLEDEEQLAHQYETIMDECGHGRFQWILFFVLGLALMADGVEVFVVSFALPSAEKDMCLSSSKKGMLGMIVYLGMMAGAFILGGLADKLGRKRVLSMSLAVNASFASLSSFVQGYGAFLFCRLISGIGIGGALPIVFAYFSEFLSREKRGEHLSWLGIFWMTGGLYASAMAWSIIPHYGWGFSMGTNYHFHSWRVFVIVCALPCTVSMVALKFMPESPRFLLEMGKHDEAWMILKQVHDTNMRAKGTPEKVFTVSNIKTPKQMDEFIEIQSSTGTWYQRWLVRFKTIFKQVWDNALYCVMGPYRMNTLILAVVWFAMAFSYYGLTVWFPDMIRYFQDEEYKSKMKVFFGEHVYGATINFTMENQIHQHGKLVNDKFTRMYFKHVLFEDTFFDECYFEDVTSTDTYFKNCTIESTIFYNTDLYEHKFINCRFINSTFLEQKEGCHMDLEQDNDFLIYLVSFLGSLSVLPGNIISALLMDRIGRLKMIGGSMLISAVCCFFLFFGNSESAMIGWQCLFCGTSIAAWNALDVITVELYPTNQRATAFGILNGLCKFGAILGNTIFASFVGITKVVPILLAAASLVGGGLIALRLPETREQVLM

SEQ ID NO: 893475 - protein, 683 aa, Homo sapiens; identical to SEQ ID NO: 893474

SEQ ID NO: 893476 - protein, 683 aa, Homo sapiens; identical to SEQ ID NO: 893474

SEQ ID NO: 893477 - protein, 683 aa, Homo sapiens; identical to SEQ ID NO: 893474

SEQ ID NO: 893478 - protein, 683 aa, Homo sapiens; identical to SEQ ID NO: 893474

SEQ ID NO: 893479 - protein, 683 aa, Homo sapiens; identical to SEQ ID NO: 893474

SEQ ID NO: 893480 - protein, 683 aa, Homo sapiens; identical to SEQ ID NO: 893474

SEQ ID NO: 893481 - protein, 588 aa, Homo sapiens [sequence omitted]

SEQ ID NO: 893482 - protein, 533 aa, Homo sapiens [sequence omitted]

SEQ ID NO: 893483 - protein, 183 aa, Homo sapiens
GGGEERAAAQSKLSRAEPSWGRRAREAAAARSPGELAVAGPGARDAAAAAPGARSVSLSRRGTAAGMAHKARRLAWGSQHGGTPRAPPHAPPRGGTRSPTALPPRPLGALGLGMASSAGPRPVRVAGAVLEFGTGVTGGRVRQGSWRRPRPSPSRLTGGEIWSVPGKRGPADLEHPHPAACLS

SEQ ID NO: 893484 - protein, 610 aa, Homo sapiens
GGGEERAAAQSKLSRAEPSWGRRAREAAAARSPGGSAAGWECPSVLDEAGACTMSSCVSSQPSSNRAAPQDELGGRGSSSSESQKPCEALRGLSSLSIHLGMESFIVVTECEPGCAVDLGLARDRPLEADGQEVPLDSSGSQARPHLSGRKLSLQERSQGGLAAGGSLDMNGRCICPSLPYSPVSSPQSSPRLPRRPTVESHHVSITGMQDCVQLNQYTLKDEIGKGSYGVVKLAYNENDNTYYAMKVLSKKKLIRQAGFPRRPPPRGTRPAPGGCIQPRGPIEQVYQEIAILKKLDHPNVVKLVEVLDDPNEDHLYMVFELVNQGPVMEVPTLKPLSEDQARFYFQDLIKGIEYLHYQKIIHRDIKPSNLLVGEDGHIKIADFGVSNEFKGSDALLSNTVGTPAFMAPESLSETRKIFSGKALDVWAMGVTLYCFVFGQCPFMDERIMCLHSKIKSQALEFPDQPDIAEDLKDLITRMLDKNPESRIVVPEIKLHPWVTRHGAEPLPSEDENCTLVEVTEEEVENSVKHIPSLATVILVKTMIRKRSFGNPFEGSRREERSLSAPGNLLTKKPTRECESLSELKGTKKKKKGLDSMTSTVAAGWLDRRV

SEQ ID NO: 893485 - protein, 594 aa, Homo sapiens
GGGEERAAAQSKLSRAEPSWGRRAREAAAARSPGGSAAGWECPSVLDEAGACTMSSCVSSQPSSNRAAPQDELGGRGSSSSESQKPCEALRGLSSLSIHLGMESFIVVTECEPGCAVDLGLARDRPLEADGQEVPLDSSGSQARPHLSGRKLSLQERSQGGLAAGGSLDMNGRCICPSLPYSPVSSPQSSPRLPRRPTVESHHVSITGMQDCVQLNQYTLKDEIGKGSYGVVKLAYNENDNTYYAMKVLSKKKLIRQAGFPRRPPPRGTRPAPGGCIQPRGPIEQVYQEIAILKKLDHPNVVKLVEVLDDPNEDHLYMVFELVNQGPVMEVPTLKPLSEDQARFYFQDLIKGIEYLHYQKIIHRDIKPSNLLVGEDGHIKIADFGVSNEFKGSDALLSNTVGTPAFMAPESLSETRKIFSGKALDVWAMGVTLYCFVFGQCPFMDERIMCLHSKIKSQALEFPDQPDIAEDLKDLITRMLDKNPESRIVVPEIKLHPWVTRHGAEPLPSEDENCTLVEVTEEEVENSVKHIPSLATVILVKTMIRKRSFGNPFEGSRREERSLSAPGNLLTKQGSEDNLQGTDPPPVGEEEVLL

SEQ ID NO: 893486 - protein, 551 aa, Homo sapiens
GGGEERAAAQSKLSRAEPSWGRRAREAAAARSPGGSAAGWECPSVLDEAGACTMSSCVSSQPSSNRAAPQDELGGRGSSSSESQKPCEALRGLSSLSIHLGMESFIVVTECEPGCAVDLGLARDRPLEADGQEVPLDSSGSQARPHLSGRKLSLQERSQGGLAAGGSLDMNGRCICPSLPYSPVSSPQSSPRLPRRPTVESHHVSITGMQDCVQLNQYTLKDEIGKGSYGVVKLAYNENDNTYYAMKVLSKKKLIRQAGFPRRPPPRGTRPAPGGCIQPRGPIEQVYQEIAILKKLDHPNVVKLVEVLDDPNEDHLYMVFELVNQGPVMEVPTLKPLSEDQARFYFQDLIKGIEYLHYQKIIHRDIKPSNLLVGEDGHIKIADFGVSNEFKGSDALLSNTVGTPAFMAPESLSETRKIFSGKALDVWAMGVTLYCFVFGQCPFMDERIMCLHSKIKSQALEFPDQPDIAEDLKDLITRMLDKNPESRIVVPEIKILVKTMIRKRSFGNPFEGSRREERSLSAPGNLLTKQGSEDNLQGTDPPPVGEEEVLL

SEQ ID NO: 893487 - protein, 594 aa, Homo sapiens; identical to SEQ ID NO: 893485

SEQ ID NO: 893488 - protein, 326 aa, Homo sapiens
SRTSARYEAGCYENDNTYYAMKVLSKKKLIRQAGFPRRPPPRGTRPAPGGCIQPRGPIEQVYQEIAILKKLDHPNVVKLVEVLDDPNEDHLYMVFELVNQGPVMEVPTLKPLSEDQARFYFQDLIKGIEYLHYQKIIHRDIKPSNLLVGEDGHIKIADFGVSNEFKGSDALLSNTVGTPAFMAPESLSETRKIFSGKALDVWAMGVTLYCFVFGQCPFMDERIMCLHSKIKSQALEFPDQPDIAEDLKDLITRMLDKNPESRIVVPEIKILVKTMIRKRSFGNPFEGSRREERSLSAPGNLLTKQGSEDNLQGTDPPPVGEEEVLL

SEQ ID NO: 893489 - protein, 306 aa, Homo sapiens
MKVLSKKKLIRQAGFPRRPPPRGTRPAPGGCIQPRGPIEQVYQEIAILKKLDHPNVVKLVEVLDDPNEDHLYMVFELVNQGPVMEVPTLKPLSEDQARFYFQDLIKGIEYLHYQKIIHRDIKPSNLLVGEDGHIKIADFGVSNEFKGSDALLSNTVGTPAFMAPESLSETRKIFSGKALDVWAMGVTLYCFVFGQCPFMDERIMCLHSKIKSQALEFPDQPDIAEDLKDLITRMLDKNPESRIVVPEIKILVKTMIRKRSFGNPFEGSRREERSLSAPGNLLTKQGSEDNLQGTDPPPVGEEEVLL

SEQ ID NO: 893490 - protein, 641 aa, Homo sapiens
GGGEERAAAQSKLSRAEPSWGRRAREAAAARSPGGSAAGWECPSVLDEAGACTMSSCVSSQPSSNRAAPQDELGGRGSSSSESQKPCEALRGLSSLSIHLGMESFIVVTECEPGCAVDLGLARDRPLEADGQEVPLDSSGSQARPHLSGRKLSLQERSQGGLAAGGSLDMNGRCICPSLPYSPVSSPQSSPRLPRRPTVESHHVSITGMQDCVQLNQYTLKDEIGKGSYGVVKLAYNENDNTYYAMKVLSKKKLIRQAGFPRRPPPRGTRPAPGGCIQPRGPIEQVYQEIAILKKLDHPNVVKLVEVLDDPNEDHLYMVFELVNQGPVMEVPTLKPLSEDQARFYFQDLIKGIEYLHYQKIIHRDIKPSNLLVGEDGHIKIADFGVSNEFKGSDALLSNTVGTPAFMAPESLSETRKIFSGKALDVWAMGVTLYCFVFGQCPFMDERIMCLHSKIKSQALEFPDQPDIAEDLKDLITRMLDKNPESRIVVPEIKLHPWVTRHGAEPLPSEDENCTLVEVTEEEVENSVKHIPSLATVILVKTMIRKRSFGNPFEGSRREERSLSAPGNLLTKKPTRECESLSELKEARQRRQPPGHRPAPRGGGGSALVRGSPCVESCWAPAPGSPARMHPLRPEEAMEPE

SEQ ID NO: 893491 - protein, 594 aa, Homo sapiens; identical to SEQ ID NO: 893485

SEQ ID NO: 893492 - protein, 414 aa, Homo sapiens
GGGEERAAAQSKLSRAEPSWGRRAREAAAARSPGGSAAGWECPSVLDEAGACTMSSCVSSQPSSNRAAPQDELGGRGSSSSESQKPCEALRGLSSLSIHLGMESFIVVTECEPGCAVDLGLARDRPLEADGQEVPLDSSGSQARPHLSGRKLSLQERSQGGLAAGGSLDMNGRCICPSLPYSPVSSPQSSPRLPRRPTVESHHVSITGMQDLIKGIEYLHYQKIIHRDIKPSNLLVGEDGHIKIADFGVSNEFKGSDALLSNTVGTPAFMAPESLSETRKIFSGKALDVWAMGVTLYCFVFGQCPFMDERIMCLHSKIKSQALEFPDQPDIAEDLKDLITRMLDKNPESRIVVPEIKILVKTMIRKRSFGNPFEGSRREERSLSAPGNLLTKQGSEDNLQGTDPPPVGEEEVLL

SEQ ID NO: 893493 - protein, 594 aa, Homo sapiens; identical to SEQ ID NO: 893485

SEQ ID NO: 893494 - protein, 136 aa, Homo sapiens [sequence omitted]

SEQ ID NO: 893495 - protein, 594 aa, Homo sapiens; identical to SEQ ID NO: 893485

SEQ ID NO: 893496 - protein, 594 aa, Homo sapiens; identical to SEQ ID NO: 893485

SEQ ID NO: 893497 - protein, 110 aa, Homo sapiens
ECWPACLEVPRLTTCILGQLLFKTFLCQKSFIVIFRTTSDIPSDCVWGLTTVERRAENSGGLRPWRWLLHLRGSRGLDVAPSANRKPWHLPEPWSQGVRAGLALSSCREL

SEQ ID NO: 893498 - protein, 594 aa, Homo sapiens; identical to SEQ ID NO: 893485

SEQ ID NO: 893499 - protein, 594 aa, Homo sapiens; identical to SEQ ID NO: 893485

SEQ ID NO: 893500 - protein, 623 aa, Homo sapiens
GGGEERAAAQSKLSRAEPSWGRRAREAAAARSPGGSAAGWECPSVLDEAGACTMSSCVSSQPSSNRAAPQDELGGRGSSSSESQKPCEALRGLSSLSIHLGMESFIVVTECEPGCAVDLGLARDRPLEADGQEVPLDSSGSQARPHLSGRKLSLQERSQGGLAAGGSLDMNGRCICPSLPYSPVSSPQSSPRLPRRPTVESHHVSITGMQDCVQLNQYTLKDEIGKGSYGVVKLAYNENDNTYYAMKVLSKKKLIRQAGFPRRPPPRGTRPAPGGCIQPRGPIEQVYQEIAILKKLDHPNVVKLVEVLDDPNEDHLYMVFELVNQGPVMEVPTLKPLSEDQARFYFQDLIKGIEYLHYQKIIHRDIKPSNLLVGEDGHIKIADFGVSNEFKGSDALLSNTVGTPAFMAPESLSETRKIFSGKALDVWAMGVTLYCFVFGQCPFMDERIMCLHSKIKSQALEFPDQPDIAEDLKDLITRMLDKNPESRIVVPEIKLHPWVTRHGAEPLPSEDENCTLVEVTEEEVENSVKHIPSLATVILVKTMIRKRSFGNPFEGSRREERSLSAPGNLLTKKPTRECESLSELKTSAAITTINFTTFSSAQEDTLHSLAVPIQLPHPSNHSE

SEQ ID NO: 893501 - protein, 710 aa, Homo sapiens [sequence omitted]

SEQ ID NO: 893502 - protein, 731 aa, Homo sapiens
MGGKQRDEDDEAYGKPVKYDPSFRGPIKNRSCTDVICCVLFLLFILGYIVVGIVAWLYGDPRQVLYPRNSTGAYCGMGENKDKPYLLYFNIFSCILSSNIISVAENGLQCPTPQVCVSSCPEDPWTVGKNEFSQTVGEVFYTKNRNFCLPGVPWNMTVITSLQQELCPSFLLPSAPALGRCFPWTNITPPALPGITNDTTIQQGISGLIDSLNARDISVKIFEDFAQSWYWILVALGVALVLSLLFILLLRLVAGPLVLVLILGVLGVLAYGIYYCWEEYRVLRDKGASISQLGFTTNLSAYQSVQETWLAALIVLAVLEAILLLVLIFLRQRIRIAIALLKEASKAVGQMMSTMFYPLVTFVLLLICIAYWAMTALYLATSGQPQYVLWASNISSPGCEKVPINTSCNPTAHLVNSSCPGLMCVFQGYSSKGLIQRSVFNLQIYGVLGLFWTLNWVLALGQCVLAGAFASFYWAFHKPQDIPTFPLISAFIRTLRYHTGSLAFGALILTLVQIARVILEYIDHKLRGVQNPVARCIMCCFKCCLWCLEKFIKFLNRNAYIMIAIYGKNFCVSAKNAFMLLMRNIVRVVVLDKVTDLLLFFGKLLVVGGVGVLSFFFFSGRIPGLGKDFKSPHLNYYWLPIMTSILGAYVIASGFFSVFGMCVDTLFLCFQERGAPGQQEEEEVTAPALIQDCTPPPPSSHPTSLRLTGLHFVVKKGFRPGAVAHACNPTL

SEQ ID NO: 893503 - protein, 483 aa, Homo sapiens
CPHPAYSALGVALVLSLLFILLLRLVAGPLVLVLILGVLGVLAYGIYYCWEEYRVLRDKGASISQLGFTTNLSAYQSVQETWLAALIVLAVLEAILLLVLIFLRQRIRIAIALLKEASKAVGQMMSTMFYPLVTFVLLLICIAYWAMTALYLATSGQPQYVLWASNISSPGCEKVPINTSCNPTAHLVNSSCPGLMCVFQGYSSKGLIQRSVFNLQIYGVLGLFWTLNWVLALGQCVLAGAFASFYWAFHKPQDIPTFPLISAFIRTLRYHTGSLAFGALILTLVQIARVILEYIDHKLRGVQNPVARCIMCCFKCCLWCLEKFIKFLNRNAYIMIAIYGKNFCVSAKNAFMLLMRNIVRVVVLDKVTDLLLFFGKLLVVGGVGVLSFFFFSGRIPGLGKDFKSPHLNYYWLPIMTSILGAYVIASGFFSVFGMCVDTLFLCFLEDLERNNGSLDRPYYMSKSLLKILGKKNEAPPDNKKRKK

SEQ ID NO: 893504 - protein, 497 aa, Homo sapiens
FLSPICATSDQAILATQGRLTVPTHIASHPPGPPGVSLKAEDSLVLVLILGVLGVLAYGIYYCWEEYRVLRDKGASISQLGFTTNLSAYQSVQETWLAALIVLAVLEAILLLVLIFLRQRIRIAIALLKEASKAVGQMMSTMFYPLVTFVLLLICIAYWAMTALYLATSGQPQYVLWASNISSPGCEKVPINTSCNPTAHLVNSSCPGLMCVFQGYSSKGLIQRSVFNLQIYGVLGLFWTLNWVLALGQCVLAGAFASFYWAFHKPQDIPTFPLISAFIRTLRYHTGSLAFGALILTLVQIARVILEYIDHKLRGVQNPVARCIMCCFKCCLWCLEKFIKFLNRNAYIMIAIYGKNFCVSAKNAFMLLMRNIVRVVVLDKVTDLLLFFGKLLVVGGVGVLSFFFFSGRIPGLGKDFKSPHLNYYWLPIMTSILGAYVIASGFFSVFGMCVDTLFLCFLEDLERNNGSLDRPYYMSKSLLKILGKKNEAPPDNKKRKK

SEQ ID NO: 893505 - protein, 598 aa, Homo sapiens
MGGKQRDEDDEAYGKPVKYDPSFRGPIKNRSCTDVICCVLFLLFILGYIVVGIVAWLYGDPRQVLYPRNSTGAYCGMGENKDKPYLLYFNIFSCILSSNIISVAENGLQCPTPQVCVSSCPEDPWTVGKNEFSQTVGEVFYTKNRNFCLPGVPWNMTVITSLQQELCPSFLLPSAPALGRCFPWTNITPPALPGITNDTTIQQGISGLIDSLNARDISVKIFEDFAQSWYWILVAVGQMMSTMFYPLVTFVLLLICIAYWAMTALYLATSGQPQYVLWASNISSPGCEKVPINTSCNPTAHLVNSSCPGLMCVFQGYSSKGLIQRSVFNLQIYGVLGLFWTLNWVLALGQCVLAGAFASFYWAFHKPQDIPTFPLISAFIRTLRYHTGSLAFGALILTLVQIARVILEYIDHKLRGVQNPVARCIMCCFKCCLWCLEKFIKFLNRNAYIMIAIYGKNFCVSAKNAFMLLMRNIVRVVVLDKVTDLLLFFGKLLVVGGVGVLSFFFFSGRIPGLGKDFKSPHLNYYWLPIMTSILGAYVIASGFFSVFGMCVDTLFLCFLEDLERNNGSLDRPYYMSKSLLKILGKKNEAPPDNKKRKK

SEQ ID NO: 893506 - protein, 124 aa, Homo sapiens
MHPFRVCQSPPKRLTCIFSANSYHRSMQHNIPDPTSQEETEITYTCPGVRVVVQLGFQIPQAACLPVPDFLAPGSALTGLCCGSVEDLERNNGSLDRPYYMSKSLLKILGKKNEAPPDNKKRKK

SEQ ID NO: 893507 - protein, 136 aa, Homo sapiens
MGGKQRDEDDEAYGKPVKYDPSFRGPIKNRSCTDVICCVLFLLFILGYIVVGIVAWLYGDPRQVLYPRNSTGAYCGMGENKLSTKARRGVQERGEVGWAGDTPPTQAPDLSVLFHSLSLLSPPHLSLPESDNSRPR

SEQ ID NO: 893508 - protein, 573 aa, Homo sapiens
MGGKQRDEDDEAYGKPVKYDPSFRGPIKNRSCTDVICCVLFLLFILGYIVVGIVAWLYGDPRQVLYPRNSTGAYCGMGENKDKPYLLYFNIFSCILSSNIISVAENGLQCPTPQVCVSSCPEDPWTVGKNEFSQTVGEVFYTKNRNFCLPGVPWNMTVITSLQQELCPSFLLPSAPALGRCFPWTNITPPALPGITNDTTIQQGISGLIDSLNARDISVKIFEDFAQSWYWILVALGVALVLSLLFILLLRLVAGPLVLVLILGVLGVLAYGIYYCWEEYRVLRDKGASISQLGFTTNLSAYQSVQETWLAALIVLAVLEAILLLVLIFLRQRIRIAIALLKEASKAVGQMMSTMFYPLVTFVLLLICIAYWAMTALYLATSGQPQYVLWASNISSPGCEKVPINTSCNPTAHLVNSSCPGLMCVFQGYSSKGLIQRSVFNLQIYGVLGLFWTLNWVLALGQCVLAGAFASFYWAFHKPQDIPTFPLISAFIRTLRYHTGSLAFGALILTLVQIARVILEYIDHKLRGVQNPVARCIMCCFKCCLWCLEKFIKFLNRNAYIMIAGHEGTRARS

SEQ ID NO: 893509 - protein, 269 aa, Homo sapiens
MGGKQRDEDDEAYGKPVKYDPSFRGPIKNRSCTDVICCVLFLLFILGYIVVGIVAWLYGDPRQVLYPRNSTGAYCGMGENKDKPYLLYFNIFSCILSSNIISVAENGLQCPTPQVCVSSCPEDPWTVGKNEFSQTVGEVFYTKNRNFCLPGVPWNMTVITSLQQELCPSFLLPSAPALGRCFPWTNITPPALPGITNDTTIQQGISGLIDSLNARDISVKIFEDFAQSWYWILVALGVALVLSLLFISLEPLPPSTGPSTSPRTSLPSP

SEQ ID NO: 893510 - protein, 43 aa, Homo sapiens
DYRREPPRPAGVSPLRRWTAGAVPVNSFVSLQGCGTDDVYHVL

SEQ ID NO: 893511 - protein, 837 aa, Homo sapiens
GPVARHVAAGAGHENKHGGSRRFPAGVAPRRAMANVSKKVSWSGRDRDDEEAAPLLRRTARPGGGTPLLNGAGPGAARQSPRSALFRVGHMSSVELDDELLDPDMDPPHPFPKEIPHNEKLLSLKYESLDYDNSENQLFLEEERRINHTAFRTVEIKRWVICALIGILTGLVACFIDIVVENLAGLKYRVIKGNIDKFTEKGGLSFSLLLWATLNAAFVLVGSVIVAFIEPVAAGSGIPQIKCFLNGVKIPHVVRLKTLVIKVSGVILSVVGGLAVGKEGPMIHSGSVIAAGISQGRSTSLKRDFKIFEYFRRDTEKRDFVSAGAAAGVSAAFGAPVGGVLFSLEEGASFWNQFLTWRIFFASMISTFTLNFVLSIYHGNMWDLSSPGLINFGRFDSEKMAYTIHEIPVFIAMGVVGGVLGAVFNALNYWLTMFRIRYIHRPCLQVIEAMLVAAVTATVAFVLIYSSRDCQPLQGGSMSYPLQLFCADGEYNSMAAAFFNTPEKSVVSLFHDPPGSYNPLTLGLFTLVYFFLACWTYGLTVSAGVFIPSLLIGAAWGRLFGISLSYLTGAAIWADPGKYALMGAAAQLGGIVRMTLSLTVIMMEATSNVTYGFPIMLVLMTAKIVGDVFIEGLYDMHIQLQSVPFLHWEAPVTSHSLTAREVMSTPVTCLRRREKVGVIVDVLSDTASNHNGFPVVEHADDTQPARLQGLILRSQLIVLLKHKVFVERSNLGLVQRRLRLKDFRDAYPRFPPIQSIHVSQDERECTMDLSEFMNPSPYTVPQEASLPRVFKLFRALGLRHLVVVDNRNQVVGLVTRKDLARYRLGKRGLEELSLAQT

SEQ ID NO: 893512 - protein, 405 aa, Homo sapiens
MLARNCPLWDSAHRAHWALHNPGACRRSGRSCCCQSDCARALPDPRPDRALQAFRTVEIKRWVICALIGILTGLVACFIDIVVENLAGLKYRVIKGNIDKFTEKGGLSFSLLLWATLNAAFVLVGSVIVAFIEPVAAGSGIPQIKCFLNGVKIPHVVRLKTLVIKVSGVILSVVGGLAVGKEGPMIHSGSVIAAGISQGRSTSLKRDFKIFEYFRRDTEKRDFVSAGAAAGVSAAFGAPVGGVLYTACEDGCGPSGNQYMTWKDLTMLTMNHPRINLASKDYEPFTTRNIVGTWFKTQATSIQLSEQVRPREKNGLTRRLQEEQPGEQTDKWKSDNERGNTERDGYTRAMSNEQATSTRIEARKNTRDTNEQSIVRTTESDVRRHKTEHHDRQHTTEEKRNEERQ

SEQ ID NO: 893513 - protein, 837 aa, Homo sapiens; identical to SEQ ID NO: 893511

SEQ ID NO: 893514 - protein, 837 aa, Homo sapiens; identical to SEQ ID NO: 893511

SEQ ID NO: 893515 - protein, 837 aa, Homo sapiens; identical to SEQ ID NO: 893511

SEQ ID NO: 893516 - protein, 837 aa, Homo sapiens; identical to SEQ ID NO: 893511

SEQ ID NO: 893517 - protein, 309 aa, Homo sapiens
VRGHEVCSWLWGCWAWAGPPPSVYLGGFGPATTLTPPPCHLPQIWADPGKYALMGAAAQLGGIVRMTLSLTVIMMEATSNVTYGFPIMLVLMTAKIVGDVFIEGLYDMHIQLQSVPFLHWEAPVTSHSLTAREVMSTPVTCLRRREKVGVIVDVLSDTASNHNGFPVVEHADDTQPARLQGLILRSQLIVLLKHKVFVERSNLGLVQRRLRLKDFRDAYPRFPPIQSIHVSQDERECTMDLSEFMNPSPYTVPQEASLPRVFKLFRALGLRHLVVVDNRNQVVGLVTRKDLARYRLGKRGLEELSLAQT

SEQ ID NO: 893518 - protein, 271 aa, Homo sapiens
TLEKPGERQDGPMPLMELLPRLSGIVRMTLSLTVIMMEATSNVTYGFPIMLVLMTAKIVGDVFIEGLYDMHIQLQSVPFLHWEAPVTSHSLTAREVMSTPVTCLRRREKVGVIVDVLSDTASNHNGFPVVEHADDTQPARLQGLILRSQLIVLLKHKVFVERSNLGLVQRRLRLKDFRDAYPRFPPIQSIHVSQDERECTMDLSEFMNPSPYTVPQEASLPRVFKLFRALGLRHLVVVDNRNQVVGLVTRKDLARYRLGKRGLEELSLAQT

SEQ ID NO: 893519 - protein, 649 aa, Homo sapiens
GPVARHVAAGAGHENKHGGSRRFPAGVAPRRAMANVSKKVSWSGRDRDDEEAAPLLRRTARPGGGTPLLNGAGPGAARQSPRSALFRVGHMSSVELDDELLDPDMDPPHPFPKEIPHNEKLLSLKYESLDYDNSENQLFLEEERRINHTAFRTVEIKRWVICALIGILTGLVACFIDIVVENLAGLKYRVIKGNIDKFTEKGGLSFSLLLWATLNAAFVLVGSVIVAFIEPVAAGSGIPQIKCFLNGVKIPHVVRLKTLVIKVSGVILSVVGGLAVGKEGPMIHSGSVIAAGISQGRSTSLKRDFKIFEYFRRDTEKRDFVSAGAAAGVSAAFGAPVGGVLFSLEEGASFWNQFLTWRIFFASMISTFTLNFVLSIYHGNMWDLSSPGLINFGRFDSEKMAYTIHEIPVFIAMGVVGGVLGAVFNALNYWLTMFRIRYIHRPCLQVIEAMLVAAVTATVAFVLIYSSRDCQPLQGGSMSYPLQLFCADGEYNSMAAAFFNTPEKSVVSLFHDPPGSYNPLTLGLFTLVYFFLACWTYGLTVSAGVFIPSLLIGAAWGRLFGISLSYLTGAAIWADPGKYALMGAAAQLGGIVRMTLSLTVIMMEATSNVTYGFPIMLVLMTAKIVGDVFIELPAAPARRAAPARRHLRL

SEQ ID NO: 893520 - protein, 285 aa, Homo sapiens
GPVARHVAAGAGHENKHGGSRRFPAGVAPRRAMANVSKKVSWSGRDRDDEEAAPLLRRTARPGGGTPLLNGAGPGAARQSPRSALFRVGHMSSVELDDELLDPDMDPPHPFPKEIPHNEKLLSLKYESLDYDNSENQLFLEEERRINHTAFRTVEIKRWVICALIGILTGLVACFIDIVVENLAGLKYRVIKGSILPSAAAAAWEGVVAWAESRAEVLSPACSSAGGGGPARLAVSLSWLGRETSLGCPVNIMAPPSRVASARLVCGAGLRSGLGGPDGEAASPP

SEQ ID NO: 893521 - protein, 130 aa, Homo sapiens
LAFLLPREAENREPSGDRWARELRLLGSWKVTVRPETGSGAGQSCGGGSRGGPVSPSSLLGSYNPLTLGLFTLVYFFLACWTYGLTVSAGVFIPSLLIGAAWGRLFGISLSYLTGAAVSGAGGEAVGPCS

SEQ ID NO: 893522 - protein, 933 aa, Homo sapiens
GPVARHVAAGAGHENKHGGSRRFPAGVAPRRAMANVSKKVSWSGRDRDDEEAAPLLRRTARPGGGTPLLNGAGPGAARQSPRSALFRVGHMSSVELDDELLDPDMDPPHPFPKEIPHNEKLLSLKYESLDYDNSENQLFLEEERRINHTAFRTVEIKRWVICALIGILTGLVACFIDIVVENLAGLKYRVIKGSILPSAAAAAWEGVVAWAESRAEVLSPACSSAGGGGPARLAVSLSWLGRETSLGCPVNIMAPPSRVASARLVCGAGLRSGLGGLTGKQPALLDEPPDIDKFTEKGGLSFSLLLWATLNAAFVLVGSVIVAFIEPVAAGSGIPQIKCFLNGVKIPHVVRLKTLVIKVSGVILSVVGGLAVGKEGPMIHSGSVIAAGISQGRSTSLKRDFKIFEYFRRDTEKRDFVSAGAAAGVSAAFGAPVGGVLFSLEEGASFWNQFLTWRIFFASMISTFTLNFVLSIYHGNMWDLSSPGLINFGRFDSEKMAYTIHEIPVFIAMGVVGGVLGAVFNALNYWLTMFRIRYIHRPCLQVIEAMLVAAVTATVAFVLIYSSRDCQPLQGGSMSYPLQLFCADGEYNSMAAAFFNTPEKSVVSLFHDPPGSYNPLTLGLFTLVYFFLACWTYGLTVSAGVFIPSLLIGAAWGRLFGISLSYLTGAAIWADPGKYALMGAAAQLGGIVRMTLSLTVIMMEATSNVTYGFPIMLVLMTAKIVGDVFIEGLYDMHIQLQSVPFLHWEAPVTSHSLTAREVMSTPVTCLRRREKVGVIVDVLSDTASNHNGFPVVEHADDTQPARLQGLILRSQLIVLLKHKVFVERSNLGLVQRRLRLKDFRDAYPRFPPIQSIHVSQDERECTMDLSEFMNPSPYTVPQEASLPRVFKLFRALGLRHLVVVDNRNQVVGLVTRKDLARYRLGKRGLEELSLAQT

SEQ ID NO: 893523 - protein, 740 aa, Homo sapiens
MLARNCPLWDSAHRAHWALHNPGACRRSGRSCCCQSDCARALPDPRPDRALQAFRTVEIKRWVICALIGILTGLVACFIDIVVENLAGLKYRVIKGNIDKFTEKGGLSFSLLLWATLNAAFVLVGSVIVAFIEPVAAGSGIPQIKCFLNGVKIPHVVRLKTLVIKVSGVILSVVGGLAVGKEGPMIHSGSVIAAGISQGRSTSLKRDFKIFEYFRRDTEKRDFVSAGAAAGVSAAFGAPVGGVLFSLEEGASFWNQFLTWRIFFASMISTFTLNFVLSIYHGNMWDLSSPGLINFGRFDSEKMAYTIHEIPVFIAMGVVGGVLGAVFNALNYWLTMFRIRYIHRPCLQVIEAMLVAAVTATVAFVLIYSSRDCQPLQGGSMSYPLQLFCADGEYNSMAAAFFNTPEKSVVSLFHDPPGSYNPLTLGLFTLVYFFLACWTYGLTVSAGVFIPSLLIGAAWGRLFGISLSYLTGAAIWADPGKYALMGAAAQLGGIVRMTLSLTVIMMEATSNVTYGFPIMLVLMTAKIVGDVFIEGLYDMHIQLQSVPFLHWEAPVTSHSLTAREVMSTPVTCLRRREKVGVIVDVLSDTASNHNGFPVVEHADDTQPARLQGLILRSQLIVLLKHKVFVERSNLGLVQRRLRLKDFRDAYPRFPPIQSIHVSQDERECTMDLSEFMNPSPYTVPQEASLPRVFKLFRALGLRHLVVVDNRNQVVGLVTRKDLARYRLGKRGLEELSLAQT

SEQ ID NO: 893524 - protein, 470 aa, Homo sapiens
VPSGLSQKGTQIPDHFRPPLRKPGKWCAMHVKMAYTIHEIPVFIAMGVVGGVLGAVFNALNYWLTMFRIRYIHRPCLQVIEAMLVAAVTATVAFVLIYSSRDCQPLQGGSMSYPLQLFCADGEYNSMAAAFFNTPEKSVVSLFHDPPGSYNPLTLGLFTLVYFFLACWTYGLTVSAGVFIPSLLIGAAWGRLFGISLSYLTGAAIWADPGKYALMGAAAQLGGIVRMTLSLTVIMMEATSNVTYGFPIMLVLMTAKIVGDVFIEGLYDMHIQLQSVPFLHWEAPVTSHSLTAREVMSTPVTCLRRREKVGVIVDVLSDTASNHNGFPVVEHADDTQPARLQGLILRSQLIVLLKHKVFVERSNLGLVQRRLRLKDFRDAYPRFPPIQSIHVSQDERECTMDLSEFMNPSPYTVPQEASLPRVFKLFRALGLRHLVVVDNRNQVVGLVTRKDLARYRLGKRGLEELSLAQT

SEQ ID NO: 893525 - protein, 837 aa, Homo sapiens; identical to SEQ ID NO: 893511

SEQ ID NO: 893526 - protein, 837 aa, Homo sapiens; identical to SEQ ID NO: 893511

SEQ ID NO: 893527 - protein, 115 aa, Homo sapiens
RRIALSFTNLKFSLSVGSSQAPGANSTQADEGKTKKGVLEAPDTQVNPVGSVSVDCGPSRADRCSPKEDQAWDGASQDCPPLPAGVSFHIVQRLTSDAELCASNLQKAEHITSAP

SEQ ID NO: 893528 - protein, 768 aa, Homo sapiens
WVSGRALGAAAPRWVLGPTQRWGVSQASRHRCCRHHCVGLVQPRARPRPGQERRGFVMHLKPYWKLQKKEHPPEVSRETQRTPMNHQKAVNDETCKASHITSSVFPSASLGKASSRKPFGILSPNVLCSMSGKSPVESSLNVKTKKNAPSATIHQGEEEGPLDIWAVVKPGNTKEKIAFFASHQCSNRIGSMKIKSSWDIDGRATKRRKKSGDLKKAKVQVERMREVNSRCYQPEPFACGIEHCSVHYVSDSGDGVYAGRPLSVIQMVAFLEQRASALLASCSKNCTNSPAIVRFSGQSRGVPAVSESYSAPGACEEPTERGNLEVGEPQSEPVRVLDMVAKLESECLKRQGQREPGSLSRNNSFRRNVGRVLLANSTQADEGKTKKGVLEAPDTQVNPVGSVSVDCGPSRADRCSPKEDQAWDGASQDCPPLPAGVSFHIDSAELEPGSQTAVKNSNRYDVEMTDELVGLPFSSHTYSQASELPTDAVDCMSRELVSLTSRNPDQRKESLCISITVSKVDKDQPSILNSCEDPVPGMLFFLPPGQHLSDYSQLNESTTKESSEASQLEDAAGGDSASEEKSGSAEPFVPPASSVESTLPVLEASSWKKQVSHDFLETRFKIQQLLEPQQYMAFLPHHIMVKIFRLLPTKSLVALKCTCCYFKFIIEYYNIRPADSRWVRDPRYREDPCKQCKKKYVKGDVSLCRWHPKPYCQALPYGPGYWMCCHRSQKGFPGCKLGLHDNHWVPACHSFNRAIHKKAKGTEAEEEY

SEQ ID NO: 893529 - protein, 515 aa, Homo sapiens
MESMLGGLCQLYRWLAFLEQRASALLASCSKNCTNSPAIVRFSGQSRGVPAVSESYSAPGACEEPTERGNLEVGEPQSEPVRVLDMVAKLESECLKRQGQREPGSLSRNNSFRRNVGRVLLANSTQADEGKTKKGVLEAPDTQVNPVGSVSVDCGPSRADRCSPKEDQAWDGASQDCPPLPAGVSFHIDSAELEPGSQTAVKNSNRYDVEMTDELVGLPFSSHTYSQASELPTDAVDCMSRELVSLTSRNPDQRKESLCISITVSKVDKDQPSILNSCEDPVPGMLFFLPPGQHLSDYSQLNESTTKESSEASQLEDAAGGDSASEEKSGSAEPFVPPASSVESTLPVLEASSWKKQVSHDFLETRFKIQQLLEPQQYMAFLPHHIMVKIFRLLPTKSLVALKCTCCYFKFIIEYYNIRPADSRWVRDPRYREDPCKQCKKKYVKGDVSLCRWHPKPYCQALPYGPGYWMCCHRSQKGFPGCKLGLHDNHWVPACHSFNRAIHKKAKGTEAEEEY

SEQ ID NO: 893530 - protein, 577 aa, Homo sapiens
WVSGRALGAAAPRWVLGPTQRWGVSQASRHRCCRHHCVGLVQPRARPRPGQERRGFVMHLKPYWKLQKKEHPPEVSRETQRTPMNHQKAVNDETCKASHITSSVFPSASLGKASSRKPFGILSPNVLCSMSGKSPVESSLNVKTKKNAPSATIHQGEEEGPLDIWAVVKPGNTKEKIAFFASHQCSNRIGSMKIKSSWDIDGRATKRRKKSGDLKKAKVQVERMREVNSRCYQPEPFACGIEHCSVHYVSDSGDGVYAGRPLSVIQMVAFLEQRASALLASCSKNCTNSPAIVRFSGQSRGVPAVSESYSAPGACEEPTERGNLEVGEPQSEPVRVLDMVAKLESECLKRQGQREPGSLSRNNSFRRNVGRVLLANSTQADEGKTKKGVLEAPDTQVNPVGSVSVDCGPSRADRCSPKEDQAWDGASQDCPPLPAGVSFHIDSAELEPGSQTAVKNSNRYDVEMTDELVGLPFSSHTYSQASELPTDAVDCMSRELVSLTSRNPDQRKESLCISITVSKVDKDQPSILNSCEDPVPGMLFFLPPGQHLSDYSQLNESTTKESSEASQLEDVLFQVYH

SEQ ID NO: 893531 - protein, 768 aa, Homo sapiens; identical to SEQ ID NO: 893528

SEQ ID NO: 893532 - protein, 227 aa, Homo sapiens
WVSGRALGAAAPRWVLGPTQRWGVSQASRHRCCRHHCVGLVQPRARPRPGQERRGFVMHLKPYWKLQKKEHPPEVSRETQRTPMNHQKAVNDETCKASHITSSVFPSASLGKASSRKPFGILSPNVLCSMSGKSPVESSLNVKTKKNAPSATIHQGEEEGPLDIWAVVKPGNTKEKIAFFASHQCSNRIGSMKIKSSWDIDGRATKRRKKSGDLKKAKVQVDKDEGG

SEQ ID NO: 893533 - protein, 425 aa, Homo sapiens
MNYARFITAASAARNPSPIRTMTDILSRGPKSMISLAGGLPNPNMFPFKTAVITVENGKTIQFGEEMMKRALQYSPSAGIPELLSWLKQLQIKLHNPPTIHYPPSQGQMDLCVTSGSQQGLCKVFEMIINPGDNVLLDEPAYSGTLQSLHPLGCNIINVASDESGIVPDSLRDILSRWKPEDAKNPQKNTPKFLYTVPNGNNPTGNSLTSERKKEIYELARKYDFLIIEDDPYYFLQFNKFRVPTFLSMDVDGRVIRADSFSKIISSGLRIGFLTGPKPLIERVILHIQVSTLHPSTFNQLMISQLLHEWGEEGFMAHVDRVIDFYSNQKDAILAAADKWLTGLAEWHVPAAGMFLWIKVKGINDVKELIEEKAVKMGVLMLPGNAFYVDSSAPSPYLRASFSSASPEQMDVAFQVLAQLIKESL

SEQ ID NO: 893534 - protein, 299 aa, Homo sapiens [sequence omitted]

SEQ ID NO: 893535 - protein, 250 aa, Homo sapiens
MNYARFITAASAARNPSPIRTMTDILSRGPKSMISLAGGLPNPNMFPFKTAVITVENGKTIQFGEEMMKRALQYSPSAGIPELLSWLKQLQIKLHNPPTIHYPPSQGQMDLCVTSGSQQGLCKVFEMIINPGDNVLLDEPAYSGTLQSLHPLGCNIINVASDESGIVPDSLRDILSRWKPEDAKNPQKNTPKFLYTVPNGNNPTGNSLTSERKKEIYELARKYDFLIIEDDPYYFLQFNKVSDYVNLLHY

SEQ ID NO: 893536 - protein, 220 aa, Homo sapiens
MNYARFITAASAARNPSPIRTMTDILSRGPKSMISLAGGLPNPNMFPFKTAVITVENGKTIQFGEEMMKRALQYSPSAGIPELLSWLKQLQIKLHNPPTIHYPPSQGQMDLCVTSGSQQGLCKVFEMIINPGDNVLLDEPAYSGTLQSLHPLGCNIINVASDESGIVPDSLRDILSRWKPEDAKNPQKNTPKFLYTVPNGNNPTGNSLTSERKKEIYEVL

SEQ ID NO: 893537 - protein, 427 aa, Homo sapiens
RKALPGKLRRGMHSVQMGVQWRGPADILSRGPKSMISLAGGLPNPNMFPFKTAVITVENGKTIQFGEEMMKRALQYSPSAGIPELLSWLKQLQIKLHNPPTIHYPPSQGQMDLCVTSGSQQGLCKVFEMIINPGDNVLLDEPAYSGTLQSLHPLGCNIINVASDESGIVPDSLRDILSRWKPEDAKNPQKNTPKFLYTVPNGNNPTGNSLTSERKKEIYELARKYDFLIIEDDPYYFLQFNKFRVPTFLSMDVDGRVIRADSFSKIISSGLRIGFLTGPKPLIERVILHIQVSTLHPSTFNQLMISQLLHEWGEEGFMAHVDRVIDFYSNQKDAILAAADKWLTGLAEWHVPAAGMFLWIKVKGINDVKELIEEKAVKMGVLMLPGNAFYVDSSAPSPYLRASFSSASPEQMDVAFQVLAQLIKESL

SEQ ID NO: 893538 - protein, 422 aa, Homo sapiens
MNYARFITAASAARNPSPIRTMTDILSRGPKSMISLAGGLPNPNMFPFKTAVITVENGKTIQFGEEMMKRALQYSPSAGIPELLSWLKQLQIKLHNPPTIHYPPSQGQMDLCVTSGSQQGLCKVFEMIINPGDNVLLDEPAYSGTLQSLHPLGCNIINVASDESGIVPDSLRDILSRWKPEDAKNPQKNTPKFLYTVPNGNNPTGNSLTSERKKEIYELARKYDFLIIEDDPYYFLQFNKFRVPTFLSMDVDGRVIRADSFSKIISSGLRIGFLTGPKPLIERVILHIQVSTLHPSTFNQLMISQLLHEWGEEGFMAHVDRVIDFYSNQKDAILAAADKWLTGLAEWHVPAAGMFLWIKVKGINDVKELIEEKAVKMGVLMLPGNAFYVDSSAPSPYLRASFSSASPEQMDVVLAGRNEHWY

SEQ ID NO: 893539 - protein, 103 aa, Homo sapiens [sequence omitted]

SEQ ID NO: 893540 - protein, 362 aa, Homo sapiens
MKLHCCLFTLVASIIVPAAFVLEDVDFDQMVSLEANRSSYNASFPSSFELSASSHSDDDVIIAKEGTSVSIECLLTASHYEDVHWHNSKGQQLDGRSRGGKWLVSDNFLNITNVAFDDRGLYTCFVTSPIRASYSVTLRVIFTSGDMSVYYMIVCLIAFTITLILNVTRLCMMSSHLRKTEKAINEFFRTEGAEKLQKAFEIAKRIPIITSAKTLELAKVTQFKTMEFARYIEELARSVPLPPLILNCRAFVEEMFEAVRVDDPDDLGERIKERPALNAQGGIYVINPEMGRSNSPGGDSDDGSLNEQGQEIAVQVSVHLQSETKSIDTESQGSSHFSPPDDIGSAESNCNYKDGAYENCQL

SEQ ID NO: 893541 - protein, 362 aa, Homo sapiens; identical to SEQ ID NO: 893540

SEQ ID NO: 893542 - protein, 362 aa, Homo sapiens; identical to SEQ ID NO: 893540

SEQ ID NO: 893543 - protein, 362 aa, Homo sapiens; identical to SEQ ID NO: 893540

SEQ ID NO: 893544 - protein, 362 aa, Homo sapiens; identical to SEQ ID NO: 893540

SEQ ID NO: 893545 - protein, 116 aa, Homo sapiens
MKLHCCLFTLVASIIVPAAFVLEDVDFDQMVSLEANRSSYNASFPSSFELSASSHSDDDVIIAKEGTSVSIECLLTASHYEDVHWHNSKGQQLDGRSRGLRKVWMMMKMDKIQSAY

SEQ ID NO: 893546 - protein, 194 aa, Homo sapiens
MAQQQMTSSQKALMLELKSLQEEPVEGFRITLVDESDLYNWEVAIFGPPNTLYEGGYFKAHIKFPIDYPYSPPTFRFLTKMWHPNIYENGDVCISILHPPVDDPQSGELPSERWNPTQNVRTILLSVISLLNEPNTFSPANVDASVMFRKWRDSKGKDKEYAEIIRKQVSATKAEAEKDGVKVPTTLGGILHQN

SEQ ID NO: 893547 - protein, 194 aa, Homo sapiens; identical to SEQ ID NO: 893546

SEQ ID NO: 893548 - protein, 194 aa, Homo sapiens; identical to SEQ ID NO: 893546

SEQ ID NO: 893549 - protein, 194 aa, Homo sapiens; identical to SEQ ID NO: 893546

SEQ ID NO: 893550 - protein, 194 aa, Homo sapiens; identical to SEQ ID NO: 893546

SEQ ID NO: 893551 - protein, 165 aa, Homo sapiens
MAQQQMTSSQKALMLELKSLQEEPVEGFRITLVDESDLYNWEVAIFGPPNTLYEGGYFKNGDVCISILHPPVDDPQSGELPSERWNPTQNVRTILLSVISLLNEPNTFSPANVDASVMFRKWRDSKGKDKEYAEIIRKQVSATKAEAEKDGVKVPTTLGGILHQN

SEQ ID NO: 893552 - protein, 194 aa, Homo sapiens; identical to SEQ ID NO: 893546

SEQ ID NO: 893553 - protein, 149 aa, Homo sapiens
MAQQQMTSSQKALMLELKSLQEEPVEGFRITLVDESDLYNWEVAIFGPPNTLYEGGYFKAHIKFPIDYPYSPPTFRFLTKMWHPNIYENGDVCISILHPPVDDPQSGELPSERWNPTQNVRKQVSATKAEAEKDGVKVPTTLGGILHQN

SEQ ID NO: 893554 - protein, 69 aa, Homo sapiens
SSFKIKQNKKVLRRRLKKFALHNLHESNAITSQHAFRVACGGGNTHSMREDARLFMDGWMDFWGIEGVR

SEQ ID NO: 893555 - protein, 109 aa, Homo sapiens
MDGWISGELREFVDVAPFSGPLLAPVLPCHAQAKGRGAKWGDPWPWPPQAKTLFPPAGWGKHTHSSLLTPPLWDPQFGSLFMGPFNGRESNPSHRMSEFLHSLPFPSLY

SEQ ID NO: 893556 - protein, 194 aa, Homo sapiens; identical to SEQ ID NO: 893546

SEQ ID NO: 893557 - protein, 169 aa, Homo sapiens
MAQQQMTSSQKALMLELKSLQEEPVEGFRITLVDESDLYNWEVAIFGPPNTLYEGGYFKAHIKFPIDYPYSPPTFRFLTKMWHPNIYENGDVCISILHPPVDDPQSGELPSERWNPTQNVRTILLSVISLLNEPNTFSPANVDASVMFRKWRDSKKKKQICQGLAAHLH

SEQ ID NO: 893558 - protein, 169 aa, Homo sapiens; identical to SEQ ID NO: 893557

SEQ ID NO: 893559 - protein, 317 aa, Homo sapiens
MPLGASSLTYQPSYGQGLRTSSLSHSACPTPNPLSRHSPAPFSKSSTFYRNSPARELHLPIRDGNTLEMHGDTCQPGIFNYATRLGRRSKSPQAMASHGSRPGSRLKQPIGQIPLESSPPVGLSIEEVERLNTPRPRNPSICSADHGRSSSEEDCRRPLSRTRNPADGIPAPESSSDSDSHESFTCSEMEYDREKPMVYTSRMPKLSQVNESDADDEDNYGARLKPRRYHGRRAEGGPVGTQAAAPGTADNTLPMKLGQQAGTFNWDNLLNWGPGFGHYVDVFKDLASLPEKAAANEEGKAGTTKPVPKDGEAEQYV

SEQ ID NO: 893560 - protein, 466 aa, Homo sapiens
MYIAFVLNVECTLDIWYECVLYIHGCCLHATRMHLPSVFHLCCMCPACGLLYMCIMGAAFLLNVYCVSHISWVLHEYCMHLVLFHSFCNIVFYLYITCIFHVFLCMLYASCGIHAHAPHMLRVNCVVCVWRVCFGVLPSDSSAQASRVQVAIQTLDENDNAPQLAEPYDTFVCDSAAPGQLIQVIRALDRDEVGNSSHVSFQGPLGPDANFTVQDNRDGSASLLLPSRPAPPRHAPYLVPIELWDWGQPALSSTATVTVSVCRCQPDGSVASCWPEAHLSAAGLSTGALLAIITCVGALLALVVLFVALRRQKQEALMVLEEEDVRENIITYDDEGGGEEDTEAFDITALQNPDGAAPPAPGPPARRDVLPRARVSRQPRPPGPADVAQLLALRLREADEDPGVPPYDSVQVYGYEGRGSSCGSLSSLGSGSEAGGAPGPAEPLDDWGPLFRTLAELYGAKEPPAP

SEQ ID NO: 893561 - protein, 737 aa, Homo sapiens
SWVWNQFFVIEEYAGPEPVLIGKLHSDVDRGEGRTKYLLTGEGAGTVFVIDEATGNIHVTKSLDREEKAQYVLLAQAVDRASNRPLEPPSEFIIKVQDINDNPPIFPLGPYHATVPEMSNVGTSVIQVTAHDADDPSYGNSAKLVYTVLDGLPFFSVDPQTGVVRTAIPNMDRETQEEFLVVIQAKDMGGHMGGLSGSTTVTVTLSDVNDNPPKFPQSLYQFSVVETAGPGTLVGRLRAQDPDLGDNALMAYSILDGEGSEAFSISTDLQGRDGLLTVRKPLDFESQRSYSFRVEATNTLIDPAYLRRGPFKDVASVRVAVQDAPEPPAFTQAAYHLTVPENKAPGTLVGQISAADLDSPASPIRYSILPHSDPERCFSIQPEEGTIHTAAPLDREARAWHNLTVLATELDSSAQASRVQVAIQTLDENDNAPQLAEPYDTFVCDSAAPGQLIQVIRALDRDEVGNSSHVSFQGPLGPDANFTVQDNRDGSASLLLPSRPAPPRHAPYLVPIELWDWGQPALSSTATVTVSVCRCQPDGSVASCWPEAHLSAAGLSTGALLAIITCVGALLALVVLFVALRRQKQEALMVLEEEDVRENIITYDDEGGGEEDTEAFDITALQNPDGAAPPAPGPPARRDVLPRARVSRQPRPPGPADVAQLLALRLREADEDPGVPPYDSVQVYGYEGRGSSCGSLSSLGSGSEAGGAPGPAEPLDDWGPLFRTLAELYGAKEPPAP

SEQ ID NO: 893562 - protein, 83 aa, Homo sapiens [sequence omitted]

SEQ ID NO: 893563 - protein, 105 aa, Homo sapiens
CPYTCSVSVSCPHLPSFSLGPCDWLFVFFCCPSQNQEKLPATAAHPPAGDVVPQVSAPRLWGRAVDEGSHSPLPLTWLPCPYRPACMVPSITHGLSLILAPLASS

SEQ ID NO: 893564 - protein, 315 aa, Homo sapiens
MPRVYIGRLSYNVREKDIQRFFSGYGRLLEVDLKNGYGFVEFEDSRDADDAVYELNGKELCGERVIVEHARGPRRDRDGYSYGSRSGGGGYSSRRTSGRDKYGPPVRTEYRLIVENLSSRCSWQDLKDFMRQAGEVTYADAHKERTNEGVIEFRSYSDMKRALDKLDGTEINGRNIRLIEDKPRTSHRRSYSGSRSRSRSRRRSRSRSRRSSRSRSRSISKSRSRSRSRSKGRSRSRSKGRKSRSKSKSKPKSDRGSHSHSRSRSKDEYEKSRSRSRSRSPKENGKGDIKSKSRSRSQSRSNSPLPVPPSKARSV

SEQ ID NO: 893565 - protein, 225 aa, Homo sapiens
MPRVYIGRLSYNVREKDIQRFFSGYGRLLEVDLKNGYGFVEFEDSRDADDAVYELNGKELCGERVIVEHARGPRRDRDGYSYGSRSGGGGYSSRRTSGRDKYGPPVRTEYRLIVENLSSRCSWQDLKDFMRQAGEVTYADAHKERTNEGVIEFRSYSDMKRALDKLDGTEINGRNIRLIEDKPRTSHRRSYSGSRSRSRSRRRSRSRSRRSSRSRSRSISKSRSR

SEQ ID NO: 893566 - protein, 344 aa, Homo sapiens
MPRVYIGRLSYNVREKDIQRFFSGYGRLLEVDLKNGYGFVEFEDSRDADDAVYELNGKELCGERVIVEHARGPRRDRDGYSYGSRSGGGGYSSRRTSGRDKYGPPVRTEYRLIVENLSSRCSWQDLKDFMRQAGEVTYADAHKERTNEGVIEFRSYSDMKRALDKLDGTEINGRNIRLIEDKPRTSHRRSYSGSRSRSRSRRRSRSRSRRSSRSRSRSISKSRSRSRSRSKGRSRSRSKGRKSRSKSKSKPKSDRGSHSHSRSRSKDEYEKSRSRSRSRSPKENGKGDIKSKSRSRSQSRSNSPLPVPPSKARSVSPPPKRATSRSRSRSRSKSRSRSRSSSRD

SEQ ID NO: 893567 - protein, 215 aa, Homo sapiens [sequence omitted]

SEQ ID NO: 893568 - protein, 344 aa, Homo sapiens; identical to SEQ ID NO: 893566

SEQ ID NO: 893569 - protein, 344 aa, Homo sapiens; identical to SEQ ID NO: 893566

SEQ ID NO: 893570 - protein, 117 aa, Homo sapiens [sequence omitted]

SEQ ID NO: 893571 - protein, 203 aa, Homo sapiens
VVFDVSDYLIYCIVNECYSDKYWNSTEISGINIKLIDHKAITIPRPAYSVQQLRCFRILHELTRSRSRRSSRSRSRSISKSRSRSRSRSKGRSRSRSKGRKSRSKSKSKPKSDRGSHSHSRSRSKDEYEKSRSRSRSRSPKENGKGDIKSKSRSRSQSRSNSPLPVPPSKARSVSPPPKRATSRSRSRSRSKSRSRSRSSSRD

SEQ ID NO: 893572 - protein, 105 aa, Homo sapiens
LPSFRADFKESLTLTHTSHSHSRSRSKDEYEKSRSRSRSRSPKENGKGDIKSKSRSRSQSRSNSPLPVPPSKARSVSPPPKRATSRSRSRSRSKSRSRSRSSSRD

SEQ ID NO: 893573 - protein, 344 aa, Homo sapiens; identical to SEQ ID NO: 893566

SEQ ID NO: 893574 - protein, 344 aa, Homo sapiens; identical to SEQ ID NO: 893566

SEQ ID NO: 893575 - protein, 344 aa, Homo sapiens; identical to SEQ ID NO: 893566

SEQ ID NO: 893576 - protein, 344 aa, Homo sapiens; identical to SEQ ID NO: 893566

SEQ ID NO: 893577 - protein, 80 aa, Homo sapiens
YEESKEQGTSKHLFKENYEPLLKEIKEDTNKWKNIPCSWVGRINIVKMAILPNLRNIVPQKADASSIILFSLILYLIRCL

SEQ ID NO: 893578 - protein, 344 aa, Homo sapiens; identical to SEQ ID NO: 893566

SEQ ID NO: 893579 - protein, 109 aa, Homo sapiens
MGESGLGARAQRPRPGGGGNSPRKEAAKAAAPRGRASKMATARRRGGARWGTGARTCASWLTTPPRLSGPRTAPRYGFVEFEDSRDADDAVYELNGKELCGERVIVEHA

SEQ ID NO: 893580 - protein, 120 aa, Homo sapiens [sequence omitted]

SEQ ID NO: 893581 - protein, 344 aa, Homo sapiens; identical to SEQ ID NO: 893566

SEQ ID NO: 893582 - protein, 215 aa, Homo sapiens [sequence omitted]

SEQ ID NO: 893583 - protein, 215 aa, Homo sapiens [sequence omitted]

SEQ ID NO: 893584 - protein, 344 aa, Homo sapiens; identical to SEQ ID NO: 893566

SEQ ID NO: 893585 - protein, 344 aa, Homo sapiens; identical to SEQ ID NO: 893566

SEQ ID NO: 893586 - protein, 344 aa, Homo sapiens; identical to SEQ ID NO: 893566

SEQ ID NO: 893587 - protein, 344 aa, Homo sapiens; identical to SEQ ID NO: 893566

SEQ ID NO: 893588 - protein, 344 aa, Homo sapiens; identical to SEQ ID NO: 893566

SEQ ID NO: 893589 - protein, 344 aa, Homo sapiens; identical to SEQ ID NO: 893566

SEQ ID NO: 893590 - protein, 107 aa, Homo sapiens
MCTFSLSIEKIGLSLSSSRSRSKGRSRSRSKGRKSRSKSKSKPKSDRGSHSHSRSRSKDEYEKSRSRSRSRSPKENGKGDIKSKSRSRSQSRSNSPLPVPPSKARSV

SEQ ID NO: 893591 - protein, 228 aa, Homo sapiens
GRAAAEGWRKMEAPPDGAADLVPLDRYDAARAKIAANLQWICAKAYGRDNIPEDLRDPFYVDQYEQEHIKPPVIKLLLSSELYCRVCSLILKGDQVAALQGHQSVIQALSRKGIYVMESDDTPVTESDLSRAPIKMSAHMAMVDALMMAYTVEMISIEKVVASVKRFSTFSASKELPYDLEDAMVFWINKVNLKMREITEKEVKLKQQLLESPAHQKVKGKFNFSGMH

SEQ ID NO: 893592 - protein, 1597 aa, Homo sapiens
GRAAAEGWRKMEAPPDGAADLVPLDRYDAARAKIAANLQWICAKAYGRDNIPEDLRDPFYVDQYEQEHIKPPVIKLLLSSELYCRVCSLILKGDQVAALQGHQSVIQALSRKGIYVMESDDTPVTESDLSRAPIKMSAHMAMVDALMMAYTVEMISIEKVVASVKRFSTFSASKELPYDLEDAMVFWINKVNLKMREITEKEVKLKQQLLESPAHQKVRYRREHLSARQSPYFPLLEDLMRDGSDGAALLAVIHYYCPEQMKLDDICLKEVTSMADSLYNIRLLREFSNEYLNKCFYLTLEDMLYAPLVLKPNVMVFIAELFWWFENVKPDFVQPRDVQELKDAKTVLHQKSSRPPVPISNATKRSFLGSPAAGTLAELQPPVQLPAEGCHRHYLHPEEPEYLGKGTAAFSPSHPLLPLRQKQQKSIQGEDIPDQRHRSNSLTRVDGQPRGAAIAWPEKKTRPASQPTPFALHHAASCEVDPSSGDSISLARSISKDSLASNIVNLTPQNQPHPTATKSHGKSLLSNVSIEDEEEELVAIVRADVVPQQADPEFPRASPRALGLTANARSPQGQLDTSESKPDSFFLEPLMPAVLKPAKEKQVITKEDERGEGRPRSIVSRRPSEGPQPLVRRKMTGSRDLNRTFTPIPCSEFPMGIDPTETGPLSVETAGEVCGGPLALGGFDPFPQGPSTDGFFLHVGRADEDTEGRLYVSCSKSPNSHDSEPWTLLRQDSDSDVVDIEEAEHDFMGEAHPVVFSRYIGEEESAKLQEDMKVKEHEDKDDASGRSSPCLSTASQMSSVSMASGSVKMTSFAERKLQRLNSCETKSSTSSSQKTTPDASESCPAPLTTWRQKREQSPSQHGKDPASLLASELVQLHMQLEEKRRAIEAQKKKMEALSARQRLKLGKAAFLHVVKKGKAEAAPPLRPEHFAKEYSQHNGEDCGDAVSKTEDFLVKEEQREELLHEPQDVDKESLAFAQQHKAKDPVALHELERNKVISAALLEDTVGEVVDVNECDLSIEKLNETISTLQQAILKISQQQEQLLMKSPTVPVPGSKNNSQDHKVKAPVHFVEPLSPTGVAGHRKAPRLGQGRNSRSGRPAELKVPKDRPQGSSRSKTPTPSVETLPHLRPFPASSHPRTPTDPGLDSALEPSGDPHGKCLFDSYRLHDESNQRTLTLSSSKDANILSEQMSLKEVLDASVKEVGSSSSDVSGKESVPVEEPLRSRASLIEVDLSDLKAPDEDGELVSLDGSADLVSEGDQKPGVGFFFKDEQKAEDELAKKRAAFLLKQQRKAEEARVRKQQLEAEVELKRDEARRKAEEDRVRKEEEKARRELIKQEYLRRKQQQILEEQGLGKPKSKPKKPRPKSVHREESCSDSGTKCSSTPDNLSRTQSGSSLSLASAATTEPESVHSGGTPSQRVESMEALPILSRNPSRSTDRDWETASAASSLASVAEYTGPKLFKEPSSKSNKPIIHNAISHCCLAGKVNEPHKNSILEELEKCDANHYIILFRDAGCQFRALYCYYPDTEEIYKLTGTGPKNITKKMIDKLYKYSSDRKQFNLIPAKTMSVSVDALTIHNHLWQPKRPAVPKKAQTRK

SEQ ID NO: 893593 - protein, 1608 aa, Homo sapiens
GRAAAEGWRKMEAPPDGAADLVPLDRYDAARAKIAANLQWICAKAYGRDNIPEDLRDPFYVDQYEQEHIKPPVIKLLLSSELYCRVCSLILKGDQVAALQGHQSVIQALSRKGIYVMESDDTPVTESDLSRAPIKMSAHMAMVDALMMAYTVEMISIEKVVASVKRFSTFSASKELPYDLEDAMVFWINKVNLKMREITEKEVKLKQQLLESPAHQKSPSKWYWKLVPVRYRREHLSARQSPYFPLLEDLMRDGSDGAALLAVIHYYCPEQMKLDDICLKEVTSMADSLYNIRLLREFSNEYLNKCFYLTLEDMLYAPLVLKPNVMVFIAELFWWFENVKPDFVQPRDVQELKDAKTVLHQKSSRPPVPISNATKRSFLGSPAAGTLAELQPPVQLPAEGCHRHYLHPEEPEYLGKGTAAFSPSHPLLPLRQKQQKSIQGEDIPDQRHRSNSLTRVDGQPRGAAIAWPEKKTRPASQPTPFALHHAASCEVDPSSGDSISLARSISKDSLASNIVNLTPQNQPHPTATKSHGKSLLSNVSIEDEEEELVAIVRADVVPQQADPEFPRASPRALGLTANARSPQGQLDTSESKPDSFFLEPLMPAVLKPAKEKQVITKEDERGEGRPRSIVSRRPSEGPQPLVRRKMTGSRDLNRTFTPIPCSEFPMGIDPTETGPLSVETAGEVCGGPLALGGFDPFPQGPSTDGFFLHVGRADEDTEGRLYVSCSKSPNSHDSEPWTLLRQDSDSDVVDIEEAEHDFMGEAHPVVFSRYIGEEESAKLQEDMKVKEHEDKDDASGRSSPCLSTASQMSSVSMASGSVKMTSFAERKLQRLNSCETKSSTSSSQKTTPDASESCPAPLTTWRQKREQSPSQHGKDPASLLASELVQLHMQLEEKRRAIEAQKKKMEALSARQRLKLGKAAFLHVVKKGKAEAAPPLRPEHFAKEYSQHNGEDCGDAVSKTEDFLVKEEQREELLHEPQDVDKESLAFAQQHKAKDPVALHELERNKVISAALLEDTVGEVVDVNECDLSIEKLNETISTLQQAILKISQQQEQLLMKSPTVPVPGSKNNSQDHKVKAPVHFVEPLSPTGVAGHRKAPRLGQGRNSRSGRPAELKVPKDRPQGSSRSKTPTPSVETLPHLRPFPASSHPRTPTDPGLDSALEPSGDPHGKCLFDSYRLHDESNQRTLTLSSSKDANILSEQMSLKEVLDASVKEVGSSSSDVSGKESVPVEEPLRSRASLIEVDLSDLKAPDEDGELVSLDGSADLVSEGDQKPGVGFFFKDEQKAEDELAKKRAAFLLKQQRKAEEARVRKQQLEAEVELKRDEARRKAEEDRVRKEEEKARRELIKQEYLRRKQQQILEEQGLGKPKSKPKKPRPKSVHREESCSDSGTKCSSTPDNLSRTQSGSSLSLASAATTEPESVHSGGTPSQRVESMEALPILSRNPSRSTDRDWETASAASSLASVAEYTGPKLFKEPSSKSNKPIIHNAISHCCLAGKVNEPHKNSILEELEKCDANHYIILFRDAGCQFRALYCYYPDTEEIYKLTGTGPKNITKKMIDKLYKYSSDRKQFNLIPAKTMSVSVDALTIHNHLWQPKRPAVPKKAQTRK

SEQ ID NO: 893594 - protein, 1403 aa, Homo sapiens
MREITEKEVKLKQQLLESPAHQKVRYRREHLSARQSPYFPLLEDLMRDGSDGAALLAVIHYYCPEQMKLDDICLKEVTSMADSLYNIRLLREFSNEYLNKCFYLTLEDMLYAPLVLKPNVMVFIAELFWWFENVKPDFVQPRDVQELKDAKTVLHQKSSRPPVPISNATKRSFLGSPAAGTLAELQPPVQLPAEGCHRHYLHPEEPEYLGKGTAAFSPSHPLLPLRQKQQKSIQGEDIPDQRHRSNSLTRVDGQPRGAAIAWPEKKTRPASQPTPFALHHAASCEVDPSSGDSISLARSISKDSLASNIVNLTPQNQPHPTATKSHGKSLLSNVSIEDEEEELVAIVRADVVPQQADPEFPRASPRALGLTANARSPQGQLDTSESKPDSFFLEPLMPAVLKPAKEKQVITKEDERGEGRPRSIVSRRPSEGPQPLVRRKMTGSRDLNRTFTPIPCSEFPMGIDPTETGPLSVETAGEVCGGPLALGGFDPFPQGPSTDGFFLHVGRADEDTEGRLYVSCSKSPNSHDSEPWTLLRQDSDSDVVDIEEAEHDFMGEAHPVVFSRYIGEEESAKLQEDMKVKEHEDKDDASGRSSPCLSTASQMSSVSMASGSVKMTSFAERKLQRLNSCETKSSTSSSQKTTPDASESCPAPLTTWRQKREQSPSQHGKDPASLLASELVQLHMQLEEKRRAIEAQKKKMEALSARQRLKLGKAAFLHVVKKGKAEAAPPLRPEHFAKEYSQHNGEDCGDAVSKTEDFLVKEEQREELLHEPQDVDKESLAFAQQHKAKDPVALHELERNKVISAALLEDTVGEVVDVNECDLSIEKLNETISTLQQAILKISQQQEQLLMKSPTVPVPGSKNNSQDHKVKAPVHFVEPLSPTGVAGHRKAPRLGQGRNSRSGRPAELKVPKDRPQGSSRSKTPTPSVETLPHLRPFPASSHPRTPTDPGLDSALEPSGDPHGKCLFDSYRLHDESNQRTLTLSSSKDANILSEQMSLKEVLDASVKEVGSSSSDVSGKESVPVEEPLRSRASLIEVDLSDLKAPDEDGELVSLDGSADLVSEGDQKPGVGFFFKDEQKAEDELAKKRAAFLLKQQRKAEEARVRKQQLEAEVELKRDEARRKAEEDRVRKEEEKARRELIKQEYLRRKQQQILEEQGLGKPKSKPKKPRPKSVHREESCSDSGTKCSSTPDNLSRTQSGSSLSLASAATTEPESVHSGGTPSQRVESMEALPILSRNPSRSTDRDWETASAASSLASVAEYTGPKLFKEPSSKSNKPIIHNAISHCCLAGKVNEPHKNSILEELEKCDANHYIILFRDAGCQFRALYCYYPDTEEIYKLTGTGPKNITKKMIDKLYKYSSDRKQFNLIPAKTMSVSVDALTIHNHLWQPKRPAVPKKAQTRK

SEQ ID NO: 893595 - protein, 1283 aa, Homo sapiens
MVFIAELFWWFENVKPDFVQPRDVQELKDAKTVLHQKSSRPPVPISNATKRSFLGSPAAGTLAELQPPVQLPAEGCHRHYLHPEEPEYLGKGTAAFSPSHPLLPLRQKQQKSIQGEDIPDQRHRSNSLTRVDGQPRGAAIAWPEKKTRPASQPTPFALHHAASCEVDPSSGDSISLARSISKDSLASNIVNLTPQNQPHPTATKSHGKSLLSNVSIEDEEEELVAIVRADVVPQQADPEFPRASPRALGLTANARSPQGQLDTSESKPDSFFLEPLMPAVLKPAKEKQVITKEDERGEGRPRSIVSRRPSEGPQPLVRRKMTGSRDLNRTFTPIPCSEFPMGIDPTETGPLSVETAGEVCGGPLALGGFDPFPQGPSTDGFFLHVGRADEDTEGRLYVSCSKSPNSHDSEPWTLLRQDSDSDVVDIEEAEHDFMGEAHPVVFSRYIGEEESAKLQEDMKVKEHEDKDDASGRSSPCLSTASQMSSVSMASGSVKMTSFAERKLQRLNSCETKSSTSSSQKTTPDASESCPAPLTTWRQKREQSPSQHGKDPASLLASELVQLHMQLEEKRRAIEAQKKKMEALSARQRLKLGKAAFLHVVKKGKAEAAPPLRPEHFAKEYSQHNGEDCGDAVSKTEDFLVKEEQREELLHEPQDVDKESLAFAQQHKAKDPVALHELERNKVISAALLEDTVGEVVDVNECDLSIEKLNETISTLQQAILKISQQQEQLLMKSPTVPVPGSKNNSQDHKVKAPVHFVEPLSPTGVAGHRKAPRLGQGRNSRSGRPAELKVPKDRPQGSSRSKTPTPSVETLPHLRPFPASSHPRTPTDPGLDSALEPSGDPHGKCLFDSYRLHDESNQRTLTLSSSKDANILSEQMSLKEVLDASVKEVGSSSSDVSGKESVPVEEPLRSRASLIEVDLSDLKAPDEDGELVSLDGSADLVSEGDQKPGVGFFFKDEQKAEDELAKKRAAFLLKQQRKAEEARVRKQQLEAEVELKRDEARRKAEEDRVRKEEEKARRELIKQEYLRRKQQQILEEQGLGKPKSKPKKPRPKSVHREESCSDSGTKCSSTPDNLSRTQSGSSLSLASAATTEPESVHSGGTPSQRVESMEALPILSRNPSRSTDRDWETASAASSLASVAEYTGPKLFKEPSSKSNKPIIHNAISHCCLAGKVNEPHKNSILEELEKCDANHYIILFRDAGCQFRALYCYYPDTEEIYKLTGTGPKNITKKMIDKLYKYSSDRKQFNLIPAKTMSVSVDALTIHNHLWQPKRPAVPKKAQTRK

SEQ ID NO: 893596 - protein, 1597 aa, Homo sapiens; identical to SEQ ID NO: 893592

SEQ ID NO: 893597 - protein, 657 aa, Homo sapiens
KEVGSSSSDVSGKESVPVEEPLRSRASLIEVDLSDLKAPDEDGELVSLDGSADLVSEGDQKPGVGFFFKDEQKAEDELAKKRAAFLLKQQRKAEEARVLQEQLLMKSPTVPVPGSKNNSQDHKVKAPVHFVEPLSPTGVAGHRKAPRLGQGRNSRSGRPAELKVPKDRPQGSSRSKTPTPSVETLPHLRPFPASSHPRTPTDPGLDSALEPSGDPHGKCLFDSYRLHDESNQRTLTLSSSKDANILSEQMSLKEVLDASVKEVGSSSSDVSGKESVPVEEPLRSRASLIEVDLSDLKAPDEDGELVSLDGSADLVSEGDQKPGVGFFFKDEQKAEDELAKKRAAFLLKQQRKAEEARVRKQQLEAEVELKRDEARRKAEEDRVRKEEEKARRELIKQEYLRRKQQQILEEQGLGKPKSKPKKPRPKSVHREESCSDSGTKCSSTPDNLSRTQSGSSLSLASAATTEPESVHSGGTPSQRVESMEALPILSRNPSRSTDRDWETASAASSLASVAEYTGPKLFKEPSSKSNKPIIHNAISHCCLAGKVNEPHKNSILEELEKCDANHYIILFRDAGCQFRALYCYYPDTEEIYKLTGTGPKNITKKMIDKLYKYSSDRKQFNLIPAKTMSVSVDALTIHNHLWQPKRPAVPKKAQTRK

SEQ ID NO: 893598 - protein, 292 aa, Homo sapiens
SSVWACVSLRRKAEEDRVRKEEEKARRELIKQEYLRRKQQQILEEQGLGKPKSKPKKPRPKSVHREESCSDSGTKCSSTPDNLSRTQSGSSLSLASAATTEPESVHSGGTPSQRVESMEALPILSRNPSRSTDRDWETASAASSLASVAEYTGPKLFKEPSSKSNKPIIHNAISHCCLAGKVNEPHKNSILEELEKCDANHYIILFRDAGCQFRALYCYYPDTEEIYKLTGTGPKNITKKMIDKLYKYSSDRKQFNLIPAKTMSVSVDALTIHNHLWQPKRPAVPKKAQTRK

SEQ ID NO: 893599 - protein, 256 aa, Homo sapiens
SRYPYQALEQGLGKPKSKPKKPRPKSVHREESCSDSGTKCSSTPDNLSRTQSGSSLSLASAATTEPESVHSGGTPSQRVESMEALPILSRNPSRSTDRDWETASAASSLASVAEYTGPKLFKEPSSKSNKPIIHNAISHCCLAGKVNEPHKNSILEELEKCDANHYIILFRDAGCQFRALYCYYPDTEEIYKLTGTGPKNITKKMIDKLYKYSSDRKQFNLIPAKTMSVSVDALTIHNHLWQPKRPAVPKKAQTRK

SEQ ID NO: 893600 - protein, 69 aa, Homo sapiens
AGRGEGNRYRGQVLVCRNPFMNRRLFLSLAADNLSRTQSGSSLSLASAATTEPESVHSGGTPSQRSQAL

SEQ ID NO: 893601 - protein, 1441 aa, Homo sapiens
GRAAAEGWRKMEAPPDGAADLVPLDRYDAARAKIAANLQWICAKAYGRDNIPEDLRDPFYVDQYEQEHIKPPVIKLLLSSELYCRVCSLILKGDQVAALQGHQSVIQALSRKGIYVMESDDTPVTESDLSRAPIKMSAHMAMVDALMMAYTVEMISIEKVVASVKRFSTFSASKELPYDLEDAMVFWINKVNLKMREITEKEVKLKQQLLESPAHQKVRYRREHLSARQSPYFPLLEDLMRDGSDGAALLAVIHYYCPEQMKLDDICLKEVTSMADSLYNIRLLREFSNEYLNKCFYLTLEDMLYAPLVLKPNVMVFIAELFWWFENVKPDFVQPRDVQELKDAKTVLHQKSSRPPVPISNATKRSFLGSPAAGTLAELQPPVQLPAEGCHRHYLHPEEPEYLGKGTAAFSPSHPLLPLRQKQQKSIQGEDIPDQRHRSNSLTRVDGQPRGAAIAWPEKKTRPASQPTPFALHHAASCEVDPSSGDSISLARSISKDSLASNIVNLTPQNQPHPTATKSHGKSLLSNVSIEDEEEELVAIVRADVVPQQADPEFPRASPRALGLTANARSPQGQLDTSESKPDSFFLEPLMPAVLKPAKEKQVITKEDERGEGRPRSIVSRRPSEGPQPLVRRKMTGSRDLNRTFTPIPCSEFPMGIDPTETGPLSVETAGEVCGGPLALGGFDPFPQGPSTDGFFLHVGRADEDTEGRLYVSCSKSPNSHDSEPWTLLRQDSDSDVVDIEEAEHDFMGEAHPVVFSRYIGEEESAKLQEDMKVKEHEDKDDASGRSSPCLSTASQMSSVSMASGSVKMTSFAERKLQRLNSCETKSSTSSSQKTTPDASESCPAPLTTWRQKREQSPSQHGKDPASLLASELVQLHMQLEEKRRAIEAQKKKMEALSARQRLKLGKAAFLHVVKKGKAEAAPPLRPEHFAKEYSQHNGEDCGDAVSKTEDFLVKEEQREELLHEPQDVDKESLAFAQQHKAKDPVALHELERNKVISAALLEDTVGEVVDVNECDLSIEKLNETISTLQQAILKISQQQEQLLMKSPTVPVPGSKNNSQDHKVKAPVHFVEPLSPTGVAGHRKAPRLGQGRNSRSGRPAELKVPKDRPQGSSRSKTPTPSVETLPHLRPFPASSHPRTPTDPGLDSALEPSGDPHGKCLFDSYRLHDESNQRTLTLSSSKDANILSEQMSLKEVLDASVKEVGSSSSDVSGKESVPVEEPLRSRASLIEVDLSDLKAPDEDGELVSLDGSADLVSEGDQKPGVGFFFKDEQKAEDELAKKRAAFLLKQQRKAEEARVRKQQLEAEVELKRDEARRKAEEDRVRKEEEKARRELIKQEYLRRKQQQILEEQGLGKPKSKPKKPRPKSVHREESCSDSGTKCSSTPDNLSRTQSGSSLSLASAATTEPESVHSGGTPSQRIVAIMSSGIPVPFTRAPQLVKR

SEQ ID NO: 893602 - protein, 326 aa, Homo sapiens
GRAAAEGWRKMEAPPDGAADLVPLDRYDAARAKIAANLQWICAKAYGRDNIPEDLRDPFYVDQYEQEHIKPPVIKLLLSSELYCRVCSLILKGDQVAALQGHQSVIQALSRKGIYVMESDDTPVTESDLSRAPIKMSAHMAMVDALMMAYTVEMISIEKVVASVKRFSTFSASKELPYDLEDAMVFWINKVNLKMREITEKEVKLKQQLLESPAHQKVRYRREHLSARQSPYFPLLEDLMRDGSDGAALLAVIHYYCPEQMKLDDICLKEVTSMADSLYNIRLLREFSNEYLNKCFYLTLEDMLYAPLVLKVITNYLACSFKTMCE

SEQ ID NO: 893603 - protein, 160 aa, Homo sapiens
GWRKMEAPPDGAADLVPLDRYDAARAKIAANLQWICAKAYGRGGPGEGRGAGARGAGRGRGTRPGSGRVGVRAPRLCAASAQGRGWAGRLRGPGGARATRSVGTRSPGEWASLRRRAAWVGASAPISGVPPASRWRRRRREGAARFWAQGGTMGTRGRRL

SEQ ID NO: 893604 - protein, 498 aa, Homo sapiens
AARGQLEFGYWTQEGREREELVAVGSGSGRHRAPAPPLECAEGGASRAPAAQPRRSGQVCARSPLTLGLPEPATTSAPHHLGFLYCKETGKEGRKTSPERANRRKTALPGGAGRAGARGSGRRAGARPGRGRGRRGQKRRRAALRPVCGVGLGFGLAAAVEKMLQSLAGSSCVRLVERHRSAWCFGFLVLGYLLYLVFGAVVFSSVELPYEDLLRQELRKLKRRFLEEHECLSEQQLEQFLGRVLEASNYGVSVLSNASGNWNWDFTSALFFASTVLSTTGYGHTVPLSDGGKAFCIIYSVIGIPFTLLFLTAVVQRITVHVTRRPVLYFHIRWGFSKQVVAIVHAVLLGFVTVSCFFFIPAAVFSVLEDDWNFLESFYFCFISLSTIGLGDYVPGEGYNQKFRELYKIGITCYLLLGLIAMLVVLETFCELHELKKFRKMFYVKKDKDEDQVHIIEHDQLSFSSITDQAAGMKEDQKQNEPFVATQSSACVDGPANH

SEQ ID NO: 893605 - protein, 498 aa, Homo sapiens; identical to SEQ ID NO: 893604

SEQ ID NO: 893606 - protein, 259 aa, Homo sapiens
MDSSKVDINGNSLVLGHGGKRETALDGRTKNFTTQTRLESLGYGHTVPLSDGGKAFCIIYSVIGIPFTLLFLTAVVQRITVHVTRRPVLYFHIRWGFSKQVVAIVHAVLLGFVTVSCFFFIPAAVFSVLEDDWNFLESFYFCFISLSTIGLGDYVPGEGYNQKFRELYKIGITCYLLLGLIAMLVVLETFCELHELKKFRKMFYVKKDKDEDQVHIIEHDQLSFSSITDQAAGMKEDQKQNEPFVATQSSACVDGPANH

SEQ ID NO: 893607 - protein, 245 aa, Homo sapiens
MIGIYCLKTCLPLCLFLFASVTLFSLQGYGHTVPLSDGGKAFCIIYSVIGIPFTLLFLTAVVQRITVHVTRRPVLYFHIRWGFSKQVVAIVHAVLLGFVTVSCFFFIPAAVFSVLEDDWNFLESFYFCFISLSTIGLGDYVPGEGYNQKFRELYKIGITCYLLLGLIAMLVVLETFCELHELKKFRKMFYVKKDKDEDQVHIIEHDQLSFSSITDQAAGMKEDQKQNEPFVATQSSACVDGPANH

SEQ ID NO: 893608 - protein, 243 aa, Homo sapiens
MDGRCAGGFLEELMSVGIHFFSKVKGYGHTVPLSDGGKAFCIIYSVIGIPFTLLFLTAVVQRITVHVTRRPVLYFHIRWGFSKQVVAIVHAVLLGFVTVSCFFFIPAAVFSVLEDDWNFLESFYFCFISLSTIGLGDYVPGEGYNQKFRELYKIGITCYLLLGLIAMLVVLETFCELHELKKFRKMFYVKKDKDEDQVHIIEHDQLSFSSITDQAAGMKEDQKQNEPFVATQSSACVDGPANH

SEQ ID NO: 893609 - protein, 203 aa, Homo sapiens
GQRIDQKRPTLHAREHTHTRYGHTVPLSDGGKAFCIIYSVIGIPFTLLFLTAVVQRITVSCFFFIPAAVFSVLEDDWNFLESFYFCFISLSTIGLGDYVPGEGYNQKFRELYKIGITCYLLLGLIAMLVVLETFCELHELKKFRKMFYVKKDKDEDQVHIIEHDQLSFSSITDQAAGMKEDQKQNEPFVATQSSACVDGPANH

SEQ ID NO: 893610 - protein, 498 aa, Homo sapiens; identical to SEQ ID NO: 893604

SEQ ID NO: 893611 - protein, 498 aa, Homo sapiens; identical to SEQ ID NO: 893604

SEQ ID NO: 893612 - protein, 284 aa, Homo sapiens
AARGQLEFGYWTQEGREREELVAVGSGSGRHRAPAPPLECAEGGASRAPAAQPRRSGQVCARSPLTLGLPEPATTSAPHHLGFLYCKETGKEGRKTSPERANRRKTALPGGAGRAGARGSGRRAGARPGRGRGRRGQKRRRAALRPVCGVGLGFGLAAAVEKMLQSLAGSSCVRLVERHRSAWCFGFLVLGYLLYLVFGAVVFSSVELPYEDLLRQELRKLKRRFLEEHECLSEQQLEQFLGRVLEASNYGVSVLSNASGNWNWDFTSALFFASTVLSTTGEWG

SEQ ID NO: 893613 - protein, 254 aa, Homo sapiens
VLRVLSPDLVRRLLNLAVRAFQVPKGESLNFPESTPGYGHTVPLSDGGKAFCIIYSVIGIPFTLLFLTAVVQRITVHVTRRPVLYFHIRWGFSKQVVAIVHAVLLGFVTVSCFFFIPAAVFSVLEDDWNFLESFYFCFISLSTIGLGDYVPGEGYNQKFRELYKIGITCYLLLGLIAMLVVLETFCELHELKKFRKMFYVKKDKDEDQVHIIEHDQLSFSSITDQAAGMKEDQKQNEPFVATQSSACVDGPANH

SEQ ID NO: 893614 - protein, 698 aa, Homo sapiens
MEEEELEFVEELEAVLQLTPEVQLAIEQVFPSQDPLDRADFNAVEYINTLFPTEQSLANIDEVVNKIRLKIRRLDDNIRTVVRGQTNVGQDGRQALEEAQKAIQQLFGKIKDIKDKAEKSEQMVKEITRDIKQLDHAKRHLTTSITTLNHLHMLAGGVDSLEAMTRRRQYGEVANLLQGVMNVLEHFHKYMGIPQIRQLSERVKAAQTELGQQILADFEEAFPSQGTKRPGGPSNVLRDACLVANILDPRIKQEIIKKFIKQHLSEYLVLFQENQDVAWLDKIDRRYAWIKRQLVDYEEKYGRMFPREWCMAERIAVEFCHVTRAELAKIMRTRAKEIEVKLLLFAIQRTTNFEGFLAKRFSGCTLTDGTLKKLESPPPSTNPFLEDEPTPEMEELATEKGDLDQPKKPKAPDNPFHGIVSKCFEPHLYVYIESQDKNLGELIDRFVADFKAQGPPKPNTDEGGAVLPSCADLFVYYKKCMVQCSQLSTGEPMIALTTIFQKYLREYAWKILSGNLPKTTTSSGGLTISSLLKEKEGSEVAKFTLEELCLICNILSTAEYCLATTQQLEEKLKEKVDVSLIERINLTGEMDTFSTVISSSIQLLVQDLDAACDPALTAMSKMQWQNVEHVGDQSPYVTSVILHIKQNVPIIRDNLASTRKYFTQFCVKFANSFIPKFITHLFKCKPISMVGAEQVRWT

SEQ ID NO: 893615 - protein, 682 aa, Homo sapiens
SSDIELWALSRTVFPSQDPLDRADFNAVEYINTLFPTEQSLANIDEVVNKIRLKIRRLDDNIRTVVRGQTNVGQDGRQALEEAQKAIQQLFGKIKDIKDKAEKSEQMVKEITRDIKQLDHAKRHLTTSITTLNHLHMLAGGVDSLEAMTRRRQYGEVANLLQGVMNVLEHFHKYMGIPQIRQLSERVKAAQTELGQQILADFEEAFPSQGTKRPGGPSNVLRDACLVANILDPRIKQEIIKKFIKQHLSEYLVLFQENQDVAWLDKIDRRYAWIKRQLVDYEEKYGRMFPREWCMAERIAVEFCHVTRAELAKIMRTRAKEIEVKLLLFAIQRTTNFEGFLAKRFSGCTLTDGTLKKLESPPPSTNPFLEDEPTPEMEELATEKGDLDQPKKPKAPDNPFHGIVSKCFEPHLYVYIESQDKNLGELIDRFVADFKAQGPPKPNTDEGGAVLPSCADLFVYYKKCMVQCSQLSTGEPMIALTTIFQKYLREYAWKILSGNLPKTTTSSGGLTISSLLKEKEGSEVAKFTLEELCLICNILSTAEYCLATTQQLEEKLKEKVDVSLIERINLTGEMDTFSTVISSSIQLLVQDLDAACDPALTAMSKMQWQNVEHVGDQSPYVTSVILHIKQNVPIIRDNLASTRKYFTQFCVKFANSFIPKFITHLFKCKPISMVGAEQVRWT

SEQ ID NO: 893616 - protein, 831 aa, Homo sapiens [sequence omitted]

SEQ ID NO: 893617 - protein, 689 aa, Homo sapiens
MEEEELEFVEELEAVLQLTPEVQLAIEQVFPSQDPLDRADFNAVEYINTLFPTEQSLANIDEVVNKIRLKIRRLDDNIRTVVRGQTNVGQDGRQALEEAQKAIQQLFGKIKDIKDKAEKSEQMVKEITRDIKQLDHAKRHLTTSITTLNHLHMLAGGVDSLEAMTRRRQYGEVANLLQGVMNVLEHFHKYMGIPQIRQLSERVKAAQTELGQQILADFEEAFPSQGTKRPGGPSNVLRDACLVANILDPRIKQEIIKKFIKQHLSEYLVLFQENQDVAWLDKIDRRYAWIKRQLVDYEEKYGRMFPREWCMAERIAVEFCHVTRAELAKIMRTRAKEIEVKLLLFAIQRTTNFEGFLAKRFSGCTLTDGTLKKLESPPPSTNPFLEDEPTPEMEELATEKGDLDQPKKPKAPDNPFHGIVSKCFEPHLYVYIESQDKNLGELIDRFVADFKAQGPPKPNTDEGGAVLPSCADLFVYYKKCMVQCSQLSTGEPMIALTTIFQKYLREYAWKILSGNLPKTTTSSGGLTISSLLKEKEGSEVAKFTLEELCLICNILSTAEYCLATTQQLEEKLKEKVDVSLIERINLTGEMDTFSTVISSSIQLLVQDLDAACDPALTAMSKMQWQNVEHVGDQSPYVTSVILHIKQNVPIIRDNLASTRKYFTQFCVKFANCLALPNPSPVRDPQSDRS

SEQ ID NO: 893618 - protein, 270 aa, Homo sapiens
ALWEAELEEKLKEKVDVSLIERINLTGEMDTFSTVISSSIQLLVQDLDAACDPALTAMSKMQWQNVEHVGDQSPYVTSVILHIKQNVPIIRDNLASTRKYFTQFCVKFANSFIPKFITHLFKCKPISMVGAEQLLLDTHSLKMVLLDLPSISSQVVRKAPASYTKIVVKGMTRAEMILKVVMAPHEPLVVFVDNYIKLLTDCNTETFQKILDMKGLKRSEQSSMLELLRQRLPAPPSGAESSGSLSLTAPTPEQESSRIRKLEKLIKKRL

SEQ ID NO: 893619 - protein, 120 aa, Homo sapiens
RTGQWNPWIILITWSVDSTRREPMELLWLSSLSRTVEKGRWGPSPNSTASSAVCPQPRRAGKASGLLHLVLVTPGVCVQITTSLFGSLLRSRFPDGSITALSYQAAVFHSWWSQPGKLLS

SEQ ID NO: 893620 - protein, 669 aa, Homo sapiens
MEEEELEFVEELEAVLQLTPEVQLAIEQVFPSQDPLDRADFNAVEYINTLFPTEQSLANIDEVVNKIRLKIRRLDDNIRTVVRGQTNVGQDGRQVKEITRDIKQLDHAKRHLTTSITTLNHLHMLAGGVDSLEAMTRRRQYGEVANLLQGVMNVLEHFHKYMGIPQIRQLSERVKAAQTELGQQILADFEEAFPSQGTKRPGGPSNVLRDACLVANILDPRIKQEIIKKFIKQHLSEYLVLFQENQDVAWLDKIDRRYAWIKRQLVDYEEKYGRMFPREWCMAERIAVEFCHVTRAELAKIMRTRAKEIEVKLLLFAIQRTTNFEGFLAKRFSGCTLTDGTLKKLESPPPSTNPFLEDEPTPEMEELATEKGDLDQPKKPKAPDNPFHGIVSKCFEPHLYVYIESQDKNLGELIDRFVADFKAQGPPKPNTDEGGAVLPSCADLFVYYKKCMVQCSQLSTGEPMIALTTIFQKYLREYAWKILSGNLPKTTTSSGGLTISSLLKEKEGSEVAKFTLEELCLICNILSTAEYCLATTQQLEEKLKEKVDVSLIERINLTGEMDTFSTVISSSIQLLVQDLDAACDPALTAMSKMQWQNVEHVGDQSPYVTSVILHIKQNVPIIRDNLASTRKYFTQFCVKFANSFIPKFITHLFKCKPISMVGAEQVRWT

SEQ ID NO: 893621 - protein, 831 aa, Homo sapiens [sequence omitted]

SEQ ID NO: 893622 - protein, 785 aa, Homo sapiens
MEEEELEFVEELEAVLQLTPEVQLAIEQVFPSQDPLDRADFNAVEYINTLFPTEQSLANIDEVVNKIRLKIRRLDDNIRTVVRGQTNVGQDGRQALEEAQKAIQQLFGKIKDIKDKAEKSEQMVKEITRDIKQLDHAKRHLTTSITTLNHLHMLAGGVDSLEAMTRRRQYGEVANLLQGVMNVLEHFHKYMGIPQIRQLSERVKAAQTELGQQILADFEEAFPSQGTKRPGGPSNVLRDACLVANILDPRIKQEIIKKFIKQHLSEYLVLFQENQDVAWLDKIDRRYAWIKRQLVDYEEKYGRMFPREWCMAERIAVEFCHVTRAELAKIMRTRAKEIEVKLLLFAIQRTTNFEGFLAKRFSGCTLTDGTLKKLESPPPSTNPFLEDEPTPEMEELATEKGDLDQPKKPKAPDNPFHGIVSKCFEPHLYVYIESQDKNLGELIDRFVADFKAQGPPKPNTDEGGAVLPSCADLFVYYKKCMVQCSQLSTGEPMIALTTIFQKYLREYAWKILSGNLPKTTTSSGGLTISSLLKEKEGSEVAKFTLEELCLICNILSTAEYCLATTQQLEEKLKEKVDVSLIERINLTGEMDTFSTVISSSIQLLVQDLDAACDPALTAMSKMQWQNVEHVGDQSPYVTSVILHIKQNVPIIRDNLASTRKYFTQFCVKFANSFIPKFITHLFKCKPISMVGAEQLLLDTHSLKMVLLDLPSISSQVVRKAPASYTKIVVKGMTRAEMILKVVMAPHEPLVVFVDNYIKLLTDALQPGDRVRLYLKTNKKTDARRF

SEQ ID NO: 893623 - protein, 688 aa, Homo sapiens
MEEEELEFVEELEAVLQLTPEVQLAIEQVFPSQDPLDRADFNAVEYINTLFPTEQSLANIDEVVNKIRLKIRRLDDNIRTVVRGQTNVGQDGRQALEEAQKAIQQLFGKIKDIKDKAEKSEQMVKEITRDIKQLDHAKRHLTTSITTLNHLHMLAGGVDSLEAMTRRRQYGEVANLLQGVMNVLEHFHKYMGIPQIRQLSERVKAAQTELGQQILADFEEAFPSQGTKRPGGPSNVLRDACLVANILDPRIKQEIIKKFIKQHLSEYLVLFQENQDVAWLDKIDRRYAWIKRQLVDYEEKYGRMFPREWCMAERIAVEFCHVTRAELAKIMRTRAKEIEVKLLLFAIQRTTNFEGFLAKRFSGCTLTDGTLKKLESPPPSTNPFLEDEPTPEMEELATEKGDLDQPKKPKAPDNPFHGIVSKCFEPHLYVYIESQDKNLGELIDRFVADFKAQGPPKPNTDEGGAVLPSCADLFVYYKKCMVQCSQLSTGEPMIALTTIFQKYLREYAWKILSGNLPKTTTSSGGLTISSLLKEKEGSEVAKFTLEELCLICNILSTAEYCLATTQQLEEKLKEKVDVSLIERINLTGEMDTFSTVISSSIQLLVQDLDAACDPALTAMSKMQWQNVEHVGDQSPYVTSVILHIKQNVPIIRDNLASTRKYFTQFCVKFANSFIPKFITHPHPLLEFL

SEQ ID NO: 893624 - protein, 140 aa, Homo sapiens
MSLLLLDTHSLKMVLLDLPSISSQVVRKAPASYTKIVVKGMTRAEMILKVVMAPHEPLVVFVDNYIKLLTDCNTETFQKILDMKGLKRSEQSSMLELLRQRLPAPPSGAESSGSLSLTAPTPEQESSRIRKLEKLIKKRL

SEQ ID NO: 893625 - protein, 396 aa, Homo sapiens
MEEEELEFVEELEAVLQLTPEVQLAIEQVFPSQDPLDRADFNAVEYINTLFPTEQSLANIDEVVNKIRLKIRRLDDNIRTVVRGQTNVGQDGRQALEEAQKAIQQLFGKIKDIKDKAEKSEQMVKEITRDIKQLDHAKRHLTTSITTLNHLHMLAGGVDSLEAMTRRRQYGEVANLLQGVMNVLEHFHKYMGIPQIRQLSERVKAAQTELGQQILADFEEAFPSQGTKRPGGPSNVLRDACLVANILDPRIKQEIIKKFIKQHLSEYLVLFQENQDVAWLDKIDRRYAWIKRQLVDYEEKYGRMFPREWCMAERIAVEFCHVTRAELAKIMRTRAKEIEVKLLLFAIQRTTNFEGFLAKRFSGCTLTDGTLVRPSLGSCHVKSVGWVVGIQGFTVW

SEQ ID NO: 893626 - protein, 540 aa, Homo sapiens
MATSGAASAELVIGWCIFGLLLLAILAFCWIYVRKYQSRRESEVVSTITAIFSLAIALITSALLPVDIFLVSYMKNQNGTFKDWANANVSRQIEDTVLYGYYTLYSVILFCVFFWIPFVYFYYEEKDDDDTSKCTQIKTALKYTLGFVVICALLLLVGAFVPLNVPNNKNSTEWEKVKSLFEELGSSHGLAALSFSISSLTLIGMLAAITYTAYGMSALPLNLIKGTRSAAYERLENTEDIEEVEQHIQTIKSKSKDGRPLPARDKRALKQFEERLRTLKKRERHLEFIENSWWTKFCGALRPLKIVWGIFFILVALLFVISLFLSNLDKALHSAGIDSGFIIFGANLSNPLNMLLPLLQTVFPLDYILITIIIMYFIFTSMAGIRNIGIWFFWIRLYKIRRGRTRPQALLFLCMILLLIVLHTSYMIYSLAPQYVMYGSQNYLIETNITSDNHKGNSTLSVPKRCDADAPEDQCTVTRTYLFLHKFWFFSAAYYFGNWAFLGVFLIGLIVSCCKGKKSVIEGVDEDSDISDDEPSVYSA

SEQ ID NO: 893627 - protein, 467 aa, Homo sapiens
MKNQNGTFKDWANANVSRQIEDTVLYGYYTLYSVILFCVFFWIPFVYFYYEEKDDDDTSKCTQIKTALKYTLGFVVICALLLLVGAFVPLNVPNNKNSTEWEKVKSLFEELGSSHGLAALSFSISSLTLIGMLAAITYTAYGMSALPLNLIKGTRSAAYERLENTEDIEEVEQHIQTIKSKSKDGRPLPARDKRALKQFEERLRTLKKRERHLEFIENSWWTKFCGALRPLKIVWGIFFILVALLFVISLFLSNLDKALHSAGIDSGFIIFGANLSNPLNMLLPLLQTVFPLDYILITIIIMYFIFTSMAGIRNIGIWFFWIRLYKIRRGRTRPQALLFLCMILLLIVLHTSYMIYSLAPQYVMYGSQNYLIETNITSDNHKGNSTLSVPKRCDADAPEDQCTVTRTYLFLHKFWFFSAAYYFGNWAFLGVFLIGLIVSCCKGKKSVIEGVDEDSDISDDEPSVYSA

SEQ ID NO: 893628 - protein, 136 aa, Homo sapiens
MATSGAASAELVIGWCIFGLLLLAILAFCWIYVRKYQSRRESEVVSTITAIFSLAIALITSALLPVDIFLVSYMKNQNGTFKDWANANVSRQIEDTVLYGYYSKYLSVSFPIWTANQNTDTTPMSGEPQVLPLGSN

SEQ ID NO: 893629 - protein, 102 aa, Homo sapiens
AVISPMTSRVAGSFLEALAVIADLGNGAGGVWGRKRPSGLRSMWWPFVPCKTLSHGVGRQRWIFASIPVEGGAVALFITSIGVYTTTCLTSGYFGILLDICS

SEQ ID NO: 893630 - protein, 540 aa, Homo sapiens; identical to SEQ ID NO: 893626

SEQ ID NO: 893631 - protein, 540 aa, Homo sapiens; identical to SEQ ID NO: 893626

SEQ ID NO: 893632 - protein, 583 aa, Homo sapiens
AVISPMTSRVAGSFLEALAVIADLGNGAGGVWGRKRPSGLRSMWWPFVPCKTLSHGVGRQRWIFASAILAFCWIYVRKYQSRRESEVVSTITAIFSLAIALITSALLPVDIFLVSYMKNQNGTFKDWANANVSRQIEDTVLYGYYTLYSVILFCVFFWIPFVYFYYEEKDDDDTSKCTQIKTALKYTLGFVVICALLLLVGAFVPLNVPNNKNSTEWEKVKSLFEELGSSHGLAALSFSISSLTLIGMLAAITYTAYGMSALPLNLIKGTRSAAYERLENTEDIEEVEQHIQTIKSKSKDGRPLPARDKRALKQFEERLRTLKKRERHLEFIENSWWTKFCGALRPLKIVWGIFFILVALLFVISLFLSNLDKALHSAGIDSGFIIFGANLSNPLNMLLPLLQTVFPLDYILITIIIMYFIFTSMAGIRNIGIWFFWIRLYKIRRGRTRPQALLFLCMILLLIVLHTSYMIYSLAPQYVMYGSQNYLIETNITSDNHKGNSTLSVPKRCDADAPEDQCTVTRTYLFLHKFWFFSAAYYFGNWAFLGVFLIGLIVSCCKGKKSVIEGVDEDSDISDDEPSVYSA

SEQ ID NO: 893633 - protein, 467 aa, Homo sapiens; identical to SEQ ID NO: 893627

SEQ ID NO: 893634 - protein, 467 aa, Homo sapiens; identical to SEQ ID NO: 893627

SEQ ID NO: 893635 - protein, 471 aa, Homo sapiens
FIFFIIKVSFLLCQSLVFIQSTKLWSEYRLLSISICCSRDKGKHRCFPFVYFYYEEKDDDDTSKCTQIKTALKYTLGFVVICALLLLVGAFVPLNVPNNKNSTEWEKVKSLFEELGSSHGLAALSFSISSLTLIGMLAAITYTAYGMSALPLNLIKGTRSAAYERLENTEDIEEVEQHIQTIKSKSKDGRPLPARDKRALKQFEERLRTLKKRERHLEFIENSWWTKFCGALRPLKIVWGIFFILVALLFVISLFLSNLDKALHSAGIDSGFIIFGANLSNPLNMLLPLLQTVFPLDYILITIIIMYFIFTSMAGIRNIGIWFFWIRLYKIRRGRTRPQALLFLCMILLLIVLHTSYMIYSLAPQYVMYGSQNYLIETNITSDNHKGNSTLSVPKRCDADAPEDQCTVTRTYLFLHKFWFFSAAYYFGNWAFLGVFLIGLIVSCCKGKKSVIEGVDEDSDISDDEPSVYSA

SEQ ID NO: 893636 - protein, 396 aa, Homo sapiens
MATSGAASAELVIGWCIFGLLLLAILAFCWIYVRKYQSRRESEVVSTITAIFSLAIALITSALLPVDIFLVSYMKNQNGTFKDWANANVSRQIEDTVLYGYYTLYSVILFCVFFWIPFVYFYYEEKDDDDTSKCTQIKTALKYTLGFVVICALLLLVGAFVPLNVPNNKNSTEWEKVKSLFEELGSSHGLAALSFSISSLTLIGMLAAITYTAYGMSALPLNLIKGTRSAAYERLENTEDIEEVEQHIQTIKSKSKDGRPLPARDKRALKQFEERLRTLKKRERHLEFIENSWWTKFCGALRPLKIVWGIFFILVALLFVISLFLSNLDKALHSAGIDSGFIIFGANLSNPLNMLLPLLQTVFPLDYILITIIIMYFIFTSMAGIRNIGIWFFWIR

SEQ ID NO: 893637 - protein, 107 aa, Homo sapiens
MATSGAASAELVIGWCIFGLLLLAILAFCWIYVRKYQSRRESEVVSTITAIFSLAIALITSALLPVDIFLVSYMKNQNGTFKDWANANVSRQIEDTVLYGYYMPLFH

SEQ ID NO: 893638 - protein, 166 aa, Homo sapiens [sequence omitted]

SEQ ID NO: 893639 - protein, 540 aa, Homo sapiens; identical to SEQ ID NO: 893626

SEQ ID NO: 893640 - protein, 540 aa, Homo sapiens; identical to SEQ ID NO: 893626

SEQ ID NO: 893641 - protein, 500 aa, Homo sapiens
MATSGAASAELVIGWCIFGLLLLAILAFCWIYVRKYQSRRESEVVSTITAIFSLAIALITSALLPVDIFLVSYMKNQNGTFKDWANANVSRQIEDTVLYGYYTLYSVILFCVFFWIPFVYFYYEEKDDDDTSKCTQIKTALKYTLGFVVICALLLLVGAFVPLNVPNNKNSTEWEKVKSLFEELGSSHGLAALSFSISSLTLIGMLAAITYTAYGMSALPLNLIKGTRSAAYERLENTEDIEEVEQHIQTIKSKSKDGRPLPARDKRALKQFEERLRTLKKRERHLEFIENSWWTKFCGALRPLKIVWGIFFILVALLFVISLFLSNLDKALHSAGIDSGFIIFGANLSNPLNMLLPLLQTVFPLDYILITIIIMYFIFTSMAGIRNIGIWFFWIRLYKIRRGRTRPQALLFLCMILLLIVLHTSYMIYSLAPQYVMYGSQNYLIETNILLVIIKGFNLLGKRGCEAENGMVRILSQVRFSGDKGGLGEGGSPEGPWGNK

SEQ ID NO: 893642 - protein, 338 aa, Homo sapiens
MATSGAASAELVIGWCIFGLLLLAILAFCWIYVRKYQSRRESEVVSTITAIFSLAIALITSALLPVDIFLVSYMKNQNGTFKDWANANVSRQIEDTVLYGYYTLYSVILFCVFFWIPFVYFYYEEKDDDDTSKCTQIKTALKYTLGFVVICALLLLVGAFVPLNVPNNKNSTEWEKVKSLFEELGSSHGLAALSFSISSLTLIGMLAAITYTAYGMSALPLNLIKGTRSAAYERLENTEDIEEVEQHIQTIKSKSKDGRPLPARDKRALKQFEERLRTLKKRERHLEFIENSWWTKFCGALRPLKIVWGIFFILVALLFVISLFLSNLDKALHSAGKT

SEQ ID NO: 893643 - protein, 66 aa, Homo sapiens
AVISPMTSRVAGSFLEALAVIADLGNGAGGVWGRKRPSGLRSMWWPFVPCKTLSHGVGRQRWIFAS

SEQ ID NO: 893644 - protein, 1129 aa, Homo sapiens
MPATRKPMRYGHTEGHTEVCFDDSGSFIVTCGSDGDVRIWEDLDDDDPKFINVGEKAYSCALKSGKLVTAVSNNTIQVHTFPEGVPDGILTRFTTNANHVVFNGDGTKIAAGSSDFLVKIVDVMDSSQQKTFRGHDAPVLSLSFDPKDIFLASASCDGSVRVWQISDQTCAISWPLLQKCNDVINAKSICRLAWQPKSGKLLAIPVEKSVKLYRRESWSHQFDLSDNFISQTLNIVTWSPCGQYLAAGSINGLIIVWNVETKDCMERVKHEKGYAICGLAWHPTCGRISYTDAEGNLGLLENVCDPSGKTSSSKVSSRVEKDYNDLFDGDDMSNAGDFLNDNAVEIPSFSKGIINDDEDDEDLMMASGRPRQRSHILEDDENSVDISMLKTGSSLLKEEEEDGQEGSIHNLPLVTSQRPFYDGPMPTPRQKPFQSGSTPLHLTHRFMVWNSIGIIRCYNDEQDNAIDVEFHDTSIHHATHLSNTLNYTIADLSHEAILLACESTDELASKLHCLHFSSWDSSKEWIIDLPQNEDIEAICLGQGWAAAATSALLLRLFTIGGVQKEVFSLAGPVVSMAGHGEQLFIVYHRGTGFDGDQCLGVQLLELGKKKKQILHGDPLPLTRKSYLAWIGFSAEGTPCYVDSEGIVRMLNRGLGNTWTPICNTREHCKGKSDHYWVVGIHENPQQLRCIPCKGSRFPPTLPRPAVAILSFKLPYCQIATEKGQMEEQFWRSVIFHNHLDYLAKNGYEYEESTKNQATKEQQELLMKMLALSCKLEREFRCVELADLMTQNAVNLAIKYASRSRKLILAQKLSELAVEKAAELTATQVEEEEEEEDFRKKLNAGYSNTATEWSQPRFRNQVEEDAEDSGEADDEEKPEIHKPGQNSFSKSTNSSDVSAKSGAVTFSSQGRVNPFKVSASSKEPAMSMNSARSTNILDNMGKSSKKSTALSRTTNNEKSPIIKPLIPKPKPKQASAASYFQKRNSQTNKTEEVKEENLKNVLSETPAICPPQNTENQRPKTGFQMWLEENRSNILSDNPDFSDEADIIKEGMIRFRVLSTEERKVWANKAKGETASEGTEAKKRKRVVDESDETENQEEKAKENLNLSKKQKPLDFSTNQKLSAFAFKQE

SEQ ID NO: 893645 - protein, 84 aa, Homo sapiens
KKGKDLRLRVLSTKKKEKVWANKAKGETASEGTEAKKRKRVVDESDETENQEEKAKENLNLSKKQKPLDFSTNQKLSAFAFKQE

SEQ ID NO: 893646 - protein, 1129 aa, Homo sapiens; identical to SEQ ID NO: 893644

SEQ ID NO: 893647 - protein, 1129 aa, Homo sapiens; identical to SEQ ID NO: 893644

SEQ ID NO: 893648 - protein, 1067 aa, Homo sapiens
MPATRKPMRYGHTEGHTEVCFDDSGSFIVTCGSDGDVRIWEDLDDDDPKFINVGEKAYSCALKSGKLVTAVSNNTIQVHTFPEGVPDGILTRFTTNANHVVFNGDGTKIAAGSSDFLVKIVDVMDSSQQKTFRGHDAPVLSLSFDPKDIFLASASCDGSVRVWQISDQTCAISWPLLQKCNDVINAKSICRLAWQPKSGKLLAIPVEKSVKLYRRESWSHQFDLSDNFISQTLNIVTWSPCGQYLAAGSINGLIIVWNVETKDCMERVKHEKGYAICGLAWHPTCGRISYTDAEGNLGLLENVCDPSGKTSSSKVSSRVEKDYNDLFDGDDMSNAGDFLNDNAVEIPSFSKGIINDDEDDEDLMMASGRPRQRSHILEDDENSVDISMLKTGSSLLKEEEEDGQEGSIHNLPLVTSQRPFYDGPMPTPRQKPFQSGSTPCISLTDSCKLHCLHFSSWDSSKEWIIDLPQNEDIEAICLGQGWAAAATSALLLRLFTIGGVQKEVFSLAGPVVSMAGHGEQLFIVYHRGTGFDGDQCLGVQLLELGKKKKQILHGDPLPLTRKSYLAWIGFSAEGTPCYVDSEGIVRMLNRGLGNTWTPICNTREHCKGKSDHYWVVGIHENPQQLRCIPCKGSRFPPTLPRPAVAILSFKLPYCQIATEKGQMEEQFWRSVIFHNHLDYLAKNGYEYEESTKNQATKEQQELLMKMLALSCKLEREFRCVELADLMTQNAVNLAIKYASRSRKLILAQKLSELAVEKAAELTATQVEEEEEEEDFRKKLNAGYSNTATEWSQPRFRNQVEEDAEDSGEADDEEKPEIHKPGQNSFSKSTNSSDVSAKSGAVTFSSQGRVNPFKVSASSKEPAMSMNSARSTNILDNMGKSSKKSTALSRTTNNEKSPIIKPLIPKPKPKQASAASYFQKRNSQTNKTEEVKEENLKNVLSETPAICPPQNTENQRPKTGFQMWLEENRSNILSDNPDFSDEADIIKEGMIRFRVLSTEERKVWANKAKGETASEGTEAKKRKRVVDESDETENQEEKAKENLNLSKKQKPLDFSTNQKLSAFAFKQE

SEQ ID NO: 893649 - protein, 991 aa, Homo sapiens
  misc_feature (986)..(986): Xaa can be any naturally occurring amino acid
MPATRKPMRYGHTEGHTEVCFDDSGSFIVTCGSDGDVRIWEDLDDDDPKFINVGEKAYSCALKSGKLVTAVSNNTIQVHTFPEGVPDGILTRFTTNANHVVFNGDGTKIAAGSSDFLVKIVDVMDSSQQKTFRGHDAPVLSLSFDPKDIFLASASCDGSVRVWQISDQTCAISWPLLQKCNDVINAKSICRLAWQPKSGKLLAIPVEKSVKLYRRESWSHQFDLSDNFISQTLNIVTWSPCGQYLAAGSINGLIIVWNVETKDCMERVKHEKGYAICGLAWHPTCGRISYTDAEGNLGLLENVCDPSGKTSSSKVSSRVEKDYNDLFDGDDMSNAGDFLNDNAVEIPSFSKGIINDDEDDEDLMMASGRPRQRSHILEDDENSVDISMLKTGSSLLKEEEEDGQEGSIHNLPLVTSQRPFYDGPMPTPRQKPFQSGSTPLHLTHRFMVWNSIGIIRCYNDEQDNAIDVEFHDTSIHHATHLSNTLNYTIADLSHEAILLACESTDELASKLHCLHFSSWDSSKEWIIDLPQNEDIEAICLGQGWAAAATSALLLRLFTIGGVQKEVFSLAGPVVSMAGHGEQLFIVYHRGTGFDGDQCLGVQLLELGKKKKQILHGDPLPLTRKSYLAWIGFSAEGTPCYVDSEGIVRMLNRGLGNTWTPICNTREHCKGKSDHYWVVGIHENPQQLRCIPCKGSRFPPTLPRPAVAILSFKLPYCQIATEKGQMEEQFWRSVIFHNHLDYLAKNGYEYEESTKNQATKEQQELLMKMLALSCKLEREFRCVELADLMTQNAVNLAIKYASRSRKLILAQKLSELAVEKAAELTATQVEEEEEEEDFRKKLNAGYSNTATEWSQPRFRNQVEEDAEDSGEADDEEKPEIHKPGQNSFSKSTNSSDVSAKSGAVTFSSQGRVNPFKVSASSKEPAMSMNSARSTNILDNMGKSSKKSTALSRTTNNEKSPIIKPLIPKPKPKQHLQLLFRKNLTITXSEEEI

SEQ ID NO: 893650 - protein, 481 aa, Homo sapiens [sequence omitted]

SEQ ID NO: 893651 - protein, 1067 aa, Homo sapiens; identical to SEQ ID NO: 893648

SEQ ID NO: 893652 - protein, 277 aa, Homo sapiens
SLRLPVPNHVDASGLLEAARAAAVGVAATTTIGVTSPASVRSRRSRAAHVSSESAHMATQAHSLSYAGCNFLRQRLVLSTLSGRPVKIRKIRARDDNPGLRDFEASFIRLLDKITNGSRIEINQTGTTLYYQPGLLYGGSVEHDCSVLRGIGYYLESLLCLAPFMKHPLKIVLRGVTNDQVDPSVDVLKATALPLLKQFGIDGESFELKIVRRGMPPGGGGEVVFSCPVRKVLKPIQLTDPGKIKRIRGMAVLCTCVTSDGEPDCGFCKEHPQQVHT

SEQ ID NO: 893653 - protein, 277 aa, Homo sapiens; identical to SEQ ID NO: 893652

SEQ ID NO: 893654 - protein, 277 aa, Homo sapiens; identical to SEQ ID NO: 893652

SEQ ID NO: 893655 - protein, 170 aa, Homo sapiens
MANRIVDSARSILNKFIPDIYIYTDHMKGVNSGKSPGFGLSLVAETTSGTFLSAELASNPQGQGAAVLPEDLGRNCARLLLEEIYRGGCVDSTNQSLALLLMTLGQQDVSKVLLGPLSPYTIEFLRHLKSFFQIMFKIETKPCGEELKGGDKVLMTCVGIGFSNLSKTLK

SEQ ID NO: 893656 - protein, 187 aa, Homo sapiens
MTSLTPGCRYSVRVSPQMANRIVDSARSILNKFIPDIYIYTDHMKGVNSGKSPGFGLSLVAETTSGTFLSAELASNPQGQGAAVLPEDLGRNCARLLLEEIYRGGCVDSTNQSLALLLMTLGQQDVSKVLLGPLSPYTIEFLRHLKSFFQIMFKIETKPCGEELKGGDKVLMTCVGIGFSNLSKTLK

SEQ ID NO: 893657 - protein, 187 aa, Homo sapiens; identical to SEQ ID NO: 893656

SEQ ID NO: 893658 - protein, 187 aa, Homo sapiens; identical to SEQ ID NO: 893656

SEQ ID NO: 893659 - protein, 277 aa, Homo sapiens; identical to SEQ ID NO: 893652

SEQ ID NO: 893660 - protein, 170 aa, Homo sapiens; identical to SEQ ID NO: 893655

SEQ ID NO: 893661 - protein, 170 aa, Homo sapiens; identical to SEQ ID NO: 893655

SEQ ID NO: 893662 - protein, 187 aa, Homo sapiens; identical to SEQ ID NO: 893656

SEQ ID NO: 893663 - protein, 199 aa, Homo sapiens
SLRLPVPNHVDASGLLEAARAAAVGVAATTTIGVTSPASVRSRRSRAAHVSSESAHMATQAHSLSYAGCNFLRQRLVLSTLSGRPVKIRKIRARDDNPGLRDFEASFIRLLDKITNGSRIEINQTGTTLYYQPGLLYGGSVEHDCSVLRGIGYYLESLLCLAPFMKHPLKIVLRGVTNDQVDPSDRIFAAFEELFPDYV

SEQ ID NO: 893664 - protein, 651 aa, Homo sapiens
MKDYDELLKYYELHETIGTGGFAKVKLACHILTGEMVAIKIMDKNTLGSDLPRIKTEIEALKNLRHQHICQLYHVLETANKIFMVLEYCPGGELFDYIISQDRLSEEETRVVFRQIVSAVAYVHSQGYAHRDLKPENLLFDEYHKLKLIDFGLCAKPKGNKDYHLQTCCGSLAYAAPELIQGKSYLGSEADVWSMGILLYVLMCGFLPFDDDNVMALYKKIMRGKYDVPKWLSPSSILLLQQMLQVDPKKRISMKNLLNHPWIMQDYNYPVEWQSKNPFIHLDDDCVTELSVHHRNNRQTMEDLISLWQYDHLTATYLLLLAKKARGKPVRLRLSSFSCGQASATPFTDIKSNNWSLEDVTASDKNYVAGLIDYDWCEDDLSTGAATPRTSQFTKYWTESNGVESKSLTPALCRTPANKLKNKENVYTPKSAVKNEEYFMFPEPKTPVNKNQHKREILTTPNRYTTPSKARNQCLKETPIKIPVNSTGTDKLMTGVISPERRCRSVELDLNQAHMEETPKRKGAKVFGSLERGLDKVITVLTRSKRKGSARDGPRRLKLHYNVTTTRLVNPDQLLNEIMSILPKKHVDFVQKGYTLKCQTQSDFGKVTMQFELEVCQLQKPDVVGIRRQRLKGDAWVYKRLVEDILSSCKV

SEQ ID NO: 893665 - protein, 651 aa, Homo sapiens; identical to SEQ ID NO: 893664

SEQ ID NO: 893666 - protein, 603 aa, Homo sapiens
MKDYDELLKYYELHETIGTGGFAKVKLACHILTGEMVAIKIMDKNTLGSDLPRIKTEIEALKNLRHQHICQLYHVLETANKIFMVLEENLLFDEYHKLKLIDFGLCAKPKGNKDYHLQTCCGSLAYAAPELIQGKSYLGSEADVWSMGILLYVLMCGFLPFDDDNVMALYKKIMRGKYDVPKWLSPSSILLLQQMLQVDPKKRISMKNLLNHPWIMQDYNYPVEWQSKNPFIHLDDDCVTELSVHHRNNRQTMEDLISLWQYDHLTATYLLLLAKKARGKPVRLRLSSFSCGQASATPFTDIKSNNWSLEDVTASDKNYVAGLIDYDWCEDDLSTGAATPRTSQFTKYWTESNGVESKSLTPALCRTPANKLKNKENVYTPKSAVKNEEYFMFPEPKTPVNKNQHKREILTTPNRYTTPSKARNQCLKETPIKIPVNSTGTDKLMTGVISPERRCRSVELDLNQAHMEETPKRKGAKVFGSLERGLDKVITVLTRSKRKGSARDGPRRLKLHYNVTTTRLVNPDQLLNEIMSILPKKHVDFVQKGYTLKCQTQSDFGKVTMQFELEVCQLQKPDVVGIRRQRLKGDAWVYKRLVEDILSSCKV

SEQ ID NO: 893667 - protein, 651 aa, Homo sapiens; identical to SEQ ID NO: 893664

SEQ ID NO: 893668 - protein, 603 aa, Homo sapiens; identical to SEQ ID NO: 893666

SEQ ID NO: 893669 - protein, 457 aa, Homo sapiens
MGILLYVLMCGFLPFDDDNVMALYKKIMRGKYDVPKWLSPSSILLLQQMLQVDPKKRISMKNLLNHPWIMQDYNYPVEWQSKNPFIHLDDDCVTELSVHHRNNRQTMEDLISLWQYDHLTATYLLLLAKKARGKPVRLRLSSFSCGQASATPFTDIKSNNWSLEDVTASDKNYVAGLIDYDWCEDDLSTGAATPRTSQFTKYWTESNGVESKSLTPALCRTPANKLKNKENVYTPKSAVKNEEYFMFPEPKTPVNKNQHKREILTTPNRYTTPSKARNQCLKETPIKIPVNSTGTDKLMTGVISPERRCRSVELDLNQAHMEETPKRKGAKVFGSLERGLDKVITVLTRSKRKGSARDGPRRLKLHYNVTTTRLVNPDQLLNEIMSILPKKHVDFVQKGYTLKCQTQSDFGKVTMQFELEVCQLQKPDVVGIRRQRLKGDAWVYKRLVEDILSSCKV

SEQ ID NO: 893670 - protein, 61 aa, Homo sapiens
MWEVRGPLPHPPPPPVESLTFILHPGPPWCSSISWALWLSEPVVGTPSTGPKPGGAAADEV

SEQ ID NO: 893671 - protein, 635 aa, Homo sapiens
ARQRAEPAGSGARVPRRGWRQRAPSSARARPSGSPTPSGPRRPSARPRKHPPPGMVLKAFFPTCCVSTDSGLLVGRWVPEQSSAVVLAVLHFPFIPIQVKQLLAQVRQASQVGVAVLGTWCHCRQEPEESLGRFLESLGAVFPHEPWLRLCRERGGTFWSCEATHRQAPTAPGAPGEDQVMLIFYDQRQVLLSQLHLPTVLPDRQAGATTASTGGLAAVFDTVARSEVLFRSDRFDEGPVRLSHWQSEGVEASILAELARRASGPICLLLASLLSLVSAVSACRVFKLWPLSFLGSKLSTCEQLRHRLEHLTLIFSTRKAENPAQLMRKANTVASVLLDVALGLMLLSWLHGRSRIGHLADALVPVADHVAEELQHLLQWLMGAPAGLKMNRALDQVLGRFFLYHIHLWISYIHLMSPFVEHILWHVGLSACLGLTVALSLLSDIIALLTFHIYCFYVYGARLYCLKIHGLSSLWRLFRGKKWNVLRQRVDSCSYDLDQLFIGTLLFTILLFLLPTTALYYLVFTLLRLLVVAVQGLIHLLVDLINSLPLYSLGLRLCRPYRLAAGVKFRVLRHEAGRPLRLLMQINPLPYSRVVHTYRLPSCGCHPKHSWGALCRKLFLGELIYPWRQRGDKQD

SEQ ID NO: 893672 - protein, 504 aa, Homo sapiens
ARQRAEPAGSGARVPRRGWRQRAPSSARARPSGSPTPSGPRRPSARPRKHPPPGMVLKAFFPTCCVSTDSGLLVGRWVPEQSSAVVLAVLHFPFIPIQVKQLLAQVRQASQVGVAVLGTWCHCRQEPEESLGRFLESLGAVFPHEPWLRLCRERGGTFWSCEATHRQAPTAPGAPGEDQVMLIFYDQRQVLLSQLHLPTVLPDRQAGATTASTGGLAAVFDTVARSEVLFRSDRFDEGPVRLSHWQSEGVEASILAELARRASGPICLLLASLLSLVSAVSACRVFKLWPLSFLGSKLSTCEQLRHRLEHLTLIFSTRKAENPAQLMRCGPALVSAGLGACPLAPSPSPSAPPDPSGQAGLLLRPQAVLATLMPAGPDLPSRKANTVASVLLDVALGLMLLSWLHGRSRIGHLADALVPVADVSGLGWSPVSRVGVGTPPGQQSLPGPEPPPHKASSTFSMLWRHGPPLNQKQELQGRWGLGRAGLAGTPPFPSEGAVCRSQPG

SEQ ID NO: 893673 - protein, 598 aa, Homo sapiens
GSGFHEGQVQSVSQPPGMVLKAFFPTCCVSTDSGLLVGRWVPEQSSAVVLAVLHFPFIPIQVKQLLAQVRQASQVGVAVLGTWCHCRQEPEESLGRFLESLGAVFPHEPWLRLCRERGGTFWSCEATHRQAPTAPGAPGEDQVMLIFYDQRQVLLSQLHLPTVLPDRQAGATTASTGGLAAVFDTVARSEVLFRSDRFDEGPVRLSHWQSEGVEASILAELARRASGPICLLLASLLSLVSAVSACRVFKLWPLSFLGSKLSTCEQLRHRLEHLTLIFSTRKAENPAQLMRKANTVASVLLDVALGLMLLSWLHGRSRIGHLADALVPVADHVAEELQHLLQWLMGAPAGLKMNRALDQVLGRFFLYHIHLWISYIHLMSPFVEHILWHVGLSACLGLTVALSLLSDIIALLTFHIYCFYVYGARLYCLKIHGLSSLWRLFRGKKWNVLRQRVDSCSYDLDQLFIGTLLFTILLFLLPTTALYYLVFTLLRLLVVAVQGLIHLLVDLINSLPLYSLGLRLCRPYRLAAGVKFRVLRHEAGRPLRLLMQINPLPYSRVVHTYRLPSCGCHPKHSWGALCRKLFLGELIYPWRQRGDKQD

SEQ ID NO: 893674 - protein, 635 aa, Homo sapiens; identical to SEQ ID NO: 893671

SEQ ID NO: 893675 - protein, 635 aa, Homo sapiens; identical to SEQ ID NO: 893671

SEQ ID NO: 893676 - protein, 614 aa, Homo sapiens
ARQRAEPAGSGARVPRRGWRQRAPSSARARPSGSPTPSGPRRPSARPRKHPPPGMVLKAFFPTCCVSTDSGLLVGRWVPEQSSAVVLAVLHFPFIPIQVKQLLAQVRQASQVGVAVLGTWCHCRQEPEESLGRFLESLGAVFPHEPWLRLCRERGGTFWSCEATHRQAPTAPGAPGEDQVMLIFYDQRQVLLSQLHLPTVLPDRQAGATTASTGGLAAVFDTVARSEVLFRSDRFDEGPVRLSHWQSEGVEASILAELARRASGPICLLLASLLSLVSAVSACRVFKLWPLSFLGSKLSTCEQLRHRLEHLTLIFSTRKAENPAQLMRKANTVASVLLDVALGLMLLSWLHGRSRIGHLADALVPVADHVAEELQHLLQWLMGAPAGLKMNRALDQVLGRFFLYHIHLWISYIHLMSPFVEHILWHVGLSACLGLTVALSLLSDIIALLTFHIYCFYVYGARLYCLKIHGLSSLWRLFRGKKWNVLRQRVDSCSYDLDQLFIGTLLFTILLFLLPTTALYYLVFTLLRLLVVAVQGLIHLLVDLINSLPLYSLGLRLCRPYRLAGSEPWRPEATGLCSSALGFSGLGSLNCRPGAKRGKVRGTRSQQGGHHPLA

SEQ ID NO: 893677 - protein, 651 aa, Homo sapiens
ARQRAEPAGSGARVPRRGWRQRAPSSARARPSGSPTPSGPRRPSARPRKHPPPGMVLKAFFPTCCVSTDSGLLVGRWVPEQSSAVVLAVLHFPFIPIQVKQLLAQVRQASQVGVAVLGTWCHCRQEPEESLGRFLESLGAVFPHEPWLRLCRERGGTFWSCEATHRQAPTAPGAPGEDQVMLIFYDQRQVLLSQLHLPTVLPDRQAGATTASTGGLAAVFDTVARSEVLFRSDRFDEGPVRLSHWQSEGVEASILAELARRASGPICLLLASLLSLVSAVSACRVFKLWPLSFLGSKLSTCEQLRHRLEHLTLIFSTRKAENPAQLMRKANTVASVLLDVALGLMLLSWLHGRSRIGHLADALVPVADHVAEELQHLLQWLMGAPAGLKMNRALDQVLGRFFLYHIHLWISYIHLMSPFVEHILWHVGLSACLGLTVALSLLSDIIALLTFHIYCFYVYGARLYCLKIHGLSSLWRLFRGKKWNVLRQRVDSCSYDLDQLFIGTLLFTILLFLLPTTALYYLVFTLLRLLVVAVQGLIHLLVDLINSLPLYSLGLRLCRPYRLAGSEPWRPEATGLCSSALGFSGLGSLNCRPGAKRGKVRGTRSQQGGHHPVSAPSGCAGKPRPLNSTACARPSLGLFPACRTPGFFQWS

SEQ ID NO: 893678 - protein, 450 aa, Homo sapiens
ARQRAEPAGSGARVPRRGWRQRAPSSARARPSGSPTPSGPRRPSARPRKHPPPGMVLKAFFPTCCVSTDSGLLVGRWVPEQSSAVVLAVLHFPFIPIQVKQLLAQVRQASQVGVAVLGTWCHCRQEPEESLGRFLESLGAVFPHEPWLRLCRERGGTFWSCEATHRQAPTAPGAPGEDQVMLIFYDQRQVLLSQLHLPTVLPDRQAGATTASTGGLAAVFDTVARSEVLFRSDRFDEGPVRLSHWQSEGVEASILAELARRASGPICLLLASLLSLVSAVSACRVFKLWPLSFLGSKLSTCEQLRHRLEHLTLIFSTRKAENPAQLMRKANTVASVLLDVALGLMLLSWLHGRSRIGHLADALVPVADVSGLGWSPVSRVGVGTPPGQQSLPGPEPPPHKASSTFSMLWRHGPPLNQKQELQGRWGLGRAGLAGTPPFPSEGAVCRSQPG

SEQ ID NO: 893679 - protein, 814 aa, Homo sapiens
ARQRAEPAGSGARVPRRGWRQRAPSSARARPSGSPTPSGPRRPSARPRKHPPPGMVLKAFFPTCCVSTDSGLLVGRWVPEQSSAVVLAVLHFPFIPIQVKQLLAQVRQASQVGVAVLGTWCHCRQEPEESLGRFLESLGAVFPHEPWLRLCRERGGTFWSCEATHRQAPTAPGAPGEDQVMLIFYDQRQVLLSQLHLPTVLPDRQAGATTASTGGLAAVFDTVARSEVLFRSDRFDEGPVRLSHWQSEGVEASILAELARRASGPICLLLASLLSLVSAVSACRVFKLWPLSFLGSKLSTCEQLRHRLEHLTLIFSTRKAENPAQLMRKANTVASVLLDVALGLMLLSWLHGRSRIGHLADALVPVADHVAEELQHLLQWLMGAPAGLKMNRALDQVLGRFFLYHIHLWISYIHLMSPFVEHILWHVGLSACLGLTVALSLLSDIIALLTFHIYCFYVYGARLYCLKIHGLSSLWRLFRGKKWNVLRQRVDSCSYDLDQLFIGTLLFTILLFLLPTTALYYLVFTLLRLLVVAVQGLIHLLVDLINSLPLYSLGLRLCRPYRLADKPTALQPRGAHLPPPQLWLPPQALLGRPVPQAVPWGAHLPLEAERGQAGLRELLARLAPPHGHSQPSALPGWHQLSWRMSCALWTLLCAPEHGRPCYHTLGLEVIGSEQMWGWPARLAALHHWHCLPWDPLPTCCGHHGGEHSNPRCPEHCPMPTLCTQVQRVRPPQQPQVEGWSPWGLPSGSALAVGVEGPCQDEPPSPRHPLAPSAEQHPASGGLKQSLTPVPSGPGPSLPEPHGVYLRMFPGEVAL

SEQ ID NO: 893680 - protein, 515 aa, Homo sapiens
RVFYAILSAPYGSYKNRTRAVFPHEPWLRLCRERGGTFWSCEATHRQAPTAPGAPGEDQVMLIFYDQRQVLLSQLHLPTVLPDRQAGATTASTGGLAAVFDTVARSEVLFRSDRFDEGPVRLSHWQSEGVEASILAELARRASGPICLLLASLLSLVSAVSACRVFKLWPLSFLGSKLSTCEQLRHRLEHLTLIFSTRKAENPAQLMRKANTVASVLLDVALGLMLLSWLHGRSRIGHLADALVPVADHVAEELQHLLQWLMGAPAGLKMNRALDQVLGRFFLYHIHLWISYIHLMSPFVEHILWHVGLSACLGLTVALSLLSDIIALLTFHIYCFYVYGARLYCLKIHGLSSLWRLFRGKKWNVLRQRVDSCSYDLDQLFIGTLLFTILLFLLPTTALYYLVFTLLRLLVVAVQGLIHLLVDLINSLPLYSLGLRLCRPYRLAAGVKFRVLRHEAGRPLRLLMQINPLPYSRVVHTYRLPSCGCHPKHSWGALCRKLFLGELIYPWRQRGDKQD

SEQ ID NO: 893681 - protein, 635 aa, Homo sapiens; identical to SEQ ID NO: 893671

SEQ ID NO: 893682 - protein, 306 aa, Homo sapiens
GCRLTCLLGNWDWLLPQARECLRQHWPCLTTARPHPLSADGVGAQTTPLTAALVLPDKPTALQPRGAHLPPPQLWLPPQALLGRPVPQAVPWGAHLPLEAERGQAGLRELLARLAPPHGHSQPSALPGWHQLSWRMSCALWTLLCAPEHGRPCYHTLGLEVIGSEQMWGWPARLAALHHWHCLPWDPLPTCCGHHGGEHSNPRCPEHCPMPTLCTQVQRVRPPQQPQVEGWSPWGLPSGSALAVGVEGPCQDEPPSPRHPLAPSAEQHPASGGLKQSLTPVPSGPGPSLPEPHGVYLRMFPGEVAL

SEQ ID NO: 893683 - protein, 450 aa, Homo sapiens; identical to SEQ ID NO: 893678

SEQ ID NO: 893684 - protein, 285 aa, Homo sapiens
SRTTSSTCLIPRPRSPLHVRLWGGTSDLVRGPGAPPPALLQSKAQWQTPCPAQGGVPALPRTLQPLGPLHRGPGWGRTALPPGASGRAGPKCSSATAPAPGGRRAGPDPSARGPHQLPAAVLTGSSALPALQAGGEVLRIGQLALGMVEGNHTCGPCRSKDSMGHCASSLEAVVCMRKRAGRTGPPSPRGLQDQLPPGRWRETQRLTCRAGSEPWRPEATGLCSSALGFSGLGSLNCRPGAKRGKVRGTRSQQGGHHPVSAPSGCAGKPRPLNSTACARPSLGLF

SEQ ID NO: 893685 - protein, 249 aa, Homo sapiens
MLPAATASLLGPLLTACALLPFAQGQTPNYTRPVFLCGGDVKGESGYVASEGFPNLYPPNKECIWTITVPEGQTVSLSFRVFDLELHPACRYDALEVFAGSGTSGQRLGRFCGTFRPAPLVAPGNQVTLRMTTDEGTGGRGFLLWYSGRATSGTEHQFCGGRLEKAQGTLTTPNWPESDYPPGISCSWHIIAPPDQVIALTFEKFDLEPDTYCRYDSVSVFNGAVSDDSRRLGKFCGDAVPGLHLLRRE

SEQ ID NO: 893686 - protein, 249 aa, Homo sapiens; identical to SEQ ID NO: 893685

SEQ ID NO: 893687 - protein, 160 aa, Homo sapiens
  misc_feature (8)..(8): Xaa can be any naturally occurring amino acid
MILYLVRXSLVISVTRAPFIPLYVYPCCRHARCRRTGTLQSNFCASSLVVTATVKSMVREPGEGLAVTVSLIGAYKTGGLDLPSPPTGASLKFYVPCKQCPPMKKGVSYLLMGQVEENRGPVLPPESFVVLHRPNQDQILTNLSKRKCPSQPVRAAASQD

SEQ ID NO: 893688 - protein, 249 aa, Homo sapiens; identical to SEQ ID NO: 893685

SEQ ID NO: 893689 - protein, 249 aa, Homo sapiens; identical to SEQ ID NO: 893685

SEQ ID NO: 893690 - protein, 298 aa, Homo sapiens
LLGLEGWSSCQAHFSLIFVGVWDTPALSWLVEAAPGLSRPFHFIPQLPSLEFHPHHLIPILPVLPRPTRPCSFLTPFLFSRPVFLCGGDVKGESGYVASEGFPNLYPPNKECIWTITVPEGQTVSLSFRVFDLELHPACRYDALEVFAGSGTSGQRLGRFCGTFRPAPLVAPGNQVTLRMTTDEGTGGRGFLLWYSGRATSGTEHQFCGGRLEKAQGTLTTPNWPESDYPPGISCSWHIIAPPDQVIALTFEKFDLEPDTYCRYDSVSVFNGAVSDDSRRLGKFCGDAVPGLHLLRRE

SEQ ID NO: 893691 - protein, 242 aa, Homo sapiens
MLPAATASLLGPLLTACALLPFAQGQTPNYTRPVFLCGGDVKGESGYVASEGFPNLYPPNKECIWTITVPEGQTVSLSFRVFDLELHPACRYDALEVFAGSGTSGQRLGRFCGTFRPAPLVAPGNQVTLRMTTDEGTGGRGFLLWYSGRATSGTEHQFCGGRLEKAQGTLTTPNWPESDYPPGISCSWHIIAPPDQVIALTFEKFDLEPDTYCRYDSVSVFNGAVSDDSRRLGKFCGDAVPG

SEQ ID NO: 893692 - protein, 104 aa, Homo sapiens [sequence omitted]

SEQ ID NO: 893693 - protein, 205 aa, Homo sapiens [sequence omitted]

SEQ ID NO: 893694 - protein, 249 aa, Homo sapiens; identical to SEQ ID NO: 893685

SEQ ID NO: 893695 - protein, 82 aa, Homo sapiens
HEVKLQGGTSGWRRQVQSSSFISTNKTGVSYLLMGQVEENRGPVLPPESFVVLHRPNQDQILTNLSKRKCPSQPVRAAASQD

SEQ ID NO: 893696 - protein, 249 aa, Homo sapiens; identical to SEQ ID NO: 893685

SEQ ID NO: 893697 - protein, 249 aa, Homo sapiens; identical to SEQ ID NO: 893685

SEQ ID NO: 893698 - protein, 104 aa, Homo sapiens [sequence omitted]

SEQ ID NO: 893699 - protein, 104 aa, Homo sapiens [sequence omitted]

SEQ ID NO: 893700 - protein, 279 aa, Homo sapiens
MLPAATASLLGPLLTACALLPFAQGQTPNYTRPVFLCGGDVKGESGYVASEGFPNLYPPNKECIWTITVPEGQTVSLSFRVFDLELHPACRYDALEVFAGSGTSGQRLGRFCGTFRPAPLVAPGNQVTLRMTTDEGTGGRGFLLWYSGRATSGTEHQFCGGRLEKAQGTLTTPNWPESDYPPGISCSWHIIAPPDQAPSPPKGMNSSSSSSQISVSPLMASQPPTRPCRGALPKKGKGPAPNGELSLKSSCPPSPNLRRKQRNLLQPLWTCLLHPLVPP

SEQ ID NO: 893701 - protein, 148 aa, Homo sapiens
METGALRRPQLLPLLLLLCGGCPRAGGCNETGMLERLPLCGKAFADMMGKVDVWKWCNLSEFIVYYESFTNCTEMEANVVGCYWPNPLAQGFITGIHRQFFSNCTVDRVHLEDPPDEVLIPLIVIPVVLTVAMAGLVVWRSKRTDTLL

SEQ ID NO: 893702 - protein, 148 aa, Homo sapiens; identical to SEQ ID NO: 893701

SEQ ID NO: 893703 - protein, 148 aa, Homo sapiens; identical to SEQ ID NO: 893701

SEQ ID NO: 893704 - protein, 234 aa, Homo sapiens
  misc_feature (1)..(1): Xaa can be any naturally occurring amino acid
XESSPAFGNLQDPPQISFHSGPSVTQLRPASHGDWSAAAPATSPVAAAALRPFPGSMPTCTPESVAEPRLDMELGSAHWERRKGRWGSGTRAKWGHSSQEPSGQGGGCPRAGGCNETGMLERLPLCGKAFADMMGKVDVWKWCNLSEFIVYYESFTNCTEMEANVVGCYWPNPLAQGFITGIHRQFFSNCTVDRVHLEDPPDEVLIPLIVIPVVLTVAMAGLVVWRSKRTDTLL

SEQ ID NO: 893705 - protein, 139 aa, Homo sapiens
MRTHTRGAPSVFFIYLLCFVSAYITDENPEVMIPFTNANYDSHPMLYFSRAEVAELQLRAASSHEHIAARLTEAVHTMLSSPLEYLPPWDPKDYSARWNEIFGNNLGALAMFCVLYPENIEARDMAKDYMERMAAQPSW

SEQ ID NO: 893706 - protein, 958 aa, Homo sapiens [sequence omitted]

SEQ ID NO: 893707 - protein, 771 aa, Homo sapiens
MYETSYRRGWGFQYLHNHQPTNCMALLTGSLVLMNQGYLQEAYLWTKQVLTIMEKSLVLLREVTDGSLYEGVAYGSYTTRSLFQYMFLVQRHFNINHFGHPWLKQHFAFMYRTILPGFQRTVAIADSNYNWFYGPESQLVFLDKFVMRNGSGNWLADQIRRNRVVEGPGTPSKGQRWCTLHTEFLWYDGSLKSVPPPDFGTPTLHYFEDWGVVTYGSALPAEINRSFLSFKSGKLGGRAIYDIVHRNKYKDWIKGWRNFNAGHEHPDQNSFTFAPNGVPFITEALYGPKYTFFNNVLMFSPAVSKSCFSPWVGQVTEDCSSKWSKYKHDLAASCQGRVVAAEEKNGVVFIRGEGVGAYNPQLNLKNVQRNLILLHPQLLLLVDQIHLGEESPLETAASFFHNVDVPFEETVVDGVHGAFIRQRDGLYKMYWMDDTGYSEKATFASVTYPRGYPYNGTNYVNVTMHLRSPITRAAYLFIGPSIDVQSFTVHGDSQQLDVFIATSKHAYATYLWTGEATGQSAFAQVIADRHKILFDRNSAIKSSIVPEVKDYAAIVEQNLQHFKPVFQLLEKQILSRVRNTASFRKTAERLLRFSDKRQTEEAIDRIFAISQQQQQQSKSKKNRRAGKRYKFVDAVPDIFAQIEVNEKKIRQKAQILAQKELPIDEDEEMKDLLDFADVTYEKHKNGGLIKGRFGQARMVTTTHSRAPSLSASYTRLFLILNIAIFFVMLAMQLTYFQRAQSLHGQRCLYAVLLIDSCILLWLYSSCSQSQC

SEQ ID NO: 893708 - protein, 652 aa, Homo sapiens
MIKKYSSSSHQGFPFVHTGCPWIFLELSLIYSALPVLWVAFVCRIFHITMLCVIFTAIRKPFNFKIKYDGSLKSVPPPDFGTPTLHYFEDWGVVTYGSALPAEINRSFLSFKSGKLGGRAIYDIVHRNKYKDWIKGWRNFNAGHEHPDQNSFTFAPNGVPFITEALYGPKYTFFNNVLMFSPAVSKSCFSPWVGQVTEDCSSKWSKYKHDLAASCQGRVVAAEEKNGVVFIRGEGVGAYNPQLNLKNVQRNLILLHPQLLLLVDQIHLGEESPLETAASFFHNVDVPFEETVVDGVHGAFIRQRDGLYKMYWMDDTGYSEKATFASVTYPRGYPYNGTNYVNVTMHLRSPITRAAYLFIGPSIDVQSFTVHGDSQQLDVFIATSKHAYATYLWTGEATGQSAFAQVIADRHKILFDRNSAIKSSIVPEVKDYAAIVEQNLQHFKPVFQLLEKQILSRVRNTASFRKTAERLLRFSDKRQTEEAIDRIFAISQQQQQQSKSKKNRRAGKRYKFVDAVPDIFAQIEVNEKKIRQKAQILAQKELPIDEDEEMKDLLDFADVTYEKHKNGGLIKGRFGQARMVTTTHSRAPSLSASYTRLFLILNIAIFFVMLAMQLTYFQRAQSLHGQRCLYAVLLIDSCILLWLYSSCSQSQC

SEQ ID NO: 893709 - protein, 640 aa, Homo sapiens
MIKKYSSSSHQGFPFVHTGCPWIFLELSLIYSALPVLWVAFVCRIFHITMLCVIFTAIRKPFNFSKLFGTPTLHYFEDWGVVTYGSALPAEINRSFLSFKSGKLGGRAIYDIVHRNKYKDWIKGWRNFNAGHEHPDQNSFTFAPNGVPFITEALYGPKYTFFNNVLMFSPAVSKSCFSPWVGQVTEDCSSKWSKYKHDLAASCQGRVVAAEEKNGVVFIRGEGVGAYNPQLNLKNVQRNLILLHPQLLLLVDQIHLGEESPLETAASFFHNVDVPFEETVVDGVHGAFIRQRDGLYKMYWMDDTGYSEKATFASVTYPRGYPYNGTNYVNVTMHLRSPITRAAYLFIGPSIDVQSFTVHGDSQQLDVFIATSKHAYATYLWTGEATGQSAFAQVIADRHKILFDRNSAIKSSIVPEVKDYAAIVEQNLQHFKPVFQLLEKQILSRVRNTASFRKTAERLLRFSDKRQTEEAIDRIFAISQQQQQQSKSKKNRRAGKRYKFVDAVPDIFAQIEVNEKKIRQKAQILAQKELPIDEDEEMKDLLDFADVTYEKHKNGGLIKGRFGQARMVTTTHSRAPSLSASYTRLFLILNIAIFFVMLAMQLTYFQRAQSLHGQRCLYAVLLIDSCILLWLYSSCSQSQC

SEQ ID NO: 893710 - protein, 958 aa, Homo sapiens [sequence omitted]

SEQ ID NO: 893711 - protein, 958 aa, Homo sapiens [sequence omitted]

SEQ ID NO: 893712 - protein, 691 aa, Homo sapiens
DLEDPVSQADPLYTLLCITLEPGCGETRRYSKSNNLQSPPGHEALTFIWALVCEGCSSQPLAKNGVTFLPLLRTYVIGSQGNRVVEGPGTPSKGQRWCTLHTEFLWYDGSLKSVPPPDFGTPTLHYFEDWGVVTYGSALPAEINRSFLSFKSGKLGGRAIYDIVHRNKYKDWIKGWRNFNAGHEHPDQNSFTFAPNGVPFITEALYGPKYTFFNNVLMFSPAVSKSCFSPWVGQVTEDCSSKWSKYKHDLAASCQGRVVAAEEKNGVVFIRGEGVGAYNPQLNLKNVQRNLILLHPQLLLLVDQIHLGEESPLETAASFFHNVDVPFEETVVDGVHGAFIRQRDGLYKMYWMDDTGYSEKATFASVTYPRGYPYNGTNYVNVTMHLRSPITRAAYLFIGPSIDVQSFTVHGDSQQLDVFIATSKHAYATYLWTGEATGQSAFAQVIADRHKILFDRNSAIKSSIVPEVKDYAAIVEQNLQHFKPVFQLLEKQILSRVRNTASFRKTAERLLRFSDKRQTEEAIDRIFAISQQQQQQSKSKKNRRAGKRYKFVDAVPDIFAQIEVNEKKIRQKAQILAQKELPIDEDEEMKDLLDFADVTYEKHKNGGLIKGRFGQARMVTTTHSRAPSLSASYTRLFLILNIAIFFVMLAMQLTYFQRAQSLHGQRCLYAVLLIDSCILLWLYSSCSQSQC

SEQ ID NO: 893713 - protein, 621 aa, Homo sapiens
WVCQHDSKGNRVGVDGSMEHYYPKRHRSYTLHTAISQDYSRLKTVPHPHVGTPTSALSVDCDVCLENLATAEINRSFLSFKSGKLGGRAIYDIVHRNKYKDWIKGWRNFNAGHEHPDQNSFTFAPNGVPFITEALYGPKYTFFNNVLMFSPAVSKSCFSPWVGQVTEDCSSKWSKYKHDLAASCQGRVVAAEEKNGVVFIRGEGVGAYNPQLNLKNVQRNLILLHPQLLLLVDQIHLGEESPLETAASFFHNVDVPFEETVVDGVHGAFIRQRDGLYKMYWMDDTGYSEKATFASVTYPRGYPYNGTNYVNVTMHLRSPITRAAYLFIGPSIDVQSFTVHGDSQQLDVFIATSKHAYATYLWTGEATGQSAFAQVIADRHKILFDRNSAIKSSIVPEVKDYAAIVEQNLQHFKPVFQLLEKQILSRVRNTASFRKTAERLLRFSDKRQTEEAIDRIFAISQQQQQQSKSKKNRRAGKRYKFVDAVPDIFAQIEVNEKKIRQKAQILAQKELPIDEDEEMKDLLDFADVTYEKHKNGGLIKGRFGQARMVTTTHSRAPSLSASYTRLFLILNIAIFFVMLAMQLTYFQRAQSLHGQRCLYAVLLIDSCILLWLYSSCSQSQC

SEQ ID NO: 893714 - protein, 958 aa, Homo sapiens [sequence omitted]

SEQ ID NO: 893715 - protein, 121 aa, Homo sapiens
LLAEFPVRAVSDDLQRGRQGLSMAEGNTLISVDYEIFGKVQGVFFRKHTQAEGKKLGLVGWVQNTDRGTVQGQLQGPISKVRHMQEWLETRGSPKSHIDKANFNNEKVILKLDYSDFQIVK

SEQ ID NO: 893716 - protein, 89 aa, Homo sapiens
RSHPHPPYSNDKPPTRLEAEGKKLGLVGWVQNTDRGTVQGQLQGPISKVRHMQEWLETRGSPKSHIDKANFNNEKVILKLDYSDFQIVK

SEQ ID NO: 893717 - protein, 87 aa, Homo sapiens
SGRGGLRAWVSRWRGGPGVILAAGGEDKEGLSMAEGNTLISVDYEIFGKVQGVFFRKHTQEMTVENRIAETHSKSCVPVSFATSYAG

SEQ ID NO: 893718 - protein, 69 aa, Homo sapiens
SGRGGLRAWVSRWRGGPGVILAAGGEDKEGLSMAEGNTLISVDYEIFGKVQGVFFRKHTQVCGLQALGW

SEQ ID NO: 893719 - protein, 94 aa, Homo sapiens
SGRGGLRAWVSRWRGGPGVILAAGGEDKEGLSMAEGNTLISVDYEIFGKVQGVFFRKHTQEMTVENRIAETHSKSCVPVSFATSYAGINEFKRI

SEQ ID NO: 893720 - protein, 131 aa, Homo sapiens
SGRGGLRAWVSRWRGGPGVILAAGGEDKEGLSMAEGNTLISVDYEIFGKVQGVFFRKHTQAEGKKLGLVGWVQNTDRGTVQGQLQGPISKVRHMQEWLETRGSPKSHIDKANFNNEKVILKLDYSDFQIVK

SEQ ID NO: 893721 - protein, 89 aa, Homo sapiens; identical to SEQ ID NO: 893716

SEQ ID NO: 893722 - protein, 94 aa, Homo sapiens; identical to SEQ ID NO: 893719

SEQ ID NO: 893723 - protein, 233 aa, Homo sapiens
MWSGLLPPGLNESDAESNSEDEATLENSGLNLQEDKEDESIRKTEIIDFSTDEPKTETESNVNAYEECPSGIPIDMWNKFQELHKKHSEQKSTTSRFRGKRRKRSRKDKLKNEKELHSEPSSNETQWKELTQYFGVNDRFDPPVKRKKVEKSGLEKRIDQAVEEWNIEKAEELSNQLATRELGVKIAKAVACHNFVKAKKEVENSQAARKKKKLAWGFEAKKRWETKSNMGYM

SEQ ID NO: 893724 - protein, 233 aa, Homo sapiens; identical to SEQ ID NO: 893723

SEQ ID NO: 893725 - protein, 233 aa, Homo sapiens; identical to SEQ ID NO: 893723

SEQ ID NO: 893726 - protein, 260 aa, Homo sapiens
TQEPMRRRDVDGVLRWLLGDHFLTEEKMWSGLLPPGLNESDAESNSEDEATLENSGLNLQEDKEDESIRKTEIIDFSTDEPKTETESNVNAYEECPSGIPIDMWNKFQELHKKHSEQKSTTSRFRGKRRKRSRKDKLKNEKELHSEPSSNETQWKELTQYFGVNDRFDPPVKRKKVEKSGLEKRIDQAVEEWNIEKAEELSNQLATRELGVKIAKAVACHNFVKAKKEVENSQAARKKKKLAWGFEAKKRWETKSNMGYM

SEQ ID NO: 893727 - protein, 233 aa, Homo sapiens; identical to SEQ ID NO: 893723

SEQ ID NO: 893728 - protein, 147 aa, Homo sapiens
MWSGLLPPGLNESDAESNSEDEATLENSGLNLQEDKEDESIRKTEIIDFSTDEPKTETESNVNAYEECPSGIPIDMWNKFQELHKKHSEQKSTTSRFRGKRRKRSRKVNRPQMKPSGKSLLSILESMIDLTRLLKGKKLRSQALKRG

SEQ ID NO: 893729 - protein, 111 aa, Homo sapiens
MWSGLLPPGLNESDAESNSEDEATLENSGLNLQEDKEDESIRKTEIIDFSTDEPKTETESNVNAYEECPSGIPIDMWNKFQELHKKHSEQKSTTSRFRGKRRKRSRKGVLF

SEQ ID NO: 893730 - protein, 147 aa, Homo sapiens; identical to SEQ ID NO: 893728

SEQ ID NO: 893731 - protein, 233 aa, Homo sapiens; identical to SEQ ID NO: 893723

SEQ ID NO: 893732 - protein, 233 aa, Homo sapiens; identical to SEQ ID NO: 893723

SEQ ID NO: 893733 - protein, 233 aa, Homo sapiens; identical to SEQ ID NO: 893723

SEQ ID NO: 893734 - protein, 233 aa, Homo sapiens; identical to SEQ ID NO: 893723

SEQ ID NO: 893735 - protein, 233 aa, Homo sapiens; identical to SEQ ID NO: 893723

SEQ ID NO: 893736 - protein, 219 aa, Homo sapiens
MWSGLLPPGLNESDAESNSEDEATLENSGLNLQEDKEDESIRKTEIIDFSTDEPKTETESNVNAYEECPSGIPIDMWNKFQELHKKHSEQKSTTSRFRGKRRKRSRKDKLKNEKELHSEPSSNETQWKELTQYFGVNDRFDPPVKRKKVEKSGLEKRIDQAVEEWNIEKAEELSNQLATREENHGSNVVCFSVSAIQRLVLSLCPFPDGVTSINYFSLV

SEQ ID NO: 893737 - protein, 111 aa, Homo sapiens; identical to SEQ ID NO: 893729

SEQ ID NO: 893738 - protein, 563 aa, Homo sapiens
MQLKPSTSSHLLKTVKPRVWKPGDWSREQLNETTVLAPHETIFRAEDLSVILKAYVLVTSLTPLRAFIHSTGTVWNPPKKKRFTVKLQTFFETFLRASSPQQAFDIMKEAIGKLLLAAEVFSETSTLGPKTFHRCRFCFQLLTFDIGYGSFMYPVVLQVHEHLNFQDYDNMDFEDQNTEEFLLNDTFNFLFPNESSLSIFSEIFQRLYRSDVFKGENYQKELNQCLSLEEINSIMTFIKELGSLGQFQLLFPSTTPGIQSLMHEFYDVANPVGNPGSVLTQYWSLLNVFEQFQFMNKKTQPHPLEWNSFTEDKNIEKPQVPFDAIENKKAAVPQIKNENKEIHCSDDENTPCHIKQIFTHPHLELNPDFHPKIKDYYCEVPFDVVTVTIGVETPKCLCKVHLYEQAGPSFASYPLGLGMNKISIFVVDESPAHGETLITYKLTIYREDRPSLPLFEAFTACGFVQDCGLLIHPEETCGLQPISSDYIEAILQSELKRCPSGDMKGQWIVPCLSCSDNRTCDWREITWQPHNCQYGVLTKPQLQQCLGGRKLGVDVQRVPRSRN

SEQ ID NO: 893739 - protein, 1026 aa, Homo sapiens
MVCRPVFPCRRRFCPRPFLVGLVVAICLFYQTLTLRGSRKLTAAAPGAVPHTSTETQASRCKKGFSQDKQCFLLSGNAQETRKVKESMETHFGSHGRRAILYRPPFYSKTELQLHQHILTQHGYTVVIAEERLNAGLGPGLLEQGDLGSWDLLICLSSKKAEGTPCISKEVMCQLGLHQKANRLPEIQQPLCRKEGLCQIVRRFPELQLPVSPSVCLDQGMQLKPSTSSHLLKTVKPRVWKPGDWSREQLNETTVLAPHETIFRAEDLSVILKAYVLVTSLTPLRAFIHSTGTVWNPPKKKRFTVKLQTFFETFLRASSPQQAFDIMKEAIGKLLLAAEVFSETSTLGPKTFHRCRFCFQLLTFDIGYGSFMYPVVLQVHEHLNFQDYDNMDFEDQNTEEFLLNDTFNFLFPNESSLSIFSEIFQRLYRSDVFKGENYQKELNQCLSLEEINSIMTFIKELGSLGQFQLLFPSTTPGIQSLMHEFYDVANPVGNPGSVLTQYWSLLNVFEQFQFMNKKTQPHPLEWNSFTEDKNIEKPQVPFDAIENKKAAVPQIKNENKEIHCSDDENTPCHIKQIFTHPHLELNPDFHPKIKDYYCEVPFDVVTVTIGVETPKCLCKVHLYEQAGPSFASYPLGLGMNKISIFVVDESPAHGETLITYKLTIYREDRPSLPLFEAFTACGFVQDCGLLIHPEETCGLQPISSDYIEAILQSELKRCPSGDMKGQWIVPCLSCSDNRTCDWREITWQPHNCQYGVLTKPQLQQCLGGRKILFIGDSTNRGIMYYLIERLNETLQEWQKVHGTKFYHNVNGGKTLISYSYYPQFWISPSLRPTFENALEHLLQRSRPLENTGQTVLVVGGVQWLNSNHLQIIHKVLKRENLLNILVIIKTLGIGFHLPVDGVHFLTQSEVQNLWKENLIILDTAKKHGYEVVDTFTITMGRYKEFLQGKCGCHFHEVVKSKLSKEYNFIKMKRSRNHIMGRYFSNQSKLQQGTVTNFRSPYHVRGPINQVCSEILLSRMCANKRTM

SEQ ID NO: 893740 - protein, 1026 aa, Homo sapiens; identical to SEQ ID NO: 893739

SEQ ID NO: 893741 - protein, 950 aa, Homo sapiens
MPRKPERSKNQWRHTLAAMAEGPYSTGLLSTAKQSFSYTSTFLTQHGYTVVIAEERLNAGLGPGLLEQGDLGSWDLLICLSSKKAEGTPCISKEVMCQLGLHQKANRLPEIQQPLCRKEGLCQIVRRFPELQLPVSPSVCLDQGMQLKPSTSSHLLKTVKPRVWKPGDWSREQLNETTVLAPHETIFRAEDLSVILKAYVLVTSLTPLRAFIHSTGTVWNPPKKKRFTVKLQTFFETFLRASSPQQAFDIMKEAIGKLLLAAEVFSETSTLGPKTFHRCRFCFQLLTFDIGYGSFMYPVVLQVHEHLNFQDYDNMDFEDQNTEEFLLNDTFNFLFPNESSLSIFSEIFQRLYRSDVFKGENYQKELNQCLSLEEINSIMTFIKELGSLGQFQLLFPSTTPGIQSLMHEFYDVANPVGNPGSVLTQYWSLLNVFEQFQFMNKKTQPHPLEWNSFTEDKNIEKPQVPFDAIENKKAAVPQIKNENKEIHCSDDENTPCHIKQIFTHPHLELNPDFHPKIKDYYCEVPFDVVTVTIGVETPKCLCKVHLYEQAGPSFASYPLGLGMNKISIFVVDESPAHGETLITYKLTIYREDRPSLPLFEAFTACGFVQDCGLLIHPEETCGLQPISSDYIEAILQSELKRCPSGDMKGQWIVPCLSCSDNRTCDWREITWQPHNCQYGVLTKPQLQQCLGGRKILFIGDSTNRGIMYYLIERLNETLQEWQKVHGTKFYHNVNGGKTLISYSYYPQFWISPSLRPTFENALEHLLQRSRPLENTGQTVLVVGGVQWLNSNHLQIIHKVLKRENLLNILVIIKTLGIGFHLPVDGVHFLTQSEVQNLWKENLIILDTAKKHGYEVVDTFTITMGRYKEFLQGKCGCHFHEVVKSKLSKEYNFIKMKRSRNHIMGRYFSNQSKLQQGTVTNFRSPYHVRGPINQVCSEILLSRMCANKRTM

SEQ ID NO: 893742 - protein, 71 aa, Homo sapiens
NETTVLAPHETIFRAEDLSVILKAYVLVTSLTPLRAFIHSTGTVWNPPKKKRFTVKVSSRLKLLFHVSTLK

SEQ ID NO: 893743 - protein, 806 aa, Homo sapiens
MQLKPSTSSHLLKTVKPRVWKPGDWSREQLNETTVLAPHETIFRAEDLSVILKAYVLVTSLTPLRAFIHSTGTVWNPPKKKRFTVKLQTFFETFLRASSPQQAFDIMKEAIGKLLLAAEVFSETSTLGPKTFHRCRFCFQLLTFDIGYGSFMYPVVLQVHEHLNFQDYDNMDFEDQNTEEFLLNDTFNFLFPNESSLSIFSEIFQRLYRSDVFKGENYQKELNQCLSLEEINSIMTFIKELGSLGQFQLLFPSTTPGIQSLMHEFYDVANPVGNPGSVLTQYWSLLNVFEQFQFMNKKTQPHPLEWNSFTEDKNIEKPQVPFDAIENKKAAVPQIKNENKEIHCSDDENTPCHIKQIFTHPHLELNPDFHPKIKDYYCEVPFDVVTVTIGVETPKCLCKVHLYEQAGPSFASYPLGLGMNKISIFVVDESPAHGETLITYKLTIYREDRPSLPLFEAFTACGFVQDCGLLIHPEETCGLQPISSDYIEAILQSELKRCPSGDMKGQWIVPCLSCSDNRTCDWREITWQPHNCQYGVLTKPQLQQCLGGRKILFIGDSTNRGIMYYLIERLNETLQEWQKVHGTKFYHNVNGGKTLISYSYYPQFWISPSLRPTFENALEHLLQRSRPLENTGQTVLVVGGVQWLNSNHLQIIHKVLKRENLLNILVIIKTLGIGFHLPVDGVHFLTQSEVQNLWKENLIILDTAKKHGYEVVDTFTITMGRYKEFLQGKCGCHFHEVVKSKLSKEYNFIKMKRSRNHIMGRYFSNQSKLQQGTVTNFRSPYHVRGPINQVCSEILLSRMCANKRTM

SEQ ID NO: 893744 - protein, 806 aa, Homo sapiens; identical to SEQ ID NO: 893743

SEQ ID NO: 893745 - protein, 436 aa, Homo sapiens
MQLKPSTSSHLLKTVKPRVWKPGDWSREQLNETTVLAPHETIFRAEDLSVILKAYVLVTSLTPLRAFIHSTGTVWNPPKKKRFTVKLQTFFETFLRASSPQQAFDIMKEAIGKLLLAAEVFSETSTLGPKTFHRCRFCFQLLTFDIGYGSFMYPVVLQVHEHLNFQDYDNMDFEDQNTEEFLLNDTFNFLFPNESSLSIFSEIFQRLYRSDVFKGENYQKELNQCLSLEEINSIMTFIKELGSLGQFQLLFPSTTPGIQSLMHEFYDVANPVGNPGSVLTQYWSLLNVFEQFQFMNKKTQPHPLEWQFLSTRQIKNHCTNTNEGAKFEMQVAKIKQSVQMSTKVKNMENREKISMCQVDGMQENDEPMVDNSKANNRIEQTSRNECVGKSVDNGSPWKRCVPSSPKQGSPDDDIVSVNPWVEEGCDTKCEGIGVGG

SEQ ID NO: 893746 - protein, 628 aa, Homo sapiens
SSGSGSWEPRWRRRRQRQQQQQPVFGKGRQVLIYDRFGQDIISPLLSVKELRDMGITLHLLLHSDRDPIPDVPAVYFVMPTEENIDRMCQDLRNQLYESYYLNFISAISRSKLEDIANAALAASAVTQVAKVFDQYLNFITLEDDMFVLCNQNKELVSYRAINRPDITDTEMETVMDTIVDSLFCFFVTLGAVPIIRCSRGTAAEMVAVKLDKKLRENLRDARNSLFTGDTLGAGQFSFQRPLLVLVDRNIDLATPLHHTWTYQALVHDVLDFHLNRVNLEESSGVENSPAGARPKRKNKKSYDLTPVDKFWQKHKGSPFPEVAESVQQELESYRAQEDEVKRLKSIMGLEGEDEGAISMLSDNTAKLTSAVSSLPELLEKKRLIDLHTNVATAVLEHIKARKLDVYFEYEEKIMSKTTLDKSLLDIISDPDAGTPEDKMRLFLIYYISTQQAPSEADLEQYKKALTDAGCNLNPLQYIKQWKAFTKMASAPASYGSTTTKPMGLLSRVMNTGSQFVMEGVKNLVLKQQNLPVTRILDNLMEMKSNPETDDYRYFDPKMLRGNDSSVPRNKNPFQEAIVFVVGGGNYIEYQNLVDYIKGKQGKHILYGCSELFNATQFIKQLSQLGQK

SEQ ID NO: 893747 - protein, 248 aa, Homo sapiens
MVWLLLCCACRVHSDVQRSSTDLGVFRNLVPPTCVHSLVTVGNWIFLFYDFTVIRWIESGRIQNNECSIIYTTHNTFELIVTNIKALTKPDPPKPSRLYQTVEAFTKMASAPASYGSTTTKPMGLLSRVMNTGSQFVMEGVKNLVLKQQNLPVTRILDNLMEMKSNPETDDYRYFDPKMLRGNDSSVPRNKNPFQEAIVFVVGGGNYIEYQNLVDYIKGKQGKHILYGCSELFNATQFIKQLSQLGQK

SEQ ID NO: 893748 - protein, 617 aa, Homo sapiens
MLNFNVPHIKNSTGEPVWKVLIYDRFGQDIISPLLSVKELRDMGITLHLLLHSDRDPIPDVPAVYFVMPTEENIDRMCQDLRNQLYESYYLNFISAISRSKLEDIANAALAASAVTQVAKVFDQYLNFITLEDDMFVLCNQNKELVSYRAINRPDITDTEMETVMDTIVDSLFCFFVTLGAVPIIRCSRGTAAEMVAVKLDKKLRENLRDARNSLFTGDTLGAGQFSFQRPLLVLVDRNIDLATPLHHTWTYQALVHDVLDFHLNRVNLEESSGVENSPAGARPKRKNKKSYDLTPVDKFWQKHKGSPFPEVAESVQQELESYRAQEDEVKRLKSIMGLEGEDEGAISMLSDNTAKLTSAVSSLPELLEKKRLIDLHTNVATAVLEHIKARKLDVYFEYEEKIMSKTTLDKSLLDIISDPDAGTPEDKMRLFLIYYISTQQAPSEADLEQYKKALTDAGCNLNPLQYIKQWKAFTKMASAPASYGSTTTKPMGLLSRVMNTGSQFVMEGVKNLVLKQQNLPVTRILDNLMEMKSNPETDDYRYFDPKMLRGNDSSVPRNKNPFQEAIVFVVGGGNYIEYQNLVDYIKGKQGKHILYGCSELFNATQFIKQLSQLGQK

SEQ ID NO: 893749 - protein, 649 aa, Homo sapiens
  misc_feature (10)..(10): Xaa can be any naturally occurring amino acid
AHASGRRRQXTAAAVSLHSGKTASCSHVALKRMLNFNVPHIKNSTGEPVWKVLIYDRFGQDIISPLLSVKELRDMGITLHLLLHSDRDPIPDVPAVYFVMPTEENIDRMCQDLRNQLYESYYLNFISAISRSKLEDIANAALAASAVTQVAKVFDQYLNFITLEDDMFVLCNQNKELVSYRAINRPDITDTEMETVMDTIVDSLFCFFVTLGAVPIIRCSRGTAAEMVAVKLDKKLRENLRDARNSLFTGDTLGAGQFSFQRPLLVLVDRNIDLATPLHHTWTYQALVHDVLDFHLNRVNLEESSGVENSPAGARPKRKNKKSYDLTPVDKFWQKHKGSPFPEVAESVQQELESYRAQEDEVKRLKSIMGLEGEDEGAISMLSDNTAKLTSAVSSLPELLEKKRLIDLHTNVATAVLEHIKARKLDVYFEYEEKIMSKTTLDKSLLDIISDPDAGTPEDKMRLFLIYYISTQQAPSEADLEQYKKALTDAGCNLNPLQYIKQWKAFTKMASAPASYGSTTTKPMGLLSRVMNTGSQFVMEGVKNLVLKQQNLPVTRILDNLMEMKSNPETDDYRYFDPKMLRGNDSSVPRNKNPFQEAIVFVVGGGNYIEYQNLVDYIKGKQGKHILYGCSELFNATQFIKQLSQLGQK

SEQ ID NO: 893750 - protein, 633 aa, Homo sapiens
AAEWLVGAKMAAAAAATAAAAASIRERQTVALKRMLNFNVPHIKNSTGEPVWKVLIYDRFGQDIISPLLSVKELRDMGITLHLLLHSDRDPIPDVPAVYFVMPTEDLNFISAISRSKLEDIANAALAASAVTQVAKVFDQYLNFITLEDDMFVLCNQNKELVSYRAINRPDITDTEMETVMDTIVDSLFCFFVTLGAVPIIRCSRGTAAEMVAVKLDKKLRENLRDARNSLFTGDTLGAGQFSFQRPLLVLVDRNIDLATPLHHTWTYQALVHDVLDFHLNRVNLEESSGVENSPAGARPKRKNKKSYDLTPVDKFWQKHKGSPFPEVAESVQQELESYRAQEDEVKRLKSIMGLEGEDEGAISMLSDNTAKLTSAVSSLPELLEKKRLIDLHTNVATAVLEHIKARKLDVYFEYEEKIMSKTTLDKSLLDIISDPDAGTPEDKMRLFLIYYISTQQAPSEADLEQYKKALTDAGCNLNPLQYIKQWKAFTKMASAPASYGSTTTKPMGLLSRVMNTGSQFVMEGVKNLVLKQQNLPVTRILDNLMEMKSNPETDDYRYFDPKMLRGNDSSVPRNKNPFQEAIVFVVGGGNYIEYQNLVDYIKGKQGKHILYGCSELFNATQFIKQLSQLGQK

SEQ ID NO: 893751 - protein, 632 aa, Homo sapiens
AAEWLVGAKMAAAAAATAAAAASIRERQTVALKRMLNFNVPHIKNSTGEPVWKVLIYDRFGQDIISPLLSVKELRDMGITLHLLLHSDRDPIPDVPAVYFVMPTEENIDRMCQDLRNQLYESYYLNFISAISRSKLEDIANAALAASAVTQVAKVFDQYLNFITLEDDMFVLCNQNKELVSYRAINRPDITDTEMETVMDTIVDSLFCFFVTLGAVPIIRCSRGTAAEMVAVKLDKKLRENLFQRPLLVLVDRNIDLATPLHHTWTYQALVHDVLDFHLNRVNLEESSGVENSPAGARPKRKNKKSYDLTPVDKFWQKHKGSPFPEVAESVQQELESYRAQEDEVKRLKSIMGLEGEDEGAISMLSDNTAKLTSAVSSLPELLEKKRLIDLHTNVATAVLEHIKARKLDVYFEYEEKIMSKTTLDKSLLDIISDPDAGTPEDKMRLFLIYYISTQQAPSEADLEQYKKALTDAGCNLNPLQYIKQWKAFTKMASAPASYGSTTTKPMGLLSRVMNTGSQFVMEGVKNLVLKQQNLPVTRILDNLMEMKSNPETDDYRYFDPKMLRGNDSSVPRNKNPFQEAIVFVVGGGNYIEYQNLVDYIKGKQGKHILYGCSELFNATQFIKQLSQLGQK

SEQ ID NO: 893752 - protein, 457 aa, Homo sapiens
AAEWLVGAKMAAAAAATAAAAASIRERQTVALKRMLNFNVPHIKNSTGEPVWKVLIYDRFGQDIISPLLSVKELRDMGITLHLLLHSDRDPIPDVPAVYFVMPTEENIDRMCQDLRNQLYESYYLNFISAISRSKLEDIANAALAASAVTQVAKVFDQYLNFITLEDDMFVLCNQNKELVSYRAINRPDITDTEMETVMDTIVDSLFCFFVTLGAVPIIRCSRGTAAEMVAVKLDKKLRENLRDARNSLFTGDTLGAGQFSFQRPLLVLVDRNIDLATPLHHTWTYQALVHDVLDFHLNRVNLEESSGVENSPAGARPKRKNKKSYDLTPVDKFWQKHKGSPFPEVAESVQQELESYRAQEDEVKRLKSIMGLEGEDEGAISMLSDNTAKLTSAVSSLPELLEKKRLIDLHTNVATAVLEHIKVNLTFSPPQYDLHLHRVLYFVRCFSIHYLIESPL

SEQ ID NO: 893753 - protein, 297 aa, Homo sapiens
AAEWLVGAKMAAAAAATAAAAASIRERQTVALKRMLNFNVPHIKNSTGEPVWKVLIYDRFGQDIISPLLSVKELRDMGITLHLLLHSDRDPIPDVPAVYFVMPTEENIDRMCQDLRNQLYESYYLNFISAISRSKLEDIANAALAASAVTQVAKVFDQYLNFITLEDDMFVLCNQNKELVSYRAINRPDITDTEMETVMDTIVDSLFCFFVTLGAVPIIRCSRGTAAEMVAVKLDKKLRENLRDARNSLFTGDTLGAGQFSFQRPLLVLVDRNIDLATPLHHTWTYQALVHDVLVRD

SEQ ID NO: 893754 - protein, 651 aa, Homo sapiens
AAEWLVGAKMAAAAAATAAAAASIRERQTVALKRMLNFNVPHIKNSTGEPVWKVLIYDRFGQDIISPLLSVKELRDMGITLHLLLHSDRDPIPDVPAVYFVMPTEENIDRMCQDLRNQLYESYYLNFISAISRSKLEDIANAALAASAVTQVAKVFDQYLNFITLEDDMFVLCNQNKELVSYRAINRPDITDTEMETVMDTIVDSLFCFFVTLGAVPIIRCSRGTAAEMVAVKLDKKLRENLRDARNSLFTGDTLGAGQFSFQRPLLVLVDRNIDLATPLHHTWTYQALVHDVLDFHLNRVNLEESSGVENSPAGARPKRKNKKSYDLTPVDKFWQKHKGSPFPEVAESVQQELESYRAQEDEVKRLKSIMGLEGEDEGAISMLSDNTAKLTSAVSSLPELLEKKRLIDLHTNVATAVLEHIKARKLDVYFEYEEKIMSKTTLDKSLLDIISDPDAGTPEDKMRLFLIYYISTQQAPSEADLEQYKKALTDAGCNLNPLQYIKQWKAFTKMASAPASYGSTTTKPMGLLSRVMNTGSQFVMEGVKNLVLKQQNLPVTRILDNLMEMKSNPETDDYRYFDPKMLRGNDSSVPRNKNPFQEAIVFVVGGGNYIEYQNLVDYIKGKQGKHILYGCSELFNATQFIKQLSQLGQK

SEQ ID NO: 893755 - protein, 191 aa, Homo sapiens
MSKTTLDKSLLDIISDPDAGTPEDKMRLFLIYYISTQQAPSEADLEQYKKALTDAGCNLNPLQYIKQWKAFTKMASAPASYGSTTTKPMGLLSRVMNTGSQFVMEGVKNLVLKQQNLPVTRILDNLMEMKSNPETDDYRYFDPKMLRGNDSSVPRNKNPFQEAIVFVVGGGNYIEYQNLVDYIKGKQGKHI

SEQ ID NO: 893756 - protein, 633 aa, Homo sapiens
AAEWLVGAKMAAAAAATAAAAASIRERQTVALKRMLNFNVPHIKNSTGEPVWKVLIYDRFGQDIISPLLSVKELRDMGITLHLLLHSDRDPIPDVPAVYFVMPTEENIDRMCQDLRNQLYESYYLNFISAISRSKLEDIANAALAASAVTQVAKVFDQYLNFITLEDDMFVLCNPEMETVMDTIVDSLFCFFVTLGAVPIIRCSRGTAAEMVAVKLDKKLRENLRDARNSLFTGDTLGAGQFSFQRPLLVLVDRNIDLATPLHHTWTYQALVHDVLDFHLNRVNLEESSGVENSPAGARPKRKNKKSYDLTPVDKFWQKHKGSPFPEVAESVQQELESYRAQEDEVKRLKSIMGLEGEDEGAISMLSDNTAKLTSAVSSLPELLEKKRLIDLHTNVATAVLEHIKARKLDVYFEYEEKIMSKTTLDKSLLDIISDPDAGTPEDKMRLFLIYYISTQQAPSEADLEQYKKALTDAGCNLNPLQYIKQWKAFTKMASAPASYGSTTTKPMGLLSRVMNTGSQFVMEGVKNLVLKQQNLPVTRILDNLMEMKSNPETDDYRYFDPKMLRGNDSSVPRNKNPFQEAIVFVVGGGNYIEYQNLVDYIKGKQGKHILYGCSELFNATQFIKQLSQLGQK

SEQ ID NO: 893757 - protein, 550 aa, Homo sapiens
MPTEENIDRMCQDLRNQLYESYYLNFISAISRSKLEDIANAALAASAVTQVAKVFDQYLNFITLEDDMFVLCNQNKELVSYRAINRPDITDTEMETVMDTIVDSLFCFFVTLGAVPIIRCSRGTAAEMVAVKLDKKLRENLRDARNSLFTGDTLGAGQFSFQRPLLVLVDRNIDLATPLHHTWTYQALVHDVLDFHLNRVNLEESSGVENSPAGARPKRKNKKSYDLTPVDKFWQKHKGSPFPEVAESVQQELESYRAQEDEVKRLKSIMGLEGEDEGAISMLSDNTAKLTSAVSSLPELLEKKRLIDLHTNVATAVLEHIKARKLDVYFEYEEKIMSKTTLDKSLLDIISDPDAGTPEDKMRLFLIYYISTQQAPSEADLEQYKKALTDAGCNLNPLQYIKQWKAFTKMASAPASYGSTTTKPMGLLSRVMNTGSQFVMEGVKNLVLKQQNLPVTRILDNLMEMKSNPETDDYRYFDPKMLRGNDSSVPRNKNPFQEAIVFVVGGGNYIEYQNLVDYIKGKQGKHILYGCSELFNATQFIKQLSQLGQK

SEQ ID NO: 893758 - protein, 651 aa, Homo sapiens; identical to SEQ ID NO: 893754

SEQ ID NO: 893759 - protein, 298 aa, Homo sapiens
AAEWLVGAKMAAAAAATAAAAASIRERQTVALKRMLNFNVPHIKNSTGEPVWKVLIYDRFGQDIISPLLSVKELRDMGITLHLLLHSDRDPIPDVPAVYFVMPTEENIDRMCQDLRNQLYESYYLNFISAISRSKLEDIANAALAASAVTQVAKVFDQYLNFITLEDDMFVLCNQNKELVSYRAINRPDITDTEMETVMDTIVDSLFCFFVTLGAVPIIRCSRGTAAEMVAVKLDKKLRENLRDARNSLFTGDTLGAGQFSFQRPLLVLVDRNIDLATPLHHTWTYQALVHDVLERWI

SEQ ID NO: 893760 - protein, 662 aa, Homo sapiens [sequence omitted]

SEQ ID NO: 893761 - protein, 662 aa, Homo sapiens [sequence omitted]

SEQ ID NO: 893762 - protein, 199 aa, Homo sapiens
RPGASATTRSDCPAERGKESHLDTLSRAQLTQLFLASVLECPFYKGPKLLPKYQVKSFLTPCCSLETPVDSQLYRYVKIGLTNLLGARLYFAPKVLTPYCYTIDVEIKLDEEGFVLPSTANEDIHKRIALCIDGPKRFCSNSKHLLGKEAIKQRHLQLLGYQVVQIPYHEIGMLKSRRELVEYLQRKLFSQNTVHWLQE

SEQ ID NO: 893763 - protein, 608 aa, Homo sapiens [sequence omitted]

SEQ ID NO: 893764 - protein, 662 aa, Homo sapiens [sequence omitted]

SEQ ID NO: 893765 - protein, 206 aa, Homo sapiens [sequence omitted]

SEQ ID NO: 893766 - protein, 145 aa, Homo sapiens
RPGASATTRSDCPAERGKESHLDTLSRAQLTQLFLASVLECPFYKGPKLLPKYQVKSFLTPCCSLETPVDSQLYRYVKIGLTNLLGARLYFAPKVLTPYCYTIAFSPIDQCKVEGIKAKQRNEYRKIVFVRVSHEEFFLSSLTRC

SEQ ID NO: 893767 - protein, 568 aa, Homo sapiens [sequence omitted]

SEQ ID NO: 893768 - protein, 779 aa, Homo sapiens
MLTNLRIFAMSHQTIPSVYINNICCYKIRASLKRLKPHVPLGRNCSSLPGLIGNDIKSLHSIINPPIAKIRNIGIMAHIDAGKTTTTERILYYSGYTRSLGDVDDGDTVTDFMAQERERGITIQSAAVTFDWKGYRVNLIDTPGHVDFTLEVERCLRVLDGAVAVFDASAGVEAQTLTVWRQADKHNIPRICFLNKMDKTGASFKYAVESIREKLKAKPLLLQLPIGEAKTFKGVVDVVMKEKLLWNCNSNDGKDFERKPLLEMNDPELLKETTEARNALIEQVADLDDEFADLVLEEFSENFDLLPAEKLQTAIHRVTLAQTAVPVLCGSALKNKGIQPLLDAVTMYLPSPEERNYEFLQWYKDDLCALAFKVLHDKQRGPLVFMRIYSGTIKPQLAIHNINGNCTERISRLLLPFADQHVEIPSLTAGNIALTVGLKHTATGDTIVSSKSSALAAARRAEREGEKKHRQNNEAERLLLAGVEIPEPVFFCTIEPPSLSKQPDLEHALKCLQREDPSLKVRLDPDSGQTVLCGMGELHIEIIHDRIKREYGLETYLGPLQVAYRETILNSVRATDTLDRTLGDKRHLVTVEVEARPIETSSVMPVIEFEYAESINEGLLKVSQEAIENGIHSACLQGPLLGSPIQDVAITLHSLTIHPGTSTTMISACVSRCVQKALKKADKQVLEPLMNLEVTVARDYLSPVLADLAQRRGNIQEIQTRQDNKVVIGFVPLAEIMGYSTVLRTLTSGSATFALELSTYQAMNPQDQNTLLNRRSGLT

SEQ ID NO: 893769 - protein, 513 aa, Homo sapiens
MLTNLRIFAMSHQTIPSVYINNICCYKIRASLKRLKPHVPLGRNCSSLPGLIGNDIKSLHSIINPPIAKIRNIGIMAHIDAGKTTTTERILYYSGYTRSLGDVDDGDTVTDFMAQERERGITIQSAAVTFDWKGYRVNLIDTPGHVDFTLEVERCLRVLDGAVAVFDASAGVEAQTLTVWRQADKHNIPRICFLNKMDKTGASFKYAVESIREKLKAKPLLLQLPIGEAKTFKGVVDVVMKEKLLWNCNSNDGKDFERKPLLEMNDPELLKETTEARNALIEQVADLDDEFADLVLEEFSENFDLLPAEKLQTAIHRVTLAQTAVPVLCGSALKNKGIQPLLDAVTMYLPSPEERNYEFLQWYKDDLCALAFKVLHDKQRGPLVFMRIYSGTIKPQLAIHNINGNCTERISRLLLPFADQHVEIPSLTAGNIALTVGLKHTATGDTIVSSKSSALAAARRAEREGEKKHRQNNEAERLLLAGVEIPEPVFFCTIEPPSLSKQPGINGLSVSTN

SEQ ID NO: 893770 - protein, 811 aa, Homo sapiens
MKREWIQGQAWWLTPVIPALWEAETVTVWRIKMLTNLRIFAMSHQTIPSVYINNICCYKIRASLKRLKPHVPLGRNCSSLPGLIGNDIKSLHSIINPPIAKIRNIGIMAHIDAGKTTTTERILYYSGYTRSLGDVDDGDTVTDFMAQERERGITIQSAAVTFDWKGYRVNLIDTPGHVDFTLEVERCLRVLDGAVAVFDASAGVEAQTLTVWRQADKHNIPRICFLNKMDKTGASFKYAVESIREKLKAKPLLLQLPIGEAKTFKGVVDVVMKEKLLWNCNSNDGKDFERKPLLEMNDPELLKETTEARNALIEQVADLDDEFADLVLEEFSENFDLLPAEKLQTAIHRVTLAQTAVPVLCGSALKNKGIQPLLDAVTMYLPSPEERNYEFLQWYKDDLCALAFKVLHDKQRGPLVFMRIYSGTIKPQLAIHNINGNCTERISRLLLPFADQHVEIPSLTAGNIALTVGLKHTATGDTIVSSKSSALAAARRAEREGEKKHRQNNEAERLLLAGVEIPEPVFFCTIEPPSLSKQPDLEHALKCLQREDPSLKVRLDPDSGQTVLCGMGELHIEIIHDRIKREYGLETYLGPLQVAYRETILNSVRATDTLDRTLGDKRHLVTVEVEARPIETSSVMPVIEFEYAESINEGLLKVSQEAIENGIHSACLQGPLLGSPIQDVAITLHSLTIHPGTSTTMISACVSRCVQKALKKADKQVLEPLMNLEVTVARDYLSPVLADLAQRRGNIQEIQTRQDNKVVIGFVPLAEIMGYSTVLRTLTSGSATFALELSTYQAMNPQDQNTLLNRRSGLT

SEQ ID NO: 893771 - protein, 732 aa, Homo sapiens
MLTNLRIFAMSHQTIPSVYINNICCYKIRASLKRLKPHVPLGRNCSSLPGLIGNDIKSLHSIINPPIAKIRNIGIMAHIDAGKTTTTERILYYSGYTRSLGDVDDGDTVTDFMAQERERGITIQSAAVTFDWKGYRVNLIDTPGHVDFTLEVERCLRVLDGAVAVFDASAGVEAQTLTVWRQADKHNIPRICFLNKMDKTGASFKYAVESIREKLKAKPLLLQLPIGEAKTFKGVVDVVMKEKLLWNCNSNDGKDFERKPLLEMNDPELLKETTEARNALIEQVADLDDEFADLVLEEFSENFDLLPAEKLQTAIHRVTLAQTAVPVLCGSALKNKGIQPLLDAVTMYLPSPEERNYEFLERISRLLLPFADQHVEIPSLTAGNIALTVGLKHTATGDTIVSSKSSALAAARRAEREGEKKHRQNNEAERLLLAGVEIPEPVFFCTIEPPSLSKQPDLEHALKCLQREDPSLKVRLDPDSGQTVLCGMGELHIEIIHDRIKREYGLETYLGPLQVAYRETILNSVRATDTLDRTLGDKRHLVTVEVEARPIETSSVMPVIEFEYAESINEGLLKVSQEAIENGIHSACLQGPLLGSPIQDVAITLHSLTIHPGTSTTMISACVSRCVQKALKKADKQVLEPLMNLEVTVARDYLSPVLADLAQRRGNIQEIQTRQDNKVVIGFVPLAEIMGYSTVLRTLTSGSATFALELSTYQAMNPQDQNTLLNRRSGLT

SEQ ID NO: 893772 - protein, 765 aa, Homo sapiens
MLTNLRIFAMSHQTIPSVYINNICCYKIRASLKRLKPHVPLGRNCSSLPGLIGNDIKSLHSIINPPIAKIRNIGIMAHIDAGKTTTTERILYYSGYTRSLGDVDDGDTVTDFMAQERERGITIQSAAVTFDWKGYRVNLIDTPGHVDFTLEVERCLRVLDGAVAVFDASAGVEAQTLTVWRQADKHNIPRICFLNKMDKTGASFKYAVESIREKLKAKPLLLQLPIGEAKTFKGVVDVVMKEKLLWNCNSNDGKDFERKPLLEMNDPELLKETTEARNALIEQVADLDDEFADLVLEEFSENFDLLPAEKLQTAIHRVTLAQTAVPVLCGSALKNKGIQPLLDAVTMYLPSPEERNYEFLQWYKDDLCALAFKVLHDKQRGPLVFMRIYSGTMERISRLLLPFADQHVEIPSLTAGNIALTVGLKHTATGDTIVSSKSSALAAARRAEREGEKKHRQNNEAERLLLAGVEIPEPVFFCTIEPPSLSKQPDLEHALKCLQREDPSLKVRLDPDSGQTVLCGMGELHIEIIHDRIKREYGLETYLGPLQVAYRETILNSVRATDTLDRTLGDKRHLVTVEVEARPIETSSVMPVIEFEYAESINEGLLKVSQEAIENGIHSACLQGPLLGSPIQDVAITLHSLTIHPGTSTTMISACVSRCVQKALKKADKQVLEPLMNLEVTVARDYLSPVLADLAQRRGNIQEIQTRQDNKVVIGFVPLAEIMGYSTVLRTLTSGSATFALELSTYQAMNPQDQNTLLNRRSGLT

SEQ ID NO: 893773 - protein, 779 aa, Homo sapiens; identical to SEQ ID NO: 893768

SEQ ID NO: 893774 - protein, 837 aa, Homo sapiens
MLTNLRIFAMSHQTIPSVYINNICCYKIRASLKRLKPHVPLGRNCSSLPGLIGNDIKSLHSIINPPIAKIRNIGIMAHIDAGKTTTTERILYYSGYTRSLGDVDDGDTVTDFMAQERERGITIQSAAVTFDWKGYRVNLIDTPGHVDFTLEVERCLRVLDGAVAVFDASAGVEAQTLTVWRQADKHNIPRICFLNKMDKTGASFKYAVESIREKLKAKPLLLQLPIGEAKTFKGVVDVVMKEKLLWNCNSNDGKDFERKPLLEMNDPELLKETTEARNALIEQVADLDDEFADLVLEEFSENFDLLPAEKLQTAIHRVTLAQTAVPVLCGSALKNKGIQPLLDAVTMYLPSPEERNYEFLQWYKDDLCALAFKVLHDKQRGPLVFMRIYSGTIKPQLAIHNINGNCTERISRLLLPFADQHVEIPSLTAGNIALTVGLKHTATGDTIVSSKSSALAAARRAEREGEKKHRQNNEAERLLLAGVEIPEPVFFCTIEPPSLSKQPDLEHALKCLQREDPSLKVRLDPDSGQAPPRSCPHQLYSSSIGQKFGFAVGKCWYLAKCGIISLSQMLLAQQIIQLSKKKEENGQTVLCGMGELHIEIIHDRIKREYGLETYLGPLQVAYRETILNSVRATDTLDRTLGDKRHLVTVEVEARPIETSSVMPVIEFEYAESINEGLLKVSQEAIENGIHSACLQGPLLGSPIQDVAITLHSLTIHPGTSTTMISACVSRCVQKALKKADKQVLEPLMNLEVTVARDYLSPVLADLAQRRGNIQEIQTRQDNKVVIGFVPLAEIMGYSTVLRTLTSGSATFALELSTYQAMNPQDQNTLLNRRSGLT

SEQ ID NO: 893775 - protein, 433 aa, Homo sapiens
MYLPSPEERNYEFLQWYKDDLCALAFKVLHDKQRGPLVFMRIYSGTIKPQLAIHNINGNCTERISRLLLPFADQHVEIPSLTAGNIALTVGLKHTATGDTIVSSKSSALAAARRAEREGEKKHRQNNEAERLLLAGVEIPEPVFFCTIEPPSLSKQPDLEHALKCLQREDPSLKVRLDPDSGQTVLCGMGELHIEIIHDRIKREYGLETYLGPLQVAYRETILNSVRATDTLDRTLGDKRHLVTVEVEARPIETSSVMPVIEFEYAESINEGLLKVSQEAIENGIHSACLQGPLLGSPIQDVAITLHSLTIHPGTSTTMISACVSRCVQKALKKADKQVLEPLMNLEVTVARDYLSPVLADLAQRRGNIQEIQTRQDNKVVIGFVPLAEIMGYSTVLRTLTSGSATFALELSTYQAMNPQDQNTLLNRRSGLT

SEQ ID NO: 893776 - protein, 386 aa, Homo sapiens
MYLPSPEERNYEFLERISRLLLPFADQHVEIPSLTAGNIALTVGLKHTATGDTIVSSKSSALAAARRAEREGEKKHRQNNEAERLLLAGVEIPEPVFFCTIEPPSLSKQPDLEHALKCLQREDPSLKVRLDPDSGQTVLCGMGELHIEIIHDRIKREYGLETYLGPLQVAYRETILNSVRATDTLDRTLGDKRHLVTVEVEARPIETSSVMPVIEFEYAESINEGLLKVSQEAIENGIHSACLQGPLLGSPIQDVAITLHSLTIHPGTSTTMISACVSRCVQKALKKADKQVLEPLMNLEVTVARDYLSPVLADLAQRRGNIQEIQTRQDNKVVIGFVPLAEIMGYSTVLRTLTSGSATFALELSTYQAMNPQDQNTLLNRRSGLT

SEQ ID NO: 893777 - protein, 245 aa, Homo sapiens
MGELHIEIIHDRIKREYGLETYLGPLQVAYRETILNSVRATDTLDRTLGDKRHLVTVEVEARPIETSSVMPVIEFEYAESINEGLLKVSQEAIENGIHSACLQGPLLGSPIQDVAITLHSLTIHPGTSTTMISACVSRCVQKALKKADKQVLEPLMNLEVTVARDYLSPVLADLAQRRGNIQEIQTRQDNKVVIGFVPLAEIMGYSTVLRTLTSGSATFALELSTYQAMNPQDQNTLLNRRSGLT

SEQ ID NO: 893778 - protein, 466 aa, Homo sapiens
MLTNLRIFAMSHQTIPSVYINNICCYKIRASLKRLKPHVPLGRNCSSLPGLIGNDIKSLHSIINPPIAKIRNIGIMAHIDAGKTTTTERILYYSGYTRSLGDVDDGDTVTDFMAQERERGITIQSAAVTFDWKGYRVNLIDTPGHVDFTLEVERCLRVLDGAVAVFDASAGVEAQTLTVWRQADKHNIPRICFLNKMDKTGASFKYAVESIREKLKAKPLLLQLPIGEAKTFKGVVDVVMKEKLLWNCNSNDGKDFERKPLLEMNDPELLKETTEARNALIEQVADLDDEFADLVLEEFSENFDLLPAEKLQTAIHRVTLAQTAVPVLCGSALKNKGIQPLLDAVTMYLPSPEERNYEFLERISRLLLPFADQHVEIPSLTAGNIALTVGLKHTATGDTIVSSKSSALAAARRAEREGEKKHRQNNEAERLLLAGVEIPEPVFFCTIEPPSLSKQPGINGLSVSTN

SEQ ID NO: 893779 - protein, 288 aa, Homo sapiens
MLTNLRIFAMSHQTIPSVYINNICCYKIRASLKRLKPHVPLGRNCSSLPGLIGNDIKSLHSIINPPIAKIRNIGIMAHIDAGKTTTTERILYYSGYTRSLGDVDDGDTVTDFMAQERERGITIQSAAVTFDWKGYRVNLIDTPGHVDFTLEVERCLRVLDGAVAVFDASAGVEAQTLTVWRQADKHNIPRICFLNKMDKTGASFKYAVESIREKLKAKPLLLQLPIGEAKTFKGVVDVVMKEKLLWNCNSNDGKDFERKPLLEMNDPELLKETTEARNALIEQVKYNE

SEQ ID NO: 893780 - protein, 176 aa, Homo sapiens
MPVIEFEYAESINEGLLKVSQEAIENGIHSACLQGPLLGSPIQDVAITLHSLTIHPGTSTTMISACVSRCVQKALKKADKQVLEPLMNLEVTVARDYLSPVLADLAQRRGNIQEIQTRQDNKVVIGFVPLAEIMGYSTVLRTLTSGSATFALELSTYQAMNPQDQNTLLNRRSGLT

SEQ ID NO: 893781 - protein, 204 aa, Homo sapiens
MLTNLRIFAMSHQTIPSVYINNICCYKIRASLKRLKPHVPLGRNCSSLPGLIGNDIKSLHSIINPPIAKIRNIGIMAHIDAGKTTTTERILYYSGYTRSLGDVDDGDTVTDFMAQERERGITIQSAAVTFDWKGYRVNLIDTPGHVDFTLEVERCLRVLDGAVAVFDASAGVEAQTLTVWRQADKHNIPRICFLNKMDKTGARL

SEQ ID NO: 893782 - protein, 211 aa, Homo sapiens
MLTNLRIFAMSHQTIPSVYINNICCYKIRASLKRLKPHVPLGRNCSSLPGLIGNDIKSLHSIINPPIAKIRNIGIMAHIDAGKTTTTERILYYSGYTRSLGDVDDGDTVTDFMAQERERGITIQSAAVTFDWKGYRVNLIDTPGHVDFTLEVERCLRVLDGAVAVFDASAGVEAQTLTVWRQADKHNIPRICFLNKMDKTGASCSSMKLLL

SEQ ID NO: 893783 - protein, 110 aa, Homo sapiens
TARANKITVRFHSDQSYTDTGFLAEYLSYDSSDREMNIVGRRAGGGLHRMFCPPCISLASCFADSYCGERSQFVVTSNSNKITVRFHSDQSYTDTGFLAEYLSYDSSDRE

SEQ ID NO: 893784 - protein, 855 aa, Homo sapiens [sequence omitted]

SEQ ID NO: 893785 - protein, 757 aa, Homo sapiens
MGSDRARKGGGGPKDFGAGLKYNSRHEKVNGLEEGVEFLPVNNVKKVEKHGPGRWVVLAAVLIGLLLVLLGIGFLVWHLQYRDVRVQKVFNGYMRITNENFVDAYENSNSTEFVSLASKVKDALKLLYSGVPFLGPYHKESAVTAFSEGSVIAYYWSEFSIPQHLVEEAERVMAEERVVMLPPRARSLKSFVVTSVVAFPTDSKTVQRTQDNSCSFGLHARGVELMRFTTPGFPDSPYPAHARCQWALRGDADSVLSLTFRSFDLASCDERGSDLVTVYNTLSPMEPHALVQLCGTYPPSYNLTFHSSQNVLLITLITNTERRHPGFEATFFQLPRMSSCGGRLRKAQGTFNSPYYPGHYPPNIDCTWNIEVPNNQHVKVRFKFFYLLEPGVPAGTCPKDYVEINGEKYCGERSQFVVTSNSNKITVRFHSDQSYTDTGFLAEYLSYDSSDPCPGQFTCRTGRCIRKELRCDGWADCTDHSDELNCSCDAGHQFTCKNKFCKPLFWVCDSVNDCGDNSDEQGCSCPAQTFRCSNGKCLSKSQQCNGKDDCGDGSDEASCPKVNVVTCTKHTYRCLNGLCLSKGNPECDGKEDCSDGSDEKDCDCGLRSFTRQARVVGGTDADEGEWPWQVSLHALGQGHICGASLISPNWLVSAAHCYIDDRGFRYSDPTQWTAFLGLHDQSQRSAPGVQERRLKRIISHPFFNDFTFDYDIALLELEKPAEYSSMVRPICLPDASHVFPAGKAIWVTGWGHTQYGG

SEQ ID NO: 893786 - protein, 462 aa, Homo sapiens
MLPCAFNVRWVLAWVYCGERSQFVVTSNSNKITVRFHSDQSYTDTGFLAEYLSYDSSDPCPGQFTCRTGRCIRKELRCDGWADCTDHSDELNCSCDAGHQFTCKNKFCKPLFWVCDSVNDCGDNSDEQGCSCPAQTFRCSNGKCLSKSQQCNGKDDCGDGSDEASCPKVNVVTCTKHTYRCLNGLCLSKGNPECDGKEDCSDGSDEKDCDCGLRSFTRQARVVGGTDADEGEWPWQVSLHALGQGHICGASLISPNWLVSAAHCYIDDRGFRYSDPTQWTAFLGLHDQSQRSAPGVQERRLKRIISHPFFNDFTFDYDIALLELEKPAEYSSMVRPICLPDASHVFPAGKAIWVTGWGHTQYGGTGALILQKGEIRVINQTTCENLLPQQITPRMMCVGFLSGGVDSCQGDSGGPLSSVEADGRIFQAGVVSWGDGCAQRNKPGVYTRLPLFRDWIKENTGV

SEQ ID NO: 893787 - protein, 855 aa, Homo sapiens [sequence omitted]

SEQ ID NO: 893788 - protein, 130 aa, Homo sapiens
  misc_feature (10)..(10): Xaa can be any naturally occurring amino acid
  misc_feature (17)..(17): Xaa can be any naturally occurring amino acid
VVGLPQRRRXTSCRSRXTPRMMCVTGETAALRGTSQACTQGSLCFGTGSKRTLGYRGRGHPNVYTCGATHRPPQCARLQAGDWTADCTSAPRTYTVNSISRAPNLPRKPLASSASKVELGGRRGGHWWFY

SEQ ID NO: 893789 - protein, 601 aa, Homo sapiens
MGSDRARKGGGGPKDFGAGLKYNSRHEKVNGLEEGVEFLPVNNVKKVEKHGPGRWVVLAAVLIGLLLVLLGIGFLVWHLQYRDVRVQKVFNGYMRITNENFVDAYENSNSTEFVSLASKVKDALKLLYSGVPFLGPYHKESAVTAFSEGSVIAYYWSEFSIPQHLVEEAERVMAEERVVMLPPRARSLKSFVVTSVVAFPTDSKTVQRTQDNSCSFGLHARGVELMRFTTPGFPDSPYPAHARCQWALRGDADSVLSLTFRSFDLASCDERGSDLVTVYNTLSPMEPHALVQLCGTYPPSYNLTFHSSQNVLLITLITNTERRHPGFEATFFQLPRMSSCGGRLRKAQGTFNSPYYPGHYPPNIDCTWNIEVPNNQHVKVRFKFFYLLEPGVPAGTCPKDYVEINGEKYCGERSQFVVTSNSNKITVRFHSSQNVLLITLITNSCSFGLHARGVELMRFTTPGFPDSPYPAHARCQWALRGDADSVLSLTFRSFDLASCDERGSDLVTVYNTLSPMEPHALVQLCGTYPPSYNLTFHSSQNVLLVTLITNTGEARTLARLGHWRGQDTGEARTLARLGHWRGQDTGEARTLARARTLARLG

SEQ ID NO: 893790 - protein, 92 aa, Homo sapiens
MTLPSKQPGSQPRPALSPGTGALILQKGEIRVINQTTCENLLPQQITPRMMCVGFLSGGVDSCQVAPGAGGRQVGPGRGGTGDSRQGLSPPR

SEQ ID NO: 893791 - protein, 580 aa, Homo sapiens
QLGPTPPESMEPHALVQLCGTYPPSYNLTFHSSQNVLLITLITNTERRHPGFEATFFQLPRMSSCGGRLRKAQGTFNSPYYPGHYPPNIDCTWNIEVPNNQHVKVRFKFFYLLEPGVPAGTCPKDYVEINGEKYCGERSQFVVTSNSNKITVRFHSDQSYTDTGFLAEYLSYDSSDPCPGQFTCRTGRCIRKELRCDGWADCTDHSDELNCSCDAGHQFTCKNKFCKPLFWVCDSVNDCGDNSDEQGCSCPAQTFRCSNGKCLSKSQQCNGKDDCGDGSDEASCPKVNVVTCTKHTYRCLNGLCLSKGNPECDGKEDCSDGSDEKDCDCGLRSFTRQARVVGGTDADEGEWPWQVSLHALGQGHICGASLISPNWLVSAAHCYIDDRGFRYSDPTQWTAFLGLHDQSQRSAPGVQERRLKRIISHPFFNDFTFDYDIALLELEKPAEYSSMVRPICLPDASHVFPAGKAIWVTGWGHTQYGGTGALILQKGEIRVINQTTCENLLPQQITPRMMCVGFLSGGVDSCQGDSGGPLSSVEADGRIFQAGVVSWGDGCAQRNKPGVYTRLPLFRDWIKENTGV

SEQ ID NO: 893792 - protein, 835 aa, Homo sapiens
MGSDRARKGGGGPKDFGAGLKYNSRHEKVNGLEEGVEFLPVNNVKKVEKHGPGRWVVLAAVLIGLLLVLLGIGFLVWHLQYRDVRVQKVFNGYMRITNENFVDAYENSNSTEFVSLASKVKDALKLLYSGVPFLGPYHKESAVTAFSEGSVIAYYWSEFSIPQHLVEEAERVMAEERVVMLPPRARSLKSFVVTSVVAFPTDSKTVQRTQDNSCSFGLHARGVELMRFTTPGFPDSPYPAHARCQWALRGDADSVLSLTFRSFDLASCDERGSDLVTVYNTLSPMEPHALVQLCGTYPPSYNLTFHSSQNVLLITLITNTERRHPGFEATFFQLPRMSSCGGRLRKAQGTFNSPYYPGHYPPNIDCTWNIEVPNNQHVKVRFKFFYLLEPGVPAGTCPKDYVEINGEKYCGERSQFVVTSNSNKITVRFHSDQSYTDTGFLAEYLSYDSSDPCPGQFTCRTGRCIRKELRCDGWADCTDHSDELNCSCDAGHQFTCKNKFCKPLFWVCDSVNDCGDNSDEQGCSCPAQTFRCSNGKCLSKSLNVVTCTKHTYRCLNGLCLSKGNPECDGKEDCSDGSDEKDCDCGLRSFTRQARVVGGTDADEGEWPWQVSLHALGQGHICGASLISPNWLVSAAHCYIDDRGFRYSDPTQWTAFLGLHDQSQRSAPGVQERRLKRIISHPFFNDFTFDYDIALLELEKPAEYSSMVRPICLPDASHVFPAGKAIWVTGWGHTQYGGTGALILQKGEIRVINQTTCENLLPQQITPRMMCVGFLSGGVDSCQGDSGGPLSSVEADGRIFQAGVVSWGDGCAQRNKPGVYTRLPLFRDWIKENTGV

SEQ ID NO: 893793 - protein, 855 aa, Homo sapiens [sequence omitted]

SEQ ID NO: 893794 - protein, 686 aa, Homo sapiens
MGSDRARKGGGGPKDFGAGLKYNSRHEKVNGLEEGVEFLPVNNVKKVEKHGPGRWVVLAAVLIGLLLVLLGIGFLVWHLQYRDVRVQKVFNGYMRITNENFVDAYENSNSTEFVSLASKVKDALKLLYSGVPFLGPYHKESAVTAFSEGSVIAYYWSEFSIPQHLVEEAERVMAEERVVMLPPRARSLKSFVVTSVVAFPTDSKTVQRTQDNSCSFGLHARGVELMRFTTPGFPDSPYPAHARCQWALRGDADSVLSLTFRSFDLASCDERGSDLVTVYNTLSPMEPHALVQLCGTYPPSYNLTFHSSQNVLLITLITNTERRHPGFEATFFQLPRMSSCGGRLRKAQGTFNSPYYPGHYPPNIDCTWNIEVPNNQHVKVRFKFFYLLEPGVPAGTCPKDYVEINGEKYCGERSQFVVTSNSNKITVRFHSDQSYTDTGFLAEYLSYDSSDPCPGQFTCRTGRCIRKELRCDGWADCTDHSDELNCSCDAGHQFTCKNKFCKPLFWVCDSVNDCGDNSDEQGCSCPAQTFRCSNGKCLSKSQQCNGKDDCGDGSDEASCPKVNVVTCTKHTYRCLNGLCLSKGNPECDGKEDCSDGSDEKDCDCGLRSFTRQARVVGGTDADEGEWPWQVSLHALGQGHICGASLISPNWLVSAAHCWLMNSNSSASSGPENPDLVSLLLKCGADV

SEQ ID NO: 893795 - protein, 471 aa, Homo sapiens
MGSDRARKGGGGPKDFGAGLKYNSRHEKVNGLEEGVEFLPVNNVKKVEKHGPGRWVVLAAVLIGLLLVLLGIGFLVWHLQYRDVRVQKVFNGYMRITNENFVDAYENSNSTEFVSLASKVKDALKLLYSGVPFLGPYHKESAVTAFSEGSVIAYYWSEFSIPQHLVEEAERVMAEERVVMLPPRARSLKSFVVTSVVAFPTDSKTVQRTQDNSCSFGLHARGVELMRFTTPGFPDSPYPAHARCQWALRGDADSVLSLTFRSFDLASCDERGSDLVTVYNTLSPMEPHALVQLCGTYPPSYNLTFHSSQNVLLITLITNTERRHPGFEATFFQLPRMSSCGGRLRKAQGTFNSPYYPGHYPPNIDCTWNIEVPNNQHVKVRFKFFYLLEPGVPAGTCPKDYVEINGEKYCGERSQFVVTSNSNKITVRFHSDQSYTDTGFLAEYLSYDSSDPCLGQCCVWRSSAAVTGVDL

SEQ ID NO: 893796 - protein, 67 aa, Homo sapiens
TGGSTDPTGGKGLKTQPPPPAPSWAEARLCISASPVCKEQRERSFGASSVKVVGLPDLGCGALGPRS

SEQ ID NO: 893797 - protein, 171 aa, Homo sapiens
AGGGASGEREGSRRKDKKGSGTGAYGGRSGTRRAGGCRMMRFMLLFSRQGKLRLQKWYLATSDKERKKMVRELMQVVLARKPKMCSFLEWRDLKVVYKRYASLYFCCAIEGQDNELITLELIHRYVELLDKYFGSVCELDIIFNFEKAYFILDEFLMGGDVQDTSTFPFSH

SEQ ID NO: 893798 - protein, 196 aa, Homo sapiens
AGGGASGEREGSRRKDKKGSGTGAYGGRSGTRRAGGCRMMRFMLLFSRQGKLRLQKWYLATSDKERKKMVRELMQVVLARKPKMCSFLEWRDLKVVYKRYASLYFCCAIEGQDNELITLELIHRYVELLDKYFGSVCELDIIFNFEKAYFILDEFLMGGDVQDTSKKSVLKAIEQADLLQEEDESPRSVLEEMGLA

SEQ ID NO: 893799 - protein, 196 aa, Homo sapiens; identical to SEQ ID NO: 893798

SEQ ID NO: 893800 - protein, 196 aa, Homo sapiens; identical to SEQ ID NO: 893798

SEQ ID NO: 893801 - protein, 196 aa, Homo sapiens; identical to SEQ ID NO: 893798

SEQ ID NO: 893802 - protein, 196 aa, Homo sapiens; identical to SEQ ID NO: 893798

SEQ ID NO: 893803 - protein, 154 aa, Homo sapiens
MLLFSRQGKLRLQKWYLATSDKERKKMVRELMQVVLARKPKMCSFLEWRDLKVVYKRYASLYFCCAIEGQDNELITLELIHRYVELLDKYFGSVCELDIIFNFEKAYFILDEFLMGGDVQDTSKKSVLKAIEQADLLQEEDESPRSVLEEMGLA

SEQ ID NO: 893804 - protein, 93 aa, Homo sapiens
SSHTLPKYLSKSSTYRWISSSVMSSETNTLAAVCELDIIFNFEKAYFILDEFLMGGDVQDTSKKSVLKAIEQADLLQEEDESPRSVLEEMGLA

SEQ ID NO: 893805 - protein, 254 aa, Homo sapiens
MVSWIISRLVVLIFGTLYPAYSSYKAVKTKNVKEYVKWMMYWIVFAFFTTAETLTDIVLSWFPFYFELKIAFVIWLLSPYTKGSSVLYRKFVHPTLSNKEKEIDEYITQARDKSYETMMRVGKRGLNLAANAAVTAAAKGQGVLSEKLRSFSMQDLTLIRDEDALPLQRPDGRLRPSPGSLLDTIEDLGDDPALSLRSSTNPADSRTEASEDDMGDKAPKRAKPIKKAPKAEPLASKTLKTRPKKKTSGGGDSA

SEQ ID NO: 893806 - protein, 327 aa, Homo sapiens
MVSWIISRLVVLIFGTLYPAYSSYKAVKTKNVKEYVKWMMYWIVFAFFTTAETLTDIVLSWFPFYFELKIAFVIWLLSPYTKGSSVLYRKFVHPTLSNKEKVCPHSQLTSQPAPSQGSPEPAASYRLALPVGPRAQSDLAGLPWPPGAGRGLCPGVNKGRAGPLLFSLPLQSHEEIDEYITQARDKSYETMMRVGKRGLNLAANAAVTAAAKGQGVLSEKLRSFSMQDLTLIRDEDALPLQRPDGRLRPSPGSLLDTIEDLGDDPALSLRSSTNPADSRTEASEDDMGDKAPKRAKPIKKAPKAEPLASKTLKTRPKKKTSGGGDSA

SEQ ID NO: 893807 - protein, 290 aa, Homo sapiens
PVLLDTGHLPTPCPVLCACPCPNRFPFYFELKIAFVIWLLSPYTKGSSVLYRKFVHPTLSNKEKVCPHSQLTSQPAPSQGSPEPAASYRLALPVGPRAQSDLAGLPWPPGAGRGLCPGVNKGRAGPLLFSLPLQSHEEIDEYITQARDKSYETMMRVGKRGLNLAANAAVTAAAKGQGVLSEKLRSFSMQDLTLIRDEDALPLQRPDGRLRPSPGSLLDTIEDLGDDPALSLRSSTNPADSRTEASEDDMGDKAPKRAKPIKKAPKAEPLASKTLKTRPKKKTSGGGDSA

SEQ ID NO: 893808 - protein, 254 aa, Homo sapiens; identical to SEQ ID NO: 893805

SEQ ID NO: 893809 - protein, 335 aa, Homo sapiens
TSPLTAALGAPLPPRRLLQRLLLLLRLLLPPPPPLGLRQLHPRPGRVPAPRRARPRHGVLDHLSPGGGLMRSWEGEATALAERPSNHACLPRLIFGTLYPAYSSYKAVKTKNVKEYVKWMMYWIVFAFFTTAETLTDIVLSWFPFYFELKIAFVIWLLSPYTKGSSVLYRKFVHPTLSNKEKEIDEYITQARDKSYETMMRVGKRGLNLAANAAVTAAAKGQGVLSEKLRSFSMQDLTLIRDEDALPLQRPDGRLRPSPGSLLDTIEDLGDDPALSLRSSTNPADSRTEASEDDMGDKAPKRAKPIKKAPKAEPLASKTLKTRPKKKTSGGGDSA

SEQ ID NO: 893810 - protein, 254 aa, Homo sapiens; identical to SEQ ID NO: 893805

SEQ ID NO: 893811 - protein, 355 aa, Homo sapiens
MVSWIISRLVVLIFGTLYPAYSSYKAVKTKNVKEYVKWMMYWIVFAFFTTAETLTDIVLSWFPFYFELKIAFVIWLLSPYTKGSSVLYRKFVHPTLSNKEKEIDEYITQARDKSYETMMRVGKRGLNLAANAAVTAAAKVRWGQAQTPRAPTLYKGPWPGPFASTLYSGLLETLGSCSWRLQSRLYCYLAESLGLSGHFPICPQRQSVALPQPSALSVWDWVRTVWGGHRAWGCCQHHGDGQGVLSEKLRSFSMQDLTLIRDEDALPLQRPDGRLRPSPGSLLDTIEDLGDDPALSLRSSTNPADSRTEASEDDMGDKAPKRAKPIKKAPKAEPLASKTLKTRPKKKTSGGGDSA

SEQ ID NO: 893812 - protein, 216 aa, Homo sapiens
MVSWIISRLVVLIFGTLYPAYSSYKAVKTKNVKEYVKWMMYWIVFAFFTTAETLTDIVLSWFPFYFELKIAFVIWLLSPYTKGSSVLYRKFVHPTLSNKEKGQGVLSEKLRSFSMQDLTLIRDEDALPLQRPDGRLRPSPGSLLDTIEDLGDDPALSLRSSTNPADSRTEASEDDMGDKAPKRAKPIKKAPKAEPLASKTLKTRPKKKTSGGGDSA

SEQ ID NO: 893813 - protein, 254 aa, Homo sapiens; identical to SEQ ID NO: 893805

SEQ ID NO: 893814 - protein, 254 aa, Homo sapiens; identical to SEQ ID NO: 893805

SEQ ID NO: 893815 - protein, 170 aa, Homo sapiens
MVSWIISRLVVLIFGTLYPAYSSYKAVKTKNVKEYVKWMMYWIVFAFFTTAETLTDIVLSWFPFYFELKIAFVIWLLSPYTKGSSVLYRKFVHPTLSNKEKEIDEYITQARDKSYETMMRVGKRGLNLAANAAVTAAAKVRWGQAQTPRAPTLYKGPWPGPFASTLYSGL

SEQ ID NO: 893816 - protein, 364 aa, Homo sapiens [sequence omitted]

SEQ ID NO: 893817 - protein, 134 aa, Homo sapiens [sequence omitted]

SEQ ID NO: 893818 - protein, 364 aa, Homo sapiens [sequence omitted]

SEQ ID NO: 893819 - protein, 364 aa, Homo sapiens [sequence omitted]

SEQ ID NO: 893820 - protein, 364 aa, Homo sapiens [sequence omitted]

SEQ ID NO: 893821 - protein, 364 aa, Homo sapiens [sequence omitted]

SEQ ID NO: 893822 - protein, 364 aa, Homo sapiens [sequence omitted]

SEQ ID NO: 893823 - protein, 593 aa, Homo sapiens
DSGGQWRGPRCPAVTKSWRHHLPPRVMAPLALHLLVLVPILLSLVASQDWKAERSQDPFEKCMQDPDYEQLLKVVTWGLNRTLKPQRVIVVGAGVAGLVAAKVLSDAGHKVTILEADNRIGGRIFTYRDQNTGWIGELGAMRMPSSHRILHKLCQGLGLNLTKFTQYDKNTWTEVHEVKLRNYVVEKVPEKLGYALRPQEKGHSPEDIYQMALNQALKDLKALGCRKAMKKFERHTLLEYLLGEGNLSRPAVQLLGDVMSEDGFFYLSFAEALRAHSCLSDRLQYSRIVGGWDLLPRALLSSLSGLVLLNAPVVAMTQGPHDVHVQIETSPPARNLKVLKADVVLLTASGPAVKRITFSPPLPRHMQEALRRLHYVPATKVFLSFRRPFWREEHIEGGHSNTDRPSRMIFYPPPREGALLLASYTWSDAAAAFAGLSREEALRLALDDVAALHGPVVRQLWDGTGVVKRWAEDQHSQGGFVVQPPALWQTEKDDWTVPYGRIYFAGEHTAYPHGWVETAVKSALRAAIKINSRKGPASDTASPEGHASDMEGQGHVHGVASSPSHDLAKEEGSHPPVQGQLSLQNTTHTRTSH

SEQ ID NO: 893824 - protein, 114 aa, Homo sapiens
MPNDDFCPGLTIKAMGAERAPQRQPCTLHLLVLVPILLSLVASQDWKAERSQDPFEKCMQDPDYEQLLKVVTWGLNRTLKPQRVIVVGAGVAGLVAAKVLSDAGHKVGSTACSL

SEQ ID NO: 893825 - protein, 589 aa, Homo sapiens
MPNDDFCPGLTIKAMGAERAPQRQPCTLHLLVLVPILLSLVASQDWKAERSQDPFEKCMQDPDYEQLLKVVTWGLNRTLKPQRVIVVGAGVAGLVAAKVLSDAGHKVTILEADNRIGGRIFTYRDQNTGWIGELGAMRMPSSHRILHKLCQGLGLNLTKFTQYDKNTWTEVHEVKLRNYVVEKVPEKLGYALRPQEKGHSPEDIYQMALNQALKDLKALGCRKAMKKFERHTLLEYLLGEGNLSRPAVQLLGDVMSEDGFFYLSFAEALRAHSCLSDRLQYSRIVGGWDLLPRALLSSLSGLVLLNAPVVAMTQGPHDVHVQIETSPPARNLKVLKADVVLLTASGPAVKRITFSPPLPRHMQEALRRLHYVPATKVFLSFRRPFWREEHIEGGHSNTDRPSRMIFYPPPREGALLLASYTWSDAAAAFAGLSREEALRLALDDVAALHGPVVRQLWDGTGVVKRWAEDQHSQGGFVVQPPALWQTEKDDWTVPYGRIYFAGEHTAYPHGWVETAVKSALRAAIKINSRKGPASDTASPEGHASDMEGQGHVHGVASSPSHDLAKEEGSHPPVQGQLSLQNTTHTRTSH

SEQ ID NO: 893826 - protein, 567 aa, Homo sapiens
MAPLALHLLVLVPILLSLVASQDWKAERSQDPFEKCMQDPDYEQLLKVVTWGLNRTLKPQRVIVVGAGVAGLVAAKVLSDAGHKVTILEADNRIGGRIFTYRDQNTGWIGELGAMRMPSSHRILHKLCQGLGLNLTKFTQYDKNTWTEVHEVKLRNYVVEKVPEKLGYALRPQEKGHSPEDIYQMALNQALKDLKALGCRKAMKKFERHTLLEYLLGEGNLSRPAVQLLGDVMSEDGFFYLSFAEALRAHSCLSDRLQYSRIVGGWDLLPRALLSSLSGLVLLNAPVVAMTQGPHDVHVQIETSPPARNLKVLKADVVLLTASGPAVKRITFSPPLPRHMQEALRRLHYVPATKVFLSFRRPFWREEHIEGGHSNTDRPSRMIFYPPPREGALLLASYTWSDAAAAFAGLSREEALRLALDDVAALHGPVVRQLWDGTGVVKRWAEDQHSQGGFVVQPPALWQTEKDDWTVPYGRIYFAGEHTAYPHGWVETAVKSALRAAIKINSRKGPASDTASPEGHASDMEGQGHVHGVASSPSHDLAKEEGSHPPVQGQLSLQNTTHTRTSH

SEQ ID NO: 893827 - protein, 95 aa, Homo sapiens
PRSRLPTPQGSLKRATSCERAGKAVGEEVSGYSLHGCSKERRRRPRLKKEGGSGERRRETHLVPSTSGHPSWSSTFIPSVAVRRLNQGPEKVEES

SEQ ID NO: 893828 - protein, 528 aa, Homo sapiens
GGGACSLCSGSPPAPAPPASPARHVTRTARGHLEGGSRAPPLLQAVFLQIKNMVKLIHTLADHGDDVNCCAFSFSLLATCSLDKTIRLYSLRDFTELPHSPLKFHTYAVHCCCFSPSGHILASCSTDGTTVLWNTENGQMLAVMEQPSGSPVRVCQFSPDSTCLASGAADGTVVLWNAQSYKLYRCGSVKDGSLAACAFSPNGSFFVTGSSCGDLTVWDDKMRCLHSEKAHDLGITCCDFSSQPVSDGEQGLQFFRLASCGQDCQVKIWIVSFTHILGFELKYKSTLSGHCAPVLACAFSHDGQMLVSGSVDKSVIVYDTNTENILHTLTQHTRYVTTCAFAPNTLLLATGSMDKTVNIWQFDLETLCQARSTEHQLKQFTEDWSEEDVSTWLCAQDLKDLVGIFKMNNIDGKELLNLTKESLADDLKIESLGLRSKVLRKIEELRTKVKSLSSGIPDEFICPITRELMKDPVIASDGYSYEKEAMENWISKKKRTSPMTNLVLPSAVLTPNRTLKMAINRWLETHQK

SEQ ID NO: 893829 - protein, 389 aa, Homo sapiens
MLAVMEQPSGSPVRVCQFSPDSTCLASGAADGTVVLWNAQSYKLYRCGSVKDGSLAACAFSPNGSFFVTGSSCGDLTVWDDKMRCLHSEKAHDLGITCCDFSSQPVSDGEQGLQFFRLASCGQDCQVKIWIVSFTHILGFELKYKSTLSGHCAPVLACAFSHDGQMLVSGSVDKSVIVYDTNTENILHTLTQHTRYVTTCAFAPNTLLLATGSMDKTVNIWQFDLETLCQARSTEHQLKQFTEDWSEEDVSTWLCAQDLKDLVGIFKMNNIDGKELLNLTKESLADDLKIESLGLRSKVLRKIEELRTKVKSLSSGIPDEFICPITRELMKDPVIASDGYSYEKEAMENWISKKKRTSPMTNLVLPSAVLTPNRTLKMAINRWLETHQK

SEQ ID NO: 893830 - protein, 528 aa, Homo sapiens; identical to SEQ ID NO: 893828

SEQ ID NO: 893831 - protein, 481 aa, Homo sapiens
GGGACSLCSGSPPAPAPPASPARHVTRTARGHLEGGSRAPPLLQAVFLQIKNMVKLIHTLADHGDDVNCCAFSFSLLATCSLDKTIRLYSLRDFTELPHSPLKFHTYAVHCCCFSPSGHILASCSTDGTTVLWNTENGQMLAVMEQPSGSPVRVCQFSPDSTCLASGAADGTVVLWNAQSYKLYRCGSVKDGSLAACAFSPNGSFFVTGSSCGDLTVWDDKMRCLHSEKAHDLGITCCDFSSQPVSDGEQGLQFFRLASCGQDCQVKIWIVSFTHILGFELKYKSTLSGHCAPVLACAFSHDGQMLVSGSVDKSVIVYDTNTENILHTLTQHTRYVTTCAFAPNTLLLATGSMDKTVNIWQFDLETLCQARSTEHQLKQFTEDWSEEDVSTWLCAQDLKDLVGIFKMNNIDGKELLNLTKESLADDLKIDGYSYEKEAMENWISKKKRTSPMTNLVLPSAVLTPNRTLKMAINRWLETHQK

SEQ ID NO: 893832 - protein, 497 aa, Homo sapiens
GGGACSLCSGSPPAPAPPASPARHVTRTARGHLEGGSRAPPLLQAVFLQIKNMVKLIHTLADHGDDVNCCAFSFSLLATCSLDKTIRLYSLRDFTELPHSPLKFHTYAVHCCCFSPSGHILASCSTDGTTVLWNTENGQMLAVMEQPSGSPVRVCQFSPDSTCLASGAADGTVVLWNAQSYKLYRCGSVKDGSLAACAFSPNGSFFVTGSSCGDLTVWDDKMRCLHSEKAHDLGITCCDFSSQPVSGFELKYKSTLSGHCAPVLACAFSHDGQMLVSGSVDKSVIVYDTNTENILHTLTQHTRYVTTCAFAPNTLLLATGSMDKTVNIWQFDLETLCQARSTEHQLKQFTEDWSEEDVSTWLCAQDLKDLVGIFKMNNIDGKELLNLTKESLADDLKIESLGLRSKVLRKIEELRTKVKSLSSGIPDEFICPITRELMKDPVIASDGYSYEKEAMENWISKKKRTSPMTNLVLPSAVLTPNRTLKMAINRWLETHQK

SEQ ID NO: 893833 - protein, 528 aa, Homo sapiens; identical to SEQ ID NO: 893828

SEQ ID NO: 893834 - protein, 80 aa, Homo sapiens
SHGQEAERATCAAKDSRLAAAEEASVESLVPPALRGLVRPHKKRKKLSSSCRKAKRAKSQNPLRSFKHKGKKFRPTAKPS

SEQ ID NO: 893835 - protein, 573 aa, Homo sapiens
MVVALLPLASVAFFLQRVRAALLSSAMEDSEALGFEHMGLDPRLLQAVTDLGWSRPTLIQEKAIPLALEGKDLLARARTGSGKTAAYAIPMLQLLLHRKATGPVVEQAVRGLVLVPTKELARQAQSMIQQLATYCARDVRVANVSAAEDSVSQRAVLMEKPDVVVGTPSRILSHLQQDSLKLRDSLELLVVDEADLLFSFGFEEELKSLLCHLPRIYQAFLMSATFNEDVQALKELILHNPVTLKLQESQLPGPDQLQQFQVVCETEEDKFLLLYALLKLSLIRGKSLLFVNTLERSYRLRLFLEQFSIPTCVLNGELPLRSRCHIISQFNQGFYDCVIATDAEVLGAPVKGKRRGRGPKGDKASDPEAGVARGIDFHHVSAVLNFDLPPTPEAYIHRAGRTARANNPGIVLTFVLPTEQFHLGKIEELLSGENRGPILLPYQFRMEEIEGFRYRCRDAMRSVTKQAIREARLKEIKEELLHSEKLKTYFEDNPRDLQLLRHDLPLHPAVVKPHLGHVPDYLVPPALRGLVRPHKKRKKLSSSCRKAKRAKSQNPLRSFKHKGKKFRPTAKPS

SEQ ID NO: 893836 - protein, 547 aa, Homo sapiens
MEDSEALGFEHMGLDPRLLQAVTDLGWSRPTLIQEKAIPLALEGKDLLARARTGSGKTAAYAIPMLQLLLHRKATGPVVEQAVRGLVLVPTKELARQAQSMIQQLATYCARDVRVANVSAAEDSVSQRAVLMEKPDVVVGTPSRILSHLQQDSLKLRDSLELLVVDEADLLFSFGFEEELKSLLCHLPRIYQAFLMSATFNEDVQALKELILHNPVTLKLQESQLPGPDQLQQFQVVCETEEDKFLLLYALLKLSLIRGKSLLFVNTLERSYRLRLFLEQFSIPTCVLNGELPLRSRCHIISQFNQGFYDCVIATDAEVLGAPVKGKRRGRGPKGDKASDPEAGVARGIDFHHVSAVLNFDLPPTPEAYIHRAGRTARANNPGIVLTFVLPTEQFHLGKIEELLSGENRGPILLPYQFRMEEIEGFRYRCRDAMRSVTKQAIREARLKEIKEELLHSEKLKTYFEDNPRDLQLLRHDLPLHPAVVKPHLGHVPDYLVPPALRGLVRPHKKRKKLSSSCRKAKRAKSQNPLRSFKHKGKKFRPTAKPS

SEQ ID NO: 893837 - protein, 547 aa, Homo sapiens; identical to SEQ ID NO: 893836

SEQ ID NO: 893838 - protein, 547 aa, Homo sapiens; identical to SEQ ID NO: 893836

SEQ ID NO: 893839 - protein, 573 aa, Homo sapiens; identical to SEQ ID NO: 893835

SEQ ID NO: 893840 - protein, 573 aa, Homo sapiens; identical to SEQ ID NO: 893835

SEQ ID NO: 893841 - protein, 573 aa, Homo sapiens; identical to SEQ ID NO: 893835

SEQ ID NO: 893842 - protein, 436 aa, Homo sapiens
MVVALLPLASVAFFLQRVRAALLSSAMEDSEALGFEHMGLDPRLLQAVTDLGWSRPTLIQEKAIPLALEGKDLLARARTGSGKTAAYAIPMLQLLLHRKATGPVVEQAVRGLVLVPTKELARQAQSMIQQLATYCARDVRVANVSAAEDSVSQRAVLMEKPDVVVGTPSRILSHLQQDSLKLRDSLELLVVDEADLLFSFGFEEELKSLLCHLPRIYQAFLMSATFNEDVQALKELILHNPVTLKLQESQLPGPDQLQQFQVVCETEEDKFLLLYALLKLSLIRGKSLLFVNTLERSYRLRLFLEQFSIPTCVLNGELPLRSRCHIISQFNQGFYDCVIATDAEVLGAPVKGKRRGRGPKGDKASDPEAGVARGIDFHHVSAVLNFDLPPTPEAYIHRAGRTARANNPGIVLTFVLPTEQFHLGKIEGDQGRASAF

SEQ ID NO: 893843 - protein, 363 aa, Homo sapiens
MVVALLPLASVAFFLQRVRAALLSSAMEDSEALGFEHMGLDPRLLQAVTDLGWSRPTLIQEKAIPLALEGKDLLARARTGSGKTAAYAIPMLQLLLHRKATGPVVEQAVRGLVLVPTKELARQAQSMIQQLATYCARDVRVANVSAAEDSVSQRAVLMEKPDVVVGTPSRILSHLQQDSLKLRDSLELLVVDEADLLFSFGFEEELKSLLCHLPRIYQAFLMSATFNEDVQALKELILHNPVTLKLQESQLPGPDQLQQFQVVCETEEDKFLLLYALLKLSLIRGKSLLFVNTLERSYRLRLFLEQFSIPTCVLNGELPLRSRCHIISQFNQDFHHVSAVLNFDLPPTPEAYIHRAGRMPCAQ

SEQ ID NO: 893844 - protein, 410 aa, Homo sapiens
MVVALLPLASVAFFLQRVRAALLSSAMEDSEALGFEHMGLDPRLLQAVTDLGWSRPTLIQEKAIPLALEGKDLLARARTGSGKTAAYAIPMLQLLLHRKATGPVVEQAVRGLVLVPTKELARQAQSMIQQLATYCARDVRVANVSAAEDSVSQRAVLMEKPDVVVGTPSRILSHLQQDSLKLRDSLELLVVDEADLLFSFGFEEELKSLLCHLPRIYQAFLMSATFNEDVQALKELILHNPVTLKLQESQLPGPDQLQQFQVVCETEEDKFLLLYALLKLSLIRGKSLLFVNTLERSYRLRLFLEQFSIPTCVLNGELPLRSRCHIISQFNQGFYDCVIATDAEVLGAPVKGKRRGRGPKGDKASDPEAGVARGIDFHHVSAVLNFDLPPTPEAYIHRAGSSVTAQASAW

SEQ ID NO: 893845 - protein, 227 aa, Homo sapiens
MAGVGAGPLRAMGRQALLLLALCATGAQGLYFHIGETEKRCFIEEIPDETMVIGNYRTQMWDKQKEVFLPSTPGLGMHVEVKDPDGKVVLSRQYGSEGRFTFTSHTPGDHQICLHSNSTRMALFAGGKLRVHLDIQVGEHANNYPEIAAKDKLTELQLRARQLLDQVEQIQKEQDYQRYREERFRLTSESTNQRVLWWSIAQTVILILTGIWQMRHLKSFFEAKKLV

SEQ ID NO: 893846 - protein, 227 aa, Homo sapiens; identical to SEQ ID NO: 893845

SEQ ID NO: 893847 - protein, 227 aa, Homo sapiens; identical to SEQ ID NO: 893845

SEQ ID NO: 893848 - protein, 227 aa, Homo sapiens; identical to SEQ ID NO: 893845

SEQ ID NO: 893849 - protein, 227 aa, Homo sapiens; identical to SEQ ID NO: 893845

SEQ ID NO: 893850 - protein, 227 aa, Homo sapiens; identical to SEQ ID NO: 893845

SEQ ID NO: 893851 - protein, 227 aa, Homo sapiens; identical to SEQ ID NO: 893845

SEQ ID NO: 893852 - protein, 227 aa, Homo sapiens; identical to SEQ ID NO: 893845

SEQ ID NO: 893853 - protein, 186 aa, Homo sapiens
MAGVGAGPLRAMGRQALLLLALCATGAQGLYFHIGETEKRCFIEEIPDETMVIGNYRTQMWDKQKEVFLPSTPGLGMHVEVKDPDGKVVLSRQYGSEGRFTFTSHTPGDHQICLHSNSTRMALFAGGKLRVHLDIQVGEHANNYPEIAAKDKLTELQLRARQLLDQVEQIQKEQDYQRASAYLLVI

SEQ ID NO: 893854 - protein, 71 aa, Homo sapiens
RLLCNYNSHLYNLICRGVFNLPPALRGLVRPHKKRKKLSSSCRKAKRAKSQNPLRSFKHKGKKFRPTAKPS

SEQ ID NO: 893855 - protein, 186 aa, Homo sapiens; identical to SEQ ID NO: 893853

SEQ ID NO: 893856 - protein, 211 aa, Homo sapiens
MAGVGAGPLRAMGRQALLLLALCATGAQGLYFHIGETEKRCFIEEIPDETMVIGNYRTQMWDKQKEVFLPSTPGLGMHVEVKDPDGKVVLSRQYGSEGRFTFTSHTPGDHQICLHSNSTRMALFAGGKLRVHLDIQVGEHANNYPEIAAKDKLTELQLRARQLLDQVEQIQKEQDYQRYREERFRLTSESTNQRVLWWSIAQTHTQPYTHS

SEQ ID NO: 893857 - protein, 111 aa, Homo sapiens
AGPLRAMGRQALLLLALCATGAQGLYFHIGETEKRCFIEEIPDETMVIGQGAEGGEALCTQLSPRRRSLLPSPAGSLAPPVPSLRVPRGRQAPCLELRAARRRGPGGEAAH

SEQ ID NO: 893858 - protein, 103 aa, Homo sapiens
NYRTQMWDKQKEVFLPSTPGLGMHVEVKDPDGKVRLALAHAAVLQWSSRGVLSTAWRRPQGTGTCTWRACGIKVGPSLTYVAGGAVPAVRLGGPLHVHLPHAR

SEQ ID NO: 893859 - protein, 1255 aa, Homo sapiens
MALSPGANLVFHEDPKMTPSPPSCGAPGLGSGTIPQPHPDMAQVPMLNLLPSPGLALVPDLNDSLSPVSGEASGLVSENTPRPDDSRAIAPASLQITSSCSGEALDLDSKDVSRPDSQGRLCPASNPILSPSSTEAPRLSSGNHPQSNSEDAFKCLSSKIFKLGQRNSNPSRHELNPFIRHRSREGLVLGHCISRPSSKALLIPTSNSSLDLDSNPLLNMGSRNTSKLNLNVAPDSHGTLIPDTNETITLASHNISESVSKGAFSTTWSTSSKETMNVASSGHSRSDLSVTITQASYVTLIPGSSDGISLHSSTHGPNSTISPPSCMTLILGSNETLSLDSSLLFSDTSTLTLSSQQDDAKDNSIHTVPLEENLESWSEMASIKVGQFPLGFPISNPAGKDAVTLQGIPEGAFDEVTSCLVKVPEKTEGGNNMALVENVTTLQKSQDLLEAEGEKKTMIKKIIHTQPTLGMRERSELVNVCAHSVFSLPSVQAMQEKDEAKAETIQALYHQTLEALQTLLKALFIEDPTPAGLKSILEALGPWMNSGKAHERARAVNTNVSVLNHMLLTLPFFIEYKQMPLGFPALGLLLGRLILRIGDPDEEIGCEALDGIIILYTILELQKRARDKEETNKKELYESNKHFLGPYNPVSPCQNILRVIEEFGDFLGPQQIKDLLLAALEGLKGSSEAPGKDSREMMQLASEVMLSSVLEWYRHRALEVIPEIMQGIYMQLSHIQEPRARQVALLPVSLLASSFMTEVVVALLMLPPPTEQAASGLCELLSVNSCMGRVRRIYPQLLLALLIQVHYHIGLNLPGCVAPPKDTKKGAQPSPFVPVRWVVKVVKTLLLRMGCSYETTFLEDQGGWELMEQVESHHRGVALLARAMVQYSCQELCRILYLLIPLLERGDEKHRITATAFFVELLQMEQVRRIPEEYSLGRMAEGLSHHDPIMKVLSIRGLVILARRSEKTAKVKALLPSMVKGLKNMDGMLVVEAVHNLKAVFKGRDQKLMDSAVYVEMLQILLPHFSDAREDVRSSCINLYGKVVQKLRAPRTQAMEEQLVSTLVPLLLTMQEGNSKVSQKCVKTLLRCSYFMAWELPKRAYSRKPWDNQQQTVAKICKCLVNTHRDSAFIFLSQSLEYAKNSRASLRKCSVMFIGSLVPCMESIMTEDRLNEVKAALDNLRHDPEASVCIYAAQVQDHILASCWQNSWLPHGNSWVCYSATTHRWSPSCENLPTSHQRRSWIMQALGSWKMSLKK

SEQ ID NO: 893860 - protein, 1255 aa, Homo sapiens; identical to SEQ ID NO: 893859

SEQ ID NO: 893861 - protein, 1301 aa, Homo sapiens
MALSPGANLVFHEDPKMTPSPPSCGAPGLGSGTIPQPHPDMAQVPMLNLLPSPGLALVPDLNDSLSPVSGEASGLVSENTPRPDDSRAIAPASLQITSSCSGEALDLDSKDVSRPDSQGRLCPASNPILSPSSTEAPRLSSGNHPQSNSEDAFKCLSSKIFKLGQRNSNPSRHELNPFIRHRSREGLVLGHCISRPSSKALLIPTSNSSLDLDSNPLLNMGSRNTSKLNLNVAPDSHGTLIPDTNETITLASHNISESVSKGAFSTTWSTSSKETMNVASSGHSRSDLSVTITQASYVTLIPGSSDGISLHSSTHGPNSTISPPSCMTLILGSNETLSLDSSLLFSDTSTLTLSSQQDDAKDNSIHTVPLEENLESWSEMASIKVGQFPLGFPISNPAGKDAVTLQGIPEGAFDEVTSCLVKVPEKTEGGNNMALVENVTTLQKSQDLLEAEGEKKTMIKKIIHTQPTLGMRERSELVNVCAHSVFSLPSVQAMQEKDEAKAETIQALYHQTLEALQTLLKALFIEDPTPAGLKSILEALGPWMNSGKAHERARAVNTNVSVLNHMLLTLPFFIEYKQMPLGFPALGLLLGRLILRIGDPDEEIGCEALDGIIILYTILELQKRARDKEETNKKELYESNKHFLGPYNPVSPCQNILRVIEEFGDFLGPQQIKDLLLAALEGLKGSSEAPGKDSREMMQLASEVMLSSVLEWYRHRALEVIPEIMQGIYMQLSHIQEPRARQVALLPVSLLASSFMTEVVVALLMCPLPLNSNGAEMWRQLILCKPSCDVRDLLDLLLGSLKEKPVTKEGRASIVPLAAASGLCELLSVNSCMGRVRRIYPQLLLALLIQVHYHIGLNLPGCVAPPKDTKKGAQPSPFVPVRWVVKVVKTLLLRMGCSYETTFLEDQGGWELMEQVESHHRGVALLARAMVQYSCQELCRILYLLIPLLERGDEKHRITATAFFVELLQMEQVRRIPEEYSLGRMAEGLSHHDPIMKVLSIRGLVILARRSEKTAKVKALLPSMVKGLKNMDGMLVVEAVHNLKAVFKGRDQKLMDSAVYVEMLQILLPHFSDAREDVRSSCINLYGKVVQKLRAPRTQAMEEQLVSTLVPLLLTMQEGNSKVSQKCVKTLLRCSYFMAWELPKRAYSRKPWDNQQQTVAKICKCLVNTHRDSAFIFLSQSLEYAKNSRASLRKCSVMFIGSLVPCMESIMTEDRLNEVKAALDNLRHDPEASVCIYAAQVQDHILASCWQNSWLPHGNSWVCYSATTHRWSPSCENLPTSHQRRSWIMQALGSWKMSLKK

SEQ ID NO: 893862 - protein, 1366 aa, Homo sapiens
MALSPGANLVFHEDPKMTPSPPSCGAPGLGSGTIPQPHPDMAQVPMLNLLPSPGLALVPDLNDSLSPVSGEASGLVSENTPRPDDSRAIAPASLQITSSCSGEALDLDSKDVSRPDSQGRLCPASNPILSPSSTEAPRLSSGNHPQSNSEDAFKCLSSKIFKLGQRNSNPSRHELNPFIRHRSREGLVLGHCISRPSSKALLIPTSNSSLDLDSNPLLNMGSRNTSKLNLNVAPDSHGTLIPDTNETITLASHNISESVSKGAFSTTWSTSSKETMNVASSGHSRSDLSVTITQASYVTLIPGSSDGISLHSSTHGPNSTISPPSCMTLILGSNETLSLDSSLLFSDTSTLTLSSQQDDAKDNSIHTVPLEENLESWSEMASIKVGQFPLGFPISNPAGKDAVTLQGIPEGAFDEVTSCLVKVPEKTEGGNNMALVENVTTLQKSQDLLEAEGEKKTMIKKIIHTQPTLGMRERSELVNVCAHSVFSLPSVQAMQEKDEAKAETIQALYHQTLEALQTLLKALFIEDPTPAGLKSILEALGPWMNSGKAHERARAVNTNVSVLNHMLLTLPFFIEYKQMPLGFPALGLLLGRLILRIGDPDEEIGCEALDGIIILYTILELQKRARDKEETNKKELYESNKHFLGPYNPVSPCQNILRVIEEFGDFLGPQQIKDLLLAALEGLKGSSEAPGKDSREMMQLASEVMLSSVLEWYRHRALEVIPEIMQGIYMQLSHIQEPRARQVALLPVSLLASSFMTEVVVALLMCPLPLNSNGAEMWRQLILCKPSCDVRDLLDLLLGSLKEKPVTKEGRASIVPLAAASGLCELLSVNSCMGRVRRIYPQLLLALLIQVHYHIGLNLPGCVAPPKDTKKGAQPSPFVPVRWVVKVVKTLLLRMGCSYETTFLEDQGGWELMEQVESHHRGVALLARAMVQYSCQELCRILYLLIPLLERGDEKHRITATAFFVEQPCEEGIVILMLRISWERQQQAVTGARSWRVTHSALPHGADGHQTGDFQQSVGFASLKLRAELSLLLQMEQVRRIPEEYSLGRMAEGLSHHDPIMKVLSIRGLVILARRSEKTAKVKALLPSMVKGLKNMDGMLVVEAVHNLKAVFKGRDQKLMDSAVYVEMLQILLPHFSDAREDVRSSCINLYGKVVQKLRAPRTQAMEEQLVSTLVPLLLTMQEGNSKVSQKCVKTLLRCSYFMAWELPKRAYSRKPWDNQQQTVAKICKCLVNTHRDSAFIFLSQSLEYAKNSRASLRKCSVMFIGSLVPCMESIMTEDRLNEVKAALDNLRHDPEASVCIYAAQVQDHILASCWQNSWLPHGNSWVCYSATTHRWSPSCENLPTSHQRRSWIMQALGSWKMSLKK

SEQ ID NO: 893863 - protein, 1395 aa, Homo sapiens
MALSPGANLVFHEDPKMTPSPPSCGAPGLGSGTIPQPHPDMAQVPMLNLLPSPGLALVPDLNDSLSPVSGEASGLVSENTPRPDDSRAIAPASLQITSSCSGEALDLDSKDVSRPDSQGRLCPASNPILSPSSTEAPRLSSGNHPQSNSEDAFKCLSSKIFKLGQRNSNPSRHELNPFIRHRSREGLVLGHCISRPSSKALLIPTSNSSLDLDSNPLLNMGSRNTSKLNLNVAPDSHGTLIPDTNETITLASHNISESVSKGAFSTTWSTSSKETMNVASSGHSRSDLSVTITQASYVTLIPGSSDGISLHSSTHGPNSTISPPSCMTLILGSNETLSLDSSLLFSDTSTLTLSSQQDDAKDNSIHTVPLEENLESWSEMASIKVGQFPLGFPISNPAGKDAVTLQGIPEGAFDEVTSCLVKVPEKTEGGNNMALVENVTTLQKSQDLLEAEGEKKTMIKKIIHTQPTLGMRERSELVNVCAHSVFSLPSVQAMQEKDEAKAETIQALYHQTLEALQTLLKALFIEDPTPAGLKSILEALGPWMNSGKAHERARAVNTNVSVLNHMLLTLPFFIEYKQMPLGFPALGLLLGRLILRIGDPDEEIGCEALDGIIILYTILELQKRARDKEETNKKELYESNKHFLGPYNPVSPCQNILRVIEEFGDFLGPQQIKDLLLAALEGLKGSSEAPGKDSREMMQLASEVMLSSVLEWYRHRALEVIPEIMQGIYMQLSHIQEPRARQVALLPVSLLASSFMTEVVVALLMCPLPLNSNGAEMWRQLILCKPSCDVRDLLDLLLGSLKEKPVTKEGRASIVPLAAASGLCELLSVNSCMGRVRRIYPQLLLALLIQVHYHIGLNLPGCVAPPKDTKKGAQPSPFVPVRWVVKVVKTLLLRMGCSYETTFLEDQGGWELMEQVESHHRGVALLARAMVQYSCQELCRILYLLIPLLERGDEKHRITATAFFVEQPCEEGIVILMLRISWERQQQAVTGARSWRGHTQLCHMVLMDIRRRLPAICWFCKSEAPGRAEPGIQCAIPVHGRPGGCPAPLSLGSNDPLLPQLLQMEQVRRIPEEYSLGRMAEGLSHHDPIMKVLSIRGLVILARRSEKTAKVKALLPSMVKGLKNMDGMLVVEAVHNLKAVFKGRDQKLMDSAVYVEMLQILLPHFSDAREDVRSSCINLYGKVVQKLRAPRTQAMEEQLVSTLVPLLLTMQEGNSKVSQKCVKTLLRCSYFMAWELPKRAYSRKPWDNQQQTVAKICKCLVNTHRDSAFIFLSQSLEYAKNSRASLRKCSVMFIGSLVPCMESIMTEDRLNEVKAALDNLRHDPEASVCIYAAQVQDHILASCWQNSWLPHGNSWVCYSATTHRWSPSCENLPTSHQRRSWIMQALGSWKMSLKK

SEQ ID NO: 893864 - protein, 1321 aa, Homo sapiens
MALSPGANLVFHEDPKMTPSPPSCGAPGLGSGTIPQPHPDMAQVPMLNLLPSPGLALVPDLNDSLSPVSGEASGLVSENTPRPDDSRAIAPASLQITSSCSGEALDLDSKDVSRPDSQGRLCPASNPILSPSSTEAPRLSSGNHPQSNSEDAFKCLSSKIFKLGQRNSNPSRHELNPFIRHRSREGLVLGHCISRPSSKALLIPTSNSSLDLDSNPLLNMGSRNTSKLNLNVAPDSHGTLIPDTNETITLASHNISESVSKGAFSTTWSTSSKETMNVASSGHSRSDLSVTITQASYVTLIPGSSDGISLHSSTHGPNSTISPPSCMTLILGSNETLSLDSSLLFSDTSTLTLSSQQDDAKDNSIHTVPLEENLESWSEMASIKVGQFPLGFPISNPAGKDAVTLQGIPEGAFDEVTSCLVKVPEKTEGGNNMALVENVTTLQKSQDLLEAEGEKKTMIKKIIHTQPTLGMRERSELVNVCAHSVFSLPSVQAMQEKDEAKAETIQALYHQTLEALQTLLKALFIEDPTPAGLKSILEALGPWMNSGKAHERARAVNTNVSVLNHMLLTLPFFIEYKQMPLGFPALGLLLGRLILRIGDPDEEIGCEALDGIIILYTILELQKRARDKEETNKKELYESNKHFLGPYNPVSPCQNILRVIEEFGDFLGPQQIKDLLLAALEGLKGSSEAPGKDSREMMQLASEVMLSSVLEWYRHRALEVIPEIMQGIYMQLSHIQEPRARQVALLPVSLLASSFMTEVVVALLMCPLPLNSNGAEMWRQLILCKPSCDVRDLLDLLLGSLKEKPVTKEGRASIVPLAAASGLCELLSVNSCMGRVRRIYPQLLLALLIQVHYHIGLNLPGCVAPPKDTKKGAQPSPFVPVRWVVKVVKTLLLRMGCSYETTFLEDQGGWELMEQVESHHRGVALLARAMVQYSCQELCRILYLLIPLLERGDEKHRITATAFFVEEFLVWQRTQRTPQLEQGVIPLLQMEQVRRIPEEYSLGRMAEGLSHHDPIMKVLSIRGLVILARRSEKTAKVKALLPSMVKGLKNMDGMLVVEAVHNLKAVFKGRDQKLMDSAVYVEMLQILLPHFSDAREDVRSSCINLYGKVVQKLRAPRTQAMEEQLVSTLVPLLLTMQEGNSKVSQKCVKTLLRCSYFMAWELPKRAYSRKPWDNQQQTVAKICKCLVNTHRDSAFIFLSQSLEYAKNSRASLRKCSVMFIGSLVPCMESIMTEDRLNEVKAALDNLRHDPEASVCIYAAQVQDHILASCWQNSWLPHGNSWVCYSATTHRWSPSCENLPTSHQRRSWIMQALGSWKMSLKK

SEQ ID NO: 893865 - protein, 1263 aa, Homo sapiens
MALSPGANLVFHEDPKMTPSPPSCGAPGLGSGTIPQPHPDMAQVPMLNLLPSPGLALVPDLNDSLSPVSGEASGLVSENTPRPDDSRAIAPASLQITSSCSGEALDLDSKDVSRPDSQGRLCPASNPILSPSSTEAPRLSSGNHPQSNSEDAFKCLSSKIFKLGQRNSNPSRHELNPFIRHRSREGLVLGHCISRPSSKALLIPTSNSSLDLDSNPLLNMGSRNTSKLNLNVAPDSHGTLIPDTNETITLASHNISESVSKGAFSTTWSTSSKETMNVASSGHSRSDLSVTITQASYVTLIPGSSDGISLHSSTHGPNSTISPPSCMTLILGSNETLSLDSSLLFSDTSTLTLSSQQDDAKDNSIHTVPLEENLESWSEMASIKVGQFPLGFPISNPAGKDAVTLQGIPEGAFDEVTSCLVKVPEKTEGGNNMALVENVTTLQKSQDLLEAEGEKKTMIKKIIHTQPTLGMRERSELVNVCAHSVFSLPSVQAMQEKDEAKAETIQALYHQTLEALQTLLKALFIEDPTPAGLKSILEALGPWMNSGKAHERARAVNTNVSVLNHMLLTLPFFIEYKQMPLGFPALGLLLGRLILRIGDPDEEIGCEALDGIIILYTILELQKRARDKEETNKKELYESNKHFLGPYNPVSPCQNILRVIEEFGDFLGPQQIKDLLLAALEGLKGSSEAPGKDSREMMQLASEVMLSSVLEWYRHRALEVIPEIMQGIYMQLSHIQEPRARQVALLPVSLLASSFMTEVVVALLMCPLPLNSNGAEMWRQLILCKPSCDVRDLLDLLLGSLKEKPVTKEGRASIVPLAAASGLCELLSVNSCMGRVRRIYPQLLLALLIQVHYHIGLNLPGCVAPPKDTKKGAQPSPFVPVRWVVKVVKTLLLRMGCSYETTFLEDQGGWELMEQVESHHRGVALLASSFQMEQVRRIPEEYSLGRMAEGLSHHDPIMKVLSIRGLVILARRSEKTAKVKALLPSMVKGLKNMDGMLVVEAVHNLKAVFKGRDQKLMDSAVYVEMLQILLPHFSDAREDVRSSCINLYGKVVQKLRAPRTQAMEEQLVSTLVPLLLTMQEGNSKVSQKCVKTLLRCSYFMAWELPKRAYSRKPWDNQQQTVAKICKCLVNTHRDSAFIFLSQSLEYAKNSRASLRKCSVMFIGSLVPCMESIMTEDRLNEVKAALDNLRHDPEASVCIYAAQVQDHILASCWQNSWLPHGNSWVCYSATTHRWSPSCENLPTSHQRRSWIMQALGSWKMSLKK

SEQ ID NO: 893866 - protein, 1005 aa, Homo sapiens
MALSPGANLVFHEDPKMTPSPPSCGAPGLGSGTIPQPHPDMAQVPMLNLLPSPGLALVPDLNDSLSPVSGEASGLVSENTPRPDDSRAIAPASLQITSSCSGEALDLDSKDVSRPDSQGRLCPASNPILSPSSTEAPRLSSGNHPQSNSEDAFKCLSSKIFKLGQRNSNPSRHELNPFIRHRSREGLVLGHCISRPSSKALLIPTSNSSLDLDSNPLLNMGSRNTSKLNLNVAPDSHGTLIPDTNETITLASHNISESVSKGAFSTTWSTSSKETMNVASSGHSRSDLSVTITQASYVTLIPGSSDGISLHSSTHGPNSTISPPSCMTLILGSNETLSLDSSLLFSDTSTLTLSSQQDDAKDNSIHTVPLEENLESWSEMASIKVGQFPLGFPISNPAGKDAVTLQGIPEGAFDEVTSCLVKVPEKTEGGNNMALVENVTTLQKSQDLLEAEGEKKTMIKKIIHTQPTLGMRERSELVNVCAHSVFSLPSVQAMQEKDEAKAETIQALYHQTLEALQTLLKALFIEDPTPAGLKSILEALGPWMNSGKAHERARAVNTNVSVLNHMLLTLPFFIEYKQMPLGFPALGLLLGRLILRIGDPDEEIGCEALDGIIILYTILELQKRARDKEETNKKELYESNKHFLGPYNPVSPCQNILRVIEEFGDFLGPQQIKDLLLAALEGLKGSSEAPGKDSREMMQLASEVMLSSVLEWYRHRALEVIPEIMQGIYMQLSHIQEPRARQVALLPVSLLASSFMTEVVVALLMCPLPLNSNGAEMWRQLILCKPSCDVRDLLDLLLGSLKEKPVTKEGRASIVPLAAASGLCELLSVNSCMGRVRRIYPQLLLALLIQVHYHIGLNLPGCVAPPKDTKKGAQPSPFVPVRWVVKVVKTLLLRMGCSYETTFLEDQGGWELMEQVESHHRGVALLARAMVQYSCQELCRILYLLIPLLERGDEKHRITATAFFVEVPTGAAGTQRELLPGLGSRHWSFLLCKQYFIVYKAFPWA

SEQ ID NO: 893867 - protein, 871 aa, Homo sapiens
MIKKIMRQIQEEPLDSLSSSVRKQAMEILTQLSHTQPTLGMRERSELVNVCAHSVFSLPSVQAMQEKDEAKAETIQALYHQTLEALQTLLKALFIEDPTPAGLKSILEALGPWMNSGKAHERARAVNTNVSVLNHMLLTLPFFIEYKQMPLGFPALGLLLGRLILRIGDPDEEIGCEALDGIIILYTILELQKRARDKEETNKKELYESNKHFLGPYNPVSPCQNILRVIEEFGDFLGPQQIKDLLLAALEGLKGSSEAPGKDSREMMQLASEVMLSSVLEWYRHRALEVIPEIMQGIYMQLSHIQEPRARQVALLPVSLLASSFMTEVVVALLMCPLPLNSNGAEMWRQLILCKPSCDVRDLLDLLLGSLKEKPVTKEGRASIVPLAAASGLCELLSVNSCMGRVRRIYPQLLLALLIQVHYHIGLNLPGCVAPPKDTKKGAQPSPFVPVRWVVKVVKTLLLRMGCSYETTFLEDQGGWELMEQVESHHRGVALLARAMVQYSCQELCRILYLLIPLLERGDEKHRITATAFFVELLQMEQVRRIPEEYSLGRMAEGLSHHDPIMKVLSIRGLVILARRSEKTAKVKALLPSMVKGLKNMDGMLVVEAVHNLKAVFKGRDQKLMDSAVYVEMLQILLPHFSDAREDVRSSCINLYGKVVQKLRAPRTQAMEEQLVSTLVPLLLTMQEGNSKVSQKCVKTLLRCSYFMAWELPKRAYSRKPWDNQQQTVAKICKCLVNTHRDSAFIFLSQSLEYAKNSRASLRKCSVMFIGSLVPCMESIMTEDRLNEVKAALDNLRHDPEASVCIYAAQVQDHILASCWQNSWLPHGNSWVCYSATTHRWSPSCENLPTSHQRRSWIMQALGSWKMSLKK

SEQ ID NO: 893868 - protein, 803 aa, Homo sapiens
AWSSSHPQALYHQTLEALQTLLKALFIEDPTPAGLKSILEALGPWMNSGKAHERARAVNTNVSVLNHMLLTLPFFIEYKQMPLGFPALGLLLGRLILRIGDPDEEIGCEALDGIIILYTILELQKRARDKEETNKKELYESNKHFLGPYNPVSPCQNILRVIEEFGDFLGPQQIKDLLLAALEGLKGSSEAPGKDSREMMQLASEVMLSSVLEWYRHRALEVIPEIMQGIYMQLSHIQEPRARQVALLPVSLLASSFMTEVVVALLMCPLPLNSNGAEMWRQLILCKPSCDVRDLLDLLLGSLKEKPVTKEGRASIVPLAAASGLCELLSVNSCMGRVRRIYPQLLLALLIQVHYHIGLNLPGCVAPPKDTKKGAQPSPFVPVRWVVKVVKTLLLRMGCSYETTFLEDQGGWELMEQVESHHRGVALLARAMVQYSCQELCRILYLLIPLLERGDEKHRITATAFFVELLQMEQVRRIPEEYSLGRMAEGLSHHDPIMKVLSIRGLVILARRSEKTAKVKALLPSMVKGLKNMDGMLVVEAVHNLKAVFKGRDQKLMDSAVYVEMLQILLPHFSDAREDVRSSCINLYGKVVQKLRAPRTQAMEEQLVSTLVPLLLTMQEGNSKVSQKCVKTLLRCSYFMAWELPKRAYSRKPWDNQQQTVAKICKCLVNTHRDSAFIFLSQSLEYAKNSRASLRKCSVMFIGSLVPCMESIMTEDRLNEVKAALDNLRHDPEASVCIYAAQVQDHILASCWQNSWLPHGNSWVCYSATTHRWSPSCENLPTSHQRRSWIMQALGSWKMSLKK

SEQ ID NO: 893869 - protein, 441 aa, Homo sapiens
MALSPGANLVFHEDPKMTPSPPSCGAPGLGSGTIPQPHPDMAQVPMLNLLPSPGLALVPDLNDSLSPVSGEASGLVSENTPRPDDSRAIAPASLQITSSCSGEALDLDSKDVSRPDSQGRLCPASNPILSPSSTEAPRLSSGNHPQSNSEDAFKCLSSKIFKLGQRNSNPSRHELNPFIRHRSREGLVLGHCISRPSSKALLIPTSNSSLDLDSNPLLNMGSRNTSKLNLNVAPDSHGTLIPDTNETITLASHNISESVSKGAFSTTWSTSSKETMNVASSGHSRSDLSVTITQASYVTLIPGSSDGISLHSSTHGPNSTISPPSCMTLILGSNETLSLDSSLLFSDTSTLTLSSQQDDAKDNSIHTVPLEENLESWSEMASIKVGQFPLGFPISNPAGKDAVTLQGIPEDGVSLCCPGWSVMAQSRLTATSTFGVQAILL

SEQ ID NO: 893870 - protein, 570 aa, Homo sapiens
MALSPGANLVFHEDPKMTPSPPSCGAPGLGSGTIPQPHPDMAQVPMLNLLPSPGLALVPDLNDSLSPVSGEASGLVSENTPRPDDSRAIAPASLQITSSCSGEALDLDSKDVSRPDSQGRLCPASNPILSPSSTEAPRLSSGNHPQSNSEDAFKCLSSKIFKLGQRNSNPSRHELNPFIRHRSREGLVLGHCISRPSSKALLIPTSNSSLDLDSNPLLNMGSRNTSKLNLNVAPDSHGTLIPDTNETITLASHNISESVSKGAFSTTWSTSSKETMNVASSGHSRSDLSVTITQASYVTLIPGSSDGISLHSSTHGPNSTISPPSCMTLILGSNETLSLDSSLLFSDTSTLTLSSQQDDAKDNSIHTVPLEENLESWSEMASIKVGQFPLGFPISNPAGKDAVTLQGIPEGAFDEVTSCLVKVPEKTEGGNNMALVENVTTLQKSQDLLEAEGEKKTMIKKIMRQIQEEPLDSLSSSVRKQAMEILTQLSHTQPTLGMRERSELVNVCAHSVFSLPSVQAMQEKDEAKAETIQALYHQTLEALQTLLKALFIEDPTPAGLKSILEGPAPA

SEQ ID NO: 893871 - protein, 502 aa, Homo sapiens [sequence omitted]

SEQ ID NO: 893872 - protein, 247 aa, Homo sapiens
SETSLSGAMPRKRKCDLRAVRVGLLLGGGGVYGSRFRFTFPGCRALSPWRVRVQRRRCEMSTMFADTLLIVFISVCTALLAEGITWVLVYRTDKYKRLKAEVEKQSKKLEKKKETITESAGRQQKKKIERQEEKLKNNNRDLSMVRMKSMFAIGFCFTALMGMFNSIFDGRVVAKLPFTPLSYIQGLSHRNLLGDDTTDCSFIFLYILCTMSIRQNIQKILGLAPSRAATKQAGGFLGPPPPSGKFS

SEQ ID NO: 893873 - protein, 247 aa, Homo sapiens; identical to SEQ ID NO: 893872

SEQ ID NO: 893874 - protein, 281 aa, Homo sapiens
STEEVDSWTASDGGSSIRRGSVTDGWMQHEEVDMHHEEVVTTEEVDSTEEVDSTVVGLLLGGGGVYGSRFRFTFPGCRALSPWRVRVQRRRCEMSTMFADTLLIVFISVCTALLAEGITWVLVYRTDKYKRLKAEVEKQSKKLEKKKETITESAGRQQKKKIERQEEKLKNNNRDLSMVRMKSMFAIGFCFTALMGMFNSIFDGRVVAKLPFTPLSYIQGLSHRNLLGDDTTDCSFIFLYILCTMSIRQNIQKILGLAPSRAATKQAGGFLGPPPPSGKFS

SEQ ID NO: 893875 - protein, 247 aa, Homo sapiens; identical to SEQ ID NO: 893872

SEQ ID NO: 893876 - protein, 246 aa, Homo sapiens
MGTMRSRRLAMGMLLRRGIEPLRKRHLRRPMKIRFRFTFPGCRALSPWRVRVQRRRCEMSTMFADTLLIVFISVCTALLAEGITWVLVYRTDKYKRLKAEVEKQSKKLEKKKETITESAGRQQKKKIERQEEKLKNNNRDLSMVRMKSMFAIGFCFTALMGMFNSIFDGRVVAKLPFTPLSYIQGLSHRNLLGDDTTDCSFIFLYILCTMSIRQNIQKILGLAPSRAATKQAGGFLGPPPPSGKFS

SEQ ID NO: 893877 - protein, 104 aa, Homo sapiens
MVRMKSMFAIGFCFTALMGMFNSIFDGRVVAKLPFTPLSYIQGLSHRNLLGDDTTDCSFIFLYILCTMSIRQNIQKILGLAPSRAATKQAGGFLGPPPPSGKFS

SEQ ID NO: 893878 - protein, 176 aa, Homo sapiens
MESIAEFSLVSGITWVLVYRTDKYKRLKAEVEKQSKKLEKKKETITESAGRQQKKKIERQEEKLKNNNRDLSMVRMKSMFAIGFCFTALMGMFNSIFDGRVVAKLPFTPLSYIQGLSHRNLLGDDTTDCSFIFLYILCTMSIRQNIQKILGLAPSRAATKQAGGFLGPPPPSGKFS

SEQ ID NO: 893879 - protein, 293 aa, Homo sapiens
SETSLSGAMPRKRKCDLRAVRVGLLLGGGGVYGSRFRFTFPGCRALSPWRVRVQRRRCEMSTMFADTLLIVFISVCTALLAEGITWVLVYRTDKYKRLKAEVEKQSKKLEKKKETITESAGRQQKKKIDRVSPYRPGWSTVTRFMAHCSLKLLGSSNPPTVASQVAGTTGAHHHERQEEKLKNNNRDLSMVRMKSMFAIGFCFTALMGMFNSIFDGRVVAKLPFTPLSYIQGLSHRNLLGDDTTDCSFIFLYILCTMSIRQNIQKILGLAPSRAATKQAGGFLGPPPPSGKFS

SEQ ID NO: 893880 - protein, 102 aa, Homo sapiens
MVEWWQSFLLPLFLTSKDCLIEICWEMTPQTVPSFSCIFSVLCRFDRTFRRFSALPLHEPPPSRQVDFLAHHLLLGSSLELKNSLFSIILSRHTHIRLATVL

SEQ ID NO: 893881 - protein, 338 aa, Homo sapiens
SETSLSGAMPRKRKCDLRAVRVGLLLGGGGVYGSRFRFTFPGCRALSPWRVRVQRRRCEMSTMFADTLLIVFISVCTALLAEGITWVLVYRTDKYKRLKAEVEKQSKKLEKKKETITESAGRQQKKKIERQEEKLKNNNRDLSMVRMKSMFAIGFCFTALMGMFNSIFDGRVVAKLPFTPLSYIQGLSHRNLLGDDTTDCSFIFLYILCTMSIRQNIQKILGLAPSTNLVDNRRRKYERQEEKLKNNYRDLSMVRMKSMFAIGFCFTALMGTIYSIFDLRLVAKLSQYHSRGHPMTLYFLNRDCEQIYPPIYAVLCRENCAQDLHASAPGYELSACPF

SEQ ID NO: 893882 - protein, 247 aa, Homo sapiens; identical to SEQ ID NO: 893872

SEQ ID NO: 893883 - protein, 188 aa, Homo sapiens
MSTMFADTLLIVFISVCTALLAEGITWVLVYRTDKYKRLKAEVEKQSKKLEKKKETITESAGRQQKKKIERQEEKLKNNNRDLSMVRMKSMFAIGFCFTALMGMFNSIFDGRVVAKLPFTPLSYIQGLSHRNLLGDDTTDCSFIFLYILCTMSIRQNIQKILGLAPSRAATKQAGGFLGPPPPSGKFS

SEQ ID NO: 893884 - protein, 247 aa, Homo sapiens; identical to SEQ ID NO: 893872

SEQ ID NO: 893885 - protein, 247 aa, Homo sapiens; identical to SEQ ID NO: 893872

SEQ ID NO: 893886 - protein, 188 aa, Homo sapiens; identical to SEQ ID NO: 893883

SEQ ID NO: 893887 - protein, 104 aa, Homo sapiens; identical to SEQ ID NO: 893877

SEQ ID NO: 893888 - protein, 102 aa, Homo sapiens; identical to SEQ ID NO: 893880

SEQ ID NO: 893889 - protein, 120 aa, Homo sapiens
MESKEELAANNLNGENAQQENEGGEQAPTQNEEESRHLGGGEGQKPGGNIRRGRVRRLVPNFRWAIPNRHIEHNEARDDVERFVGQMMEIKRKTREQQMRHYMRFQTPEPDNHYDFCLIP

SEQ ID NO: 893890 - protein, 170 aa, Homo sapiens
DRPTLSVVSLWRQSRRGSFHSRRWYLLPVALRTCGPGAAPKLGSGGGAGVMESKEELAANNLNGENAQQENEGGEQAPTQNEEESRHLGGGEGQKPGGNIRRGRVRRLVPNFRWAIPNRHIEHNEARDDVERFVGQMMEIKRKTREQQMRHYMRFQTPEPDNHYDFCLIP

SEQ ID NO: 893891 - protein, 93 aa, Homo sapiens
VTGHTECCLALASEPSWLVPFSAVVPAPGGPEDVWARGGPEIRKRRGSSLQVCGAKCRGGAPRVKNPEEETARIGPGVMESKEELAANNLSCL

SEQ ID NO: 893892 - protein, 120 aa, Homo sapiens; identical to SEQ ID NO: 893889

SEQ ID NO: 893893 - protein, 120 aa, Homo sapiens; identical to SEQ ID NO: 893889

SEQ ID NO: 893894 - protein, 120 aa, Homo sapiens; identical to SEQ ID NO: 893889

SEQ ID NO: 893895 - protein, 136 aa, Homo sapiens
RQRTQKDGDAKIGPGVMESKEELAANNLNGENAQQENEGGEQAPTQNEEESRHLGGGEGQKPGGNIRRGRVRRLVPNFRWAIPNRHIEHNEARDDVERFVGQMMEIKRKTREQQMRHYMRFQTPEPDNHYDFCLIP

SEQ ID NO: 893896 - protein, 646 aa, Homo sapiens
MTDGHISCTAVEFSYMSKISLNTPPGTKVKLSGIVDIKNGFLLLNDSNTTVLGGEVEHLIEKWELQRSLSKHNRSNIGTEGGPPPFVPFGQKCVSHVQVDSRELDRRKTLQVTMPVKPTNDNDEFEKQRTAAIAEVAKSKETKTFGGGGGGARSNLNMNAAGNRNREVLQKEKSTKSEGKHEGVYRELVDEKALKHITEMGFSKEASRQALMDNGNNLEAALNVLLTSNKQKPVMGPPLRGRGKGRGRIRSEDEEDLGNARPSAPSTLFDFLESKMGTLNVEEPKSQPQQLHQGQYRSSNTEQNGVKDNNHLRHPPRNDTRQPRNEKPPRFQRDSQNSKSVLEGSGLPRNRGSERPSTSSVSEVWAEDRIKCDRPYSRYDRTKDTSYPLGSQHSDGAFKKRDNSMQSRSGKGPSFAEAKENPLPQGSVDYNNQKRGKRESQTSIPDYFYDRKSQTINNEAFSGIKIEKHFNVNTDYQNPVRSNSFIGVPNGEVEMPLKGRRIGPIKPAGPVTAVPCDDKIFYNSGPKRRSGPIKPEKILESSIPMEYAKMWKPGDECFALYWEDNKFYRAEVEALHSSGMTAVVKFIDYGNYEEVLLSNIKPIQTEAWEEEGTYDQTLEFRRGGDGQPRRSTRPTQQFYQPPRARN

SEQ ID NO: 893897 - protein, 66 aa, Homo sapiens
HFEHVKSLLFANRRRKKAPTIKLWSSVGEVMASQDDPLGQPNSFTNHPGLGTNRKSRLFVKKRASD

SEQ ID NO: 893898 - protein, 77 aa, Homo sapiens
CIECCLRGNPIPPQLEPLAPLRRQRRKKAPTIKLWSSVGEVMASQDDPLGQPNSFTNHPGLGTNRKSRLFVKKRASD

SEQ ID NO: 893899 - protein, 66 aa, Homo sapiens; identical to SEQ ID NO: 893897

SEQ ID NO: 893900 - protein, 646 aa, Homo sapiens; identical to SEQ ID NO: 893896

SEQ ID NO: 893901 - protein, 646 aa, Homo sapiens; identical to SEQ ID NO: 893896

SEQ ID NO: 893902 - protein, 646 aa, Homo sapiens; identical to SEQ ID NO: 893896

SEQ ID NO: 893903 - protein, 646 aa, Homo sapiens; identical to SEQ ID NO: 893896

SEQ ID NO: 893904 - protein, 695 aa, Homo sapiens
MFRIPPHDTIVERKKLEGPCVLQIQKIRNVAAPKDNEESQAAPRMLRLQMTDGHISCTAVEFSYMSKISLNTPPGTKVKLSGIVDIKNGFLLLNDSNTTVLGGEVEHLIEKWELQRSLSKHNRSNIGTEGGPPPFVPFGQKCVSHVQVDSRELDRRKTLQVTMPVKPTNDNDEFEKQRTAAIAEVAKSKETKTFGGGGGGARSNLNMNAAGNRNREVLQKEKSTKSEGKHEGVYRELVDEKALKHITEMGFSKEASRQALMDNGNNLEAALNVLLTSNKQKPVMGPPLRGRGKGRGRIRSEDEEDLGNARPSAPSTLFDFLESKMGTLNVEEPKSQPQQLHQGQYRSSNTEQNGVKDNNHLRHPPRNDTRQPRNEKPPRFQRDSQNSKSVLEGSGLPRNRGSERPSTSSVSEVWAEDRIKCDRPYSRYDRTKDTSYPLGSQHSDGAFKKRDNSMQSRSGKGPSFAEAKENPLPQGSVDYNNQKRGKRESQTSIPDYFYDRKSQTINNEAFSGIKIEKHFNVNTDYQNPVRSNSFIGVPNGEVEMPLKGRRIGPIKPAGPVTAVPCDDKIFYNSGPKRRSGPIKPEKILESSIPMEYAKMWKPGDECFALYWEDNKFYRAEVEALHSSGMTAVVKFIDYGNYEEVLLSNIKPIQTEAWEEEGTYDQTLEFRRGGDGQPRRSTRPTQQFYQPPRARN

SEQ ID NO: 893905 - protein, 766 aa, Homo sapiens
PSVSSGLILPSLRWPPVGAANATLLLYEEPPRDFPRYLSDEGIEACTSSPDKVNVNDIILIALNLEGPCVLQIQKIRNVAAPKDNEESQAAPRMLRLQMTDGHISCTAVEFSYMSKISLNTPPGTKVKLSGIVDIKNGFLLLNDSNTTVLGGEVEHLIEKWELQRSLSKHNRSNIGTEGGPPPFVPFGQFGRRNSQDKRKCEVLWCDAMLMKCVSHVQVDSRELDRRKTLQVTMPVKPTNDNDEFEKQRTAAIAEVAKSKETKTFGGGGGGARSNLNMNAAGNRNREVLQKEKSTKSEGKHEGVYRELVDEKALKHITEMGFSKEASRQALMDNGNNLEAALNVLLTSNKQKPVMGPPLRGRGKGRGRIRSEDEEDLGNARPSAPSTLFDFLESKMGTLNVEEPKSQPQQLHQGQYRSSNTEQNGVKDNNHLRHPPRNDTRQPRNEKPPRFQRDSQNSKSVLEGSGLPRNRGSERPSTSSVSEVWAEDRIKCDRPYSRYDRTKDTSYPLGSQHSDGAFKKRDNSMQSRSGKGPSFAEAKENPLPQGSVDYNNQKRGKRESQTSIPDYFYDRKSQTINNEAFSGIKIEKHFNVNTDYQNPVRSNSFIGVPNGEVEMPLKGRRIGPIKPAGPVTAVPCDDKIFYNSGPKRRSGPIKPEKILESSIPMEYAKMWKPGDECFALYWEDNKFYRAEVEALHSSGMTAVVKFIDYGNYEEVLLSNIKPIQTEAWEEEGTYDQTLEFRRGGDGQPRRSTRPTQQFYQPPRARN

SEQ ID NO: 893906 - protein, 98 aa, Homo sapiens
  misc_feature (8)..(9): Xaa can be any naturally occurring amino acid
  misc_feature (14)..(14): Xaa can be any naturally occurring amino acid
TEGPLGRXXIRFRXGGCGFYRAEVEALHSSGMTAVVKFIDYGNYEEVLLSNIKPIQTEAWEEEGTYDQTLEFRRGGDGQPRRSTRPTQQFYQPPRARN

SEQ ID NO: 893907 - protein, 116 aa, Homo sapiens [sequence omitted]

SEQ ID NO: 893908 - protein, 646 aa, Homo sapiens; identical to SEQ ID NO: 893896

SEQ ID NO: 893909 - protein, 75 aa, Homo sapiens
FYFRFPAPRRQRLCATLCVQRYRRKKAPTIKLWSSVGEVMASQDDPLGQPNSFTNHPGLGTNRKSRLFVKKRASD

SEQ ID NO: 893910 - protein, 73 aa, Homo sapiens
VGGDTVYEVKGGGAGRRWNSGRKKAPTIKLWSSVGEVMASQDDPLGQPNSFTNHPGLGTNRKSRLFVKKRASD

SEQ ID NO: 893911 - protein, 77 aa, Homo sapiens
PPATRHTKRGRRGESRSLKHLWGTRRKKAPTIKLWSSVGEVMASQDDPLGQPNSFTNHPGLGTNRKSRLFVKKRASD

SEQ ID NO: 893912 - protein, 646 aa, Homo sapiens; identical to SEQ ID NO: 893896

SEQ ID NO: 893913 - protein, 646 aa, Homo sapiens; identical to SEQ ID NO: 893896

SEQ ID NO: 893914 - protein, 646 aa, Homo sapiens; identical to SEQ ID NO: 893896

SEQ ID NO: 893915 - protein, 646 aa, Homo sapiens; identical to SEQ ID NO: 893896

SEQ ID NO: 893916 - protein, 134 aa, Homo sapiens
PVSLLRPYPALSEVAACGRCKRHTFALRRTSSRLSKVCNSEKRPPKQVKAFGEEAKSLNRPDSSHQPVFGGSGPGAPQPGSPTPGRPLRPLRKRGERNPHAEAPAALSMPSCRADQRSFFFSFLFFFLRGGGLK

SEQ ID NO: 893917 - protein, 265 aa, Homo sapiens
MSAAPLVGYSSSGSEDESEDGMRTRPGDGSHRRGQSPLPRQRFPVPDSVLNMFPGTEEGPEDDSTKHGGRVRTFPHERGNWATHVYVPYEAKEEFLDLLDVLLPHAQTYVPRLVRMKVFHLSLSQSVVLRHHWILPFVQALKARMTSFHRFFFTANQVKIYTNQEKTRTFIGLEVTSGHAQFLDLVSEVDRVMEEFNLTTFYQDPSFHLSLAWCVGDARLQLEGQCLQELQAIVDGFEDAEVLLRVHTEQVRCKSGNKFFSMPLK

SEQ ID NO: 893918 - protein, 109 aa, Homo sapiens
  misc_feature (1)..(1): Xaa can be any naturally occurring amino acid
  misc_feature (17)..(17): Xaa can be any naturally occurring amino acid
XSPSFFLSFFSSLFFPXFFSLLSLFLSSISSPPLSLPLLSLFLSSLSLAFFSLSCLGCCGLQVGCCCCGPSQKLPVEGSLGILMLTLVVTQRKYWGHWRAHPHSPESPL

SEQ ID NO: 893919 - protein, 163 aa, Homo sapiens
MSAAPLVGYSSSGSEDESEDGMRTRPGDGSHRRGQSPLPRQRFPVPDSVLNMFPGTEEGPEDDSTKHGGRVRTFPHERGNWATHVYVPYEAKEEFLDLLDVLLPHAQTYVPRLVRMKVFHLSLSQSVVLRHHWILPFVQALKARMTSFHRCQKPMPEAQPKVA

SEQ ID NO: 893920 - protein, 265 aa, Homo sapiens; identical to SEQ ID NO: 893917

SEQ ID NO: 893921 - protein, 265 aa, Homo sapiens; identical to SEQ ID NO: 893917

SEQ ID NO: 893922 - protein, 265 aa, Homo sapiens; identical to SEQ ID NO: 893917

SEQ ID NO: 893923 - protein, 265 aa, Homo sapiens; identical to SEQ ID NO: 893917

SEQ ID NO: 893924 - protein, 245 aa, Homo sapiens
MIERNRQRDGARRGQSPLPRQRFPVPDSVLNMFPGTEEGPEDDSTKHGGRVRTFPHERGNWATHVYVPYEAKEEFLDLLDVLLPHAQTYVPRLVRMKVFHLSLSQSVVLRHHWILPFVQALKARMTSFHRFFFTANQVKIYTNQEKTRTFIGLEVTSGHAQFLDLVSEVDRVMEEFNLTTFYQDPSFHLSLAWCVGDARLQLEGQCLQELQAIVDGFEDAEVLLRVHTEQVRCKSGNKFFSMPLK

SEQ ID NO: 893925 - protein, 222 aa, Homo sapiens
MSAAPLVGYSSSGSEDESEDGMRTRPGDGSHRRGQSPLPRQRFPVPDSVLNMFPGTEEGPEDDSTKHGGRVRTFPHERGNWATHVYVPYEAKEEFLDLLDVLLPHAQTYVPRLVRMKVFHLSLSQSVVLRHHWILPFVQALKARMTSFHRFFFTANQVKIYTNQEKTRTFIGLEVTSGHAQFLDLVSEVDRVMEEFNLTTFYQTRLRWRNLLKSMEMLLASQ

SEQ ID NO: 893926 - protein, 247 aa, Homo sapiens
MSAAPLVGYSSSGSEDESEDGMRTRPGDGSHRRGQSPLPRQRFPVPDSVLNMFPGTEEGPEDDSTKHGGRVRTFPHERGNWATHVYVPYEAKEEFLDLLDVLLPHAQTYVPRLVRMKVFHLSLSQSVVLRHHWILPFVQALKARMTSFHRTFIGLEVTSGHAQFLDLVSEVDRVMEEFNLTTFYQDPSFHLSLAWCVGDARLQLEGQCLQELQAIVDGFEDAEVLLRVHTEQVRCKSGNKFFSMPLK

SEQ ID NO: 893927 - protein, 265 aa, Homo sapiens; identical to SEQ ID NO: 893917

SEQ ID NO: 893928 - protein, 265 aa, Homo sapiens; identical to SEQ ID NO: 893917

SEQ ID NO: 893929 - protein, 265 aa, Homo sapiens; identical to SEQ ID NO: 893917

SEQ ID NO: 893930 - protein, 216 aa, Homo sapiens
MSAAPLVGYSSSGSEDESEDGMRTRPGDGSHRRGQSPLPRQRFPVPDSVLNMFPGTEEGPEDDSTKHGGRVRTFPHERGNWATHVYVPYEAKEEFLDLLDVLLPHAQTYVPRLVRMKVFHLSLSQSVVLRHHWILPFVQALKARMTSFHRFFFTANQVKIYTNQEKTRTFIGLEVTSGHAQFLDLVSEVDRVMEEFNLTTFYQVMNGAAASPLTHF

SEQ ID NO: 893931 - protein, 216 aa, Homo sapiens; identical to SEQ ID NO: 893930

SEQ ID NO: 893932 - protein, 163 aa, Homo sapiens; identical to SEQ ID NO: 893919

SEQ ID NO: 893933 - protein, 186 aa, Homo sapiens
MSAAPLVGYSSSGSEDESEDGMRTRPGDGSHRRGQSPLPRQRFPVPDSVLNMFPGTEEGPEDDSTKHGGRVRTFPHERGNWATHVYVPYEAKEEFLDLLDVLLPHAQTYVPRLVRMKVFHLSLSQSVVLRHHWILPFVQALKARMTSFHSPHPGPHCLIGTKDAPVTQEIPKDLGALRQEPGSQTR

SEQ ID NO: 893934 - protein, 203 aa, Homo sapiens
MSAAPLVGYSSSGSEDESEDGMRTRPGDGSHRRGQSPLPRQRFPVPDSVLNMFPGTEEGPEDDSTKHGGRVRTFPHERGNWATHVYVPYPRRSYWRGSDLQELQDNRGVGLNDAERAAARCTLDTQRPLQCLGTTFLPRCLSNAEHQQAFHPSKGTYIHDPVLADCDGGQSNHSHVGDCLHRPDPRTCSAPKRMTYRTLATAE

SEQ ID NO: 893935 - protein, 150 aa, Homo sapiens [sequence omitted]

SEQ ID NO: 893936 - protein, 129 aa, Homo sapiens
MARGSLRRLLRLLVLGLWLALLRSVAGEQAPGTAPCSRGSSWSADLDKCMDCASCRARPHSDFCLGCAAAPPAPFRLLWPILGGALSLTFVLGLLSGFLVWRRCRRREKFTTPIEETGGEGCPAVALIQ

SEQ ID NO: 893937 - protein, 116 aa, Homo sapiens
AAAVGPCRPAAGADSGGRRTCTMARGSLRRLLRLLVLGLWLALLRSVAGEQAPGAAAPPAPFRLLWPILGGALSLTFVLGLLSGFLVWRRCRRREKFTTPIEETGGEGCPAVALIQ

SEQ ID NO: 893938 - protein, 129 aa, Homo sapiens; identical to SEQ ID NO: 893936

SEQ ID NO: 893939 - protein, 129 aa, Homo sapiens; identical to SEQ ID NO: 893936

SEQ ID NO: 893940 - protein, 129 aa, Homo sapiens; identical to SEQ ID NO: 893936

SEQ ID NO: 893941 - protein, 98 aa, Homo sapiens
AYYYYKLAAARSEPDLRAGAAFWLFGLETMPQEREVHHPHRGDRRRGLPSCGADPVTMCPLPAGARPLIIHSSILEPVSASQTRREPSSSNHKGGGGR

SEQ ID NO: 893942 - protein, 134 aa, Homo sapiens
GGGRGSLPAGGGRRQRRAQDVHYGSGLAAPVAAAPRAGALAGVAALRGRGASARHRPLLPRQLLERGPGQVHGLRVLQGATAQRLLPGLDPVTMCPLPAGARPLIIHSSILEPVSASQTRREPSSSNHKGGGGR

SEQ ID NO: 893943 - protein, 129 aa, Homo sapiens; identical to SEQ ID NO: 893936

SEQ ID NO: 893944 - protein, 172 aa, Homo sapiens
NKHSRGRVLIGQGALWLGARCAGCCGSSCWGSGWRCCAPWPGSKRQVRGTPGSGNPGPGLGSRTGCLENSAELGEQADVGIWGQVAFKQLAPGCGKFHHSPSFIHNPGLSFSHRPIGVGGVFSSTSPKYFEWREKVSEGGMFSLGRGTPPAWSVQGLTSPSDRRVGEAVERH

SEQ ID NO: 893945 - protein, 34 aa, Homo sapiens
EGAGDSRYSSRPTLTSDPRIAESRPQPLTRGPLP

SEQ ID NO: 893946 - protein, 322 aa, Homo sapiens; identical to SEQ ID NO: 743119

SEQ ID NO: 893947 - protein, 322 aa, Homo sapiens; identical to SEQ ID NO: 743119

SEQ ID NO: 893948 - protein, 322 aa, Homo sapiens; identical to SEQ ID NO: 743119

SEQ ID NO: 893949 - protein, 322 aa, Homo sapiens; identical to SEQ ID NO: 743119

SEQ ID NO: 893950 - protein, 360 aa, Homo sapiens
MFVHVLSSCMLCVSLVTSVSLDQKSDAICAGCASACRLTCCCVMVCHAMSWHPICACCVVHVVHACGPKAGAADKSAVVAAAAPASVADDTPPPERRNKSGIISEPLNKSLRRSRPLSHYSSFGSSGGSGGGSMMGGESADKATAAAAAASLLANGHDLAAAMAVDKSNPTSKHKSGAVASLLSKAERATELAAEGQLTLQQFAQSTEMLKRVVQEHLPLMSEAGAGLPDMEAVAGAEALNGQSDFPYLGAFPINPGLFIMTPAGVFLAESALHMAGLAEYPMQGELASAISSGKKKRKRCGMCAPCRRRINCEQCSSCRNRKTGHQICKFRKCEELKKKPSAALEKVMLPTGAAFRWFQ

SEQ ID NO: 893951 - protein, 322 aa, Homo sapiens; identical to SEQ ID NO: 743119

SEQ ID NO: 893952 - protein, 322 aa, Homo sapiens; identical to SEQ ID NO: 743119

SEQ ID NO: 893953 - protein, 312 aa, Homo sapiens [sequence omitted]

SEQ ID NO: 893954 - protein, 322 aa, Homo sapiens; identical to SEQ ID NO: 743119

SEQ ID NO: 893955 - protein, 322 aa, Homo sapiens; identical to SEQ ID NO: 743119

SEQ ID NO: 893956 - protein, 322 aa, Homo sapiens; identical to SEQ ID NO: 743119

SEQ ID NO: 893957 - protein, 322 aa, Homo sapiens; identical to SEQ ID NO: 743119

SEQ ID NO: 893958 - protein, 220 aa, Homo sapiens
MPAAVAAAAASLLANGHDLAAAMAVDKSNPTSKHKSGAVASLLSKAERATELAAEGQLTLQQFAQSTEMLKRVVQEHLPLMSEAGAGLPDMEAVAGAEALNGQSDFPYLGAFPINPGLFIMTPAGVFLAESALHMAGLAEYPMQGELASAISSGKKKRKRCGMCAPCRRRINCEQCSSCRNRKTGHQICKFRKCEELKKKPSAALEKVMLPTGAAFRWFQ

SEQ ID NO: 893959 - protein, 282 aa, Homo sapiens
MSSLGGGSVADDTPPPERRNKSGIISEPLNKSLRRSRPLSHYSSFGSSGGSGGGSMMGGESADKATAAAAAASLLANGHDLAAAMAVDKSNPTSKHKSGAVASLLSKAERATELAAEGQLTLQQFAQSTEMLKRVVQEHLPLMSEAGAGLPDMEAVAGAEALNGQSDFPYLGAFPINPGLFIMTPAGVFLAESALHMAGLAEYPMQGELASAISSGKKKRKRCGMCAPCRRRINCEQCSSCRNRKTGHQICKFRKCEELKKKPSAALEKVMLPTGAAFRWFQ

SEQ ID NO: 893960 - protein, 103 aa, Homo sapiens
LEKARGSHAAISAPLWQGPSLCPQMQQPSWSARPGYKSIFSACSPCPCPRPSMSGLDANVQNGWKTTVVYPSHGLLVTLPQPQPHPSISALLCTHKGTHFSPV

SEQ ID NO: 893961 - protein, 260 aa, Homo sapiens
MDLAAAAEPGAGSQHLEVRDEVAEKCQKLFLDFLEEFQSSDGEIKYLQLAEELIRPERNTLVVSFVDLEQFNQQLSTTIQEEFYRVYPYLCRALKTFVKDRKEIPLAKDFYVAFQDLPTRHKIRELTSSRIGLLTRISGQVVRTHPVHPELVSGTFLCLDCQTVIRDVEQQFKYTQPNICRNPVCANRRRFLLDTNKSRFVDFQKVRIQETQAELPRGSIPRSLEVILRAEAVESAQAGDKCDFRALMWGGKIQLTRAWE

SEQ ID NO: 893962 - protein, 821 aa, Homo sapiens
MDLAAAAEPGAGSQHLEVRDEVAEKCQKLFLDFLEEFQSSDGEIKYLQLAEELIRPERNTLVVSFVDLEQFNQQLSTTIQEEFYRVYPYLCRALKTFVKDRKEIPLAKDFYVAFQDLPTRHKIRELTSSRIGLLTRISGQVVRTHPVHPELVSGTFLCLDCQTVIRDVEQQFKYTQPNICRNPVCANRRRFLLDTNKSRFVDFQKVRIQETQAELPRGSIPRSLEVILRAEAVESAQAGDKCDFTGTLIVVPDVSKLSTPGARAETNSRVSGVDGYETEGIRGLRALGVRDLSYRLVFLACCVAPTNPRFGGKELRDEEQTAESIKNQMTVKEWEKVFEMSQDKNLYHNLCTSLFPTIHGNDEVKRGVLLMLFGGVPKTTGEGTSLRGDINVCIVGDPSTAKSQFLKHVEEFSPRAVYTSGKASSAAGLTAAVVRDEESHEFVIEAGALMLADNGVCCIDEFDKMDVRDQVAIHEAMEQQTISITKAGVKATLNARTSILAAANPISGHYDRSKSLKQNINLSAPIMSRFDLFFILVDECNEVTDYAIARRIVDLHSRIEESIDRVYSLDDIRRYLLFARQFKPKISKESEDFIVEQYKHLRQRDGSGVTKSSWRITVRQLESMIRLSEAMARMHCCDEVQPKHVKEAFRLLNKSIIRVETPDVNLDQEEEIQMEVDEGAGGINGHADSPAPVNGINGYNEDINQESAPKASLRLGFSEYCRISNLIVLHLRKVEEEEDESALKRSELVNWYLKEIESEIDSEEELINKKRIIEKVIHRLTHYDHVLIELTQAGLKGSTEGSESYEEDPYLVVNPNYLLED

SEQ ID NO: 893963 - protein, 821 aa, Homo sapiens; identical to SEQ ID NO: 893962

SEQ ID NO: 893964 - protein, 821 aa, Homo sapiens; identical to SEQ ID NO: 893962

SEQ ID NO: 893965 - protein, 800 aa, Homo sapiens
MDLAAAAEPGAGSQHLEVRDEVAEKCQKLFLDFLEEFQSSDGEIKYLQLAEELIRPERNTLVVSFVDLEQFNQQLSTTIQEEFYRVYPYLCRALKTFVKDRKEIPLAKDFYVAFQDLPTRHKIRELTSSRIGLLTRISGQVVRTHPVHPELVSGTFLCLDCQTVIRDVEQQFKYTQPNICRNPVCANRRRFLLDTNKSRFVDFQKVRIQETQAELPRGSIPRSLEVILRAEAVESAQAGDKCDFTGTLIVVPDVSKLSTPGARAETNSRVSGVDGYETEGIRGLRALGVRDLSYRLVFLACCVAPTNPRFGGKELRDEEQTAESIKNQMTVKEWEKVFEMSQDKNLYHNLCTSLFPTIHGNDEVKRGVLLMLFGGVPKTTGEGTSLRGDINVCIVGDPSTAKSQFLKHVEEFSPRAVYTSGKASSAAGLTAAVVRDEESHEFVIEAGALMLADNGVCCIDEFDKMDVRDQVAIHEAMEQQTISITKAGVKATLNARTSILAAANPISGHYDRSKSLKQNINLSAPIMSRFDLFFILVDECNEVTDYAIARRIVDLHSRIEESIDRVYSLDDIRRYLLFARQFKPKISKESEDFIVEQYKHLRQRDGSGVTKSSWRITVRQLESMIRLSEAMARMHCCDEVQPKHVKEAFRLLNKSIIRVETPDVNLDQEEEIQMEVDEGAGGINGHADSPAPVNGINGYNEDINQESAPKASLRLGFSEYCRISNLIVLHLRKVEEEEDESALKRSELVNWYLKEIESEIDSEEELINKKRIIEKVIHRLTHYDHVLIELTQAGAWLELC

SEQ ID NO: 893966 - protein, 821 aa, Homo sapiens; identical to SEQ ID NO: 893962

SEQ ID NO: 893967 - protein, 581 aa, Homo sapiens
MEARVNRPRVVPDVSKLSTPGARAETNSRVSGVDGYETEGIRGLRALGVRDLSYRLVFLACCVAPTNPRFGGKELRDEEQTAESIKNQMTVKEWEKVFEMSQDKNLYHNLCTSLFPTIHGNDEVKRGVLLMLFGGVPKTTGEGTSLRGDINVCIVGDPSTAKSQFLKHVEEFSPRAVYTSGKASSAAGLTAAVVRDEESHEFVIEAGALMLADNGVCCIDEFDKMDVRDQVAIHEAMEQQTISITKAGVKATLNARTSILAAANPISGHYDRSKSLKQNINLSAPIMSRFDLFFILVDECNEVTDYAIARRIVDLHSRIEESIDRVYSLDDIRRYLLFARQFKPKISKESEDFIVEQYKHLRQRDGSGVTKSSWRITVRQLESMIRLSEAMARMHCCDEVQPKHVKEAFRLLNKSIIRVETPDVNLDQEEEIQMEVDEGAGGINGHADSPAPVNGINGYNEDINQESAPKASLRLGFSEYCRISNLIVLHLRKVEEEEDESALKRSELVNWYLKEIESEIDSEEELINKKRIIEKVIHRLTHYDHVLIELTQAGLKGSTEGSESYEEDPYLVVNPNYLLED

SEQ ID NO: 893968 - protein, 453 aa, Homo sapiens
MYEEIPGFNFSHGALFEMDMITVPAWLADPSTAKSQFLKHVEEFSPRAVYTSGKASSAAGLTAAVVRDEESHEFVIEAGALMLADNGVCCIDEFDKMDVRDQVAIHEAMEQQTISITKAGVKATLNARTSILAAANPISGHYDRSKSLKQNINLSAPIMSRFDLFFILVDECNEVTDYAIARRIVDLHSRIEESIDRVYSLDDIRRYLLFARQFKPKISKESEDFIVEQYKHLRQRDGSGVTKSSWRITVRQLESMIRLSEAMARMHCCDEVQPKHVKEAFRLLNKSIIRVETPDVNLDQEEEIQMEVDEGAGGINGHADSPAPVNGINGYNEDINQESAPKASLRLGFSEYCRISNLIVLHLRKVEEEEDESALKRSELVNWYLKEIESEIDSEEELINKKRIIEKVIHRLTHYDHVLIELTQAGLKGSTEGSESYEEDPYLVVNPNYLLED

SEQ ID NO: 893969 - protein, 419 aa, Homo sapiens
PVVKRPVVETALGLNSSSGKASSAAGLTAAVVRDEESHEFVIEAGALMLADNGVCCIDEFDKMDVRDQVAIHEAMEQQTISITKAGVKATLNARTSILAAANPISGHYDRSKSLKQNINLSAPIMSRFDLFFILVDECNEVTDYAIARRIVDLHSRIEESIDRVYSLDDIRRYLLFARQFKPKISKESEDFIVEQYKHLRQRDGSGVTKSSWRITVRQLESMIRLSEAMARMHCCDEVQPKHVKEAFRLLNKSIIRVETPDVNLDQEEEIQMEVDEGAGGINGHADSPAPVNGINGYNEDINQESAPKASLRLGFSEYCRISNLIVLHLRKVEEEEDESALKRSELVNWYLKEIESEIDSEEELINKKRIIEKVIHRLTHYDHVLIELTQAGLKGSTEGSESYEEDPYLVVNPNYLLED

SEQ ID NO: 893970 - protein, 593 aa, Homo sapiens
MDLAAAAEPGAGSQHLEVRDEVAEKCQKLFLDFLEEFQSSDGEIKYLQLAEELIRPERNTLVVSFVDLEQFNQQLSTTIQEEFYRVYPYLCRALKTFVKDRKEIPLAKDFYVAFQDLPTRHKIRELTSSRIGLLTRISGQVVRTHPVHPELVSGTFLCLDCQTVIRDVEQQFKYTQPNICRNPVCANRRRFLLDTNKSRFVDFQKVRIQETQAELPRGSIPRSLEVILRAEAVESAQAGDKCDFTGTLIVVPDVSKLSTPGARAETNSRVSGVDGYETEGIRGLRALGVRDLSYRLVFLACCVAPTNPRFGGKELRDEEQTAESIKNQMTVKEWEKVFEMSQDKNLYHNLCTSLFPTIHGNDEVKRGVLLMLFGGVPKTTGEGTSLRGDINVCIVGDPSTAKSQFLKHVEEFSPRAVYTSGKASSAAGLTAAVVRDEESHEFVIEAGALMLADNGVCCIDEFDKMDVRDQVAIHEAMEQQTISITKAGVKATLNARTSILAAANPISGHYDRSKSLKQNINLSAPIMSRFDLFFILVDECNEVTDYAIARRIVDLHSRIEESIDRVYSLDDIRRYLLFARQFKPKVTYPFVLG

SEQ ID NO: 893971 - protein, 428 aa, Homo sapiens
  misc_feature (412)..(412): Xaa can be any naturally occurring amino acid
MDLAAAAEPGAGSQHLEVRDEVAEKCQKLFLDFLEEFQSSDGEIKYLQLAEELIRPERNTLVVSFVDLEQFNQQLSTTIQEEFYRVYPYLCRALKTFVKDRKEIPLAKDFYVAFQDLPTRHKIRELTSSRIGLLTRISGQVVRTHPVHPELVSGTFLCLDCQTVIRDVEQQFKYTQPNICRNPVCANRRRFLLDTNKSRFVDFQKVRIQETQAELPRGSIPRSLEVILRAEAVESAQAGDKCDFTGTLIVVPDVSKLSTPGARAETNSRVSGVDGYETEGIRGLRALGVRDLSYRLVFLACCVAPTNPRFGGKELRDEEQTAESIKNQMTVKEWEKVFEMSQDKNLYHNLCTSLFPTIHGNDEVKRGVLLMLFGGVPKTTGEGTSLRGDINVCIVGDPSTAKSQFLNLWEPXRMRNCHCVLSFPGAYL

SEQ ID NO: 893972 - protein, 304 aa, Homo sapiens
MDLAAAAEPGAGSQHLEVRDEVAEKCQKLFLDFLEEFQSSDGEIKYLQLAEELIRPERNTLVVSFVDLEQFNQQLSTTIQEEFYRVYPYLCRALKTFVKDRKEIPLAKDFYVAFQDLPTRHKIRELTSSRIGLLTRISGQVVRTHPVHPELVSGTFLCLDCQTVIRDVEQQFKYTQPNICRNPVCANRRRFLLDTNKSRFVDFQKVRIQETQAELPRGSIPRSLEVILRAEAVESAQAGDKCDFSGPWGVPRFQLHRPWDYPAGWGQTRFGPAGGRLGAPGAPPCGGVARLTRGAVDPSLYGGV

SEQ ID NO: 893973 - protein, 260 aa, Homo sapiens; identical to SEQ ID NO: 893961

SEQ ID NO: 893974 - protein, 176 aa, Homo sapiens
MDLAAAAEPGAGSQHLEVRDEVAEKCQKLFLDFLEEFQSSDGEIKYLQLAEELIRPERNTLVVSFVDLEQFNQQLSTTIQEEFYRIRELTSSRIGLLTRISGQVVRTHPVHPELVSGTFLCLDCQTVIRDVEQQFKYTQPNICRNPVCANRFHTNTGFSTSFGVFPVPVKLEPNNV

SEQ ID NO: 893975 - protein, 104 aa, Homo sapiens
  misc_feature (40)..(40): Xaa can be any naturally occurring amino acid
SESDLIYLLLKKSYFCLDSDLEVEARREESLRLFAICSWXFSLASFILLARVVAAEEMGKFMKPGKVVLVLAGRYSGRKAVIVKKNIDDGTSDRPLQPCSGGWN

SEQ ID NO: 893976 - protein, 74 aa, Homo sapiens
PHRGERLAEVSFFPFCCRPGWLLPKRTLMMAPQIAPYSHALVAGIDRYPRKVTACHGQEEDRQEIKDKIFCESV

SEQ ID NO: 893977 - protein, 118 aa, Homo sapiens
LLRVLHLEEVALGRESGDGAVVAHSGGGGLGSFRRDFPKRTLTACAHPRLPGPIRPRPNPWGRVLRCPAAEMGKFMKPGKVVLVLAGRYSGRKAVIVKKNIDDGTSDRPLQPCSGGWN

SEQ ID NO: 893978 - protein, 80 aa, Homo sapiens
EWYQHRGPITAGKSGINPEWPITAGSSGINAELPITAGGLFAVGPGGCCRNGQVHETWEGGACPGWTLLRTQSCHREEEH

SEQ ID NO: 893979 - protein, 258 aa, Homo sapiens
MARGRAEKRGHAKWANGPKGSVPENPSFLGAQRGDKICAGDTPYKEKSAYIHFRNNARGYPGFESRRNKTKTPTTKHHTKNHPRTTTNNDNDHKTDDDNRTKAHKHTTHNPPTENTRTTHATQQQNYTQTHNTTQDQANDQLREASQAANKHNSGHRRHEEKHERRAEQLRTPTKRKNNEEDSARREDKTRRRKEEKEKKKDDDTTNTQNRSRREEDQGNHEKQKTKREGAKTRGDGRSQRETRARHTKHERDGEKKM

SEQ ID NO: 893980 - protein, 122 aa, Homo sapiens
MKSGHTIAHSAQGIAAGGHQQVGGQWPQDFLAGQGQLQAQGSRGQGHPGGAQDRYVPKATALISSWSLREKEAMLPSTPRLPFPARPGWLLPKVEAWVESFNLLPSAAWGSKVRAAPGAFLP

SEQ ID NO: 893981 - protein, 80 aa, Homo sapiens; identical to SEQ ID NO: 893978

SEQ ID NO: 893982 - protein, 122 aa, Homo sapiens; identical to SEQ ID NO: 893980

SEQ ID NO: 893983 - protein, 80 aa, Homo sapiens
MEETPLLNGNANEENGEQEADNEVDEEEEEGGEEEDEEEEGDGEEEDGDEDEEAEVSYGQRAVKMMRMTMSIQEARREMI

SEQ ID NO: 893984 - protein, 258 aa, Homo sapiens
MARGRAEKRGHAKWANGPKGSVPENPSFLGAQRGDKICAGDTPYKEKSAYIHFRNNARGYPGFESRRNKTKTPTTKHHTKNHPRTTTNNDNDHKTDDDNRTKAHKHTTHNPPTENTRTTHATQQQNYTQTHNTTQDQANDQLREASQAANKHNSGHRRHEEKHERRAEQLRTPTYRKNNEEDSARREDKTRRRKEEKEKKKDDDTTNTQNRSRREEDQGNHEKQKTKREGAKTRGDGRSQRETRARHTKHERDGEKKM

SEQ ID NO: 893985 - protein, 122 aa, Homo sapiens; identical to SEQ ID NO: 893980

SEQ ID NO: 893986 - protein, 258 aa, Homo sapiens; identical to SEQ ID NO: 893979

SEQ ID NO: 893987 - protein, 140 aa, Homo sapiens
MKSGHTIAHSAQGIAAGGHQQVGGQWPQDFLEDKGSSRPKAPVVRATQVEPRIASPQSHCANFVMVTAREGSNAPLYPTSPLPRAARVVAAEEMGKFMKPGKVVLVLAGRYSGRKAVIVKKNIDDGTSDRPLQPCSGGWN

SEQ ID NO: 893988 - protein, 258 aa, Homo sapiens; identical to SEQ ID NO: 893979

SEQ ID NO: 893989 - protein, 258 aa, Homo sapiens
MARGRAEKRGHAKWANGPKGSVPENPSFLGAQRGDKICAGDTPYKEKSAYIHFRNNARGYPGFESRRNKTKTPTTKHHTKNHPRTTTNNDNDHKTDDDNRTKAHKHTTHNPPTENTRTTHATQQQNYTQQHNTTQDQANDQLREASQAANKHNSGHRRHEEKHERRAEQLRTPTKRKNNEEDSARREDKTRRRKEEKEKKKDDDTTNTQNRSRREEDQGNHEKQKTKREGAKTRGDGRSQRETRARHTKHERDGEKKM

SEQ ID NO: 893990 - protein, 140 aa, Homo sapiens; identical to SEQ ID NO: 893987

SEQ ID NO: 893991 - protein, 140 aa, Homo sapiens; identical to SEQ ID NO: 893987

SEQ ID NO: 893992 - protein, 170 aa, Homo sapiens
MKSGHTIAHSAQGIAAGGHQQVGGQWPQDFLEDKGSSRPKAPVVRATQVEPRIASPQSHCANFVMVTAREGSNAPLYPTSPLPRAARVVAAEEMGKFMKPGKVVLVLAGRYSGRKAVIVKKVLCGISPWTKLSSIRMSSEILLLNARPDGRAKVKFEREIQDRQEQVVLP

SEQ ID NO: 893993 - protein, 120 aa, Homo sapiens
TCNELRSHHCSPAWTKDSDSVSKKKKCEFSDNVIGTWLLMVASKESDPDSLVSHKDLGCIGAPAVCGLILPLHLCPKVLCGISPWTKLSSIRMSSEILLLNARPDGRAKVKFEREVSRLW

SEQ ID NO: 893994 - protein, 74 aa, Homo sapiens
  misc_feature (9)..(9): Xaa can be any naturally occurring amino acid
  misc_feature (11)..(11): Xaa can be any naturally occurring amino acid
  misc_feature (13)..(13): Xaa can be any naturally occurring amino acid
PAALTRLRXDXRXGVSPCCEARVVAAEMGKFMKPGKVVLVLAGRYSGRKAVIVKKNIDDGTSDRPLQPCSGGWN

SEQ ID NO: 893995 - protein, 105 aa, Homo sapiens
RPPTTTTARIQASNDVRGEMGKFMKPGKVVLVLAGRYSGRKAVIVKKVLCGISPWTKLSSIRMSSEILLLNARPDGRAKVKFEREIQDRQEQVVLPETAVLDALF

SEQ ID NO: 893996 - protein, 80 aa, Homo sapiens; identical to SEQ ID NO: 893983

SEQ ID NO: 893997 - protein, 258 aa, Homo sapiens
MARGRAEKRGHAKWANGPKGSVPENPSFLGAQRGDKICAGDTPYKEKSAYIHFRNNARGYPGFESRRNKTKTPTTKHHTKNHPRTTTNNDNDHKTDDDNRTKAHKHTTHNPPTENTRTTHATQQQNYTQTHNTTQDQANDQLREASQAANKHNSGHRRHEEKHERRAEQLRTPTKRKNNEEDSARREDKDETEKGRKREKKDDDTTNTQNRSRREEDQGNHEKQKTKREGAKTRGDGRSQRETRARHTKHERDGEKKM

SEQ ID NO: 893998 - protein, 140 aa, Homo sapiens; identical to SEQ ID NO: 893987

SEQ ID NO: 893999 - protein, 258 aa, Homo sapiens; identical to SEQ ID NO: 893979

SEQ ID NO: 894000 - protein, 122 aa, Homo sapiens; identical to SEQ ID NO: 893980

SEQ ID NO: 894001 - protein, 258 aa, Homo sapiens; identical to SEQ ID NO: 893979

SEQ ID NO: 894002 - protein, 258 aa, Homo sapiens; identical to SEQ ID NO: 893979

SEQ ID NO: 894003 - protein, 140 aa, Homo sapiens; identical to SEQ ID NO: 893987

SEQ ID NO: 894004 - protein, 73 aa, Homo sapiens
MGKKKIAKRSKIKSFVKVYNYNHLMPTRYSVGYPLGPTGGPRSSLNERYKTGKNKWFFQKLRFHKRFYRRRGR

SEQ ID NO: 894005 - protein, 140 aa, Homo sapiens; identical to SEQ ID NO: 893987

SEQ ID NO: 894006 - protein, 122 aa, Homo sapiens; identical to SEQ ID NO: 893980

SEQ ID NO: 894007 - protein, 96 aa, Homo sapiens
LLIFSSISWMGGKNPFLGIAYLVVGSLCILTGFVMLVVYIRYQDQDDDDEEWFRLSRDPSCFLPKLLQGAFGISSSPVTQFQPRLAFPPFVNEGTR

SEQ ID NO: 894008 - protein, 96 aa, Homo sapiens; identical to SEQ ID NO: 894007

SEQ ID NO: 894009 - protein, 96 aa, Homo sapiens; identical to SEQ ID NO: 894007

SEQ ID NO: 894010 - protein, 96 aa, Homo sapiens; identical to SEQ ID NO: 894007

SEQ ID NO: 894011 - protein, 96 aa, Homo sapiens; identical to SEQ ID NO: 894007

SEQ ID NO: 894012 - protein, 108 aa, Homo sapiens [sequence omitted]

SEQ ID NO: 894013 - protein, 341 aa, Homo sapiens
PGLSGPLPWERERWTQAAMSRPRMRLVVTADDFGYCPRRDEGIVEAFLAGAVTSVSLLVNGAATESAAELARRHSIPTGLHANLSEGRPVGPARRGASSLLGPEGFFLGKMGFREAVAAGDVDLPQVREELEAQLSCFRELLGRAPTHADGHQHVHVLPGVCQVFAEALQAYGVRFTRLPLERGVGGCTWLEAPARAFACAVERDARAAVGPFSRHGLRWTDAFVGLSTCGRHMSAHRVSGALARVLEGTLAGHTLTAELMAHPGYPSVPPTGGCGEGPDAFSCSWERLHELRVLTAPTLRAQLAQDGVQLCALDDLDSKRPGEEVPCEPTLEPFLEPSLL

SEQ ID NO: 894014 - protein, 406 aa, Homo sapiens
PGLSGPLPWERERWTQAAMSRPRMRLVVTADDFGYCPRRDEGIVEAFLAGAVTSVSLLVNGAATESAAELARRHSIPTGLHANLSEGRPVGPARRGASSLLGPEGFFLGKMGFREAVAAGDVDLPQVRSRSYRRMLARTPRAPPGGYCEAVRSWRWMTSAFKHWSHHTEARGGYPRQLLPVAQGVSRSPSEVREELEAQLSCFRELLGRAPTHADGHQHVHVLPGVCQVFAEALQAYGVRFTRLPLERGVGGCTWLEAPARAFACAVERDARAAVGPFSRHGLRWTDAFVGLSTCGRHMSAHRVSGALARVLEGTLAGHTLTAELMAHPGYPSVPPTGGCGEGPDAFSCSWERLHELRVLTAPTLRAQLAQDGVQLCALDDLDSKRPGEEVPCEPTLEPFLEPSLL

SEQ ID NO: 894015 - protein, 108 aa, Homo sapiens [sequence omitted]

SEQ ID NO: 894016 - protein, 108 aa, Homo sapiens [sequence omitted]

SEQ ID NO: 894017 - protein, 108 aa, Homo sapiens [sequence omitted]

SEQ ID NO: 894018 - protein, 108 aa, Homo sapiens [sequence omitted]

SEQ ID NO: 894019 - protein, 108 aa, Homo sapiens [sequence omitted]

SEQ ID NO: 894020 - protein, 167 aa, Homo sapiens
PGLSGPLPWERERWTQAAMSRPRMRLVVTADDFGYCPRRDEGIVEAFLAGAVTSVSLLVNGAATESAAELARRHSIPTGLHANLSEGRPVGPARRGASSLLGPEGFFLGKMGFREAVAAGDVDLPQVREELEAQLSCFRELLGRAPTHADGHQHVHVLPGGQTPSWA

SEQ ID NO: 894021 - protein, 199 aa, Homo sapiens
PGLSGPLPWERERWTQAAMSRPRMRLVVTADDFGYCPRRDEGIVEAFLAGAVTSVSLLVNGAATESAAELARRHSIPTGLHANLSEGRPVGPARRGASSLLGPEGFFLGKMGFREAVAAGDVDLPQVRSRSYRRMLARTPRAPPGGYCEAVRSWRWMTSAFKHWSHHTEARGGYPRQLLPVAQGVSRSPSRCGRSSRPN

SEQ ID NO: 894022 - protein, 108 aa, Homo sapiens [sequence omitted]

SEQ ID NO: 894023 - protein, 693 aa, Homo sapiens
MRACAGSTREAGSGAAQDLSTLLCLEESMEEQDEKPPEPPKVCAQDSFLPQEIIIKVEGEDTGSLTIPSQEGVNFKIVTVDFTREEQGTCNPAQRTLDRDVILENHRDLVSWDLATAVGKKDSTSKQRIFDEEPANGVKIERFTRDDPWLSSCEEVDDCKDQLEKQQEKQEILLQEVAFTQRKAVIHERVCKSDETGEKSGLNSSLFSSPVIPIRNHFHKHVSHAKKWHLNAAVNSHQKINENETLYENNECGKPPQSIHLIQFTRTQTKDKSYGFSDRIQSFCHGTPLHIHEKIHGGGKTFDFKECGQVLNPKISHNEQQRIPFEESQYKCSETSHSSSLTQNMRNNSEEKPFECNQCGKSFSWSSHLVAHQRTHTGEKPYECSECGKSFSRSSHLVSHQRTHTGEKPYRCNQCGKSFSQSYVLVVHQRTHTGEKPYECNQCGKSFRQSYKLIAHQRTHTGEKPYECNQCGKSFIQSYKLIAHQRIHTGEKPYECNQCGKSFSQSYKLVAHQRTHTGEKPFECNQCGKSFSWSSQLVAHQRTHTGEKPYECSECGKSFNRSSHLVMHQRIHTGEKPYECNQCGKSFSQSYVLVVHQRTHTGEKPYECSQCGKSFRQSSCLTQHQRTHTGEKPFECNQCGKTFSLSARLIVHQRTHTGEKPFTCIQCGKAFINSYKLIRHQATHTEEKLYECN

SEQ ID NO: 894024 - protein, 665 aa, Homo sapiens
MEEQDEKPPEPPKVCAQDSFLPQEIIIKVEGEDTGSLTIPSQEGVNFKIVTVDFTREEQGTCNPAQRTLDRDVILENHRDLVSWDLATAVGKKDSTSKQRIFDEEPANGVKIERFTRDDPWLSSCEEVDDCKDQLEKQQEKQEILLQEVAFTQRKAVIHERVCKSDETGEKSGLNSSLFSSPVIPIRNHFHKHVSHAKKWHLNAAVNSHQKINENETLYENNECGKPPQSIHLIQFTRTQTKDKSYGFSDRIQSFCHGTPLHIHEKIHGGGKTFDFKECGQVLNPKISHNEQQRIPFEESQYKCSETSHSSSLTQNMRNNSEEKPFECNQCGKSFSWSSHLVAHQRTHTGEKPYECSECGKSFSRSSHLVSHQRTHTGEKPYRCNQCGKSFSQSYVLVVHQRTHTGEKPYECNQCGKSFRQSYKLIAHQRTHTGEKPYECNQCGKSFIQSYKLIAHQRIHTGEKPYECNQCGKSFSQSYKLVAHQRTHTGEKPFECNQCGKSFSWSSQLVAHQRTHTGEKPYECSECGKSFNRSSHLVMHQRIHTGEKPYECNQCGKSFSQSYVLVVHQRTHTGEKPYECSQCGKSFRQSSCLTQHQRTHTGEKPFECNQCGKTFSLSARLIVHQRTHTGEKPFTCIQCGKAFINSYKLIRHQATHTEEKLYECN

SEQ ID NO: 894025 - protein, 535 aa, Homo sapiens
MFSWLGTDDRRRKDPEVFQTVSEGLKKLYKSKLLPLEEHYRFHEFHSPALEDADFDNKPMVLLVGQYSTGKTTFIRYLLEQDFPGMRIGPEPTTDSFIAVMQGDMEGIIPGNALVVDPKKPFRKLNAFGNAFLNRFVCAQLPNPVLESISVIDTPGILSGEKQRISRGYDFAAVLEWFAERVDRIILLFDAHKLDISDEFSEVIKALKNHEDKMRVVLNKADQIETQQLMRVYGALMWSLGKIVNTPEVIRVYIGSFWSHPLLIPDNRKLFEAEEQDLFRDIQSLPRNAALRKLNDLIKRARLAKVHAYIISSLKKEMPSVFGKDNKKKELVNNLAEIYGRIEREHQISPGDFPNLKRMQDQLQAQDFSKFQPLKSKLLEVVDDMLAHDIAQLMVLVRQEESQRPIQMVKGGAFEGTLHGPFGHGYGEGAGEGIDDAEWVVARDKPMYDEIFYTLSPVDGKITGANAKKEMVRSKLPNSVLGKIWKLADIDKDGMLDDDEFALANHLIKVKLEGHELPNELPAHLLPPSKRKVAE

SEQ ID NO: 894026 - protein, 450 aa, Homo sapiens
MRIGPEPTTDSFIAVMQGDMEGIIPGNALVVDPKKPFRKLNAFGNAFLNRFVCAQLPNPVLESISVIDTPGILSGEKQRISRGYDFAAVLEWFAERVDRIILLFDAHKLDISDEFSEVIKALKNHEDKMRVVLNKADQIETQQLMRVYGALMWSLGKIVNTPEVIRVYIGSFWSHPLLIPDNRKLFEAEEQDLFRDIQSLPRNAALRKLNDLIKRARLAKVHAYIISSLKKEMPSVFGKDNKKKELVNNLAEIYGRIEREHQISPGDFPNLKRMQDQLQAQDFSKFQPLKSKLLEVVDDMLAHDIAQLMVLVRQEESQRPIQMVKGGAFEGTLHGPFGHGYGEGAGEGIDDAEWVVARDKPMYDEIFYTLSPVDGKITGANAKKEMVRSKLPNSVLGKIWKLADIDKDGMLDDDEFALANHLIKVKLEGHELPNELPAHLLPPSKRKVAE

SEQ ID NO: 894027 - protein, 103 aa, Homo sapiens
MPTSTTSPWFCWWASTPLGRPPSSGEPAQGPGSPPRSPAPSPSGHSWCSIPDRGPMGSPQLRALKRSVFVQASKSYPTIFAGPPSHPTQYLSTLLGPWLWWST

SEQ ID NO: 894028 - protein, 535 aa, Homo sapiens; identical to SEQ ID NO: 894025

SEQ ID NO: 894029 - protein, 528 aa, Homo sapiens
MFSWLGTDDRRRKDPEVFQTVSEGLKKLYKSKLLPLEEHYRFHEFHSPALEDADFDNKPMVLLVGQYSTGKTTFIRYLLEQDFPGMRIGPEPTTDSFIAVMQGDMEGIIPGNALVVDPKKPFRKLNAFGNAFLNRFVCAQLPNPVLESISVIDTPGILSGEKQRISRGYDFAAVLEWFAERVDRIILLFDAHKLDISDEFSEVIKALKNHEDKMRVVLNKADQIETQQLMRVYGALMWSLGKIVNTPEVIRVYIGSFWSHPLLIPDNRKLFEAEEQDLFRDIQSLPRNAALRKLNDLIKRARLAKVHAYIISSLKKEMPSVFGKDNKKKELVNNLAEIYGRIEREHQISPGDFPNLKRMQDQLQAQDFSKFQPLKSKLLEVVDDMLAHDIAQLMVLVRQEESQRPIQMVKGGAFEGTLHGPFGHGYGEGAGEGIDDAEWVVARDKPMYDEIFYTLSPVDGKITGANAKKEMVRSKLPNSVLGKIWKLADIDKDGMLDDDGSFFLYSPPIQLTRAGVTEGACLLMPPDA

SEQ ID NO: 894030 - protein, 131 aa, Homo sapiens
PGLVFTAVCPLLLEAQPLWPCVLQVLGDPQLRRPGAPGSLEMGPLQFRDVAIEFSLEEWHCLDTAQRNLYRNVMLENYRNLVFLGIVVSKPDLITCLEQRLQWGKIVRLHSSLGNKSKTLSQKKKSLLDYL

SEQ ID NO: 894031 - protein, 577 aa, Homo sapiens
PGLVFTAVCPLLLEAQPLWPCVLQVLGDPQLRRPGAPGSLEMGPLQFRDVAIEFSLEEWHCLDTAQRNLYRNVMLENYRNLVFLGIVVSKPDLITCLEQGKKPLTMKKHEMVANPSVTCSHFARDLWPEQSIKDSFQKVTLRRYENYGHDNLQFKKGCESVDECKVHKRGYNGLNQYLTTTQSKIFQCDKYVKVIHKFSNSNRHKIRHTGKKPFKCIECGKAFNQSSTLTTHKKIHTGEKPFKCEECGKAFNWSSHLTTHKRIHTGEKRYKCEDCGKAFSRFSYLTAHKIIHSGEKPYKCEECGKAFKRSSNLTTHKIIHTGEKPYKCEECGKAFKRSSILTAHKIIHSGEKPYKCEECGKAFKHPSVLTTHKRIHTGEKPYKCEECGRAFKYFSSLTTHKIIHSGEKPYKCEECGKAFNWSSHLTTHKRIHTGEKPYKCEECGEAFKYSSSLTTHKIIHTGQQPFKCEECGKAFKCFSILTTHKRIHTGEKPYKCEECGKAFNSSSHLTAHKRIHTGEKPYKCERCGKAFKRSFILTRHKRIHTGEKPYKCEECGEGFKCPSTLTTHKVIHTGEKL

SEQ ID NO: 894032 - protein, 577 aa, Homo sapiens; identical to SEQ ID NO: 894031

SEQ ID NO: 894033 - protein, 535 aa, Homo sapiens
SRSCLHCCVSSAPRGPASVALCPAGIGRSTAKTPGSPWKPRNGIVVSKPDLITCLEQGKKPLTMKKHEMVANPSVTCSHFARDLWPEQSIKDSFQKVTLRRYENYGHDNLQFKKGCESVDECKVHKRGYNGLNQYLTTTQSKIFQCDKYVKVIHKFSNSNRHKIRHTGKKPFKCIECGKAFNQSSTLTTHKKIHTGEKPFKCEECGKAFNWSSHLTTHKRIHTGEKRYKCEDCGKAFSRFSYLTAHKIIHSGEKPYKCEECGKAFKRSSNLTTHKIIHTGEKPYKCEECGKAFKRSSILTAHKIIHSGEKPYKCEECGKAFKHPSVLTTHKRIHTGEKPYKCEECGRAFKYFSSLTTHKIIHSGEKPYKCEECGKAFNWSSHLTTHKRIHTGEKPYKCEECGEAFKYSSSLTTHKIIHTGQQPFKCEECGKAFKCFSILTTHKRIHTGEKPYKCEECGKAFNSSSHLTAHKRIHTGEKPYKCERCGKAFKRSFILTRHKRIHTGEKPYKCEECGEGFKCPSTLTTHKVIHTGEKL

SEQ ID NO: 894034 - protein, 591 aa, Homo sapiens
PGLVFTAVCPLLLEAQPLWPCVLQVLGDPQLRRPGAPGSLEMGPLQFRDVAIEFSLEEWHCLDTAQRNLYRNVMLENYRNLVFLGIVVSKPDLITCLEQGKKPLTMKKHEMVANPSVTCSHFARDLWPEQSIKDSFQKVTLRRYENYGHDNLQFKKGCESVDECKVHKRGYNGLNQYLTTTQSKIFQCDKYVKVIHKFSNSNRHKIRHTGKKPFKCIECGKAFNQSSTLTTHKKIHTGEKPFKCEECGKAFNWSSHLTTHKRIHTGEKRYKCEDCGKAFSRFSYLTAHKIIHSGEKPYKCEECGKAFKRSSNLTTHKIIHTGEKPYKCEECGKAFKRSSILTAHKIIHSGEKPYKCEECGKAFKHPSVLTTHKRIHTGEKPYKCEECGRAFKYFSSLTTHKIIHSGEKPYKCEECGKAFNWSSHLTTHKRIHTGEKPYKCEECGEAFKYSSSLTTHKIIHTGQQPFKCEECGKAFKCFSILTTHKRIHTGEKPYKCEECGKAFNSSSHLTAHKRIHTGEKPYKCERCGKAFKRSFILTRHKRIHTGEKPYKCEECGEGFKCPSTLTTHKFFVYCREVAVLLENCYSHLYPH

SEQ ID NO: 894035 - protein, 120 aa, Homo sapiens
PGLVFTAVCPLLLEAQPLWPCVLQVLGDPQLRRPGAPGSLEMGPLQFRDVAIEFSLEEWHCLDTAQRNLYRNVMLENYRNLVFLGIVVSKPDLITCLEQGKKPLTMKKHEMVANPSGRCK

SEQ ID NO: 894036 - protein, 183 aa, Homo sapiens
MTTASASQVRQNSHQDSEAAINRQINLELYASYVYLSMSYYFDRDDVALKNFAKYFLHQSHEEREHAEKLMELQNQLGGRIFLQDIKKPDCDDWESRLNATECALHLEKNVNQSLLELHKLATDKNDPHLCDFIETHYLNEQVKAIKELGDQVTNLRKMGAPESGLAEYLFDKHILGDSDNES

SEQ ID NO: 894037 - protein, 172 aa, Homo sapiens
TDRTEVIPLVLEVSIACSLASYVYLSMSYYFDRDDVALKNFAKYFLHQSHEEREHAEKLMELQNQLGGRIFLQDIKKPDCDDWESRLNATECALHLEKNVNQSLLELHKLATDKNDPHLCDFIETHYLNEQVKAIKELGDQVTNLRKMGAPESGLAEYLFDKHILGDSDNES

SEQ ID NO: 894038 - protein, 122 aa, Homo sapiens
ITALLMGIILMEKSKGKGQQLGSTPDESSGLGGVHVVLSLGRVRAAARVGPAVGVCSVEMGRKLEPGSSSHSLPAPAPRHHLLVGSALMPHLSLQRDLDFTIDLDFKGQLCELSCSTDYRMR

SEQ ID NO: 894039 - protein, 373 aa, Homo sapiens
TLEVPQRWSSAEAANCIMEVSCGQAESSEKPNAEDMTSKDYYFDSYAHFGIHEEMLKDEVRTLTYRNSMFHNRHLFKDKVVLDVGSGTGILCMFAAKAGARKVIGIECSSISDYAVKIVKANKLDHVVTIIKGKVEEVELPVEKVDIIISEWMGYCLFYESMLNTVLYARDKWLAPDGLIFPDRATLYVTAIEDRQYKDYKIHWWENVYGFDMSCIKDVAIKEPLVDVVDPKQLVTNACLIKEVDIYTVKVEDLTFTSPFCLQVKRNDYVHALVAYFNIEFTRCHKRTGFSTSPESPYTHWKQTVFYMEDYLTVKTGEEIFGTIGMRPNAQEQPGPGLHHRPGLQGPAVRAVLLHRLPDALRPGSPALHEPRG

SEQ ID NO: 894040 - protein, 89 aa, Homo sapiens
VDPPGCRIRPESPYTHWKQTVFYMEDYLTVKTGEEIFGTIGMRPNAQEQPGPGLHHRPGLQGPAVRAVLLHRLPDALRPGSPALHEPRG

SEQ ID NO: 894041 - protein, 99 aa, Homo sapiens
ITALLMGIILMEKSKGKGQQLGSTPDGTWTSPSTWTSRASCASCPAPPTTGCAEARLSRPARAQGLSVPRRFRGSPFLSLPPAEGGFRGLGWGDGEGTS

SEQ ID NO: 894042 - protein, 93 aa, Homo sapiens
MRPGHGGQQRQSPREKLTQRVEQTLGNCTNRQAKNRDITNATRKDRHLKTGNIERTHTNSCGPAAPQHREDKDSPRDAETAPQTTEPPRATRH

SEQ ID NO: 894043 - protein, 48 aa, Homo sapiens
LESPGVVWVGKVGPGRWVRGWVALRVVMECGPWDTHEPVTAAVVNWAV

SEQ ID NO: 894044 - protein, 38 aa, Homo sapiens
PPPPRTFATVCGNICGCHPYKDSCSPRDHGTSWETDTG

SEQ ID NO: 894045 - protein, 373 aa, Homo sapiens; identical to SEQ ID NO: 894039

SEQ ID NO: 894046 - protein, 366 aa, Homo sapiens
MAAAEAANCIMEVSCGQAESSEKPNAEDMTSKDYYFDSYAHFGIHEEMLKDEVRTLTYRNSMFHNRHLFKDKVVLDVGSGTGILCMFAAKAGARKVIGIECSSISDYAVKIVKANKLDHVVTIIKGKVEEVELPVEKVDIIISEWMGYCLFYESMLNTVLYARDKWLAPDGLIFPDRATLYVTAIEDRQYKDYKIHWWENVYGFDMSCIKDVAIKEPLVDVVDPKQLVTNACLIKEVDIYTVKVEDLTFTSPFCLQVKRNDYVHALVAYFNIEFTRCHKRTGFSTSPESPYTHWKQTVFYMEDYLTVKTGEEIFGTIGMRPNAQEQPGPGLHHRPGLQGPAVRAVLLHRLPDALRPGSPALHEPRG

SEQ ID NO: 894047 - protein, 366 aa, Homo sapiens; identical to SEQ ID NO: 894046

SEQ ID NO: 894048 - protein, 385 aa, Homo sapiens
MAAAEAANCIMENFVATLANGMSLQPPLEEEVSCGQAESSEKPNAEDMTSKDYYFDSYAHFGIHEEMLKDEVRTLTYRNSMFHNRHLFKDKVVLDVGSGTGILCMFAAKAGARKVIGIECSSISDYAVKIVKANKLDHVVTIIKGKVEEVELPVEKVDIIISEWMGYCLFYESMLNTVLYARDKWLAPDGLIFPDRATLYVTAIEDRQYKDYKIHWWENVYGFDMSCIKDVAIKEPLVDVVDPKQLVTNACLIKEVDIYTVKVEDLTFTSPFCLQVKRNDYVHALVAYFNIEFTRCHKRTGFSTSPESPYTHWKQTVFYMEDYLTVKTGEEIFGTIGMRPNAQEQPGPGLHHRPGLQGPAVRAVLLHRLPDALRPGSPALHEPRG

SEQ ID NO: 894049 - protein, 373 aa, Homo sapiens; identical to SEQ ID NO: 894039

SEQ ID NO: 894050 - protein, 373 aa, Homo sapiens; identical to SEQ ID NO: 894039

SEQ ID NO: 894051 - protein, 373 aa, Homo sapiens; identical to SEQ ID NO: 894039

SEQ ID NO: 894052 - protein, 360 aa, Homo sapiens
MVGVAEVSCGQAESSEKPNAEDMTSKDYYFDSYAHFGIHEEMLKDEVRTLTYRNSMFHNRHLFKDKVVLDVGSGTGILCMFAAKAGARKVIGIECSSISDYAVKIVKANKLDHVVTIIKGKVEEVELPVEKVDIIISEWMGYCLFYESMLNTVLYARDKWLAPDGLIFPDRATLYVTAIEDRQYKDYKIHWWENVYGFDMSCIKDVAIKEPLVDVVDPKQLVTNACLIKEVDIYTVKVEDLTFTSPFCLQVKRNDYVHALVAYFNIEFTRCHKRTGFSTSPESPYTHWKQTVFYMEDYLTVKTGEEIFGTIGMRPNAQEQPGPGLHHRPGLQGPAVRAVLLHRLPDALRPGSPALHEPRG

SEQ ID NO: 894053 - protein, 373 aa, Homo sapiens; identical to SEQ ID NO: 894039

SEQ ID NO: 894054 - protein, 367 aa, Homo sapiens
LVQIRHEEETGEMVSCGQAESSEKPNAEDMTSKDYYFDSYAHFGIHEEMLKDEVRTLTYRNSMFHNRHLFKDKVVLDVGSGTGILCMFAAKAGARKVIGIECSSISDYAVKIVKANKLDHVVTIIKGKVEEVELPVEKVDIIISEWMGYCLFYESMLNTVLYARDKWLAPDGLIFPDRATLYVTAIEDRQYKDYKIHWWENVYGFDMSCIKDVAIKEPLVDVVDPKQLVTNACLIKEVDIYTVKVEDLTFTSPFCLQVKRNDYVHALVAYFNIEFTRCHKRTGFSTSPESPYTHWKQTVFYMEDYLTVKTGEEIFGTIGMRPNAQEQPGPGLHHRPGLQGPAVRAVLLHRLPDALRPGSPALHEPRG

SEQ ID NO: 894055 - protein, 338 aa, Homo sapiens
MTSKDYYFDSYAHFGIHEEMLKDEVRTLTYRNSMFHNRHLFKDKVVLDVGSGTGILCMFAAKAGARKVIGIECSSISDYAVKIVKANKLDHVVTIIKGKVEEVELPVEKVDIIISEWMGYCLFYESMLNTVLYARDKWLAPDGLIFPDRATLYVTAIEDRQYKDYKIHWWENVYGFDMSCIKDVAIKEPLVDVVDPKQLVTNACLIKEVDIYTVKVEDLTFTSPFCLQVKRNDYVHALVAYFNIEFTRCHKRTGFSTSPESPYTHWKQTVFYMEDYLTVKTGEEIFGTIGMRPNAQEQPGPGLHHRPGLQGPAVRAVLLHRLPDALRPGSPALHEPRG

SEQ ID NO: 894056 - protein, 362 aa, Homo sapiens
MKSSSGVAVSCGQAESSEKPNAEDMTSKDYYFDSYAHFGIHEEMLKDEVRTLTYRNSMFHNRHLFKDKVVLDVGSGTGILCMFAAKAGARKVIGIECSSISDYAVKIVKANKLDHVVTIIKGKVEEVELPVEKVDIIISEWMGYCLFYESMLNTVLYARDKWLAPDGLIFPDRATLYVTAIEDRQYKDYKIHWWENVYGFDMSCIKDVAIKEPLVDVVDPKQLVTNACLIKEVDIYTVKVEDLTFTSPFCLQVKRNDYVHALVAYFNIEFTRCHKRTGFSTSPESPYTHWKQTVFYMEDYLTVKTGEEIFGTIGMRPNAQEQPGPGLHHRPGLQGPAVRAVLLHRLPDALRPGSPALHEPRG

SEQ ID NO: 894057 - protein, 338 aa, Homo sapiens; identical to SEQ ID NO: 894055

SEQ ID NO: 894058 - protein, 338 aa, Homo sapiens; identical to SEQ ID NO: 894055

SEQ ID NO: 894059 - protein, 360 aa, Homo sapiens; identical to SEQ ID NO: 894052

SEQ ID NO: 894060 - protein, 332 aa, Homo sapiens
MAAAEAANCIMEEMLKDEVRTLTYRNSMFHNRHLFKDKVVLDVGSGTGILCMFAAKAGARKVIGIECSSISDYAVKIVKANKLDHVVTIIKGKVEEVELPVEKVDIIISEWMGYCLFYESMLNTVLYARDKWLAPDGLIFPDRATLYVTAIEDRQYKDYKIHWWENVYGFDMSCIKDVAIKEPLVDVVDPKQLVTNACLIKEVDIYTVKVEDLTFTSPFCLQVKRNDYVHALVAYFNIEFTRCHKRTGFSTSPESPYTHWKQTVFYMEDYLTVKTGEEIFGTIGMRPNAQEQPGPGLHHRPGLQGPAVRAVLLHRLPDALRPGSPALHEPRG

SEQ ID NO: 894061 - protein, 387 aa, Homo sapiens
MVGVAEVSCGQAESSEKPNAEDMTSKDYYFDSYAHFGIHERRSRSVAQAESALVQSWLTAASTSPAQEMLKDEVRTLTYRNSMFHNRHLFKDKVVLDVGSGTGILCMFAAKAGARKVIGIECSSISDYAVKIVKANKLDHVVTIIKGKVEEVELPVEKVDIIISEWMGYCLFYESMLNTVLYARDKWLAPDGLIFPDRATLYVTAIEDRQYKDYKIHWWENVYGFDMSCIKDVAIKEPLVDVVDPKQLVTNACLIKEVDIYTVKVEDLTFTSPFCLQVKRNDYVHALVAYFNIEFTRCHKRTGFSTSPESPYTHWKQTVFYMEDYLTVKTGEEIFGTIGMRPNAQEQPGPGLHHRPGLQGPAVRAVLLHRLPDALRPGSPALHEPRG

SEQ ID NO: 894062 - protein, 327 aa, Homo sapiens
VPVPSKAEMLKDEVRTLTYRNSMFHNRHLFKDKVVLDVGSGTGILCMFAAKAGARKVIGIECSSISDYAVKIVKANKLDHVVTIIKGKVEEVELPVEKVDIIISEWMGYCLFYESMLNTVLYARDKWLAPDGLIFPDRATLYVTAIEDRQYKDYKIHWWENVYGFDMSCIKDVAIKEPLVDVVDPKQLVTNACLIKEVDIYTVKVEDLTFTSPFCLQVKRNDYVHALVAYFNIEFTRCHKRTGFSTSPESPYTHWKQTVFYMEDYLTVKTGEEIFGTIGMRPNAQEQPGPGLHHRPGLQGPAVRAVLLHRLPDALRPGSPALHEPRG

SEQ ID NO: 894063 - protein, 373 aa, Homo sapiens; identical to SEQ ID NO: 894039

SEQ ID NO: 894064 - protein, 357 aa, Homo sapiens
  misc_feature (3)..(3): Xaa can be any naturally occurring amino acid
MHXEECPKLLEGTMNNPKDFHSFDFHTHTFGIPRRMNAWMDRRVRTLTYRNSMFHNRHLFKDKVVLDVGSGTGILCMFAAKAGARKVIGIECSSISDYAVKIVKANKLDHVVTIIKGKVEEVELPVEKVDIIISEWMGYCLFYESMLNTVLYARDKWLAPDGLIFPDRATLYVTAIEDRQYKDYKIHWWENVYGFDMSCIKDVAIKEPLVDVVDPKQLVTNACLIKEVDIYTVKVEDLTFTSPFCLQVKRNDYVHALVAYFNIEFTRCHKRTGFSTSPESPYTHWKQTVFYMEDYLTVKTGEEIFGTIGMRPNAQEQPGPGLHHRPGLQGPAVRAVLLHRLPDALRPGSPALHEPRG

SEQ ID NO: 894065 - protein, 336 aa, Homo sapiens
  misc_feature (15)..(15): Xaa can be any naturally occurring amino acid
RHTFGNSNERADFAXTRNQMCLVRTLTYRNSMFHNRHLFKDKVVLDVGSGTGILCMFAAKAGARKVIGIECSSISDYAVKIVKANKLDHVVTIIKGKVEEVELPVEKVDIIISEWMGYCLFYESMLNTVLYARDKWLAPDGLIFPDRATLYVTAIEDRQYKDYKIHWWENVYGFDMSCIKDVAIKEPLVDVVDPKQLVTNACLIKEVDIYTVKVEDLTFTSPFCLQVKRNDYVHALVAYFNIEFTRCHKRTGFSTSPESPYTHWKQTVFYMEDYLTVKTGEEIFGTIGMRPNAQEQPGPGLHHRPGLQGPAVRAVLLHRLPDALRPGSPALHEPRG

SEQ ID NO: 894066 - protein, 345 aa, Homo sapiens
TLEVPQRWSSAEAANCIMEVSCGQAESSEKPNAEDMTSKDYYFDSYAHFGIHEEMLKDEVRTLTYRNSMFHNRHLFKDKVVLDVGSGTGILCMFAAKAGARKVIGIECSSISDYAVKIVKANKLDHVVTIIKGKVEEVELPVEKVDIIISEWMGYCLFYESMLNTVLYARDKWLAPDGLIFPDRATLYVTAIEDRQYKDYKIHWWENVYGFDMSCIKDVAIKEPLVDVVDPKQLVTNACLIKEVDIYTVKVEDLTFTSPFCLQVKRNDYVHALVAYFNIEFTRCHKRTGFSTSPESPYTHWKQTVFYMEDYLTVKTGEEIFGTIGMRPNAQEQPGPGLHHRPCKA

SEQ ID NO: 894067 - protein, 221 aa, Homo sapiens
MGYCLFYESMLNTVLYARDKWLAPDGLIFPDRATLYVTAIEDRQYKDYKIHWWENVYGFDMSCIKDVAIKEPLVDVVDPKQLVTNACLIKEVDIYTVKVEDLTFTSPFCLQVKRNDYVHALVAYFNIEFTRCHKRTGFSTSPESPYTHWKQTVFYMEDYLTVKTGEEIFGTIGMRPNAQEQPGPGLHHRPGLQGPAVRAVLLHRLPDALRPGSPALHEPRG

SEQ ID NO: 894068 - protein, 299 aa, Homo sapiens
MAAAEAANCIMEVSCGQAESSEKPNAEDMTSKDYYFDSYAHFGIHEEMLKDEVRTLTYRNSMFHNRHLFKDKVVLDVGSGTGILCMFAAKAGARKVIGIECSSISDYAVKIVKANKLDHVVTIIKGKVEEVELPVEKVDIIISEWMGYCLFYESMLNTVLYARDKWLAPDGLIFPDRATLYVTAIEDRQYKDYKIHWWENVYGFDMSCIKDVAIKEPLVDVVDPKQLVTNACLIKVRGWAWPGAPWVETKERPSPGPGMGLWGPECWPEVSEPDLPARGGARGPGKTLRPLNIFVSAAV

SEQ ID NO: 894069 - protein, 249 aa, Homo sapiens
MAAAEAANCIMEVSCGQAESSEKPNAEDMTSKDYYFDSYAHFGIHEEMLKDEVRTLTYRNSMFHNRHLFKDKVVLDVGSGTGILCMFAAKAGARKVIGIECSSISDYAVKIVKANKLDHVVTIIKGKVEEVELPVEKVDIIISEWMGYCLFYESMLNTVLYARDKWLAPDGLIFPDRATLYVTAIEDRQYKDYKIHWWENVYGFDMSCIKDVAIKEPLVDVVDPKQLVTNACLIKPEVVLEAQERHFVL

SEQ ID NO: 894070 - protein, 321 aa, Homo sapiens
TLEVPQRWSSAEAANCIMEVSCGQAESSEKPNAEDMTSKDYYFDSYAHFGIHEEMLKDEVRTLTYRNSMFHNRHLFKDKVVLDVGSGTGILCMFAAKAGARKVIGIECSSISDYAVKIVKANKLDHVVTIIKGKVEEVELPVEKVDIIISEWMGYCLFYESMLNTVLYARDKWLAPDGLIFPDRATLYVTAIEDRQYKDYKIHWWENVYGFDMSCIKDVAIKEPLVDVVDPKQLVTNACLIKEVDIYTVKVEDLTFTSPFCLQVKRNDYVHALVAYFNIEFTRCHKRTGFSTSPESPYTHWKQTVFYMVRGLGWGDGEGTS

SEQ ID NO: 894071 - protein, 189 aa, Homo sapiens
MLNFYFSYVLIYIKDYKIHWWENVYGFDMSCIKDVAIKEPLVDVVDPKQLVTNACLIKEVDIYTVKVEDLTFTSPFCLQVKRNDYVHALVAYFNIEFTRCHKRTGFSTSPESPYTHWKQTVFYMEDYLTVKTGEEIFGTIGMRPNAQEQPGPGLHHRPGLQGPAVRAVLLHRLPDALRPGSPALHEPRG

SEQ ID NO: 894072 - protein, 312 aa, Homo sapiens
MAAAEAANCIMEVSCGQAESSEKPNAEDMTSKDYYFDSYAHFGIHEEMLKDEVRTLTYRNSMFHNRHLFKDKVVLDVGSGTGILCMFAAKAGARKVIGIECSSISDYAVKIVKANKLDHVVTIIKGKVEEVELPVEKVDIIISEWMGYCLFYESMLNTVLYARDKWLAPDGLIFPDRATLYEVDIYTVKVEDLTFTSPFCLQVKRNDYVHALVAYFNIEFTRCHKRTGFSTSPESPYTHWKQTVFYMEDYLTVKTGEEIFGTIGMRPNAQEQPGPGLHHRPGLQGPAVRAVLLHRLPDALRPGSPALHEPRG

SEQ ID NO: 894073 - protein, 196 aa, Homo sapiens
MAAAEAANCIMEVSCGQAESSEKPNAEDMTSKDYYFDSYAHFGIHEEMLKDEVRTLTYRNSMFHNRHLFKDKVVLDVGSGTGILCMFAAKAGARKVIGIECSSISDYAVKIVKANKLDHVVTIIKGKVEEVELPVEKVDIIISEWMGYCLFYESMLNTVLYARDKWLAPDGLIFPDRATLYVTAIEDRQYKDYKIH

SEQ ID NO: 894074 - protein, 161 aa, Homo sapiens
MSCIKDVAIKEPLVDVVDPKQLVTNACLIKEVDIYTVKVEDLTFTSPFCLQVKRNDYVHALVAYFNIEFTRCHKRTGFSTSPESPYTHWKQTVFYMEDYLTVKTGEEIFGTIGMRPNAQEQPGPGLHHRPGLQGPAVRAVLLHRLPDALRPGSPALHEPRG

SEQ ID NO: 894075 - protein, 94 aa, Homo sapiens
  misc_feature (4)..(4): Xaa can be any naturally occurring amino acid
  misc_feature (7)..(8): Xaa can be any naturally occurring amino acid
ELGXRGXXKTTEGCGPTPRTTGTWTSPSTWTSRASCASCPAPPTTGCAEARLSRPARAQGLSVPRRFRGSPFLSLPPAEGGFRGLGWGDGEGTS

SEQ ID NO: 894076 - protein, 97 aa, Homo sapiens
MAAAEAANCIMEVSCGQAESSEKPNAEDMTSKDYYFDSYAHFGIHEEMLKDEVRTLTYRNSMFHNRHLFKDKAHSSSLPSFPTPRKDRGGILKNGYD

SEQ ID NO: 894077 - protein, 195 aa, Homo sapiens
LGWKSGSRPMGARVGGTQGSHGMWTLGHPRACDSSSCQLGSFTAPSAPRPPPGRLPPSVETFVVVTPEKGWSWHLVGRGQGAGKCPAATGPPPTKTHAAPGTTALAGKRILEREEESSGVGDFVSSSCAGGYGGRRGSGDSRLDHCVSLERLPEEEVGLGEVFFFMKEAITALLMGIILMEKSKGKGQQLGSTPE

SEQ ID NO: 894078 - protein, 260 aa, Homo sapiens
SNISLYSVVSLRPLPADYVPSIVMLPGTCQTQDVEVSEETVEPSDELIEYDSPEQLNEQLVTLSLLPESRWKNLLNLDVIKKKNKPKEPPKVPKSAPFFIPTIPGLVPRYAAPEQNNDPQQSKVVNLGVLAQKSDFCLKLEEGLVNNKYDTALNLLKESGPSGIETELRSLSPDCGGSIEVMQSFLKMIGMMLDRKRDFELAQAYLALFLKLHLKMLPSEPVLLEEITNLSSQVEENWTHLQSLFNQSMCILNYLKSALL

SEQ ID NO: 894079 - protein, 433 aa, Homo sapiens
GGGWGEALSSPARGRSGGARASSPQRRGGGRRKMETHISCLFPELLAMIFGYLDVRDKGRAAQVCTAWRDAAYHKSVWRGVEAKLHLRRANPSLFPSLQARGIRRVQILSLRRSLSYVIQGMANIESLNLSGCYNLTDNGLGHAFVQEIGSLRALNLSLCKQITDSSLGRIAQYLKGLEVLELGGCSNITNTGLLLIAWGLQRLKSLNLRSCRHLSDVGIGHLAGMTRSAAEGCLGLEQLTLQDCQKLTDLSLKHISRGLTGLRLLNLSFCGGISDAGLLHLSHMGSLRSLNLRSCDNISDTGIMHLAMGSLRLSGLDVSFCDKVGDQSLAYIAQGLDGLKSLSLCSCHISDDGINRMVRQMHGLRTLNIGQCVRITDKGLELIAEHLSQLTGIDLYGCTRITKRGLERITQLPCLKVLNLGLWQMTDSEKVR

SEQ ID NO: 894080 - protein, 409 aa, Homo sapiens
GGGWGEALSSPARGRSGGARASSPQRRGGGRRKMETHISCLFPELLAMIFGYLDVRDKGRAAQVCTAWRDAAYHKSVWRGVEAKLHLRRANPSLFPSLQARGIRRVQILSLRRSLSYVIQGMANIESLNLSGCYNLTDNGLGHAFVQEIGSLRALNLSLCKQITDSSLGRIAQYLKGLEVLELGGCSNITNTGLLLIAWGLQRLKSLNLRSCRHLSDVGIGHLAGMTRSAAEGCLGLEQLTLQDCQKLTDLSLKHISRGLTGLRLLNLSFCGGISDAGLLHLSHMGSLRLSGLDVSFCDKVGDQSLAYIAQGLDGLKSLSLCSCHISDDGINRMVRQMHGLRTLNIGQCVRITDKGLELIAEHLSQLTGIDLYGCTRITKRGLERITQLPCLKVLNLGLWQMTDSEKVR

SEQ ID NO: 894081 - protein, 433 aa, Homo sapiens; identical to SEQ ID NO: 894079

SEQ ID NO: 894082 - protein, 434 aa, Homo sapiens
GGGWGEALSSPARGRSGGARASSPQRRGGGRRKMETHISCLFPELLAMIFGYLDVRDKGRAAQVCTAWRDAAYHKSVWRGVEAKLHLRRANPSLFPSLQARGIRRVQILSLRRSLSYVIQGMANIESLNLSGCYNLTDNGLGHAFVQEIGSLRALNLSLCKQITDSSLGRIAQYLKGLEVLELGGCSNITNTGLLLIAWGLQRLKSLNLRSCRHLSDVGIGHLAGMTRSAAEGCLGLEQLTLQDCQKLTDLSLKHISRGLTGLRLLNLSFCGGISDAGLLHLSHMGSLRSLNLRSCDNISDTGIMHLAMGSLRLSGLDVSFCDKVGDQSLAYIAQGLDGLKSLSLCSCHISDDGINRMVRQMHGLRTLNIGQCVRITDKGLELIAEHLSQLTGIDLYGCTRITKRGLERITQLPCLKVLNLGLWQMTDSEKGLL

SEQ ID NO: 894083 - protein, 757 aa, Homo sapiens
MLSLLVWILTLSDTFSQGTQTRFSQEPADQTVVAGQRAVLPCVLLNYSGIVQWTKDGLALGMGQGLKAWPRYRVVGSADAGQYNLEITDAELSDDASYECQATEAALRSRRAKLTVLIPPEDTRIDGGPVILLQAGTPHNLTCRAFNAKPAATIIWFRDGTQQEGAVASTELLKDGKRETTVSQLLINPTDLDIGRVFTCRSMNEAIPSGKETSIELDVHHPPTVTLSIEPQTVQEGERVVFTCQATANPEILGYRWAKGGFLIEDAHESRYETNVDYSFFTEPVSCEVHNKVGSTNVSTLVNVHFAPRIVVDPKPTTTDIGSDVTLTCVWVGNPPLTLTWTKKDSNMVLSNSNQLLLKSVTQADAGTYTCRAIVPRIGVAEREVPLYVNGPPIISSEAVQYAVRGDGGKVECFIGSTPPPDRIAWAWKENFLEVGTLERYTVERTNSGSGVLSTLTINNVMEADFQTHYNCTAWNSFGPGTAIIQLEEREVLPVGIIAGATIGASILLIFFFIALVFFLYRRRKGSRKDVTLRKLDIKVETVNREPLTMHSDREDDTASVSTATRVMKAIYSSFKDDVDLKQDLRCDTIDTREEYEMKDPTNGYYNVRAHEDRPSSRAVLYADYRAPGPARFDGRPSSRLSHSSGYAQLNTYSRGPASDYGPEPTPPGPAAPAGTDTTSQLSYENYEKFNSHPFPGAAGYPTYRLGYPQAPPSGLERTPYEAYDPIGKYATATRFSYTSQHSDYGQRFQQRMQTHV

SEQ ID NO: 894084 - protein, 757 aa, Homo sapiens; identical to SEQ ID NO: 894083

SEQ ID NO: 894085 - protein, 305 aa, Homo sapiens
MCIFYGILVLMGTTSVGLRSGQPGLVLSLPTPYWPEEREVLPVGIIAGATIGASILLIFFFIALVFFLYRRRKGSRKDVTLRKLDIKVETVNREPLTMHSDREDDTASVSTATRVMKAIYSSFKDDVDLKQDLRCDTIDTREEYEMKDPTNGYYNVRAHEDRPSSRAVLYADYRAPGPARFDGRPSSRLSHSSGYAQLNTYSRGPASDYGPEPTPPGPAAPAGTDTTSQLSYENYEKFNSHPFPGAAGYPTYRLGYPQAPPSGLERTPYEAYDPIGKYATATRFSYTSQHSDYGQRFQQRMQTHV

SEQ ID NO: 894086 - protein, 190 aa, Homo sapiens
APPLSGSFKDDVDLKQDLRCDTIDTREEYEMKDPTNGYYNVRAHEDRPSSRAVLYADYRAPGPARFDGRPSSRLSHSSGYAQLNTYSRGPASDYGPEPTPPGPAAPAGTDTTSQLSYENYEKFNSHPFPGAAGYPTYRLGYPQAPPSGLERTPYEAYDPIGKYATATRFSYTSQHSDYGQRFQQRMQTHV

SEQ ID NO: 894087 - protein, 79 aa, Homo sapiens
YAQQRSGVNRPRGMKTSEHPVFKRYALPLFQQGYFPLHSDEGSFICFQNGARRTGVSCPLVNLSGATGLHKTESVSQYT

SEQ ID NO: 894088 - protein, 509 aa, Homo sapiens
MLSLLVWILTLSDTFSQGTQTRFSQEPADQTVVAGQRAVLPCVLLNYSGIVQWTKDGLALGMGQGLKAWPRYRVVGSADAGQYNLEITDAELSDDASYECQATEAALRSRRAKLTVLIPPEDTRIDGGPVILLQAGTPHNLTCRAFNAKPAATIIWFRDGTQQEGAVASTELLKDGKRETTVSQLLINPTDLDIGRVFTCRSMNEAIPSGKETSIELDVHHPPTVTLSIEPQTVQEGERVVFTCQATANPEILGYRWAKGGFLIEDAHESRYETNVDYSFFTEPVSCEVHNKVGSTNVSTLVNVHFAPRIVVDPKPTTTDIGSDVTLTCVWVGNPPLTLTWTKKDSNMGPRPPGSPPEAALSAQVLSNSNQLLLKSVTQADAGTYTCRAIVPRIGVAEREVPLYVNGPPIISSEAVQYAVRGDGGKVECFIGSTPPPDRIAWAWKENFLEVGTLERYTVERTNSGSGVLSTLTINNVMEADFQTHYNCTAWNSFGPGTAIIQLEERGDW

SEQ ID NO: 894089 - protein, 773 aa, Homo sapiens
MLSLLVWILTLSDTFSQGTQTRFSQEPADQTVVAGQRAVLPCVLLNYSGIVQWTKDGLALGMGQGLKAWPRYRVVGSADAGQYNLEITDAELSDDASYECQATEAALRSRRAKLTVLIPPEDTRIDGGPVILLQAGTPHNLTCRAFNAKPAATIIWFRDGTQQEGAVASTELLKDGKRETTVSQLLINPTDLDIGRVFTCRSMNEAIPSGKETSIELDVHHPPTVTLSIEPQTVQEGERVVFTCQATANPEILGYRWAKGGFLIEDAHESRYETNVDYSFFTEPVSCEVHNKVGSTNVSTLVNVHFAPRIVVDPKPTTTDIGSDVTLTCVWVGNPPLTLTWTKKDSNMGPRPPGSPPEAALSAQVLSNSNQLLLKSVTQADAGTYTCRAIVPRIGVAEREVPLYVNGPPIISSEAVQYAVRGDGGKVECFIGSTPPPDRIAWAWKENFLEVGTLERYTVERTNSGSGVLSTLTINNVMEADFQTHYNCTAWNSFGPGTAIIQLEEREVLPVGIIAGATIGASILLIFFFIALVFFLYRRRKGSRKDVTLRKLDIKVETVNREPLTMHSDREDDTASVSTATRVMKAIYSSFKDDVDLKQDLRCDTIDTREEYEMKDPTNGYYNVRAHEDRPSSRAVLYADYRAPGPARFDGRPSSRLSHSSGYAQLNTYSRGPASDYGPEPTPPGPAAPAGTDTTSQLSYENYEKFNSHPFPGAAGYPTYRLGYPQAPPSGLERTPYEAYDPIGKYATATRFSYTSQHSDYGQRFQQRMQTHV

SEQ ID NO: 894090 - protein, 269 aa, Homo sapiens
MKEVLPVGIIAGATIGASILLIFFFIALVFFLYRRRKGSRKDVTLRKLDIKVETVNREPLTMHSDREDDTASVSTATRVMKAIYSSFKDDVDLKQDLRCDTIDTREEYEMKDPTNGYYNVRAHEDRPSSRAVLYADYRAPGPARFDGRPSSRLSHSSGYAQLNTYSRGPASDYGPEPTPPGPAAPAGTDTTSQLSYENYEKFNSHPFPGAAGYPTYRLGYPQAPPSGLERTPYEAYDPIGKYATATRFSYTSQHSDYGQRFQQRMQTHV

SEQ ID NO: 894091 - protein, 105 aa, Homo sapiens
REFNRGGVSPVQRSFHHGLHYLVRSELVSTRDPFIPNSNTKYTLNLKLFWFCYTHRVGGRDGTAHCWQGTGNSSKHGEGWRAGWGGSLLFKEAFTMGFIILSEVN

SEQ ID NO: 894092 - protein, 605 aa, Homo sapiens
MLSLLVWILTLSDTFSQGTQTRFSQEPADQTVVAGQRAVLPCVLLNYSGIVQWTKDGLALGMGQGLKAWPRYRVVGSADAGQYNLEITDAELSDDASYECQATEAALRSRRAKLTVLIPPEDTRIDGGPVILLQAGTPHNLTCRAFNAKPAATIIWFRDGTQQEGAVASTELLKDGKRETTVSQLLINPTDLDIGRVFTCRSMNEAIPSGKETSIELDVHHPPTVTLSIEPQTVQEGERVVFTCQATANPEILGYRWAKGGFLIEDAHESRYETNVDYSFFTEPVSCEVHNKVGSTNVSTLVNVHFAPRIVVDPKPTTTDIGSDVTLTCVWVGNPPLTLTWTKKDSNMVLSNSNQLLLKSVTQADAGTYTCRAIVPRIGVAEREVPLYVNGPPIISSEAVQYAVRGDGGKVECFIGSTPPPDRIAWAWKENFLEVGTLERYTVERTNSGSGVLSTLTINNVMEADFQTHYNCTAWNSFGPGTAIIQLEEREVLPVGIIAGATIGASILLIFFFIALVFFLYRRRKGSRKDVTLRKLDIKVETVNREPLTMHSDREDDTASVSTATRVMKAIYSSFKDDVDLKQDLRCDTIERPRIRGRLNTSYSD

SEQ ID NO: 894093 - protein, 325 aa, Homo sapiens
MGIFPGIILIFLRVKFATAAVIVSGHQKSTTVSHEMSGLNWKPFVYGGLASIVAEFGTFPVDLTKTRLQVQGQSIDARFKEIKYRGMFHALFRICKEEGVLALYSGIAPALLRQASYGTIKIGIYQSLKRLFVERLEDETLLINMICGVVSGVISSTIANPTDVLKIRMQAQGSLFQGSMIGSFIDIYQQEGTRGLWRGVVPTAQRAAIVVGVELPVYDITKKHLILSGMMGDTILTHFVSSFTCGLAGALASNPVDVVRTRMMNQRAIVGHVDLYKGTVDGILKMWKHEGFFALYKGFWPNWLRLGPWNIIFFITYEQLKRLQI

SEQ ID NO: 894094 - protein, 325 aa, Homo sapiens; identical to SEQ ID NO: 894093

SEQ ID NO: 894095 - protein, 324 aa, Homo sapiens
RVGAAVAFPTVGASASQSSDEPEQHQKSTTVSHEMSGLNWKPFVYGGLASIVAEFGTFPVDLTKTRLQVQGQSIDARFKEIKYRGMFHALFRICKEEGVLALYSGIAPALLRQASYGTIKIGIYQSLKRLFVERLEDETLLINMICGVVSGVISSTIANPTDVLKIRMQAQGSLFQGSMIGSFIDIYQQEGTRGLWRGVVPTAQRAAIVVGVELPVYDITKKHLILSGMMGDTILTHFVSSFTCGLAGALASNPVDVVRTRMMNQRAIVGHVDLYKGTVDGILKMWKHEGFFALYKGFWPNWLRLGPWNIIFFITYEQLKRLQI

SEQ ID NO: 894096 - protein, 340 aa, Homo sapiens
MGIFPGIILIFLRVKFATAAVIVSGHQKSTTVSHEMSGLNWKPFVYGGLASIVAEFGTFPVDLTKTRLQVQGQSIDARFKEIKYRGMFHALFRICKEEGVLALYSGIAPALLRQASYGTIKIGIYQSLKRLFVERLEGLGLLDVWGQLEKPFDETLLINMICGVVSGVISSTIANPTDVLKIRMQAQGSLFQGSMIGSFIDIYQQEGTRGLWRGVVPTAQRAAIVVGVELPVYDITKKHLILSGMMGDTILTHFVSSFTCGLAGALASNPVDVVRTRMMNQRAIVGHVDLYKGTVDGILKMWKHEGFFALYKGFWPNWLRLGPWNIIFFITYEQLKRLQI

SEQ ID NO: 894097 - protein, 181 aa, Homo sapiens
MICGVVSGVISSTIANPTDVLKIRMQAQGSLFQGSMIGSFIDIYQQEGTRGLWRGVVPTAQRAAIVVGVELPVYDITKKHLILSGMMGDTILTHFVSSFTCGLAGALASNPVDVVRTRMMNQRAIVGHVDLYKGTVDGILKMWKHEGFFALYKGFWPNWLRLGPWNIIFFITYEQLKRLQI

SEQ ID NO: 894098 - protein, 156 aa, Homo sapiens
MGIFPGIILIFLRVKFATAAVIVSGHQKSTTVSHEMSGLNWKPFVYGGLASIVAEFGTFPVDLTKTRLQVQGQSIDARFKEIKYRGMFHALFRICKEEGVLALYSGIAPALLRQASYGTIKIGIYQSLKRLFVERLEGLGLLDVWGQLESLSMKLF

SEQ ID NO: 894099 - protein, 146 aa, Homo sapiens
MGIFPGIILIFLRVKFATAAVIVSGHQKSTTVSHEMSGLNWKPFVYGGLASIVAEFGTFPVDLTKTRLQVQGQSIDARFKEIKYRGMFHALFRICKEEGVLALYSGIAPALLRQASYGTIKIGIYQSLKRLFVERLEGQYTYPLLR

SEQ ID NO: 894100 - protein, 197 aa, Homo sapiens
RVGAAVAFPTVGASASQSSDEPEQHQKSTTVSHEMSGLNWKPFVYGGLASIVAEFGTFPVDLTKTRLQVQGQSIDARFKEIKYRGMFHALFRICKEEGVLALYSGIAPALLRQASYGTIKIGIYQSLKRLFVERLEDSNAGSRKLVPREHDWKLYRYIPTRRHQGSVEGKYSFPAIILHSQFLQFAENFFLYKDIKS

SEQ ID NO: 894101 - protein, 356 aa, Homo sapiens
MGIFPGIILIFLRVKFATAAVIVSGHQKSTTVSHEMSGLNWKPFVYGGLASIVAEFGTFPVDLTKTRLQVQGQSIDARFKEIKYRGMFHALFRICKEEGVLALYSGIAPALLRQASYGTIKIGIYQSLKRLFVERLEDETLLINMICGVVSGVISSTIANPTDVLKIRMQAQGSLFQGSMIGSFIDIYQQEGTRGLWRCLCSKAVTGCVLWLMPVIPALWEANAGGSLEGVVPTAQRAAIVVGVELPVYDITKKHLILSGMMGDTILTHFVSSFTCGLAGALASNPVDVVRTRMMNQRAIVGHVDLYKGTVDGILKMWKHEGFFALYKGFWPNWLRLGPWNIIFFITYEQLKRLQI

SEQ ID NO: 894102 - protein, 188 aa, Homo sapiens
RVGAAVAFPTVGASASQSSDEPEQHQKSTTVSHEMSGLNWKPFVYGGLASIVAEFGTFPVDLTKTRLQVQGQSIDARFKEIKYRGMFHALFRICKEEGVLALYSGIAPALLRQASYGTIKIGIYQSLKRLFVERLEDSNAGSRKLVPREHDWKLYRYIPTRRHQGSVEGCGSNCSACCHRCRSRATSL

SEQ ID NO: 894103 - protein, 240 aa, Homo sapiens
MGIFPGIILIFLRVKFATAAVIVSGHQKSTTVSHEMSGLNWKPFVYGGLASIVAEFGTFPVDLTKTRLQVQGQSIDARFKEIKYRGMFHALFRICKEEGVLALYSGIAPALLRQASYGTIKIGIYQSLKRLFVERLEDETLLINMICGVVSGVISSTIANPTDVLKIRMQAQGSLFQGSMIGSFIDIYQQEGTRGLWRGVVPTAQRAAIVVGVELPVYDITKKHLILSGMMGDTILTHFV

SEQ ID NO: 894104 - protein, 137 aa, Homo sapiens
MHTHHLPGVYDERNQKFYRQQRLPIPGSIWFENRRAKWRRHQRALMARNMLPFMAVGQPVMVTAAEAITAPLFISGMRDDYFWDHSHSSSLCFPMPPFPPPSLPLPLMLLPPMPPAGQAEFGPFPFVIVPSFTFPNV

SEQ ID NO: 894105 - protein, 288 aa, Homo sapiens
MEPPDQCSQYMTSLLSPAVDDEKELQDMNAMVLSLTEEVKEEEEDAQPEPEQGTAAGEKLKSAGAQGGEEKDGGGEEKDGGGAGVPGHLWEGNLEGTSGSDGNVEDSDQSEKEPGQQYSRPQGAVGGLEPGNAQQPNVHAFTPLQLQELECIFQREQFPSEFLRRRLARSMNVTELAVQIWFENRRAKWRRHQRALMARNMLPFMAVGQPVMVTAAEAITAPLFISGMRDDYFWDHSHSSSLCFPMPPFPPPSLPLPLMLLPPMPPAGQAEFGPFPFVIVPSFTFPNV

SEQ ID NO: 894106 - protein, 359 aa, Homo sapiens
MPSLLLLFTAALLSSWAQLLTDANSWWSLALNPVQRPEMFIIGAQPVCSQLPGLSPGQRKLCQLYQEHMAYIGEGAKTGIKECQHQFRQRRWNCSTADNASVFGRVMQIGSRETAFTHAVSAAGVVNAISRACREGELSTCGCSRTARPKDLPRDWLWGGCGDNVEYGYRFAKEFVDAREREKNFAKGSEEQGRVLMNLQNNEAGRRAVYKMADVACKCHGVSGSCSLKTCWLQLAEFRKVGDRLKEKYDSAAAMRVTRKGRLELVNSRFTQPTPEDLVYVDPSPDYCLRNESTGSLGTQGRLCNKTSEGMDGCELMCCGRGYNQFKSVQVERCHCKFHWCCFVRCKKCTEIVDQYICK

SEQ ID NO: 894107 - protein, 402 aa, Homo sapiens
GAGRAGPGRAAPGARGPDTRRDMQGTLLWKLSVPGHWGGLRPTMPSLLLLFTAALLSSWAQLLTDANSWWSLALNPVQRPEMFIIGAQPVCSQLPGLSPGQRKLCQLYQEHMAYIGEGAKTGIKECQHQFRQRRWNCSTADNASVFGRVMQIGSRETAFTHAVSAAGVVNAISRACREGELSTCGCSRTARPKDLPRDWLWGGCGDNVEYGYRFAKEFVDAREREKNFAKGSEEQGRVLMNLQNNEAGRRAVYKMADVACKCHGVSGSCSLKTCWLQLAEFRKVGDRLKEKYDSAAAMRVTRKGRLELVNSRFTQPTPEDLVYVDPSPDYCLRNESTGSLGTQGRLCNKTSEGMDGCELMCCGRGYNQFKSVQVERCHCKFHWCCFVRCKKCTEIVDQYICK

SEQ ID NO: 894108 - protein, 359 aa, Homo sapiens; identical to SEQ ID NO: 894106

SEQ ID NO: 894109 - protein, 148 aa, Homo sapiens [sequence omitted]

SEQ ID NO: 894110 - protein, 359 aa, Homo sapiens; identical to SEQ ID NO: 894106

SEQ ID NO: 894111 - protein, 359 aa, Homo sapiens; identical to SEQ ID NO: 894106

SEQ ID NO: 894112 - protein, 359 aa, Homo sapiens; identical to SEQ ID NO: 894106

SEQ ID NO: 894113 - protein, 487 aa, Homo sapiens
SLPSWLCMTKGKEQVSSLICPLPAPHTCLLVPPPQPRLREGKSKGGLGKGCVPALLDPARATVLSWRPRTKILPGLMTRSTRRPLPESLGTPTRESGAVSRGARGCARQGTLLWKLSVPGHWGGLRPTMPSLLLLFTAALLSSWAQLLTDANSWWSLALNPVQRPEMFIIGAQPVCSQLPGLSPGQRKLCQLYQEHMAYIGEGAKTGIKECQHQFRQRRWNCSTADNASVFGRVMQIGSRETAFTHAVSAAGVVNAISRACREGELSTCGCSRTARPKDLPRDWLWGGCGDNVEYGYRFAKEFVDAREREKNFAKGSEEQGRVLMNLQNNEAGRRAVYKMADVACKCHGVSGSCSLKTCWLQLAEFRKVGDRLKEKYDSAAAMRVTRKGRLELVNSRFTQPTPEDLVYVDPSPDYCLRNESTGSLGTQGRLCNKTSEGMDGCELMCCGRGYNQFKSVQVERCHCKFHWCCFVRCKKCTEIVDQYICK

SEQ ID NO: 894114 - protein, 122 aa, Homo sapiens
AAALSYFSFSRSPTLRNSASCSQQVLRLQDPEDAVAFAGYVCHLIHSPATCLRNESTGSLGTQGRLCNKTSEGMDGCELMCCGRGYNQFKSVQVERCHCKFHWCCFVRCKKCTEIVDQYICK

SEQ ID NO: 894115 - protein, 308 aa, Homo sapiens
MPSLLLLFTAALLSSWAQLLTDANSWWSLALNPVQRPEMFIIGAQPVCSQLPGLSPGQRKLCQLYQEHMAYIGEGAKTGIKECQHQFRQRRWNCSTADNASVFGRVMQIGSRETAFTHAVSAAGVVNAISRACREGELSTCGCSRTARPKDLPRDWLWGGCGDNVEYGYRFAKEFVDAREREKNFAKGSEEQGRVLMNLQNNEAGRRAVYKMADVACKCHGVSGSCSLKTCWLQLAEFRKVGDRLKEKYDSAAAMRVTRKGRLELVNSRFTQPTPEDLVYVDPSPDYCLRNESTGSLGTQGRLCNKTQ

SEQ ID NO: 894116 - protein, 760 aa, Homo sapiens
MKTWVKIVFGVATSAVLALLVMCIVLRPSRVHNSEENTMRALTLKDILNGTFSYKTFFPNWISGQEYLHQSADNNIVLYNIETGQSYTILSNRTMKSVNASNYGLSPDRQFVYLESDYSKLWRYSYTATYYIYDLSNGEFVRGNELPRPIQYLCWSPVGSKLAYVYQNNIYLKQRPGDPPFQITFNGRENKIFNGIPDWVYEEEMLATKYALWWSPNGKFLAYAEFNDTDIPVIAYSYYGDEQYPRTINIPYPKAGAKNPVVRIFIIDTTYPAYVGPQEVPVPAMIASSDYYFSWLTWVTDERVCLQWLKRVQNVSVLSICDFREDWQTWDCPKTQEHIEESRTGWAGGFFVSTPVFSYDAISYYKIFSDKDGYKHIHYIKDTVENAIQITSGKWEAINIFRVTQDSLFYSSNEFEEYPGRRNIYRISIGSYPPSKKCVTCHLRKERCQYYTASFSDYAKYYALVCYGPGIPISTLHDGRTDQEIKILEENKELENALKNIQLPKEEIKKLEVDEITLWYKMILPPQFDRSKKYPLLIQVYGGPCSQSVRSVFAVNWISYLASKEGMVIALVDGRGTAFQGDKLLYAVYRKLGVYEVEDQITAVRKFIEMGFIDEKRIAIWGWSYGGYVSSLALASGTGLFKCGIAVAPVSSWEYYASVYTERFMGLPTKDDNLEHYKNSTVMARAEYFRNVDYLLIHGTADDNVHFQNSAQIAKALVNAQVDFQAMWYSDQNHGLSGLSTNHLYTHMTHFLKQCFSLSD

SEQ ID NO: 894117 - protein, 239 aa, Homo sapiens
MILPPQFDRSKKYPLLIQVYGGPCSQSVRSVFAVNWISYLASKEGMVIALVDGRGTAFQGDKLLYAVYRKLGVYEVEDQITAVRKFIEMGFIDEKRIAIWGWSYGGYVSSLALASGTGLFKCGIAVAPVSSWEYYASVYTERFMGLPTKDDNLEHYKNSTVMARAEYFRNVDYLLIHGTADDNVHFQNSAQIAKALVNAQVDFQAMWYSDQNHGLSGLSTNHLYTHMTHFLKQCFSLSD

SEQ ID NO: 894118 - protein, 239 aa, Homo sapiens; identical to SEQ ID NO: 894117

SEQ ID NO: 894119 - protein, 491 aa, Homo sapiens
MKTWVKIVFGVATSAVLALLVMCIVLRPSRVHNSEENTMRALTLKDILNGTFSYKTFFPNWISGQEYLHQSADNNIVLYNIETGQSYTILSNRTMKSVNASNYGLSPDRQFVYLESDYSKLWRYSYTATYYIYDLSNGEFVRGNELPRPIQYLCWSPVGSKLAYVYQNNIYLKQRPGDPPFQITFNGRENKIFNGIPDWVYEEEMLATKYALWWSPNGKFLAYAEFNDTDIPVIAYSYYGDEQYPRTINIPYPKAGAKNPVVRIFIIDTTYPAYVGPQEVPVPAMIASSDYYFSWLTWVTDERVCLQWLKRVQNVSVLSICDFREDWQTWDCPKTQEHIEESRTGWAGGFFVSTPVFSYDAISYYKIFSDKDGYKHIHYIKDTVENAIQITSGKWEAINIFRVTQDSLFYSSNEFEEYPGRRNIYRISIGSYPPSKKCVTCHLRKERCQYYTASFSDYAKYYALVCYGPGIPISTLHDGRTDQATSHCCHV

SEQ ID NO: 894120 - protein, 469 aa, Homo sapiens [sequence omitted]

SEQ ID NO: 894121 - protein, 760 aa, Homo sapiens; identical to SEQ ID NO: 894116

SEQ ID NO: 894122 - protein, 742 aa, Homo sapiens
MKTWVKIVFGVATSAVLALLVMCIVLRPSRVHNSEENTMRALTLKDILNGTFSYNNNIVLYNIETGQSYTILSNRTMKSVNASNYGLSPDRQFVYLESDYSKLWRYSYTATYYIYDLSNGEFVRGNELPRPIQYLCWSPVGSKLAYVYQNNIYLKQRPGDPPFQITFNGRENKIFNGIPDWVYEEEMLATKYALWWSPNGKFLAYAEFNDTDIPVIAYSYYGDEQYPRTINIPYPKAGAKNPVVRIFIIDTTYPAYVGPQEVPVPAMIASSDYYFSWLTWVTDERVCLQWLKRVQNVSVLSICDFREDWQTWDCPKTQEHIEESRTGWAGGFFVSTPVFSYDAISYYKIFSDKDGYKHIHYIKDTVENAIQITSGKWEAINIFRVTQDSLFYSSNEFEEYPGRRNIYRISIGSYPPSKKCVTCHLRKERCQYYTASFSDYAKYYALVCYGPGIPISTLHDGRTDQEIKILEENKELENALKNIQLPKEEIKKLEVDEITLWYKMILPPQFDRSKKYPLLIQVYGGPCSQSVRSVFAVNWISYLASKEGMVIALVDGRGTAFQGDKLLYAVYRKLGVYEVEDQITAVRKFIEMGFIDEKRIAIWGWSYGGYVSSLALASGTGLFKCGIAVAPVSSWEYYASVYTERFMGLPTKDDNLEHYKNSTVMARAEYFRNVDYLLIHGTADDNVHFQNSAQIAKALVNAQVDFQAMWYSDQNHGLSGLSTNHLYTHMTHFLKQCFSLSD

SEQ ID NO: 894123 - protein, 151 aa, Homo sapiens [sequence omitted]

SEQ ID NO: 894124 - protein, 251 aa, Homo sapiens
RSAEAAGTRFSSFPEAGPRPVRRRAGLARGQRRSAGVSSSGSEGAADAGRMYTLLSGLYKYMFQKDEYCILILGLDNAGKTTFLEQSKTRFNKNYKGMSLSKITTTVGLNIGTVDVGKARLMFWDLGGQEELQSLWDKYYAECHGVIYVIDSTDEERLAESKQAFEKVVTSEALCGVPVLVLANKQDVETCLSIPDIKTAFSDCTSKIGRRDCLTQACSALTGKGVREGIEWMVKCVVRNVHRPPRQRDIT

SEQ ID NO: 894125 - protein, 168 aa, Homo sapiens [sequence omitted]

SEQ ID NO: 894126 - protein, 171 aa, Homo sapiens
RSAEAAGTRFSSFPEAGPRPVRRRAGLARGQRRSAGVSSSGSEGAADAGRMYTLLSGLYKYMFQKDEYCILILGLDNAGKTTFLEQSKTRFNKNYKGMSLSKITTTVGLNIGTVDVGKARLMFWDLGGQEELQSLWDKYYAECHGVIYVIDSTDEERLAESKQAFDVPLNP

SEQ ID NO: 894127 - protein, 223 aa, Homo sapiens
RSAEAAGTRFSSFPEAGPRPVRRRAGLARGQRRSAGVSSSGSEGAADAGRMYTLLSGLYKYMFQKDEYCILILGLDNAGKTTFLEQSKTRFNKNYKGMSLSKITTTVGLNIGTVDVGKARLMFWDLGGQEELQSLWDKYYAECHGVIYVIDSTDEERLAESKQAFEKVVTSEALCGVPVLVLANKQDVETCLSIPDIKTAFSDCTSKIGRRDCLTQACSALTG

SEQ ID NO: 894128 - protein, 52 aa, Homo sapiens
MTDTENHDSAPSSTSTCCPPITAGMQLKDSLGPGSNRPLWTLRPLHLRVVCL

SEQ ID NO: 894129 - protein, 162 aa, Homo sapiens
MTHLIEYDRHRKSRLIPLQHLYLLPADHSRNAAERFPGAWFQPPTVDSEASAFAGGLPVIFWSWAGLVGFPFVWPVSMCLNPLSFIKSKTKENNNHILSSSLSLPLSLYTSNSLPFYPTISARLAQPIFTSARFINALRIRVHLAQFPLKGARLLHGPRFRV

SEQ ID NO: 894130 - protein, 105 aa, Homo sapiens
MTHLIEYDRHRKSRLIPLQHLYLLPADHSRNAAERFPGAWFQPPTVDSEASAFAGGLPVIFWSWAGLVGFPFVWPVSMCLNPLSFIKSKTKEKKNKNIWFYLALK

SEQ ID NO: 894131 - protein, 124 aa, Homo sapiens [sequence omitted]

SEQ ID NO: 894132 - protein, 133 aa, Homo sapiens
LTDHSKNKKLTSPGPPCQNRDNNSGDETGSSMTHLIEYDRHRKSRLIPLQHLYLLPADHSRNAAERFPGAWFQPPTVDSEASAFAGGLPVIFWSWAGLVGFPFVWPVSMCLNPLSFIKSKTKEKKPPWPLWPK

SEQ ID NO: 894133 - protein, 110 aa, Homo sapiens
MTHLIEYDRHRKSRLIPLQHLYLLPADHSRNAAERFPGAWFQPPTVDSEASAFAGGLPVIFWSWAGLVGFPFVWPVSMCLNPLSFIKSKTKEKGGAPKHTGLVGLKKKAL

SEQ ID NO: 894134 - protein, 52 aa, Homo sapiens; identical to SEQ ID NO: 894128

SEQ ID NO: 894135 - protein, 52 aa, Homo sapiens; identical to SEQ ID NO: 894128

SEQ ID NO: 894136 - protein, 349 aa, Homo sapiens
SGVWPQSRQWWLPIPKRRPPTPCAALLAGPVRKRVVELRTTPAGSRRQIPSPESCEKLSLVPDAAAARVPWQPQVSEPRATLPAPRLRARVDRSLSGCTLGIPDLDSAGEMPLGHIMRLDLEKIALEYIVPCLHEVGFCYLDNFLGEVVGDCVLERVKQLHCTGALRDGQLAGPRAGVSKRHLRGDQITWIGGNEEGCEAISFLLSLIDRLVLYCGSRLGKYYVKERSKAMVACYPGNGTGYVRHVDNPNGDGRCITCIYYLNKNWDAKLHGGILRIFPEGKSFIADVEPIFDRLLFFWSDRRNPHEVQPSYATRYAMTVWYFDAEERAEAKKKFRNLTRKTESALTED

SEQ ID NO: 894137 - protein, 349 aa, Homo sapiens; identical to SEQ ID NO: 894136

SEQ ID NO: 894138 - protein, 331 aa, Homo sapiens
RSLAAVAAVVASHPQKAPSDSLRRTARRASPETGRGAPHHSRWFPKADPFSRELRETFPCPRRLPAPRLRARVDRSLSGCTLGIPDLDSAGEMPLGHIMRLDLEKIALEYIVPCLHEVGFCYLDNFLGEVVGDCVLERVKQLHCTGALRDGQLAGPRAGVSKRHLRGDQITWIGGNEEGCEAISFLLSLIDRLVLYCGSRLGKYYVKERSKAMVACYPGNGTGYVRHVDNPNGDGRCITCIYYLNKNWDAKLHGGILRIFPEGKSFIADVEPIFDRLLFFWSDRRNPHEVQPSYATRYAMTVWYFDAEERAEAKKKFRNLTRKTESALTED

SEQ ID NO: 894139 - protein, 178 aa, Homo sapiens
MTTINRSLHEKTRSHHKAEASHKHRPRHDSRTESKKRGDKRKTRQQEEENRWERTQQYSERETKKGQNKHQKRNTATERKYQTPQQRGKPAGGKNRKERHNSTRGKKKKPKHQNPGESSNKERRQNKSTNRDTTRRELKDNTNNNDSHARDNNKHKARNTKRRRQKRGQTQKPQQRRQ

SEQ ID NO: 894140 - protein, 121 aa, Homo sapiens
MAMVACYPGNGTGYVRHVDNPNGDGRCITCIYYLNKNWDAKLHGGILRIFPEGKSFIADVEPIFDRLLFFWSDRRNPHEVQPSYATRYAMTVWYFDAEERAEAKKKFRNLTRKTESALTED

SEQ ID NO: 894141 - protein, 114 aa, Homo sapiens
LNLAQGDMKFDWVMGLRSITLKNSSTGRGDGPKQHLQADPMLIIRARTLSLSVSLSVSPLGLTPHWTPLHPCPSHNTAAVSSACLWEMGSGGLDLGWGSGVEGEFICSLSILLY

SEQ ID NO: 894142 - protein, 65 aa, Homo sapiens
MQSCIESSELLYKELFDYVRILYSFPLNIKKKLKEAEGRVMHDARDPQCTWITMHVDHMRSSRSP

SEQ ID NO: 894143 - protein, 387 aa, Homo sapiens
MSLWLGAPVPDIPPDSAVELWKPGAQDASSQAQGGSSCILREEARMPHSAGGTAGVGLEAAEPTALLTRAEPPSEPTEIRPQKRKKGPAPKMLGNELCSVCGDKASGFHYNVLSCEGCKGFFRRSVIKGAHYICHSGGHCPMDTYMRRKCQECRLRKCRQAGMREECVLSEEQIRLKKLKRQEEEQAHATSLPPRASSPPQILPQLSPEQLGMIEKLVAAQQQCNRRSFSDRLRVTVMLLETSRRYNPGSESITFLKDFSYNREDFAKAGLQVEFINPIFEFSRAMNELQLNDAEFALLIAISIFSADRPNVQDQLQVERLQHTYVEALHAYVSIHHPHDRLMFPRMLMKLVSLRTLSSVHSEQVFALRLQDKKLPPLLSEIWDVHE

SEQ ID NO: 894144 - protein, 447 aa, Homo sapiens
MSLWLGAPVPDIPPDSAVELWKPGAQDASSQAQGGSSCILREEARMPHSAGGTAGVGLEAAEPTALLTRAEPPSEPTEIRPQKRKKGPAPKMLGNELCSVCGDKASGFHYNVLSCEGCKGFFRRSVIKGAHYICHSGGHCPMDTYMRRKCQECRLRKCRQAGMREECVLSEEQIRLKKLKRQEEEQAHATSLPPRASSPPQILPQLSPEQLGMIEKLVAAQQQCNRRSFSDRLRVTPWPMAPDPHSREARQQRFAHFTELAIVSVQEIVDFAKQLPGFLQLSREDQIALLKTSAIEVMLLETSRRYNPGSESITFLKDFSYNREDFAKAGLQVEFINPIFEFSRAMNELQLNDAEFALLIAISIFSADRPNVQDQLQVERLQHTYVEALHAYVSIHHPHDRLMFPRMLMKLVSLRTLSSVHSEQVFALRLQDKKLPPLLSEIWDVHE

SEQ ID NO: 894145 - protein, 447 aa, Homo sapiens; identical to SEQ ID NO: 894144

SEQ ID NO: 894146 - protein, 447 aa, Homo sapiens; identical to SEQ ID NO: 894144

SEQ ID NO: 894147 - protein, 447 aa, Homo sapiens; identical to SEQ ID NO: 894144

SEQ ID NO: 894148 - protein, 447 aa, Homo sapiens; identical to SEQ ID NO: 894144

SEQ ID NO: 894149 - protein, 447 aa, Homo sapiens; identical to SEQ ID NO: 894144

SEQ ID NO: 894150 - protein, 447 aa, Homo sapiens; identical to SEQ ID NO: 894144

SEQ ID NO: 894151 - protein, 402 aa, Homo sapiens
MPHSAGGTAGVGLEAAEPTALLTRAEPPSEPTEIRPQKRKKGPAPKMLGNELCSVCGDKASGFHYNVLSCEGCKGFFRRSVIKGAHYICHSGGHCPMDTYMRRKCQECRLRKCRQAGMREECVLSEEQIRLKKLKRQEEEQAHATSLPPRASSPPQILPQLSPEQLGMIEKLVAAQQQCNRRSFSDRLRVTPWPMAPDPHSREARQQRFAHFTELAIVSVQEIVDFAKQLPGFLQLSREDQIALLKTSAIEVMLLETSRRYNPGSESITFLKDFSYNREDFAKAGLQVEFINPIFEFSRAMNELQLNDAEFALLIAISIFSADRPNVQDQLQVERLQHTYVEALHAYVSIHHPHDRLMFPRMLMKLVSLRTLSSVHSEQVFALRLQDKKLPPLLSEIWDVHE

SEQ ID NO: 894152 - protein, 521 aa, Homo sapiens
PGRAGTFAPRGAYGGEGTRFWRLLGLGWGFLGGSPFARAAKSAGSCLCSAPAHWLATETSGQETAPSSSPSKGAPETAHPGSLVAWGFDSAVELWKPGAQDASSQAQGGSSCILREEARMPHSAGGTAGVGLEAAEPTALLTRAEPPSEPTEIRPQKRKKGPAPKMLGNELCSVCGDKASGFHYNVLSCEGCKGFFRRSVIKGAHYICHSGGHCPMDTYMRRKCQECRLRKCRQAGMREECVLSEEQIRLKKLKRQEEEQAHATSLPPRASSPPQILPQLSPEQLGMIEKLVAAQQQCNRRSFSDRLRVTPWPMAPDPHSREARQQRFAHFTELAIVSVQEIVDFAKQLPGFLQLSREDQIALLKTSAIEVMLLETSRRYNPGSESITFLKDFSYNREDFAKAGLQVEFINPIFEFSRAMNELQLNDAEFALLIAISIFSADRPNVQDQLQVERLQHTYVEALHAYVSIHHPHDRLMFPRMLMKLVSLRTLSSVHSEQVFALRLQDKKLPPLLSEIWDVHE

SEQ ID NO: 894153 - protein, 306 aa, Homo sapiens [sequence omitted]

SEQ ID NO: 894154 - protein, 544 aa, Homo sapiens
MSLWLGAPVPDIPPDSAVELWKPGAQDASSQAQGGSSCILREEARMPHSAGGTAGVGLEAAEPTALLTRAEPPSEPTEIRPQKRKKGPAPKMLGNELCSVCGDKASGFHYNVLSCEGCKGFFRRSVIKGAHYICHSGGHCPMDTYMRRKCQECRLRKCRQAGMREECVLSEEQIRLKKLKRQEEEQAHATSLPPRASSPPQILPQLSPEQLGMIEKLVAAQQQCNRRSFSDRLRVTVLDTPGERRLRPDHQLGFLMSDSKRFAFSLLGEPWPMAPDPHSREARQQRFAHFTELAIVSVQEIVDFAKQLPGFLQLSREDQIALLKTSAIEVAGEGQGMKGEAEWDYLWEGPPDIELGEPNLLGSRDEENRPPWKRPCSKTSPPSPRLRFAACVQVMLLETSRRYNPGSESITFLKDFSYNREDFAKAGLQVEFINPIFEFSRAMNELQLNDAEFALLIAISIFSADRPNVQDQLQVERLQHTYVEALHAYVSIHHPHDRLMFPRMLMKLVSLRTLSSVHSEQVFALRLQDKKLPPLLSEIWDVHE

SEQ ID NO: 894155 - protein, 313 aa, Homo sapiens
MPHSAGGTAGVGLEAAEPTALLTRAEPPSEPTGVLSEEQIRLKKLKRQEEEQAHATSLPPRASSPPQILPQLSPEQLGMIEKLVAAQQQCNRRSFSDRLRVTPWPMAPDPHSREARQQRFAHFTELAIVSVQEIVDFAKQLPGFLQLSREDQIALLKTSAIEVMLLETSRRYNPGSESITFLKDFSYNREDFAKAGLQVEFINPIFEFSRAMNELQLNDAEFALLIAISIFSADRPNVQDQLQVERLQHTYVEALHAYVSIHHPHDRLMFPRMLMKLVSLRTLSSVHSEQVFALRLQDKKLPPLLSEIWDVHE

SEQ ID NO: 894156 - protein, 286 aa, Homo sapiens
MALSLGVLSEEQIRLKKLKRQEEEQAHATSLPPRASSPPQILPQLSPEQLGMIEKLVAAQQQCNRRSFSDRLRVTPWPMAPDPHSREARQQRFAHFTELAIVSVQEIVDFAKQLPGFLQLSREDQIALLKTSAIEVMLLETSRRYNPGSESITFLKDFSYNREDFAKAGLQVEFINPIFEFSRAMNELQLNDAEFALLIAISIFSADRPNVQDQLQVERLQHTYVEALHAYVSIHHPHDRLMFPRMLMKLVSLRTLSSVHSEQVFALRLQDKKLPPLLSEIWDVHE

SEQ ID NO: 894157 - protein, 387 aa, Homo sapiens; identical to SEQ ID NO: 894143

SEQ ID NO: 894158 - protein, 342 aa, Homo sapiens
ETIDWKVSMVFLRCLRFSGKLPFSGGYTFRGSAFWSRCITWSSVMLPYLVAFCMGPWGRASGFHYNVLSCEGCKGFFRRSVIKGAHYICHSGGHCPMDTYMRRKCQECRLRKCRQAGMREECVLSEEQIRLKKLKRQEEEQAHATSLPPRASSPPQILPQLSPEQLGMIEKLVAAQQQCNRRSFSDRLRVTVMLLETSRRYNPGSESITFLKDFSYNREDFAKAGLQVEFINPIFEFSRAMNELQLNDAEFALLIAISIFSADRPNVQDQLQVERLQHTYVEALHAYVSIHHPHDRLMFPRMLMKLVSLRTLSSVHSEQVFALRLQDKKLPPLLSEIWDVHE

SEQ ID NO: 894159 - protein, 272 aa, Homo sapiens
MAPDPHSREARQQRFAHFTELAIVSVQEIVDFAKQLPGFLQLSREDQIALLKTSAIEVAGEGQGMKGEAEWDYLWEGPPDIELGEPNLLGSRDEENRPPWKRPCSKTSPPSPRLRFAACVQVMLLETSRRYNPGSESITFLKDFSYNREDFAKAGLQVEFINPIFEFSRAMNELQLNDAEFALLIAISIFSADRPNVQDQLQVERLQHTYVEALHAYVSIHHPHDRLMFPRMLMKLVSLRTLSSVHSEQVFALRLQDKKLPPLLSEIWDVHE

SEQ ID NO: 894160 - protein, 175 aa, Homo sapiens
MIEKLVAAQQQCNRRSFSDRLRVTVMLLETSRRYNPGSESITFLKDFSYNREDFAKAGLQVEFINPIFEFSRAMNELQLNDAEFALLIAISIFSADRPNVQDQLQVERLQHTYVEALHAYVSIHHPHDRLMFPRMLMKLVSLRTLSSVHSEQVFALRLQDKKLPPLLSEIWDVHE

SEQ ID NO: 894161 - protein, 368 aa, Homo sapiens
MSLWLGAPVPDIPPDSAVELWKPGAQDASSQAQGGSSCILREEARMPHSAGGTAGVGLEAAEPTALLTRAEPPSEPTEIRPQKRKKGPAPKMLGNELCSVCGDKASGFHYNVLSCEGCKGFFRRSVIKGAHYICHSGGHCPMDTYMRRKCQECRLRKCRQAGMREECVLSEEQIRLKKLKRQEEEQAHATSLPPRASSPPQILPQLSPEQLGMIEKLVAAQQQCNRRSFSDRLRVTPWPMAPDPHSREARQQRFAHFTELAIVSVQEIVDFAKQLPGFLQLSREDQIALLKTSAIEVMLLETSRRYNPGSESITFLKDFSYNREDFAKAGLQVEFINPIFEFSRAMNELQLNDAEFALLIAISIFSAG

SEQ ID NO: 894162 - protein, 409 aa, Homo sapiens
MSLWLGAPVPDIPPDSAVELWKPGAQDASSQAQGGSSCILREEARMPHSAGGTAGVGLEAAEPTALLTRAEPPSEPTEIRPQKRKKGPAPKMLGNELCSVCGDKASGFHYNVLSCEGCKGFFRRSVIKGAHYICHSGGHCPMDTYMRRKCQECRLRKCRQAGMREECVLSEEQIRLKKLKRQEEEQAHATSLPPRASSPPQILPQLSPEQLGMIEKLVAAQQQCNRRSFSDRLRVTPWPMAPDPHSREARQQRFAHFTELAIVSVQEIVDFAKQLPGFLQLSREDQIALLKTSAIEVMLLETSRRYNPGSESITFLKDFSYNREDFAKAGLQVEFINPIFEFSRAMNELQLNDAEFALLIAISIFSAGVEEGQWETARDLHQGGLQVPQESVGGGGWWLGRVEAFAVLF

SEQ ID NO: 894163 - protein, 278 aa, Homo sapiens
MSLWLGAPVPDIPPDSAVELWKPGAQDASSQAQGGSSCILREEARMPHSAGGTAGVGLEAAEPTALLTRAEPPSEPTEIRPQKRKKGPAPKMLGNELCSVCGDKASGFHYNVLSCEGCKGFFRRSVIKGAHYICHSGGHCPMDTYMRRKCQECRLRKCRQAGMREECVLSEEQIRLKKLKRQEEEQAHATSLPPRASSPPQILNALSCEGCKGFFRRSVIKGAHYIHHPHDRLMFPRMLMKLVSLRTLSSVHSEQVFALRLQDKKLPPLLSEIWDVHE

SEQ ID NO: 894164 - protein, 278 aa, Homo sapiens; identical to SEQ ID NO: 894163

SEQ ID NO: 894165 - protein, 258 aa, Homo sapiens
MSLWLGAPVPDIPPDSAVELWKPGAQDASSQAQGGSSCILREEARMPHSAGGTAGVGLEAAEPTALLTRAEPPSEPTEIRPQKRKKGPAPKMLGNELCSVCGDKASGFHYNVLSCEGCKGFFRRSVIKGAHYICHSGGHCPMDTYMRRKCQECRLRKCRQAGMREECVLSEEQIRLKKLKRQEEEQAHATSLPQVLTPNLAWYRKWHDRESSCQNSYGLLLTLGRWLKVHREPTVAFYRFVELLKRTVTMKSYSVARR

SEQ ID NO: 894166 - protein, 67 aa, Homo sapiens
ILLRDLLGCGEKAQSRWDCVQEGRGLAVAEEHKKDSRFNYLYILQDLNFASRVVMEEAKKQIETVPW

SEQ ID NO: 894167 - protein, 447 aa, Homo sapiens; identical to SEQ ID NO: 894144

SEQ ID NO: 894168 - protein, 215 aa, Homo sapiens
MPHSAGGTAGVGLEAAEPTALLTRAEPPSEPTGVLSEEQIRLKKLKRQEEEQAHATSLPPRASSPPQILPQLSPEQLGMIEKLVAAQQQCNRRSFSDRLRVTVMLLETSRRYNPGSESITFLKDFSYNREDFAKAGLQVEFINPIFEFSRAMNELQLNDAEFALLIAISIFSAGVEEGQWETARDLHQGGLQVPQESVGGGGWWLGRVEAFAVLF

SEQ ID NO: 894169 - protein, 101 aa, Homo sapiens
  misc_feature (5)..(5): Xaa can be any naturally occurring amino acid
  misc_feature (32)..(33): Xaa can be any naturally occurring amino acid
  misc_feature (40)..(40): Xaa can be any naturally occurring amino acid
  misc_feature (44)..(44): Xaa can be any naturally occurring amino acid
  misc_feature (50)..(50): Xaa can be any naturally occurring amino acid
PTRLXCRARRGRANGCKDQASRGQRGVRATTXXVEARVRXARTXGRPTRXRASDRLMFPRMLMKLVSLRTLSSVHSEQVFALRLQDKKLPPLLSEIWDVHE

SEQ ID NO: 894170 - protein, 136 aa, Homo sapiens
MQAARPREAAAASSERKPGCPTLLGVLQGWGWRLQSPQPCSPGQSPLQNPQRHQGSALHLPQWRPLPHGHLHASQVPGVSASQMPSGWHAGGVCPVRRTDPPEETEAAVHSEQVFALRLQDKKLPPLLSEIWDVHE

SEQ ID NO: 894171 - protein, 76 aa, Homo sapiens
RRKNPRAWPGAGHPCRRIGIPAHTVVFPAPQTPAGSSRAELRADKARSERPLTGARPLLRALAMMCGSSLLLLGNC

SEQ ID NO: 894172 - protein, 252 aa, Homo sapiens
RRKRAGRHKEEAGSRPCPRAWETLPRPGRARAPAAGGWSPLGHCEPGVSRSCRAAQAMDCEVNNGSSLRDECITNLLVFGFLQSCSDNSFRRELDALGHELPVLAPQWEGYDELQTDGNRSSHSRLGRIEADSESQEDIIRNIARHLAQVGDSMDRSIPPGLVNGLALQLRNTSRSEEDRNRDLATALEQLLQAYPRDMEKEKTMLVLALLLAKKVASHTPSLLRDVFHTTVNFINQNLRTYVRSLARNGMD

SEQ ID NO: 894173 - protein, 252 aa, Homo sapiens; identical to SEQ ID NO: 894172

SEQ ID NO: 894174 - protein, 241 aa, Homo sapiens
MCSGAGVMMARWAARGRAGWRSTVRILSPLGHCEPGVSRSCRAAQAMDCEVNNGSSLRDECITNLLVFGFLQSCSDNSFRRELDALGHELPVLAPQWEGYDELQTDGNRSSHSRLGRIEADSESQEDIIRNIARHLAQVGDSMDRSIPPGLVNGLALQLRNTSRSEEDRNRDLATALEQLLQAYPRDMEKEKTMLVLALLLAKKVASHTPSLLRDVFHTTVNFINQNLRTYVRSLARNGMD

SEQ ID NO: 894175 - protein, 174 aa, Homo sapiens
MSASQTYWCLASSKAVLTTASAESWTHWATSCQCWLPSGRATMSCRLMATAAANSESQEDIIRNIARHLAQVGDSMDRSIPPGLVNGLALQLRNTSRSEEDRNRDLATALEQLLQAYPRDMEKEKTMLVLALLLAKKVASHTPSLLRDVFHTTVNFINQNLRTYVRSLARNGMD

SEQ ID NO: 894176 - protein, 114 aa, Homo sapiens
MSASQTYWCLASSKAVLTTASAESWNGLALQLRNTSRSEEDRNRDLATALEQLLQAYPRDMEKEKTMLVLALLLAKKVASHTPSLLRDVFHTTVNFINQNLRTYVRSLARNGMD

SEQ ID NO: 894177 - protein, 76 aa, Homo sapiens; identical to SEQ ID NO: 894171

SEQ ID NO: 894178 - protein, 84 aa, Homo sapiens
DCDPTTGETDDEGYEEIFQEQLAAVPEFRGLGPLFKSSPEPVALTESETEYVIRCTKHTFTNHMVFQFDCTNTLNDQTLENVTV

SEQ ID NO: 894179 - protein, 68 aa, Homo sapiens
  misc_feature (24)..(24): Xaa can be any naturally occurring amino acid
  misc_feature (41)..(41): Xaa can be any naturally occurring amino acid
CFLMTVLVWSTSVVNSMYSDAIGXLYKVLPLSGASLWTQNXTSVLQVETFVLASNRHASTCRITEQYC

SEQ ID NO: 894180 - protein, 252 aa, Homo sapiens; identical to SEQ ID NO: 894172

SEQ ID NO: 894181 - protein, 105 aa, Homo sapiens
RRKRAGRHKEEAGSRPCPRAWETLPRPGRARAPAAGGWSTTVPASGMSASQTYWCLASSKAVLTTASAESWTHWATSCQCWLPSGRATMSCRLMATAAATPAWEE

SEQ ID NO: 894182 - protein, 217 aa, Homo sapiens
PDCSRNSLGILNVSQRIIRNYPSGAGVNNGSSLRDECITNLLVFGFLQSCSDNSFRRELDALGHELPVLAPQWEGYDELQTDGNRSSHSRLGRIEADSESQEDIIRNIARHLAQVGDSMDRSIPPGLVNGLALQLRNTSRSEEDRNRDLATALEQLLQAYPRDMEKEKTMLVLALLLAKKVASHTPSLLRDVFHTTVNFINQNLRTYVRSLARNGMD

SEQ ID NO: 894183 - protein, 159 aa, Homo sapiens
EGGSARGAIRRKRVVDRVRAPGRRCLGPDAPAPPRLEGDSESQEDIIRNIARHLAQVGDSMDRSIPPGLVNGLALQLRNTSRSEEDRNRDLATALEQLLQAYPRDMEKEKTMLVLALLLAKKVASHTPSLLRDVFHTTVNFINQNLRTYVRSLARNGMD

SEQ ID NO: 894184 - protein, 163 aa, Homo sapiens
RRKRAGRHKEEAGSRPCPRAWETLPRPGRARAPAAGGWSPLGHCEPGVSRSCRAAQAMDCEVNNGSSLRDECITNLLVFGFLQSCSDNSFRRELDALGHELPVLAPQWEGYDELQTDGNRSSHSRLGRIEAASLLRDVFHTTVNFINQNLRTYVRSLARNGMD

SEQ ID NO: 894185 - protein, 252 aa, Homo sapiens; identical to SEQ ID NO: 894172

SEQ ID NO: 894186 - protein, 252 aa, Homo sapiens; identical to SEQ ID NO: 894172

SEQ ID NO: 894187 - protein, 412 aa, Homo sapiens
RVRVFLSKSPCPARLRALAPIAPAAARPEAARGARRPARPSSPAPPPPSRTAAASAASCTMSVAGLKKQFHKATQKVSEKVGGAEGTKLDDDFKEMERKVDVTSRAVMEIMTKTIEYLQPNPASRAKLSMINTMSKIRGQEKGPGYPQAEALLAEAMLKFGRELGDDCNFGPALGEVGEAMRELSEVKDSLDIEVKQNFIDPLQNLHDKDLREIQHHLKKLEGRRLDFDYKKKRQGKIPDEELRQALEKFDESKEIAESSMFNLLEMDIEQVSQLSALVQAQLEYHKQAVQILQQVTVRLEERIRQASSQPRREYQPKPRMSLEFPTGDSTQPNGGLSHTGTPKPSGVQMDQPCCRALYDFEPENEGELGFKEGDIITLTNQIDENWYEGMLHGHSGFFPINYVEILVALPH

SEQ ID NO: 894188 - protein, 412 aa, Homo sapiens; identical to SEQ ID NO: 894187

SEQ ID NO: 894189 - protein, 412 aa, Homo sapiens; identical to SEQ ID NO: 894187

SEQ ID NO: 894190 - protein, 412 aa, Homo sapiens; identical to SEQ ID NO: 894187

SEQ ID NO: 894191 - protein, 412 aa, Homo sapiens; identical to SEQ ID NO: 894187

SEQ ID NO: 894192 - protein, 163 aa, Homo sapiens
RVRVFLSKSPCPARLRALAPIAPAAARPEAARGARRPARPSSPAPPPPSRTAAASAASCTMSVAGLKKQFHKATQKVSEKVGGAEGTKLDDDFKEMERVSKWISPAAELCTTLNLKVSLHFSMQRGESFCFHTVPSQICESWNCQSKPSLTSKLSPDLNEFVS

SEQ ID NO: 894193 - protein, 412 aa, Homo sapiens; identical to SEQ ID NO: 894187

SEQ ID NO: 894194 - protein, 269 aa, Homo sapiens
MPLPLPSAFVLSALQPSPTHSSSNTQRLPDRVTGVDTDPHFIIHVPQKEDTLCFNINEEPGVILSLVQDPNTGFSVNGQLIGNKARSPGQHDGTYFGRLGIANPATDFQLEVTPQNITLNPGFGGPVFSWRDQAVLRQDGVVVTINKKRNLVVSVDDGGTFEVVLHRVWKGSSVHQDFLGFYVLDSHRMSARTHGLLGQFFHPIGFEVSDIHPGSDPHKARCHDGGEEPPAHGHQGFAKRLQQGPVAWGRGVLLVHSQQWGWTHRWCLH

SEQ ID NO: 894195 - protein, 140 aa, Homo sapiens
MPLPLPSAFVLSALQPSPTHSSSNTQRLPDRVTGVDTDPHFIIHVPQKEDTLCFNINEEPGVILSLVQDPNTGFSVNGQLIGNKARSPGQHDGTYFGRLGIANPATDFQLEVTPQNITLNPGFGGPVFSWRDQAVLRQDG

SEQ ID NO: 894196 - protein, 168 aa, Homo sapiens
MKAMGWGRGHKGWVPDDKGSEWRGMQSAAPALSATWLCRVVVTINKKRNLVVSVDDGGTFEVVLHRVWKGSSVHQDFLGFYVLDSHRMSARTHGLLGQFFHPIGFEVSDIHPGSDPHKARCHDGGEEPPAHGHQGFAKRLQQGPVAWGRGVLLVHSQQWGWTHRWCLH

SEQ ID NO: 894197 - protein, 102 aa, Homo sapiens
MPLPLPSAFVLSALQPSPTHSSSNTQRLPDRVTGGFSVNGQLIGNKARSPGQHDGTYFGRLGIANPATDFQLEVTPQNITLNPGFGGPVFSWRDQAVLRQDG

SEQ ID NO: 894198 - protein, 151 aa, Homo sapiens
CVSQRMKVDREVRANLSSQALRMSLDYGFVTPLTSMSIRGMADQDGLKPTIDKPSEDSPPLEMLGPRRTFVLSALQPSPTHSSSNTQRLPDRVTGGSDPHKARCHDGGEEPPAHGHQGFAKRLQQGPVAWGRGVLLVHSQQWGWTHRWCLH

SEQ ID NO: 894199 - protein, 330 aa, Homo sapiens
CVSQRMKVDREVRANLSSQALRMSLDYGFVTPLTSMSIRGMADQDGLKPTIDKPSEDSPPLEMLGPRRTFVLSALQPSPTHSSSNTQRLPDRVTGVDTDPHFIIHVPQKEDTLCFNINEEPGVILSLVQDPNTGFSVNGQLIGNKARSPGQHDGTYFGRLGIANPATDFQLEVTPQNITLNPGFGGPVFSWRDQAVLRQDGVVVTINKKRNLVVSVDDGGTFEVVLHRVWKGSSVHQDFLGFYVLDSHRMSARTHGLLGQFFHPIGFEVSDIHPGSDPHKARCHDGGEEPPAHGHQGFAKRLQQGPVAWGRGVLLVHSQQWGWTHRWCLH

SEQ ID NO: 894200 - protein, 330 aa, Homo sapiens; identical to SEQ ID NO: 894199

SEQ ID NO: 894201 - protein, 259 aa, Homo sapiens
MPLPLPSAFVLSALQPSPTHSSSNTQRLPDRVTGVDTDPHFIIHVPQKEDTLCFNINEEPGVILSLVQDPNTGFSVNGQLIGNKARSPGQHDGTYFGRLGIANPATDFQLEVTPQNITLNPGFGGPVFSWRDQAVLRQDGVVVTINKKRNLVVSVDDGGTFEVVLHRVWKGSSVHQDFLGFYVLDSHRMSARTHGLLGQFFHPIGFEVSDIHPGSDPHKARCHDGGEEPPAHGHQWFIHNNGAGLIDGAYTDYIVPDIF

SEQ ID NO: 894202 - protein, 350 aa, Homo sapiens
CVSQRMKVDREVRANLSSQALRMSLDYGFVTPLTSMSIRGMADQDGLKPTIDKPSEDSPPLEMLGPRRTFVLSALQPSPTHSSSNTQRLPDRVTGVDTDPHFIIHVPQKEDTLCFNINEEPGVILSLVQDPNTGFSVNGQLIGNKARSPGQHDGTYFGRLGIANPATDFQLEVTPQNITLNPGFGGPVFSWRDQAVLRQDGVVVTINKKRNLVVSVDDGGTFEVVLHRVWKGSSVHQDFLGFYVLDSHRMSARTHGLLGQFFHPIGFEVSDIHPGSDPHKARCHDGGVCKKTTARTRGMGPRCPAGSFTTMGLDSSMVPTLIISSPTSSEPSGQHACPPPGPRQRRRTTS

SEQ ID NO: 894203 - protein, 287 aa, Homo sapiens
MAQVGAWRTGALGLALLLLLGLGLGLEAAASPLSTPTSAQAAGPSSGSCPPTKFQCRTSGLCVPLTWRCDRDLDCSDGSDEEECRIEPCTQKGQCPPPPGLPCPCTGVSDCSGGTDKKLRNCSRLACLAGELRCTLSDDCIPLTWRCDGHPDCPDSSDELGCGTNEILPEGDATTMGPPVTLESVTSLRNATTMGPPVTLESVPSVGNATSSSAGDQSGSPTAYGVIAAAAVLSAACHRTSPFVWYDPERSRTGYWCMMSPLVSDRDSSQTDFPPINIGTTDENMDD

SEQ ID NO: 894204 - protein, 277 aa, Homo sapiens [sequence omitted]

SEQ ID NO: 894205 - protein, 289 aa, Homo sapiens
GWSAGISGLESGLDSAWPAPLWGQHERRLDGAGWSVANRGSGPGAAAAARPRTRPGGRREPAFHPDLCPGRRPQLRLVPTHQRDLDCSDGSDEEECRIEPCTQKGQCPPPPGLPCPCTGVSDCSGGTDKKLRNCSRLACLAGELRCTLSDDCIPLTWRCDGHPDCPDSSDELGCGTNEILPEGDATTMGPPVTLESVTSLRNATTMGPPVTLESVPSVGNATSSSAGDQSGSPTAYGVIAAAAVLSASLVTATLLLLSWLRAQERLRPLGLLVAMKESLLLSEQKTSLP

SEQ ID NO: 894206 - protein, 157 aa, Homo sapiens
MAQVGAWRTGALGLALLLLLGLGLGLEAAASPLSTPTSAQAAGTNEILPEGDATTMGPPVTLESVTSLRNATTMGPPVTLESVPSVGNATSSSAGDQSGSPTAYGVIAAAAVLSASLVTATLLLLSWLRAQERLRPLGLLVAMKESLLLSEQKTSLP

SEQ ID NO: 894207 - protein, 277 aa, Homo sapiens [sequence omitted]

SEQ ID NO: 894208 - protein, 216 aa, Homo sapiens
MGFQGVTWAFLGGHLGPDQPCAPGIEPCTQKGQCPPPPGLPCPCTGVSDCSGGTDKKLRNCSRLACLAGELRCTLSDDCIPLTWRCDGHPDCPDSSDELGCGTNEILPEGDATTMGPPVTLESVTSLRNATTMGPPVTLESVPSVGNATSSSAGDQSGSPTAYGVIAAAAVLSASLVTATLLLLSWLRAQERLRPLGLLVAMKESLLLSEQKTSLP

SEQ ID NO: 894209 - protein, 899 aa, Homo sapiens
VGGNGCSRRGSVRGAAVGCPAMDPTAGSKKEPGGGAATEEGVNRIAVPKPPSIEEFSIVKPISRGAFGKVYLGQKGGKLYAVKVVKKADMINKNMTHQVQAERDALALSKSPFIVHLYYSLQSANNVYLVMEYLIGGDVKSLLHIYGYFDEEMAVKYISEVALALDYLHRHGIIHRDLKPDNMLISNEGHIKLTDFGLSKVTLNRDINMMDILTTPSMAKPRQDYSRTPGQVLSLISSLGFNTPIAEKNQDPANILSACLSETSQLSQGLVCPMSVDQKDTTPYSSKLLKSCLETVASNPGMPVKCLTSNLLQSRKRLATSSASSQSHTFISSVESECHSSPKWEKDCQESDEALGPTMMSWNAVEKLCAKSANAIETKGFNKKDLELALSPIHNSSALPTTGRSCVNLAKKCFSGEVSWEAVELDVNNINMDTDTSQLGFHQSNQWAVDSGGISEEHLGKRSLKRNFELVDSSPCKKIIQNKKTCVEYKHNEMTNCYTNQNTGLTVEVQDLKLSVHKSQQNDCANKENIVNSFTDKQQTPEKLPIPMIAKNLMCELDEDCEKNSKRDYLSSSFLCSDDDRASKNISMNSDSSFPGISIMESPLESQPLDSDRSIKESSFEESNIEDPLIVTPDCQEKTSPKGVENPAVQESNQKMLGPPLEVLKTLASKRNAVAFRSFNSHINASNNSEPSRMNMTSLDAMDISCAYSGSYPMAITPTQKRRSCMPHQTPNQIKSGTPYRTPKSVRRGVAPVDDGRILGTPDYLAPELLLGRAHGPAVDWWALGVCLFEFLTGIPPFNDETPQQVFQNILKRDIPWPEGEEKLSDNAQSAVEILLTIDDTKRAGMKELKRHPLFSDVDWENLQHQTMPFIPQPDDETDTSYFEARNTAQHLTVSGFSL

SEQ ID NO: 894210 - protein, 899 aa, Homo sapiens; identical to SEQ ID NO: 894209

SEQ ID NO: 894211 - protein, 827 aa, Homo sapiens
VGGNGCSRRGSVRGAAVGCPAMDPTAGSKKEPGGGAATEEGVNRIAVPKPPSIEEFSIVKPISRGAFGKVYLGQKGGKLYAVKVVKKADMINKNMTHQVQAERDALALSKSPFIVHLYYSLQSANNVYLVMEYLIGGDVKSLLHIYGYFDEEMAVKYISEVALALDYLHRHGIIHRDLKPDNMLISNEGHIKLTDFGLSKVTLNRDINMMDILTTPSMAKPRQDYSRTPGQVLSLISSLGFNTPIAEKNQDPANILSACLSETSQLSQGLVCPMSVDQKDTTPYSSKLLKSCLETVASNPGMPVKCLTSNLLQSRKRLATSSASSQSHTFISSVESECHSSPKWEKDCQESDEALGPTMMSWNAVEKLCAKSANAIETKGFNKKDLELALSPIHNSSALPTTGRSCVNLAKKCFSGEVSWEAVELDVNNINMDTDTSQLGFHQSNQWAVDSGGISEEHLGKRSLKRNFELVDSSPCKKIIQNKKTCVEYKHNEMTNCYTNQNTGLTVEVQDLKLSVHKSQQNDCANKENIVNSFTDKQQTPEKLPIPMIAKNLMCELDEDCEKNSKRDYLSSSFLCSDDDRASKNISMNSDSSFPGISIMESPLESQPLDSDRSIKESSFEESNIEDPLIVTPDCQEKTSPKGVENPAVQESNQKMLGPPLEVLKTLASKRNAVAFRSFNSHINASNNSEPSRMNMTSLDAMDISCAYSGSYPMAITPTQKRRSCMPHQTPNQIKSGTPYRTPKSVRRGVAPVDDGRILGTPDYLAPELLLGRAHELKRHPLFSDVDWENLQHQTMPFIPQPDDETDTSYFEARNTAQHLTVSGFSL

SEQ ID NO: 894212 - protein, 762 aa, Homo sapiens
VGGNGCSRRGSVRGAAVGCPAMDPTAGSKKEPGGGAATEEGVNRIAVPKPPSIEEFSIVKPISRGAFGKVYLGQKGGKLYAVKVVKKADMINKNMTHQVQAERDALALSKSPFIVHLYYSLQSANNVYLVMEYLIGGDVKSLLHIYGYFDEEMAVKYISEVALALDYLHRHGIIHRDLKPDNMLISNEGHIKLTDFGLSKVTLNRDINMMDILTTPSMAKPRQDYSRTPGQVLSLISSLGFNTPIAEKNQDPANILSACLSETSQLSQGLVCPMSVDQKDTTPYSSKLLKSCLETVASNPGMPVKCLTSNLLQSRKRLATSSASSQSHTFISSVESECHSSPKWEKDCQESDEALGPTMMSWNAVEKLCAKSANAIETKGFNKKDLELALSPIHNSSALPTTGRSCVNLAKKCFSGEVSWEAVELDVNNINMDTDTSQLGFHQSNQWAVDSGGISEEHLGKRSLKRNFELVDSSPCKKIIQNKKTCVEYKHNEMTNCYTNQNTGLTVEVQDLKLSVHKSQQNDCANKENIVNSFTDKQQTPEKLPIPMIAKNLMCELDEDCEKNSKRDYLSSSFLCSDDDRASKNISMNSDSSFPGISIMESPLESQPLDSDRSIKESSFEESNIEDPLIVTPDCQEKTSPKGVENPAVQESNQKMLGPPLEVLKTLASKRNAVAFRSFNSHINASNNSEPSRIGFLFVDLSVRNYSSMRLGLLKVPCQIRIMDHRRMQKKLSKSALNMGQVCMNISNELLAGKEFSSYKFR

SEQ ID NO: 894213 - protein, 350 aa, Homo sapiens
VGGNGCSRRGSVRGAAVGCPAMDPTAGSKKEPGGGAATEEGVNRIAVPKPPSIEEFSIVKPISRGAFGKVYLGQKGGKLYAVKVVKKADMINKNMTHQVQAERDALALSKSPFIVHLYYSLQSANNVYLVMEYLIGGDVKSLLHIYGYFDEEMAVKYISEVALALDYLHRHGIIHRDLKPDNMLISNEGHIKLTDFGLSKVTLNRDINMMDILTTPSMAKPRQDYSRTPGQVLSLISSLGFNTPIAEKNQDPANILSACLSETSQLSQGLVCPMSVDQKDTTPYSSKLLKSCLETVASNPGMPVKCLTSNLLQSRKRLATSSASSQSHTFISSVESECHSSPKWEKDCQV

SEQ ID NO: 894214 - protein, 247 aa, Homo sapiens
GGCRLCPCSGPHLAEGARARVGPMSRLRLSTAEWVDVTLQQEDEAPPRPPLPELYSPEDQPPAVPPLPREATIIRHTSVRGLKRQSDERKRDRELGQCVNGDSRVELRSYVSEPELATLSGDMAQPSLGLVGPESRYQTLPGRGLSGSTSRLQQSSTIAPYVTLRRGLNAESSKATFPRPKSALERLYSGDHQRGKMSAEEQLERMKRHQKALVRERKRTLGQGERTGLPSSRYLSRPLPGDLGSVC

SEQ ID NO: 894215 - protein, 176 aa, Homo sapiens
MDLPDSASRVFCGRILSMVNTDDVNAIILAQKNMLDRFEKTNEMLLNFNNLSSARLQQMSERFLHHTRTLVEMKRDLDSIFRRIRTLKGKLARQHPEAFSHIPEASFLEEEDEDPIPPSTTTTIATSEQSTGSCDTSPDTVSPSLSPGFEDLSHVQAGSPAINGRSQTDDEEMTGE

SEQ ID NO: 894216 - protein, 176 aa, Homo sapiens; identical to SEQ ID NO: 894215

SEQ ID NO: 894217 - protein, 176 aa, Homo sapiens; identical to SEQ ID NO: 894215

SEQ ID NO: 894218 - protein, 176 aa, Homo sapiens; identical to SEQ ID NO: 894215

SEQ ID NO: 894219 - protein, 176 aa, Homo sapiens; identical to SEQ ID NO: 894215

SEQ ID NO: 894220 - protein, 176 aa, Homo sapiens; identical to SEQ ID NO: 894215

SEQ ID NO: 894221 - protein, 203 aa, Homo sapiens
LVRARVNRRGGTASIGADVQAAEEEKEMDLPDSASRVFCGRILSMVNTDDVNAIILAQKNMLDRFEKTNEMLLNFNNLSSARLQQMSERFLHHTRTLVEMKRDLDSIFRRIRTLKGKLARQHPEAFSHIPEASFLEEEDEDPIPPSTTTTIATSEQSTGSCDTSPDTVSPSLSPGFEDLSHVQAGSPAINGRSQTDDEEMTGE

SEQ ID NO: 894222 - protein, 220 aa, Homo sapiens
MARYVAVMVNQTRVDRTRAPSRKREQGLPDCAVHCWMAAEEEKEMDLPDSASRVFCGRILSMVNTDDVNAIILAQKNMLDRFEKTNEMLLNFNNLSSARLQQMSERFLHHTRTLVEMKRDLDSIFRRIRTLKGKLARQHPEAFSHIPEASFLEEEDEDPIPPSTTTTIATSEQSTGSCDTSPDTVSPSLSPGFEDLSHVQAGSPAINGRSQTDDEEMTGE

SEQ ID NO: 894223 - protein, 243 aa, Homo sapiens
PALSCRDLTHASGSRVRPRHARSQDRCVVTFRRRGRHPGSASKAARCAGAAATDAGAEFGAAEEEKEMDLPDSASRVFCGRILSMVNTDDVNAIILAQKNMLDRFEKTNEMLLNFNNLSSARLQQMSERFLHHTRTLVEMKRDLDSIFRRIRTLKGKLARQHPEAFSHIPEASFLEEEDEDPIPPSTTTTIATSEQSTGSCDTSPDTVSPSLSPGFEDLSHVQAGSPAINGRSQTDDEEMTGE

SEQ ID NO: 894224 - protein, 176 aa, Homo sapiens; identical to SEQ ID NO: 894215

SEQ ID NO: 894225 - protein, 176 aa, Homo sapiens; identical to SEQ ID NO: 894215

SEQ ID NO: 894226 - protein, 176 aa, Homo sapiens; identical to SEQ ID NO: 894215

SEQ ID NO: 894227 - protein, 176 aa, Homo sapiens; identical to SEQ ID NO: 894215

SEQ ID NO: 894228 - protein, 176 aa, Homo sapiens; identical to SEQ ID NO: 894215

SEQ ID NO: 894229 - protein, 176 aa, Homo sapiens; identical to SEQ ID NO: 894215

SEQ ID NO: 894230 - protein, 176 aa, Homo sapiens; identical to SEQ ID NO: 894215

SEQ ID NO: 894231 - protein, 190 aa, Homo sapiens
MDLPDSASRVFCGRILSMVNTDDVNAIILAQKNMLDRFEKTNEMLLNFNNLSSARLQQMSERFLHHTRTLVEMKRDLDSIFRRIRTLKGKLARQHPEAFSHIPEASFLEEEDEDPSAMPGHAHSSWSRGAGHRGIFPELSLTSALKKLRRFPDTVSPSLSPGFEDLSHVQAGSPAINGRSQTDDEEMTGE

SEQ ID NO: 894232 - protein, 195 aa, Homo sapiens [sequence omitted]

SEQ ID NO: 894233 - protein, 176 aa, Homo sapiens; identical to SEQ ID NO: 894215

SEQ ID NO: 894234 - protein, 894 aa, Homo sapiens
MSRRKQGNPQHLSQRELITPEADHVEAAILEEDEGLEIEEPSGLGLMVGGPDPDLLTCGQCQMNFPLGDILVFIEHKRKQCGGSLGACYDKALDKDSPPPSSRSELRKVSEPVEIGIQVTPDEDDHLLSPTKGICPKQENIAGPCRPAQLPAVAPIAASSHPHSSVITSPLRALGALPPCLPLPCCSARPVSGDGTQGEGQTEAPFGCQCQLSGKDEPSSYICTTCKQPFNSAWFLLQHAQNTHGFRIYLEPGPASSSLTPRLTIPPPLGPEAVAQSPLMNFLGDSNPFNLLRMTGPILRDHPGFGEGRLPGTPPLFSPPPRHHLDPHRLSAEEMGLVAQHPSAFDRVMRLNPMAIDSPAMDFSRRLRELAGNSSTPPPVSPGRGNPMHRLLNPFQPSPKSPFLSTPPLPPMPPGGTPPPQPPAKSKSCEFCGKTFKFQSNLIVHRRSHTGEKPYKCQLCDHACSQASKLKRHMKTHMHKAGSLAGRSDDGLSAASSPEPGTSELAGEGLKAADGDFRHHESDPSLGHEPEEEDEEEEEEEEELLLENESRPESSFSMDSELSRNRENGGGGVPGVPGAGGGAAKALADEKALVLGKVMENVGLGALPQYGELLADKQKRGAFLKRAAGGGDAGDDDDAGGCGDAGAGGAVNGRGGGFAPGTEPFPGLFPRKPAPLPSPGLNSAAKRIKVEKDLELPPAALIPSENVYSQWLVGYAASRHFMKDPFLGFTDARQSPFATSSEHSSENGSLRFSTPPGDLLDGGLSGRSGTASGGSTPHLGGPGPGRPSSKEGRRSDTCEYCGKVFKNCSNLTVHRRSHTGERPYKCELCNYACAQSSKLTRHMKTHGQIGKEVYRCDICQMPFSVYSTLEKHMKKWHGEHLLTNDVKIEQAERS

SEQ ID NO: 894235 - protein, 823 aa, Homo sapiens
MSRRKQGNPQHLSQRELITPEADHVEAAILEEDEGLEIEEPSGLGLMVGGPDPDLLTCGQCQMNFPLGDILVFIEHKRKQCGGSLGACYDKALDKDSPPPSSRSELRKVSEPVEIGIQVTPDEDDHLLSPTKGICPKQENIAGKDEPSSYICTTCKQPFNSAWFLLQHAQNTHGFRIYLEPGPASSSLTPRLTIPPPLGPEAVAQSPLMNFLGDSNPFNLLRMTGPILRDHPGFGEGRLPGTPPLFSPPPRHHLDPHRLSAEEMGLVAQHPSAFDRVMRLNPMAIDSPAMDFSRRLRELAGNSSTPPPVSPGRGNPMHRLLNPFQPSPKSPFLSTPPLPPMPPGGTPPPQPPAKSKSCEFCGKTFKFQSNLIVHRRSHTGEKPYKCQLCDHACSQASKLKRHMKTHMHKAGSLAGRSDDGLSAASSPEPGTSELAGEGLKAADGDFRHHESDPSLGHEPEEEDEEEEEEEEELLLENESRPESSFSMDSELSRNRENGGGGVPGVPGAGGGAAKALADEKALVLGKVMENVGLGALPQYGELLADKQKRGAFLKRAAGGGDAGDDDDAGGCGDAGAGGAVNGRGGGFAPGTEPFPGLFPRKPAPLPSPGLNSAAKRIKVEKDLELPPAALIPSENVYSQWLVGYAASRHFMKDPFLGFTDARQSPFATSSEHSSENGSLRFSTPPGDLLDGGLSGRSGTASGGSTPHLGGPGPGRPSSKEGRRSDTCEYCGKVFKNCSNLTVHRRSHTGERPYKCELCNYACAQSSKLTRHMKTHGQIGKEVYRCDICQMPFSVYSTLEKHMKKWHGEHLLTNDVKIEQAERS

SEQ ID NO: 894236 - protein, 110 aa, Homo sapiens
RRRAHGCFSFIVLTRASSAGESPAPPAPSSSSSSSSTSGFWGITVLSRQQVRLGLGGAGGPGRGPPVGRRARGSRGLRGRAAVTATQPAPGPGSGRSSPWGDAAWSGGRR

SEQ ID NO: 894237 - protein, 199 aa, Homo sapiens
PGLQRASPRLLQLLPPLPPPPPPPAFGGSLSSLGSRMSRQVVRSSKFRHVFGKHLEEPLSLQELDTSSGVLLPFFDPDTNIVYLCGKGDSSIRYFEITSEAPFLHYLSMFSSKESQRGMGYMPKRGLEVNKCEIARFYKLHERRCEPIAMTVPRKSDLFQEGPDPTPRRAPPVLSVRRAGGLESCPPPSPSGGGGRPPK

SEQ ID NO: 894238 - protein, 264 aa, Homo sapiens
RLVRAGVNRPRESRLLQLLPPLPPPPPPPAFGGSLSSLGSRMSRQVVRSSKFRHVFGQPAKADQCYEDVRVSQTTWDSGFCAVNPKFVALICEASGGGAFLVLPLGKTGRVDKNAPTVCGHTAPVLDIAWCPHNDNVIASGSEDCTVMVWEIPDGGLMLPLREPVVTLEGHTKRVGIVAWHTTAQNVLLSAGCDNVIMVWDVGTGAAMLTLGPEVHPDTIYSVDWSRDGGLICTSCRDKRVRIIEPRSLFFKAPQARPRVMGNS

SEQ ID NO: 894239 - protein, 461 aa, Homo sapiens
MSRQVVRSSKFRHVFGQPAKADQCYEDVRVSQTTWDSGFCAVNPKFVALICEASGGGAFLVLPLGKTGRVDKNAPTVCGHTAPVLDIAWCPHNDNVIASGSEDCTVMVWEIPDGGLMLPLREPVVTLEGHTKRVGIVAWHTTAQNVLLSAGCDNVIMVWDVGTGAAMLTLGPEVHPDTIYSVDWSRDGGLICTSCRDKRVRIIEPRKGTVVAEKDRPHEGTRPVRAVFVSEGKILTTGFSRMSERQVALWDTKHLEEPLSLQELDTSSGVLLPFFDPDTNIVYLCGKGDSSIRYFEITSEAPFLHYLSMFSSKESQRGMGYMPKRGLEVNKCEIARFYKLHERRCEPIAMTVPRKSDLFQEDLYPPTAGPDPALTAEEWLGGRDAGPLLISLKDGYVPPKSRELRVNRGLDTGRRRAAPEASGTPSSDAVSRLEEEMRKLQATVQELQKRLDRLEETVQAK

SEQ ID NO: 894240 - protein, 461 aa, Homo sapiens; identical to SEQ ID NO: 894239

SEQ ID NO: 894241 - protein, 461 aa, Homo sapiens; identical to SEQ ID NO: 894239

SEQ ID NO: 894242 - protein, 461 aa, Homo sapiens; identical to SEQ ID NO: 894239

SEQ ID NO: 894243 - protein, 454 aa, Homo sapiens [sequence omitted]

SEQ ID NO: 894244 - protein, 496 aa, Homo sapiens
MSRQVVRSSKFRHVFGQPAKADQCYEDVRVSQTTWDSGFCAVNPKFVALICEASGGGAFLVLPLGKTGRVDKNAPTVCGHTAPVLDIAWCPHNDNVIASGSEDCTVMVWEIPDGGLMLPLREPVVTLEGHTKRVGIVAWHTTAQNVLLSAGCDNVIMVWDVGTGAAMLTLGPEVHPDTIYSVDWSRDGGLICTSCRDKRVRIIEPRKGTVVAEKDRPHEGTRPVRAVFVSEGKILTTGFSRMSERQVALWDTKHLEEPLSLQELDTSSGVLLPFFDPDTNIVYLCGKGDSSIRYFEITSEAPFLHYLSMFSSKESQRGMGYMPKRGLEVNKCEIARSLTPGPDRSMLLGQWAVPSPPNQTVGPASPSPSHRFYKLHERRCEPIAMTVPRKSDLFQEDLYPPTAGPDPALTAEEWLGGRDAGPLLISLKDGYVPPKSRELRVNRGLDTGRRRAAPEASGTPSSDAVSRLEEEMRKLQATVQELQKRLDRLEETVQAK

SEQ ID NO: 894245 - protein, 501 aa, Homo sapiens
SLGWYWSEILGSRLLQLLPPLPPPPPPPAFGGSLSSLGSRMSRQVVRSSKFRHVFGQPAKADQCYEDVRVSQTTWDSGFCAVNPKFVALICEASGGGAFLVLPLGKTGRVDKNAPTVCGHTAPVLDIAWCPHNDNVIASGSEDCTVMVWEIPDGGLMLPLREPVVTLEGHTKRVGIVAWHTTAQNVLLSAGCDNVIMVWDVGTGAAMLTLGPEVHPDTIYSVDWSRDGGLICTSCRDKRVRIIEPRKGTVVAEKDRPHEGTRPVRAVFVSEGKILTTGFSRMSERQVALWDTKHLEEPLSLQELDTSSGVLLPFFDPDTNIVYLCGKGDSSIRYFEITSEAPFLHYLSMFSSKESQRGMGYMPKRGLEVNKCEIARFYKLHERRCEPIAMTVPRKSDLFQEDLYPPTAGPDPALTAEEWLGGRDAGPLLISLKDGYVPPKSRELRVNRGLDTGRRRAAPEASGTPSSDAVSRLEEEMRKLQATVQELQKRLDRLEETVQAK

SEQ ID NO: 894246 - protein, 429 aa, Homo sapiens
MSRQVVRSSKFRHVFGQPAKADQCYEDVRVSQTTWDSGFCAVNPKFVALICEASGGGAFLVLPLGKTGRVDKNAPTVCGHTAPVLDIAWCPHNDNVIASGSEDCTVMVWEIPDGGLMLPLREPVVTLEGHTKRVGIVAWHTTAQNVLLSAGCDNVIMVWDVGTGAAMLTLGPEVHPDTIYSVDWSRDGGLICTSCRDKRVRIIEPRKGTVVAEKDRPHEGTRPVRAVFVSEGKILTTGFSRMSERQVALWDTKHLEEPLSLQELDTSSGVLLPFFDPDTNIVYLCGKGDSSIRYFEITSEAPFLHYLSMFSSKESQRGMGYMPKRGLEVNKCEIARFYKLHERRCEPIAMTVPRKSDLFQEDLYPPTAGPPAGSAIHTHPLTSHSQPHGREKNHNKMALFSGTSQTLMTGPLDTQFAEPTSPRASPPPR

SEQ ID NO: 894247 - protein, 434 aa, Homo sapiens
  misc_feature (423)..(423): Xaa can be any naturally occurring amino acid
MSRQVVRSSKFRHVFGQPAKADQCYEDVRVSQTTWDSGFCAVNPKFVALICEASGGGAFLVLPLGKTGRVDKNAPTVCGHTAPVLDIAWCPHNDNVIASGSEDCTVMVWEIPDGGLMLPLREPVVTLEGHTKRVGIVAWHTTAQNVLLSAGCDNVIMVWDVGTGAAMLTLGPEVHPDTIYSVDWSRDGGLICTSCRDKRVRIIEPRKGTVVAEKDRPHEGTRPVRAVFVSEGKILTTGFSRMSERQVALWDTKHLEEPLSLQELDTSSGVLLPFFDPDTNIVYLCGKGDSSIRYFEITSEAPFLHYLSMFSSKESQRGMGYMPKRGLEVNKCEIARFYKLHERRCEPIAMTVPRKSDLFQGGSLVPTAPGGGPDPALTAEEWLGGRDAGPLLISLKDGYVPPKSRELRVNRGLDTRAHGGHAXMRRQVGTSPGS

SEQ ID NO: 894248 - protein, 371 aa, Homo sapiens
MSRQVVRSSKFRHVFGQPAKADQCYEDVRVSQTTWDSGFCAVNPKFVALICEASGGGAFLVLPLGKTGRVDKNAPTVCGHTAPVLDIAWCPHNDNVIASGSEDCTVMVWEIPDGGLMLPLREPVVTLEGHTKRVGIVAWHTTAQNVLLSAGCDNVIMVWDVGTGAAMLTLGPEVHPDTIYSVDWSRDGGLICTSCRDKRVRIIEPRKGTVVAEKDRPHEGTRPVRAVFVSEGKILTTGFSRMSERQVALWDTKHLEEPLSLQELDTSSGVLLPFFDPDTNIVYLCGKGDSSIRYFEITSEAPFLHYLSMFSSKESQRGMGYMPKRGLEVNKCEIARFYKLHERRCEPCCRPKRRPGCPPGATFPVEAGRMA

SEQ ID NO: 894249 - protein, 461 aa, Homo sapiens; identical to SEQ ID NO: 894239

SEQ ID NO: 894250 - protein, 328 aa, Homo sapiens
MSRQVVRSSKFRHVFGQPAKADQCYEDVRVSQTTWDSGFCAVNPKFVALICEASGGGAFLVLPLGKTGRVDKNAPTVCGHTAPVLDIAWCPHNDNVIASGSEDCTVMVWEIPDGGLMLPLREPVVTLEGHTKRVGIVAWHTTAQNVLLSAGCDNVIMVWDVGTGAAMLTLGPEVHPDTIYSVDWSRDGGLICTSCRDKRVRIIEPRKGTVVAEKDRPHEGTRPVRAVFVSEGKILTTGFSRMSERQVALWDTKHLEEPLSLQELDTSSGVLLPFFDPDTGRRRAAPEASGTPSSDAVSRLEEEMRKLQATVQELQKRLDRLEETVQAK

SEQ ID NO: 894251 - protein, 298 aa, Homo sapiens
MSRQVVRSSKFRHVFGQPAKADQCYEDVRVSQTTWDSGFCAVNPKFVALICEASGGGAFLVLPLGKTGRVDKNAPTVCGHTAPVLDIAWCPHNDNVIASGSEDCTVMVWEIPDGGLMLPLREPVVTLEGHTKRVGIVAWHTTAQNVLLSAGCDNVIMVWDVGTGAAMLTLGPEVHPDTIYSVDWSRDGGLICTSCRDKRVRIIEPRKGTVVAEKDRPHEGTRPVRAVFVSEGKILTTGFSRMSERQVALWDTKHLEEPLSLQELDTSSGVLLPFFDPDTTVQELQKRLDRLEETVQAK

SEQ ID NO: 894252 - protein, 597 aa, Homo sapiens
MEAKRRGSGCRGESWARAPHGCHTGSPAEAAVPGRSHFQTSAPAWGQLGQAPWPLSFWEEPALQPHHSHSLSGELPPPPQPPYTCPGSRASCAHGSLTRGSWGGGANPKGRDRLRQRPAGTLPGSCTAPNLCHAWPALLGFAQAILGLEQEKNNPPPSPPQALVQLPGTPQLSSLGLSEGGVEEVGLGLGGKSTSKALLCLQTGRVDKNAPTVCGHTAPVLDIAWCPHNDNVIASGSEDCTVMVWEIPDGGLMLPLREPVVTLEGHTKRVGIVAWHTTAQNVLLSAGCDNVIMVWDVGTGAAMLTLGPEVHPDTIYSVDWSRDGGLICTSCRDKRVRIIEPRKGTVVAEKDRPHEGTRPVRAVFVSEGKILTTGFSRMSERQVALWDTKHLEEPLSLQELDTSSGVLLPFFDPDTNIVYLCGKGDSSIRYFEITSEAPFLHYLSMFSSKESQRGMGYMPKRGLEVNKCEIARFYKLHERRCEPIAMTVPRKSDLFQEDLYPPTAGPDPALTAEEWLGGRDAGPLLISLKDGYVPPKSRELRVNRGLDTGRRRAAPEASGTPSSDAVSRLEEEMRKLQATVQELQKRLDRLEETVQAK

SEQ ID NO: 894253 - protein, 492 aa, Homo sapiens
MSRQVVRSSKFRHVFGQPAKADQCYEDVRVSQTTWDSGFCAVNPKFVALICEASGGGAFLVLPLGKTGRVDKNAPTVCGHTAPVLDIAWCPHNDNVIASGSEDCTVMVWEIPDGGLMLPLREPVVTLEGHTKRVGIVAWHTTAQNVLLSAVLREEGLGGGSWPAVDEGRRLMASDTVEERAGCDNVIMVWDVGTGAAMLTLGPEVHPDTIYSVDWSRDGGLICTSCRDKRVRIIEPRKGTVVAEKDRPHEGTRPVRAVFVSEGKILTTGFSRMSERQVALWDTKHLEEPLSLQELDTSSGVLLPFFDPDTNIVYLCGKGDSSIRYFEITSEAPFLHYLSMFSSKESQRGMGYMPKRGLEVNKCEIARFYKLHERRCEPIAMTVPRKSDLFQEDLYPPTAGPDPALTAEEWLGGRDAGPLLISLKDGYVPPKSRELRVNRGLDTGRRRAAPEASGTPSSDAVSRLEEEMRKLQATVQELQKRLDRLEETVQAK

SEQ ID NO: 894254 - protein, 514 aa, Homo sapiens
MSRQVVRSSKFRHVFGQPAKADQCYEDVRVSQTTWDSGFCAVNPKFVALICEASGGGAFLVLPLGKTGRVDKNAPTVCGHTAPVLDIAWCPHNDNVIASGSEDCTVMVWEIPDGGLMLPLREPVVTLEGHTKRVGIVAWHTTAQNVLLSAGCDNVIMVWDVGTGAAMLTLGPEVHPDTIYSVDWSRDGGLICTSCRDKRVRIIEPRKGTVVAVSRHLPWPLTLQPLSFLSTISQALGCCPPSPPPGTGPVGYVRVPDLTTSLSLQEKDRPHEGTRPVRAVFVSEGKILTTGFSRMSERQVALWDTKHLEEPLSLQELDTSSGVLLPFFDPDTNIVYLCGKGDSSIRYFEITSEAPFLHYLSMFSSKESQRGMGYMPKRGLEVNKCEIARFYKLHERRCEPIAMTVPRKSDLFQEDLYPPTAGPDPALTAEEWLGGRDAGPLLISLKDGYVPPKSRELRVNRGLDTGRRRAAPEASGTPSSDAVSRLEEEMRKLQATVQELQKRLDRLEETVQAK

SEQ ID NO: 894255 - protein, 345 aa, Homo sapiens
MLPLREPVVTLEGHTKRVGIVAWHTTAQNVLLSAGCDNVIMVWDVGTGAAMLTLGPEVHPDTIYSVDWSRDGGLICTSCRDKRVRIIEPRKGTVVAEKDRPHEGTRPVRAVFVSEGKILTTGFSRMSERQVALWDTKHLEEPLSLQELDTSSGVLLPFFDPDTNIVYLCGKGDSSIRYFEITSEAPFLHYLSMFSSKESQRGMGYMPKRGLEVNKCEIARFYKLHERRCEPIAMTVPRKSDLFQEDLYPPTAGPDPALTAEEWLGGRDAGPLLISLKDGYVPPKSRELRVNRGLDTGRRRAAPEASGTPSSDAVSRLEEEMRKLQATVQELQKRLDRLEETVQAK

SEQ ID NO: 894256 - protein, 341 aa, Homo sapiens
EDSQRHKEGHTKRVGIVAWHTTAQNVLLSAGCDNVIMVWDVGTGAAMLTLGPEVHPDTIYSVDWSRDGGLICTSCRDKRVRIIEPRKGTVVAEKDRPHEGTRPVRAVFVSEGKILTTGFSRMSERQVALWDTKHLEEPLSLQELDTSSGVLLPFFDPDTNIVYLCGKGDSSIRYFEITSEAPFLHYLSMFSSKESQRGMGYMPKRGLEVNKCEIARFYKLHERRCEPIAMTVPRKSDLFQEDLYPPTAGPDPALTAEEWLGGRDAGPLLISLKDGYVPPKSRELRVNRGLDTGRRRAAPEASGTPSSDAVSRLEEEMRKLQATVQELQKRLDRLEETVQAK

SEQ ID NO: 894257 - protein, 523 aa, Homo sapiens
MSRQVVRSSKFRHVFGQPAKADQCYEDVRVSQTTWDSGFCAVNPKFVALICEASGGGAFLVLPLGKTGRVDKNAPTVCGHTAPVLDIAWCPHNDNVIASGSEDCTVMVSGGGDPGAGRGALGWDLTFGVLKTHWPLLCGVGDPGWGPDAAPAGARRHPGGPHQACGHCGLAHHSPERAAQCRCCGRRGLGVARGLQWMRAGGSWLLNCGERAGCDNVIMVWDVGTGAAMLTLGPEVHPDTIYSVDWSRDGGLICTSCRDKRVRIIEPRKGTVVAEKDRPHEGTRPVRAVFVSEGKILTTGFSRMSERQVALWDTKHLEEPLSLQELDTSSGVLLPFFDPDTNIVYLCGKGDSSIRYFEITSEAPFLHYLSMFSSKESQRGMGYMPKRGLEVNKCEIARFYKLHERRCEPIAMTVPRKSDLFQEDLYPPTAGPDPALTAEEWLGGRDAGPLLISLKDGYVPPKSRELRVNRGLDTGRRRAAPEASGTPSSDAVSRLEEEMRKLQATVQELQKRLDRLEETVQAK

SEQ ID NO: 894258 - protein, 209 aa, Homo sapiens
MSRQVVRSSKFRHVFGQPAKADQCYEDVRVSQTTWDSGFCAVNPKFVALICEASGGGAFLVLPLGKTGRVDKNAPTVCGHTAPVLDIAWCPHNDNVIASGSEDCTVMVWEIPDGGLMLPLREPVVTLEGHTKRVGIVAWHTTAQNVLLSAGCDNVIMVWDVGTGAAMLTLGPEVHPDTIYHCHDSASKVGPVPGGPVPTHRRARPCPHG

SEQ ID NO: 894259 - protein, 105 aa, Homo sapiens
MSRQVVRSSKFRHVFGQPAKADQCYEDVRVSQTTWDSGFCAVNPKFVALICEASGGGAFLVLPLGKVSPWGPGGSSSSTGPMALCRSCLGDGHQAFQGLCCHLEN

SEQ ID NO: 894260 - protein, 344 aa, Homo sapiens
MWPVLSQPFPHPFTPLPNPDGFKVILAIEFHMTLFSSVLDTFLKILLNIFLRMRNSYKCIFFVPLCLPFLAFQTPLSVTFVSFPPPFSLHSREWREKDRPHEGTRPVRAVFVSEGKILTTGFSRMSERQVALWDTKHLEEPLSLQELDTSSGVLLPFFDPDTNIVYLCGKGDSSIRYFEITSEAPFLHYLSMFSSKESQRGMGYMPKRGLEVNKCEIARFYKLHERRCEPIAMTVPRKSDLFQEDLYPPTAGPDPALTAEEWLGGRDAGPLLISLKDGYVPPKSRELRVNRGLDTGRRRAAPEASGTPSSDAVSRLEEEMRKLQATVQELQKRLDRLEETVQAK

SEQ ID NO: 894261 - protein, 143 aa, Homo sapiens
MSRQVVRSSKFRHVFGQPAKADQCYEDVRVSQTTWDSGFCAVNPKFVALICEASGGGAFLVLPLGKTGRVDKNAPTVCGHTAPVLDIAWCPHNDNVIASGSEDCTVMVWEIPDGGLMLPLREPVVTLEGHTKRVGIVALGRPC

SEQ ID NO: 894262 - protein, 384 aa, Homo sapiens
QTTGQCECRPGYQGLHCETCKEGFYLNYTSGLCQPCDCSPHGALSIPCNSSGKCQCKVGVIGSICDRCQDGYYGFSKNGCLPCQCNNRSASCDALTGACLNCQENSKGNHCEECKEGFYQSPDATKECLRCPCSAVTSTGSCSIKSSELEPECDQCKDGYIGPNCNKCENGYYNFDSICRKCQCHGHVDPVKTPKICKPESGECINCLHNTTGFWCENCLEGYVHDLEGNCIKKEVILPTPEGSTILVSNASLTTSVPTPVINSTFTPTTLQTIFSVSTSENSTSALADVSWTQFNIIILTVIIIVVVLLMGFVGAVYMYREYQNRKLNAPFWTIELKEDNISFSSYHDSIPNADVSGLLEDDGNEVAPNGQLTLTTPIHNYKA

SEQ ID NO: 894263 - protein, 384 aa, Homo sapiens; identical to SEQ ID NO: 894262

SEQ ID NO: 894264 - protein, 384 aa, Homo sapiens; identical to SEQ ID NO: 894262

SEQ ID NO: 894265 - protein, 653 aa, Homo sapiens
PGVRQPLLLLLLLLPPPPPPSLRPSVSAPGTRAPPQPASMSGIKKQKTENQQKSTNVVYQAHHVSRNKRGQVVGTRGGFRGCTVWLTGLSGAGKTTISFALEEYLVSHAIPCYSLDGDNVRHGLNRNLGFSPGDREENIRRIAEVAKLFADAGLVCITSFISPFAKDRENARKIHESAGLPFFEIFVDAPLNICESRDVKGLYKRARAGEIKGFTGIDSDYEKPETPERVLKTNLSTVSDCVHQVVELLQEQNIVPYTIIKDIHELFVPENKLDHVRAEAETLPSLSITKLDLQWVQVLSEGWATPLKGFMREKEYLQVMHFDTLLDDGVINMSIPIVLPVSAEDKTRLEGCSKFVLAHGGRRVAILRDAEFYEHRKEERCSRVWGTTCTKHPHIKMVMESGDWLVGGDLQVLEKIRWNDGLDQYRLTPLELKQKCKEMNADAVFAFQLRNPVHNGHALLMQDTRRRLLERGYKHPVLLLHPLGGWTKDDDVPLDWRMKQHAAVLEEGVLDPKSTIVAIFPSPMLYAGPTEVQWHCRSRMIAGANFYIVGRDPAGMPHPETKKDLYEPTHGGKVLSMAPGLTSVEIIPFRVAAYNKAKKAMDFYDPARHNEFDFISGTRMRKLAREGENPPDGFMAPKAWKVLTDYYRSLEKN

SEQ ID NO: 894266 - protein, 653 aa, Homo sapiens; identical to SEQ ID NO: 894265

SEQ ID NO: 894267 - protein, 653 aa, Homo sapiens; identical to SEQ ID NO: 894265

SEQ ID NO: 894268 - protein, 653 aa, Homo sapiens; identical to SEQ ID NO: 894265

SEQ ID NO: 894269 - protein, 653 aa, Homo sapiens; identical to SEQ ID NO: 894265

SEQ ID NO: 894270 - protein, 653 aa, Homo sapiens; identical to SEQ ID NO: 894265

SEQ ID NO: 894271 - protein, 631 aa, Homo sapiens
CKPQMIVLVTEWVDLSLVDRQCNGHIENQQKSTNVVYQAHHVSRNKRGQVVGTRGGFRGCTVWLTGLSGAGKTTISFALEEYLVSHAIPCYSLDGDNVRHGLNRNLGFSPGDREENIRRIAEVAKLFADAGLVCITSFISPFAKDRENARKIHESAGLPFFEIFVDAPLNICESRDVKGLYKRARAGEIKGFTGIDSDYEKPETPERVLKTNLSTVSDCVHQVVELLQEQNIVPYTIIKDIHELFVPENKLDHVRAEAETLPSLSITKLDLQWVQVLSEGWATPLKGFMREKEYLQVMHFDTLLDDGVINMSIPIVLPVSAEDKTRLEGCSKFVLAHGGRRVAILRDAEFYEHRKEERCSRVWGTTCTKHPHIKMVMESGDWLVGGDLQVLEKIRWNDGLDQYRLTPLELKQKCKEMNADAVFAFQLRNPVHNGHALLMQDTRRRLLERGYKHPVLLLHPLGGWTKDDDVPLDWRMKQHAAVLEEGVLDPKSTIVAIFPSPMLYAGPTEVQWHCRSRMIAGANFYIVGRDPAGMPHPETKKDLYEPTHGGKVLSMAPGLTSVEIIPFRVAAYNKAKKAMDFYDPARHNEFDFISGTRMRKLAREGENPPDGFMAPKAWKVLTDYYRSLEKN

SEQ ID NO: 894272 - protein, 630 aa, Homo sapiens
SQELFQTRLFFCRVSEQIELTPFCQENQQKSTNVVYQAHHVSRNKRGQVVGTRGGFRGCTVWLTGLSGAGKTTISFALEEYLVSHAIPCYSLDGDNVRHGLNRNLGFSPGDREENIRRIAEVAKLFADAGLVCITSFISPFAKDRENARKIHESAGLPFFEIFVDAPLNICESRDVKGLYKRARAGEIKGFTGIDSDYEKPETPERVLKTNLSTVSDCVHQVVELLQEQNIVPYTIIKDIHELFVPENKLDHVRAEAETLPSLSITKLDLQWVQVLSEGWATPLKGFMREKEYLQVMHFDTLLDDGVINMSIPIVLPVSAEDKTRLEGCSKFVLAHGGRRVAILRDAEFYEHRKEERCSRVWGTTCTKHPHIKMVMESGDWLVGGDLQVLEKIRWNDGLDQYRLTPLELKQKCKEMNADAVFAFQLRNPVHNGHALLMQDTRRRLLERGYKHPVLLLHPLGGWTKDDDVPLDWRMKQHAAVLEEGVLDPKSTIVAIFPSPMLYAGPTEVQWHCRSRMIAGANFYIVGRDPAGMPHPETKKDLYEPTHGGKVLSMAPGLTSVEIIPFRVAAYNKAKKAMDFYDPARHNEFDFISGTRMRKLAREGENPPDGFMAPKAWKVLTDYYRSLEKN

SEQ ID NO: 894273 - protein, 635 aa, Homo sapiens
PGVRQPLLLLLLLLPPPPPPSLRPSVSAPGTRAPPQPASMSGIKKQKTENQQKSTNVVYQAHHVSRNKRGQVVGTRGGFRGCTVWLTGLSGAGKTTISFALEEYLVSHAIPCYSLDGDNVRHGLNRNLGFSPGDREENIRRIAEVAKLFADAGLVCITSFISPFAKDRENARKIHESAGLPFFEIFVDAPLNICESRDVKGLYKRARAGEIKGFTGIDSDYEKPETPERVLKTNLSTVSDCVHQVVELLQEQNIVPYTIIKDIHELFVPENKLDHVRAEAETLPSLSITKLDLQWVQVLSEGWATPLKGFMREKEYLQVMHFDTLLDDGVINMSIPIVLPVSAEDKTRLEGCSKFVLAHGGRRVAILRDAEFYEHRKEERCSRVWGTTCTKHPHIKMVMESGDWLVGGDLQVLEKIRWNDGLDQYRLTPLELKQKCKEMNADAVFAFQLRNPVHNGHALLMQDTRRRLLERGYKHPVLLLHPLGGWTKDDDVPLDWRMKQHAAVLEEGVLDPKSTIVAIFPSPMLYAGPTEVQWHCRSRMIAGANFYIVGRDPAGMPHPETKKDLYEPTHGGKVLSMAPGLTSVEIIPFRVAAYNKAKRTRMRKLAREGENPPDGFMAPKAWKVLTDYYRSLEKN

SEQ ID NO: 894274 - protein, 331 aa, Homo sapiens [sequence omitted]

SEQ ID NO: 894275 - protein, 114 aa, Homo sapiens
MIAGANFYIVGRDPAGMPHPETKKDLYEPTHGGKVLSMAPGLTSVEIIPFRVAAYNKAKKAMDFYDPARHNEFDFISGTRMRKLAREGENPPDGFMAPKAWKVLTDYYRSLEKN

SEQ ID NO: 894276 - protein, 550 aa, Homo sapiens
PGVRQPLLLLLLLLPPPPPPSLRPSVSAPGTRAPPQPASMSGIKKQKTENQQKSTNVVYQAHHVSRNKRGQVVGTRGGFRGCTVWLTGLSGAGKTTISFALEEYLVSHAIPCYSLDGDNVRHGLNRNLGFSPGDREENIRRIAEVAKLFADAGLVCITSFISPFAKDRENARKIHESAGLPFFEIFVDAPLNICESRDVKGLYKRARAGEIKGFTGIDSDYEKPETPERVLKTNLSTVSDCVHQVVELLQEQNIVPYTIIKDIHELFVPENKLDHVRAEAETLPSLSITKLDLQWVQVLSEGWATPLKGFMREKEYLQVMHFDTLLDDGVINMSIPIVLPVSAEDKTRLEGCSKFVLAHGGRRVAILRDAEFYEHRKEERCSRVWGTTCTKHPHIKMVMESGDWLVGGDLQVLEKIRWNDGLDQYRLTPLELKQKCKEMNADAVFAFQLRNPVHNGHALLMQDTRRRLLERGYKHPVLLLHPLGGWTKDDDVPLDWRMKQHAAVLEEGVLDPKSTIVAIFPSPMLYAGPTEVSNSQSWALRLRNSDSDFT

SEQ ID NO: 894277 - protein, 357 aa, Homo sapiens
MATTVPDGCRNGLKSKYYRLCDKAEAWGIVLETVATAGVVTSVAFMLTLPILVCKVQDSNRRKMLPTQFLFLLGVLGIFGLTFAFIIGLDGSTGPTRFFLFGILFSICFSCLLAHAVSLTKLVRGRKPLSLLVILGLAVGFSLVQDVIAIEYIVLTMNRTNVNVFSELSAPRRNEDFVLLLTYVLFLMALTFLMSSFTFCGSFTGWKRHGAHIYLTMLLSIAIWVAWITLLMLPDFDRRWDDTILSSALAANGWVFLLAYVSPEFWLLTKQRNPMDYPVEDAFCKPQLVKKSYGVENRAYSQEEITQGFEETGDTLYAPYSTHFQLQNQPPQKEFSIPRAHAWPSPYKDYEVKKEGS

SEQ ID NO: 894278 - protein, 357 aa, Homo sapiens; identical to SEQ ID NO: 894277

SEQ ID NO: 894279 - protein, 339 aa, Homo sapiens
MATTVPDGCRNGLKSKYYRLCDKAEAWGIVLETVATAGVVTSVAFMLTLPILVCKVQDSNRRKMLPTQFLFLLGVLGIFGLTFAFIIGLDGSTGPTRFFLFGILFSICFSCLLAHAVSLTKLVRGRKPLSLLVILGLAVGFSLVQDVIAIEYIVLTMNRTNVNVFSELSAPRRNEDFVLLLTYVLFLMALTFLMSSFTFCGSFTGWKRHGAHIYLTMLLSIAIWVAWITLLMLPDFDRRWDDTILSSALAANGWVFLLAYVSPEFWLLTKQRNPMDYPVEDAFCKPQLVKKSYGVENRAYSQEEITQGFEETGDTLYAPYSTHFQLQVSDFFLPLHQRH

SEQ ID NO: 894280 - protein, 412 aa, Homo sapiens
CACVSFPKRAINSKNSAVSFPVSSLRLALRSSPAALLRAGSSTKFTANALALGSRMATTVPDGCRNGLKSKYYRLCDKAEAWGIVLETVATAGVVTSVAFMLTLPILVCKVQDSNRRKMLPTQFLFLLGVLGIFGLTFAFIIGLDGSTGPTRFFLFGILFSICFSCLLAHAVSLTKLVRGRKPLSLLVILGLAVGFSLVQDVIAIEYIVLTMNRTNVNVFSELSAPRRNEDFVLLLTYVLFLMALTFLMSSFTFCGSFTGWKRHGAHIYLTMLLSIAIWVAWITLLMLPDFDRRWDDTILSSALAANGWVFLLAYVSPEFWLLTKQRNPMDYPVEDAFCKPQLVKKSYGVENRAYSQEEITQGFEETGDTLYAPYSTHFQLQNQPPQKEFSIPRAHAWPSPYKDYEVKKEGS

SEQ ID NO: 894281 - protein, 357 aa, Homo sapiens; identical to SEQ ID NO: 894277

SEQ ID NO: 894282 - protein, 357 aa, Homo sapiens; identical to SEQ ID NO: 894277

SEQ ID NO: 894283 - protein, 357 aa, Homo sapiens; identical to SEQ ID NO: 894277

SEQ ID NO: 894284 - protein, 357 aa, Homo sapiens; identical to SEQ ID NO: 894277

SEQ ID NO: 894285 - protein, 343 aa, Homo sapiens [sequence omitted]

SEQ ID NO: 894286 - protein, 128 aa, Homo sapiens
MLWAGAHQHGRNWRKRETSPGTQGPLPPVPRARPALMATHAIAPTLSWAIPRQQCSPQPGRLNALPPDRCSGPHFGDRAPESCFPGACSVSGACAFKGTRPACPPQEPSLRSSRNRLREGQTFGRMEI

SEQ ID NO: 894287 - protein, 128 aa, Homo sapiens; identical to SEQ ID NO: 894286

SEQ ID NO: 894288 - protein, 482 aa, Homo sapiens
MAEAATPGTTATTSGAGAAAATAAAASPTPIPTVTAPSLGAGGGGGGSDGSGGGWTKQVTCRYFMHGVCKEGDNCRYSHDLSDSPYSVVCKYFQRGYCIYGDRCRYEHSKPLKQEEATATELTTKSSLAASSSLSSIVGPLVEMNTGEAESRNSNFATVGAGSEDWVNAIEFVPGQPYCGRTAPSCTEAPLQGSVTKEESEKEQTAVETKKQLCPYAAVGECRYGENCVYLHGDSCDMCGLQVLHPMDAAQRSQHIKSCIEAHEKDMELSFAVQRSKDMVCGICMEVVYEKANPSERRFGILSNCNHTYCLKCIRKWRSAKQFESKIIKSCPECRITSNFVIPSEYWVEEKEEKQKLILKYKEAMSNKACRYFDEGRGSCPFGGNCFYKHAYPDGRREEPQRQKVGTSSRYRAQRRNHFWELIEERENSNPFDNDEEEVVTFELGEMLLMLLAAGGDDELTDSEDEWDLFHDELEDFYDLDL

SEQ ID NO: 894289 - protein, 329 aa, Homo sapiens
MAEAATPGTTATTSGAGAAAATAAAASPTPIPTVTAPSLGAGGGGGGSDGSGGGWTKQVTCRYFMHGVCKEGDNCRYSHDLSDSPYSVVCKYFQRGYCIYGDRCRYEHSKPLKQEEATATELTTKSSLAASSSLSSIVGPLVEMNTGEAESRNSNFATVGAGSEDWVNAIEFVPGQPYCGRTAPSCTEAPLQGSVTKEESEKEQTAVETKKQLCPYAAVGECRYGENCVYLHGDSCDMCGLQVLHPMDAAQRSQHIKSCIEAHEKDMELSFAVQRSKDMVCGICMEVVYEKANPSERRFGILSNCNHTYCLKCIRKWRSAKQFESKIIK

SEQ ID NO: 894290 - protein, 225 aa, Homo sapiens
MAEAATPGTTATTSGAGAAAATAAAASPTPIPTVTAPSLGAGGGGGGSDGSGGGWTKQVTCRYFMHGVCKEGDNCRYSHDLSDSPYSVVCKYFQRGYCIYGDRCRYEHSKPLKQEEATATELTTKSSLAASSSLSSIVGPLVEMNTGEAESRNSNFATVGAGSEDWVNAIEFVPGQPYCGRTAPSCTEAPLQGSVTKEESEKEQTAVETKKQLCPYAAVGESQPQ

SEQ ID NO: 894291 - protein, 111 aa, Homo sapiens
MHGVCKEGDNCRYSHDLSDSPYSVVCKYFQRGYCIYGDRCSRALRPMRRTWSSHLPCSAARTWCVGSAWRWSMRKPTPVSAASGSSPTATTPTVSSAFASGGVLSNLRARS

SEQ ID NO: 894292 - protein, 113 aa, Homo sapiens
VEVARALRYATRSRRGPNGCLSVLPLPSPGLAVLSPQPDRNYVIPEVPGPLLCGINSNGGGCNSRNNSHNIRSRSGSGDGGSSLPHPDPHSHRPVPGGGRRGRRQRRQRRRLD

SEQ ID NO: 894293 - protein, 329 aa, Homo sapiens; identical to SEQ ID NO: 894289

SEQ ID NO: 894294 - protein, 517 aa, Homo sapiens
VEVARALRYATRSRRGPNGCLSVLPLPSPGLAVLSPQPDRNYVIPEVPGPLLCGINSNGGGCNSRNNSHNIRSRSGSGDGGSSDGSGGGWTKQVTCRYFMHGVCKEGDNCRYSHDLSDSPYSVVCKYFQRGYCIYGDRCRYEHSKPLKQEEATATELTTKSSLAASSSLSSIVGPLVEMNTGEAESRNSNFATVGAGSEDWVNAIEFVPGQPYCGRTAPSCTEAPLQGSVTKEESEKEQTAVETKKQLCPYAAVGECRYGENCVYLHGDSCDMCGLQVLHPMDAAQRSQHIKSCIEAHEKDMELSFAVQRSKDMVCGICMEVVYEKANPSERRFGILSNCNHTYCLKCIRKWRSAKQFESKIIKSCPECRITSNFVIPSEYWVEEKEEKQKLILKYKEAMSNKACRYFDEGRGSCPFGGNCFYKHAYPDGRREEPQRQKVGTSSRYRAQRRNHFWELIEERENSNPFDNDEEEVVTFELGEMLLMLLAAGGDDELTDSEDEWDLFHDELEDFYDLDL

SEQ ID NO: 894295 - protein, 445 aa, Homo sapiens
MAEAATPGTTATTSGAGAAAATAAAASPTPIPTVTAPSLGAGGGGGGSDGSGGGWTKQVTCRYFMHGVCKEGDNCRYSHDLSDSPYSVVCKYFQRGYCIYGDRCRYEHSKPLKQEEATATELTTKSSLAASSSLSSIVGPLVEMNTGEAESRNSNFATVGAGSEDWVNAIEFVPGQPYCGRTAPSCTEAPLQGSVTKEESEKEQTAVETKKQLCPYAAVGECRYGENCVYLHGDSCDMCGLQVLHPMDAAQRSQHIKSCIEAHEKDMELSFAVQRSKDMVCGICMEVVYEKANPSERRFGILSNCNHTYCLKCIRKWRSAKQFESKIINNKACRYFDEGRGSCPFGGNCFYKHAYPDGRREEPQRQKVGTSSRYRAQRRNHFWELIEERENSNPFDNDEEEVVTFELGEMLLMLLAAGGDDELTDSEDEWDLFHDELEDFYDLDL

SEQ ID NO: 894296 - protein, 418 aa, Homo sapiens
MHGVCKEGDNCRYSHDLSDSPYSVVCKYFQRGYCIYGDRCRYEHSKPLKQEEATATELTTKSSLAASSSLSSIVGPLVEMNTGEAESRNSNFATVGAGSEDWVNAIEFVPGQPYCGRTAPSCTEAPLQGSVTKEESEKEQTAVETKKQLCPYAAVGECRYGENCVYLHGDSCDMCGLQVLHPMDAAQRSQHIKSCIEAHEKDMELSFAVQRSKDMVCGICMEVVYEKANPSERRFGILSNCNHTYCLKCIRKWRSAKQFESKIIKSCPECRITSNFVIPSEYWVEEKEEKQKLILKYKEAMSNKACRYFDEGRGSCPFGGNCFYKHAYPDGRREEPQRQKVGTSSRYRAQRRNHFWELIEERENSNPFDNDEEEVVTFELGEMLLMLLAAGGDDELTDSEDEWDLFHDELEDFYDLDL

SEQ ID NO: 894297 - protein, 418 aa, Homo sapiens; identical to SEQ ID NO: 894296

SEQ ID NO: 894298 - protein, 329 aa, Homo sapiens; identical to SEQ ID NO: 894289

SEQ ID NO: 894299 - protein, 315 aa, Homo sapiens
MAEAATPGTTATTSGAGAAAATAAAASPTPIPTVTAPSLGAGGGGGGSDGSGGGWTKQVTCRYFMHGVCKEGDNCRYSHDLSDSPYSVVCKYFQRGYCIYGDRCRYEHSKPLKQEEATATELTTKSSLAASSSLSSIVGPLVEMNTGEAESRNSNFATVGAGSEDWVNAIEFVPGQPYCGRTAPSCTEAPLQGSVTKEESEKEQTAVESADTGRTVCISTEILVTCVGCRSCIQWMLPRDRSISNRALRPMRRTWSSHLPCSAARTWCVGSAWRWSMRKPTPVSAASGSSPTATTPTVSSAFASGGVLSNLRARS

SEQ ID NO: 894300 - protein, 329 aa, Homo sapiens; identical to SEQ ID NO: 894289

SEQ ID NO: 894301 - protein, 329 aa, Homo sapiens; identical to SEQ ID NO: 894289

SEQ ID NO: 894302 - protein, 329 aa, Homo sapiens; identical to SEQ ID NO: 894289

SEQ ID NO: 894303 - protein, 329 aa, Homo sapiens; identical to SEQ ID NO: 894289

SEQ ID NO: 894304 - protein, 412 aa, Homo sapiens
MAEAATPGTTATTSGAGAAAATAAAASPTPIPTVTAPSLGAGGGGGGSDGSGGGWTKQVTCRYFMHGVCKEGDNCRYSHDLSDSPYSVVCKYFQRGYCIYGDRCRYEHSKPLKQEEATATELTTKSSLAASSSLSSIVGPLVEMNTGEAESRNSNFATVGAGSEDWVNAIEFVPGQPYCGRTAPSCTEAPLQGSVTKEESEKEQTAVETKKQLCPYAAVGECRYGENCVYLHGDSCDMCGLQVLHPMDAAQRSQHIKSCIEAHEKDMELSFAVQRSKDMVCGICMEVVYEKANPSERRFGILSNCNHTYCLKCIRKWRSAKQFESKIIKSCPECRITSNFVIPSEYWVEEKEEKQKLILKYKEAMRYEHCSLFSSEEPNRAWVHFEKNGAALYTPTSFLPFFDFPGQFILSP

SEQ ID NO: 894305 - protein, 422 aa, Homo sapiens
MAEAATPGTTATTSGAGAAAATAAAASPTPIPTVTAPSLGAGGGGGGSDGSGGGWTKQVTCRYFMHGVCKEGDNCRYSHDLSDSPYSVVCKYFQRGYCIYGDRCRYEHSKPLKQEEATATELTTKSSLAASSSLSSIVGPLVEMNTGEAESRNSNFATVGAGSEDWVNAIEFVPGQPYCGRTAPSCTEAPLQGSVTKEESEKEQTAVETKKQLCPYAAVGECRYGENCVYLHGDSCDMCGLQVLHPMDAAQRSQHIKSCIEAHEKDMELSFAVQRSKDMVCGICMEVVYEKANPSERRFGILSNCNHTYCLKCIRKWRSAKQFESKIIKSCPECRITSNFVIPSEYWVEEKEEKQKLILDSRAWHSSRLCCPLRRPLRTFSPLPQPTRPTPPPPSAPAPGPARPPPIRPRSPPALPPPPLPP

SEQ ID NO: 894306 - protein, 351 aa, Homo sapiens
MAEAATPGTTATTSGAGAAAATAAAASPTPIPTVTAPSLGAGGGGGGSDGSGGGWTKQVTCRYFMHGVCKEGDNCRYSHDLSDSPYSVVCKYFQRGYCIYGDRCRYEHSKPLKQEEATATELTTKSSLAASSSLSSIVGPLVEMNTGEAESRNSNFATVGAGSEDWVNAIEFVPGQPYCGRTAPSCTEAPLQGSVTKEESEKEQTAVETKKQLCPYAAVGECRYGENCVYLHGDSCDMCGLQVLHPMDAAQRSQHIKSCIEAHEKDMELSFAVQRSKDMVCGICMEVVYEKANPSERRFGILSNCNHTYCLKCIRKWRSAKQFESKIIKSCPECRITSNALIPWIPPILSL

SEQ ID NO: 894307 - protein, 332 aa, Homo sapiens
MAEAATPGTTATTSGAGAAAATAAAASPTPIPTVTAPSLGAGGGGGGSDGSGGGWTKQVTCRYFMHGVCKEGDNCRYSHDLSDSPYSVVCKYFQRGYCIYGDRCRYEHSKPLKQEEATATELTTKSSLAASSSLSSIVGPLVEMNTGEAESRNSNFATVGAGSEDWVNAIEFVPGQPYCGRTAPSCTEAPLQGSVTKEESEKEQTAVETKKQLCPYAAVGECRYGENCVYLHGDSCDMCGLQVLHPMDAAQRSQHIKSCIEAHEKDMELSFAVQRSKDMVCGICMEVVYEKANPSERRFGILSNCNHTYCLKCIRKWRSAKQRSLYFAAALL

SEQ ID NO: 894308 - protein, 189 aa, Homo sapiens
GRGLLPRRLRYLGQDATAAARDLRTRGLQGYCPSATARQQVLVSALQQLKGRRSEHRCVRSLGGGCSAAGGRTAPGTCGGKRKYLRWGRLHFRVGVSLAKLEPASQRCSAFPGLEQRPIVASRVHPSLTLRHGSPSPGGRWYFLARGPFWGAWGTGSLLPRPGWSLQTPKNFNRDTCWALARLSALRKH

SEQ ID NO: 894309 - protein, 265 aa, Homo sapiens
MGKCLRYITANTDTEEQSFPVPKAFNTRVEELNLDVLLQKVDHLRMSESGKSESFELLRDHKEKFRDEIEFMWRFARAYGDMYELSTNTQEKKHYANIGKTLSERAINRAPMNGHCHLWYAVLCGYVSEFEGLQNKINYGHLFKEHLDIAIKLLPEEPFLYYLKGRYCYTVSKLSWIEKKMAATLFGKIPSSTVQEALHNFLKAEELCPGYSNPNYMYLAKCYTDLEENQNALKFCNLALLLPTVTKEDKEAQKEMQKIMTSLKR

SEQ ID NO: 894310 - protein, 566 aa, Homo sapiens
GRGLLPRRLRYLGQDATAAARDLRTRGLQGYCPSATARQQVLVSALQQLKGRRSEHRCVRSLGGGCSAAGGRTAPGTCGGKRKYLRWGRLHFRVGVSLAKLEPASQRCSAFPGLEQRPIVASRVHPSLTLRHGSPSPGGRWYFLARGTLLGNENQEMPYSTNKELILGIMVGTAGISLLLLWYHKVRKPGIAMKLPEFLSLGNTFNSITLQDEIHDDQGTTVIFQERQLQILEKLNELLTNMEELKEEIRFLKEAIPKLEEYIQDELGGKITVHKISPQHRARKRRLPTIQSSATSNSSEEAESEGGYITANTDTEEQSFPVPKAFNTRVEELNLDVLLQKVDHLRMSESGKSESFELLRDHKEKFRDEIEFMWRFARAYGDMYELSTNTQEKKHYANIGKTLSERAINRAPMNGHCHLWYAVLCGYVSEFEGLQNKINYGHLFKEHLDIAIKLLPEEPFLYYLKGRYCYTVSKLSWIEKKMAATLFGKIPSSTVQEALHNFLKAEELCPGYSNPNYMYLAKCYTDLEENQNALKFCNLALLLPTVTKEDKEAQKEMQKIMTSLKR

SEQ ID NO: 894311 - protein, 472 aa, Homo sapiens
GRGLLPRRLRYLGQDATAAARDLRTRGLQGYCPSATARQQVLVSALQQLKGRRSEHRNENQEMPYSTNKELILGIMVGTAGISLLLLWYHKVRKPGIAMKLPEFLSLGNTFNSITLQDEIHDDQGTTVIFQERQLQILEKLNELLTNMEELKEEIRFLKEAIPKLEEYIQDELGGKITVHKISPQHRARKRRLPTIQSSATSNSSEEAESEGGYITANTDTEEQSFPVPKAFNTRVEELNLDVLLQKVDHLRMSESGKSESFELLRDHKEKFRDEIEFMWRFARAYGDMYELSTNTQEKKHYANIGKTLSERAINRAPMNGHCHLWYAVLCGYVSEFEGLQNKINYGHLFKEHLDIAIKLLPEEPFLYYLKGRYCYTVSKLSWIEKKMAATLFGKIPSSTVQEALHNFLKAEELCPGYSNPNYMYLAKCYTDLEENQNALKFCNLALLLPTVTKEDKEAQKEMQKIMTSLKR

SEQ ID NO: 894312 - protein, 451 aa, Homo sapiens
GRGLLPRRLRYLGQDATAAARDLRTRGLQGYCPSATARQQVLVSALQQLKGRRSEHRNENQEMPYSTNKELILGIMVGTAGISLLLLWYHKVRKPGIAMKLPEFLSLGNTFNSITLQDEIHDDQGTTVIFQERQLQILEKLNELLTNMEELKEEIRFLKEAIPKLEEYIQDELGGKITVHKISPQTEREKEEYITANTDTEEQSFPVPKAFNTRVEELNLDVLLQKVDHLRMSESGKSESFELLRDHKEKFRDEIEFMWRFARAYGDMYELSTNTQEKKHYANIGKTLSERAINRAPMNGHCHLWYAVLCGYVSEFEGLQNKINYGHLFKEHLDIAIKLLPEEPFLYYLKGRYCYTVSKLSWIEKKMAATLFGKIPSSTVQEALHNFLKAEELCPGYSNPNYMYLAKCYTDLEENQNALKFCNLALLLPTVTKEDKEAQKEMQKIMTSLKR

SEQ ID NO: 894313 - protein, 265 aa, Homo sapiens; identical to SEQ ID NO: 894309

SEQ ID NO: 894314 - protein, 475 aa, Homo sapiens
GRGLLPRRLRYLGQDATAAARDLRTRGLQGYCPSATARQQVLVSALQQLKGRRSEHRCVRSLGGGCSAAGGRTAPGTCGGKRKYLRWGRLHFRVGVSLAKLEPASQRCSAFPGLEQRPIVASRVHPSLTLRHGSPSPGGRWYFLARGTLLGNENQEMPYSTNKELILGIMVGTAGISLLLLWYHKVRKPGIAMKLPEFLSLGNTFNSITLQDEIHDDQGTTVIFQERQLQILEKLNELLTNMEELKEEIRFLKEAIPKLEEYIQDELGGKITVHKISPQHRARKRRLPTIQSSATSNSSEEAESEGGYITANTDTEEQSFPVPKAFNTRVEELNLDVLLQKVDHLRMSESGKSESFELLRDHKEKFRDEIEFMWRFARAYGDMYELSTNTQEKKHYANIGKTLSERAINRAPMNGHCHLWYAVLCGYVSEFEGLQNKINYGHLFKEHLDIAIKLLPEEPFLYYLKGRYCYTVFKN

SEQ ID NO: 894315 - protein, 410 aa, Homo sapiens
MPYSTNKELILGIMVGTAGISLLLLWYHKVRKPGIAMKLPEFLSLGNTFNSITLQDEIHDDQGTTVIFQERQLQILEKLNELLTNMEELKEEIRFLKEAIPKLEEYIQDELGGKITVHKISPQHRARKRRLPTIQSSATSNSSEEAESEGGYITANTDTEEQSFPVPKAFNTRVEELNLDVLLQKVDHLRMSESGKSESFELLRDHKEKFRDEIEFMWRFARAYGDMYELSTNTQEKKHYANIGKTLSERAINRAPMNGHCHLWYAVLCGYVSEFEGLQNKINYGHLFKEHLDIAIKLLPEEPFLYYLKGRYCYTVSKLSWIEKKMAATLFGKIPSSTVQEALHNFLKAEELCPGYSNPNYMYLAKCYTDLEENQNALKFCNLALLLPTVTKEDKEAQKEMQKIMTSLKR

SEQ ID NO: 894316 - protein, 265 aa, Homo sapiens; identical to SEQ ID NO: 894309

SEQ ID NO: 894317 - protein, 272 aa, Homo sapiens
CGAEAEAEERPAAAGSGGTGSGRRSRPEPSRAEPSRSGRRRPARRAATMSVFGKLFGAGGGKAGKGGPTPQEAIQRLRDTEEMLSKKQEFLEKKIEQELTAAKKHGTKNKRAALQALKRKKRYEKQLAQIDGTLSTIEFQREALENANTNTEVLKNMGYAAKAMKAAHDNMDIDKVDELMQDIADQQELAEEISTAISKPVGFGEEFDEDELMAELEELEQEELDKNLLEISGPETVPLPNVPSIALPSKPAKKKEEEDDDMKELENWAGSM

SEQ ID NO: 894318 - protein, 224 aa, Homo sapiens
MSVFGKLFGAGGGKAGKGGPTPQEAIQRLRDTEEMLSKKQEFLEKKIEQELTAAKKHGTKNKRAALQALKRKKRYEKQLAQIDGTLSTIEFQREALENANTNTEVLKNMGYAAKAMKAAHDNMDIDKVDELMQDIADQQELAEEISTAISKPVGFGEEFDEDELMAELEELEQEELDKNLLEISGPETVPLPNVPSIALPSKPAKKKEEEDDDMKELENWAGSM

SEQ ID NO: 894319 - protein, 272 aa, Homo sapiens; identical to SEQ ID NO: 894317

SEQ ID NO: 894320 - protein, 272 aa, Homo sapiens; identical to SEQ ID NO: 894317

SEQ ID NO: 894321 - protein, 272 aa, Homo sapiens; identical to SEQ ID NO: 894317

SEQ ID NO: 894322 - protein, 272 aa, Homo sapiens; identical to SEQ ID NO: 894317

SEQ ID NO: 894323 - protein, 272 aa, Homo sapiens; identical to SEQ ID NO: 894317

SEQ ID NO: 894324 - protein, 116 aa, Homo sapiens
FLSTLRIFKHRNLNMDIDKVDELMQDIADQQELAEEISTAISKPVGFGEEFDEDELMAELEELEQEELDKNLLEISGPETVPLPNVPSIALPSKPAKKKEEEDDDMKELENWAGSM

SEQ ID NO: 894325 - protein, 299 aa, Homo sapiens
CGAEAEAEERPAAAGSGGTGSGRRSRPEPSRAEPSRSGRRRPARRAATMSVFGKLFGAGGGKAGKGGPTPQEAIQRLRDTEEMLSKKQEFLEKKIEQELTAAKKHGTKNKRAALQALKRKKRYEKQLAQIDGTLSTIEFQREALENANTNTEVLKNMGYAAKAMKAAHDNMDIDKVDELMQDIADQQELAEEISTAISKPVGFGEEFDEDELMAELEELEQEELDKNLLEISGPETVPLPNVPSIALPSKPVDPCNGVQRWLGPDRLWWPAQRAGVCVCGAGRMWCRQVPSLSTLTPKQ

SEQ ID NO: 894326 - protein, 274 aa, Homo sapiens
CGAEAEAEERPAAAGSGGTGSGRRSRPEPSRAEPSRSGRRRPARRAATMSVFGKLFGAGGGKAGKGGPTPQEAIQRLRDTEEMLSKKQEFLEKKIEQELTAAKKHGTKNKRAALQALKRKKRYEKQLAQIDGTLSTIEFQREALENANTNTEVLKNMGYAAKAMKAAHDNMDIDKVDELMQDIADQQELAEEISTAISKPVGFGEEFDEDELMAELEELEQEELDKNLLEISGPETVPLPNVPSIALPSKPAKKKEEEDDDMKELENWATCHSR

SEQ ID NO: 894327 - protein, 299 aa, Homo sapiens; identical to SEQ ID NO: 894325

SEQ ID NO: 894328 - protein, 299 aa, Homo sapiens; identical to SEQ ID NO: 894325

SEQ ID NO: 894329 - protein, 252 aa, Homo sapiens
CGAEAEAEERPAAAGSGGTGSGRRSRPEPSRAEPSRSGRRRPARRAATMSVFGKLFGAGGGKAGKGGPTPQEAIQRLRDTEEMLSKKQEFLEKKIEQELTAAKKHGTKNKRAALQALKRKKRYEKQLAQIDGTLSTIEFQREALENANTNTEVLKNMGYAAKAMKAAHDNMDIDKVDELMQDIADQQELAEEISTAISKPVGFGEEFDEDELMAELEELEQEELDKNLLEISGPETVPLPNVPSIALPSKPG

SEQ ID NO: 894330 - protein, 261 aa, Homo sapiens
CGAEAEAEERPAAAGSGGTGSGRRSRPEPSRAEPSRSGRRRPARRAATMSVFGKLFGAGGGKAGKGGPTPQEAIQRLRDTEEMLSKKQEFLEKKIEQELTAAKKHGTKNKRAALQALKRKKRYEKQLAQIDGTLSTIEFQREALENANTNTEVLKNMGYAAKAMKAAHDNMDIDKVDELMQDIADQQELAEEISTAISKPVGFGEEFDEDELMAELEELEQEELDKNLLEISGPETVPLPNVPSIALPSKPAKKKEEGVCG

SEQ ID NO: 894331 - protein, 214 aa, Homo sapiens
CGAEAEAEERPAAAGSGGTGSGRRSRPEPSRAEPSRSGRRRPARRAATMSVFGKLFGAGGGKAGKGGPTPQEAIQRLRDTEEMLSKKQEFLEKKIEQELTAAKKHGTKNKRAALQALKRKKRYEKQLAQIDGTLSTIEFQREALENANTNTEVLKNMGYAAKAMKAAHDNMDIDKVDELMQDIADQQELAEEISRDVGRRDEMLEGGMRCWKEP

SEQ ID NO: 894332 - protein, 132 aa, Homo sapiens
MPYKWNNTASSKDVVRQLCQESFSSSALGLKKLLDVTCSSLSVTQEEAEELLQALHRLTRLVAFRDLSSAEAILALFPENFHQNLKNLLTKIILEHVSTWRTEAQANQISLPRLVDLDWRVDIKTEKLLSAT

SEQ ID NO: 894333 - protein, 212 aa, Homo sapiens
PRFPGCHGQRDFGKMAALTAEHFAALQSLLKASSKDVVRQLCQESFSSSALGLKKLLDVTCSSLSVTQEEAEELLQALHRLTRLVAFRDLSSAEAILALFPENFHQNLKNLLTKIILEHVSTWRTEAQANQISLPRLVDLDWRVDIKTSSDSISRMAVPTCLLQMKIQEDPSLCGDKPSISAVTVELSKETLDTMLDGLGRIRDQLSAVASK

SEQ ID NO: 894334 - protein, 189 aa, Homo sapiens
MPYKWNNTASSKDVVRQLCQESFSSSALGLKKLLDVTCSSLSVTQEEAEELLQALHRLTRLVAFRDLSSAEAILALFPENFHQNLKNLLTKIILEHVSTWRTEAQANQISLPRLVDLDWRVDIKTSSDSISRMAVPTCLLQMKIQEDPSLCGDKPSISAVTVELSKETLDTMLDGLGRIRDQLSAVASK

SEQ ID NO: 894335 - protein, 199 aa, Homo sapiens
PRFPGCHGQRDFGKMAALTAEHFAALQSLLKASSKDVVRQLCQESFSSSALGLKKLLDVTCSSLSVTQEEAEELLQALHRLTRLVAFRDLSSAEAILALFPENFHQNLKNLLTKIILEHVLSATPGRSGLESGYQNLLRQHQPHGRPHLPAPDEDPRRSQPMRRQTLHLSCHRGAEQRNTGHHVRWPGPHPRPTLCRGQ

SEQ ID NO: 894336 - protein, 168 aa, Homo sapiens
PRFPGCHGQRDFGKMAALTAEHFAALQSLLKASSKDVVRQLCQESFSSSALGLKKLLDVTCSSLSVTQEEAEELLQALHRLTRLVAFRDLSSAEAILALFPENFHQNLKNLLTKIILEHVSTWRTEAQANQISLPRLVDLDWRVDIKTSKKIPAYAETNPPSQLSPWS

SEQ ID NO: 894337 - protein, 212 aa, Homo sapiens; identical to SEQ ID NO: 894333

SEQ ID NO: 894338 - protein, 212 aa, Homo sapiens; identical to SEQ ID NO: 894333

SEQ ID NO: 894339 - protein, 155 aa, Homo sapiens
PRFPGCHGQRDFGKMAALTAEHFAALQSLLKASSKDVVRQLCQESFSSSALGLKKLLDVTCSSLSVTQEEAEELLQALHRLTRLVAFRDLSSAEAILALFPENFHQNLKNLLTKIILEHVSTWRTEAQANQISLPRLVDLDWRVDIKTEKLLSAT

SEQ ID NO: 894340 - protein, 202 aa, Homo sapiens
RLYRSESLDAEHFAALQSLLKASSKDVVRQLCQESFSSSALGLKKLLDVTCSSLSVTQEEAEELLQALHRLTRLVAFRDLSSAEAILALFPENFHQNLKNLLTKIILEHVSTWRTEAQANQISLPRLVDLDWRVDIKTSSDSISRMAVPTCLLQMKIQEDPSLCGDKPSISAVTVELSKETLDTMLDGLGRIRDQLSAVASK

SEQ ID NO: 894341 - protein, 170 aa, Homo sapiens
PRFPGCHGQRDFGKMAALTAEHFAALQSLLKLLQALHRLTRLVAFRDLSSAEAILALFPENFHQNLKNLLTKIILEHVSTWRTEAQANQISLPRLVDLDWRVDIKTSSDSISRMAVPTCLLQMKIQEDPSLCGDKPSISAVTVELSKETLDTMLDGLGRIRDQLSAVASK

SEQ ID NO: 894342 - protein, 212 aa, Homo sapiens; identical to SEQ ID NO: 894333

SEQ ID NO: 894343 - protein, 176 aa, Homo sapiens
PRFPGCHGQRDFGKMAALTAEHFAALQSLLKASSKDVVRQLCQESFSSSALGLKKLLDVTCSSLSVTQEEAEELLQALHRLTRLVAFRDLSSAEAILALFPENFHQNLKNLLTKIILEHVSTWRTEAQANQNPRRSQPMRRQTLHLSCHRGAEQRNTGHHVRWPGPHPRPTLCRGQ

SEQ ID NO: 894344 - protein, 187 aa, Homo sapiens
PRFPGCHGQRDFGKMAALTAEHFAALQSLLKASSKDVVRQLCQESFSSSALGLKKLLDVTCSSLSVTQEEAEELLQALHRLTRLVAFRDLSSAEAILALFPENFHQNLKNLLTKIILEHVSTWRTEAQANQISLPRLVDLDWRVDIKTSSDSISRMAVPTCLLQMKIQEDPSLCGDKPSIEKLLSAT

SEQ ID NO: 894345 - protein, 222 aa, Homo sapiens
PRFPGCHGQRDFGKMAALTAEHFAALQSLLKASSKDVVRQLCQESFSSSALGLKKLLDVTCSSLSVTQEEAEELLQALHRLTRLVAFRDLSSAEAILALFPENFHQNLKNLLTKIILEHVSTWRTEAQANQISLPRLVDLDWRVDIKTSSDSISRMAVPTCLLQMKIQEDPSLCGDKPSISAVTVELSKETLDTMLDGLGRIRDQLSAVATGEQKPPSLKSS

SEQ ID NO: 894346 - protein, 503 aa, Homo sapiens
CPTLSSGTSARFRGKNQFSGGLPQITLSPLAQPCGRLAAMYSNVIGTVTSGKRKVYLLSLLLIGFWDCVTCHGSPVDICTAKPRDIPMNPMCIYRSPEKKATEDEGSEQKIPEATNRRVWELSKANSRFATTFYQHLADSKNDNDNIFLSPLSISTAFAMTKLGACNDTLQQLMEVFKFDTISEKTSDQIHFFFAKLNCRLYRKANKSSKLVSANRLFGDKSLTFNETYQDISELVYGAKLQPLDFKENAEQSRAAINKWVSNKTEGRITDVIPSEAINELTVLVLVNTIYFKGLWKSKFSPENTRKELFYKADGESCSASMMYQEGKFRYRRVAEGTQVLELPFKGDDITMVLILPKPEKSLAKVEKELTPEVLQEWLDELEEMMLVVHMPRFRIEDGFSLKEQLQDMGLVDLFSPEKSKLPGIVAEGRDDLYVSDAFHKAFLEVNEEGSEAAASTAVVIAGRSLNPNRVTFKANRPFLVFIREVPLNTIIFMGRVANPCVK

SEQ ID NO: 894347 - protein, 447 aa, Homo sapiens
MYSNVIGTVTSGKSCHGSPVDICTAKPRDIPMNPMCIYRSPEKKATEDEGSEQKIPEATNRRVWELSKANSRFATTFYQHLADSKNDNDNIFLSPLSISTAFAMTKLGACNDTLQQLMEVFKFDTISEKTSDQIHFFFAKLNCRLYRKANKSSKLVSANRLFGDKSLTFNETYQDISELVYGAKLQPLDFKENAEQSRAAINKWVSNKTEGRITDVIPSEAINELTVLVLVNTIYFKGLWKSKFSPENTRKELFYKADGESCSASMMYQEGKFRYRRVAEGTQVLELPFKGDDITMVLILPKPEKSLAKVEKELTPEVLQEWLDELEEMMLVVHMPRFRIEDGFSLKEQLQDMGLVDLFSPEKSKLPGIVAEGRDDLYVSDAFHKAFLEVNEEGSEAAASTAVVIAGRSLNPNRVTFKANRPFLVFIREVPLNTIIFMGRVANPCVK

SEQ ID NO: 894348 - protein, 260 aa, Homo sapiens
MRPTRTSVSWYMEPSSSPWTSSEGRITDVIPSEAINELTVLVLVNTIYFKGLWKSKFSPENTRKELFYKADGESCSASMMYQEGKFRYRRVAEGTQVLELPFKGDDITMVLILPKPEKSLAKVEKELTPEVLQEWLDELEEMMLVVHMPRFRIEDGFSLKEQLQDMGLVDLFSPEKSKLPGIVAEGRDDLYVSDAFHKAFLEVNEEGSEAAASTAVVIAGRSLNPNRVTFKANRPFLVFIREVPLNTIIFMGRVANPCVK

SEQ ID NO: 894349 - protein, 445 aa, Homo sapiens
MYSNVIGTVTSGKRKVYLLSLLLIGFWDCVTCHGSPVDICTAKPRDIPMNPMCIYRSPEKKATEDEGSEQKIPEATNRRVWELSKANSRFATTFYQHLADSKNDNDNIFLSPLSISTAFAMTKLGACNDTLQQLMEVFKFDTISEKTSDQIHFFFAKLNCRLYRLTFNETYQDISELVYGAKLQPLDFKENAEQSRAAINKWVSNKTEGRITDVIPSEAINELTVLVLVNTIYFKGLWKSKFSPENTRKELFYKADGESCSASMMYQEGKFRYRRVAEGTQVLELPFKGDDITMVLILPKPEKSLAKVEKELTPEVLQEWLDELEEMMLVVHMPRFRIEDGFSLKEQLQDMGLVDLFSPEKSKLPGIVAEGRDDLYVSDAFHKAFLEVNEEGSEAAASTAVVIAGRSLNPNRVTFKANRPFLVFIREVPLNTIIFMGRVANPCVK

SEQ ID NO: 894350 - protein, 182 aa, Homo sapiens
MMYQEGKFRYRRVAEGTQVLELPFKGDDITMVLILPKPEKSLAKVEKELTPEVLQEWLDELEEMMLVVHMPRFRIEDGFSLKEQLQDMGLVDLFSPEKSKLPGIVAEGRDDLYVSDAFHKAFLEVNEEGSEAAASTAVVIAGRSLNPNRVTFKANRPFLVFIREVPLNTIIFMGRVANPCVK

SEQ ID NO: 894351 - protein, 385 aa, Homo sapiens
MYSNVIGTVTSGKRKVYLLSLLLIGFWDCVTCHGSPVDICTAKPRDIPMNPMCIYRSPEKKATEDEGSEQKIPEATNRRVWELSKANSRFATTFYQHLADSKNDNDNIFLSPLSISTAFAMTKLGACNDTLQQLMEVFKFDTISEKTSDQIHFFFAKLNCRLYRKANKSSKLVSANRLFGDKSLTFNETYQDISELVYGAKLQPLDFKENAEQSRAAINKWVSNKTEGRITDVIPSEAINELTVLVLVNTIYFKGLWKSKFSPENTRKELFYKADGESCSASMMYQEGKFRYRRVAEGTQVLELPFKGDDITMVLILPKPEKSLAKVEKELTPEVLQEWLDELEEMMLVVHMPRFRIEDGFSLKEQLQDMGLVDLFSPLCLRCIP

SEQ ID NO: 894352 - protein, 446 aa, Homo sapiens
MYSNVIGTVTSGKRKVYLLSLLLIGFWDCVTCHGSPVDICTAKPRDIPMNPMCIYRSPEKKATEDEGSEQKIPEATNRRVWELSKANSRFATTFYQHLADSKNDNDNIFLSPLSISTAFAMTKLGACNDTLQQLMEVFKFDTISEKTSDQIHFFFAKLNCRLYRKANKSSKLVSANRLFGDKSLTFNETYQDISELVYGAKLQPLDFKENAEQSRAAINKWVSNKTEGRITDVIPSEAINELTVLVLVNTIYFKGLWKSKFSPENTRKELFYKADGESCSASMMYQEGKFRYRRVAEGTQVLELPFKGDDITMVLILPKPEKSLAKVEKELTPEVLQEWLDELEEMMLVVHMPRFRIEDGFSLKEQLQDMGLVDLFSPEKSKLPGIVAEGRDDLYVSDAFHKAFLEVNEEGSEAAASTAVVIAGLIREVPLNTIIFMGRVANPCVK

SEQ ID NO: 894353 - protein, 235 aa, Homo sapiens
CPTLSSGTSARFRGKNQFSGGLPQITLSPLAQPCGRLAAMYSNVIGTVTSGKRKVYLLSLLLIGFWDCVTCHGSPVDICTAKPRDIPMNPMCIYRSPEKKATEDEGSEQKIPEATNRRVWELSKANSRFATTFYQHLADSKNDNDNIFLSPLSISTAFAMTKLGACNDTLQQLMEVFKFDTISEKTSDQIHFFFAKLNCRLYRKANKSSKLVSANRLFGDKSSMSQMHSIRHFLR

SEQ ID NO: 894354 - protein, 464 aa, Homo sapiens
MYSNVIGTVTSGKRKVYLLSLLLIGFWDCVTCHGSPVDICTAKPRDIPMNPMCIYRSPEKKATEDEGSEQKIPEATNRRVWELSKANSRFATTFYQHLADSKNDNDNIFLSPLSISTAFAMTKLGACNDTLQQLMEVFKFDTISEKTSDQIHFFFAKLNCRLYRKANKSSKLVSANRLFGDKSLTFNETYQDISELVYGAKLQPLDFKENAEQSRAAINKWVSNKTEGRITDVIPSEAINELTVLVLVNTIYFKGLWKSKFSPENTRKELFYKADGESCSASMMYQEGKFRYRRVAEGTQVLELPFKGDDITMVLILPKPEKSLAKVEKELTPEVLQEWLDELEEMMLVVHMPRFRIEDGFSLKEQLQDMGLVDLFSPEKSKLPGIVAEGRDDLYVSDAFHKAFLEVNEEGSEAAASTAVVIAGRSLNPNRVTFKANRPFLVFIREVPLNTIIFMGRVANPCVK

SEQ ID NO: 894355 - protein, 416 aa, Homo sapiens
MNPMCIYRSPEKKATEDEGSEQKIPEATNRRVWELSKANSRFATTFYQHLADSKNDNDNIFLSPLSISTAFAMTKLGACNDTLQQLMEVFKFDTISEKTSDQIHFFFAKLNCRLYRKANKSSKLVSANRLFGDKSLTFNETYQDISELVYGAKLQPLDFKENAEQSRAAINKWVSNKTEGRITDVIPSEAINELTVLVLVNTIYFKGLWKSKFSPENTRKELFYKADGESCSASMMYQEGKFRYRRVAEGTQVLELPFKGDDITMVLILPKPEKSLAKVEKELTPEVLQEWLDELEEMMLVVHMPRFRIEDGFSLKEQLQDMGLVDLFSPEKSKLPGIVAEGRDDLYVSDAFHKAFLEVNEEGSEAAASTAVVIAGRSLNPNRVTFKANRPFLVFIREVPLNTIIFMGRVANPCVK

SEQ ID NO: 894356 - protein, 416 aa, Homo sapiens; identical to SEQ ID NO: 894355

SEQ ID NO: 894357 - protein, 344 aa, Homo sapiens
MTKLGACNDTLQQLMEVFKFDTISEKTSDQIHFFFAKLNCRLYRKANKSSKLVSANRLFGDKSLTFNETYQDISELVYGAKLQPLDFKENAEQSRAAINKWVSNKTEGRITDVIPSEAINELTVLVLVNTIYFKGLWKSKFSPENTRKELFYKADGESCSASMMYQEGKFRYRRVAEGTQVLELPFKGDDITMVLILPKPEKSLAKVEKELTPEVLQEWLDELEEMMLVVHMPRFRIEDGFSLKEQLQDMGLVDLFSPEKSKLPGIVAEGRDDLYVSDAFHKAFLEVNEEGSEAAASTAVVIAGRSLNPNRVTFKANRPFLVFIREVPLNTIIFMGRVANPCVK

SEQ ID NO: 894358 - protein, 397 aa, Homo sapiens
MNPMCIYRSPEKKATEDEGSEQKIPEATNRRVWELSKANSRFATTFYQHLADSKNDNDNIFLSPLSISTAFAMTKLGACNDTLQQLMEVFKFDTISEKTSDQIHFFFAKLNCRLYRLTFNETYQDISELVYGAKLQPLDFKENAEQSRAAINKWVSNKTEGRITDVIPSEAINELTVLVLVNTIYFKGLWKSKFSPENTRKELFYKADGESCSASMMYQEGKFRYRRVAEGTQVLELPFKGDDITMVLILPKPEKSLAKVEKELTPEVLQEWLDELEEMMLVVHMPRFRIEDGFSLKEQLQDMGLVDLFSPEKSKLPGIVAEGRDDLYVSDAFHKAFLEVNEEGSEAAASTAVVIAGRSLNPNRVTFKANRPFLVFIREVPLNTIIFMGRVANPCVK

SEQ ID NO: 894359 - protein, 356 aa, Homo sapiens
MYSNVIGTVTSGKRKVYLLSLLLIGFWDCVTCHGSPVDICTAKPRDIPMNPMCIYRSPEKKATEDEGSEQKIPEATNRRVWELSKANSRFATTFYQHLADSKNDNDNIFLSPLSISTAFAMTKLGACNDTLQQLMEVFKFDTIYFKGLWKSKFSPENTRKELFYKADGESCSASMMYQEGKFRYRRVAEGTQVLELPFKGDDITMVLILPKPEKSLAKVEKELTPEVLQEWLDELEEMMLVVHMPRFRIEDGFSLKEQLQDMGLVDLFSPEKSKLPGIVAEGRDDLYVSDAFHKAFLEVNEEGSEAAASTAVVIAGRSLNPNRVTFKANRPFLVFIREVPLNTIIFMGRVANPCVK

SEQ ID NO: 894360 - protein, 280 aa, Homo sapiens
MRRAELAGLKTMAWVPAESAVEELMPRLLPVEPCDLTEGFDPSVPPRTPQEYLRRVQIEAAQCPDVVVAQIDPKKLKRKQSVNISLSGCQPAPEGYSPTLQWQQQQVAQFSTVRQNVNKHRSHWKSQQLDSNVTMPKSEDEEGWKKFCLGEKLCADGAVGPATNESPGIDYVQIGFPPLLSIVSRMNQATVTSVLEYLSNWFGERDFTPELGRWLYALLACLEKPLLPEAHSLIRQLARRCSEVRLLVDSKDDERVPALNLLICLVSRYFDQRDLADEPS

SEQ ID NO: 894361 - protein, 265 aa, Homo sapiens
MRRAELAGLKTMAWVPAESAVEELMPRLLPVEPCDLTEGFDPSVPPRTPQEYLRRVQIEAAQCPDVVVAQIDPKKLKRKQSVNISLSGCQPAPEGYSPTLQWQQQQVAQFSTVRQNVNKHRSHWKSQQLDSNVTMPKSEDEEGWKKFCLGEKLCADGAVGPATNESPGIDYVQATVTSVLEYLSNWFGERDFTPELGRWLYALLACLEKPLLPEAHSLIRQLARRCSEVRLLVDSKDDERVPALNLLICLVSRYFDQRDLADEPS

SEQ ID NO: 894362 - protein, 146 aa, Homo sapiens
MPKSEDEEGWKKFCLGEKLCADGAVGPATNESPGIDYVQIGFPPLLSIVSRMNQATVTSVLEYLSNWFGERDFTPELGRWLYALLACLEKPLLPEAHSLIRQLARRCSEVRLLVDSKDDERVPALNLLICLVSRYFDQRDLADEPS

SEQ ID NO: 894363 - protein, 250 aa, Homo sapiens
MRRAELAGLKTMAWVPAESAVEELMPRLLPVEPCDLTEGFDPSVPPRTPQEYLRRVQIEAAQCPDVVVAQIDPKKLKRKQSVNISLSGCQPAPEGYSPTLQWQQQQVAQFSTVRQNVNKHRSHWKSQQLDSNVTMPKSEDEEGWKKFCLGEKLCADGAVGPATNESPGIDYVQIGFPPLLSIVSRMNQATVTSVLEYLSNWFGERDFTPELGRWLYALLACLEKPLLPEAHSLIRQLARRCSEVRLLVVF

SEQ ID NO: 894364 - protein, 204 aa, Homo sapiens
MPHEISLDDGAATIWTRLSYSPTLQWQQQQVAQFSTVRQNVNKHRSHWKSQQLDSNVTMPKSEDEEGWKKFCLGEKLCADGAVGPATNESPGIDYVQIGFPPLLSIVSRMNQATVTSVLEYLSNWFGERDFTPELGRWLYALLACLEKPLLPEAHSLIRQLARRCSEVRLLVDSKDDERVPALNLLICLVSRYFDQRDLADEPS

SEQ ID NO: 894365 - protein, 149 aa, Homo sapiens
MRRAELAGLKTMAWVPAESAVEELMPRLLPVEPCDLTEGFDPSVPPRTPQEYLRRVQIEAAQCPDVVVAQIDPKKLKRKQSVNISLSGCQPAPEGYSPTLQWQQQQVAQFSTVRQNVNKHRSHWKSQQLDSNVTMRWGFAMLARLVLNS

SEQ ID NO: 894366 - protein, 270 aa, Homo sapiens
MRRAELAGLKTMAWVPAESAVEELMPRLLPVEPCDLTEGFDPSVPPRTPQEYLRRVQIEAAQCPDVVVAQIDPKKLKRKQSVNISLSGCQPAPEGYSPTLQWQQQQVAQFSTVRQNVNKHRSHWKSQQLDSNVTMPKSEDEEGWKKFCLGEKLCADGAVGPATNESPGIDYVQIGFPPLLSIVSRMNQATVTSVLEYLSNWFGERDFTPELGRWLYALLACLEKPLLPEAHSLIRQLARRCSEVRLLVDSKDDERVPALNLLICLVSRYS

SEQ ID NO: 894367 - protein, 270 aa, Homo sapiens; identical to SEQ ID NO: 894366

SEQ ID NO: 894368 - protein, 290 aa, Homo sapiens
MRRAELAGLKTMAWVPAESAVEELMPRLLPVEPCDLTEGFDPSVPPRTPQEYLRRVQIEAAQCPDVVVAQIDPKKLKRKQSVNISLSGCQPAPEGYSPTLQWQQQQVAQFSTVRQNVNKHRSHWKSQQLDSNVTMPKSEDEEGWKKFCLGEKLCADGAVGPATNESPGIDYVQIGFPPLLSIVSRMNQATVTSVLEYLSNWFGERDFTPELGRWLYALLACLEKPLLPEAHSLIRQLARRCSEVRLLVIAQDDAEGSCLVEIVESSIRSYKRERSIVRPLSSVAVAFRDS

SEQ ID NO: 894369 - protein, 280 aa, Homo sapiens; identical to SEQ ID NO: 894360

SEQ ID NO: 894370 - protein, 280 aa, Homo sapiens; identical to SEQ ID NO: 894360

SEQ ID NO: 894371 - protein, 257 aa, Homo sapiens
MRRAELAGLKTMAWVPAESAVEELMPRLLPVEPCDLTEGFDPSVPPRTPQEYLRRVQIEAAQCPDVVVAQIDPKKLKRKQSVNISLSGCQPAPEGYSPTLQWQQQQVAQFSTVRQNVNKHRSHWKSQQLDSNVTMPKSEDEEGWKKFCLGEKLCADGAVGPATNESPGIDYVQIGFPPLLSIVSRMNQGRWLYALLACLEKPLLPEAHSLIRQLARRCSEVRLLVDSKDDERVPALNLLICLVSRYFDQRDLADEPS

SEQ ID NO: 894372 - protein, 270 aa, Homo sapiens; identical to SEQ ID NO: 894366

SEQ ID NO: 894373 - protein, 219 aa, Homo sapiens
MRRAELAGLKTMAWVPAESAVEELMPRLLPVEPCDLTEGFDPSVPPRTPQEYLRRVQIEAAQCPDVVVAQIDPKKLKRKQSVNISLSGCQPAPEGYSPTLQWQQQQVAQFSTVRQNVNKHRSHWKSQQLDSNVTMIGFPPLLSIVSRMNQGRWLYALLACLEKPLLPEAHSLIRQLARRCSEVRLLVDSKDDERVPALNLLICLVSRYFDQRDLADEPS

SEQ ID NO: 894374 - protein, 174 aa, Homo sapiens
MATVAELKAVLKDTLEKKGVLGHLKARIRAEVFNALDDDREPRPSLSHENLLINELIREYLEFNKYKYTASVLIAESGQPVVPLDRQFLIHELNAFEESKDNTIPLLYGILAHFLRGTKDGIQNAFLKGPSLQPSDPSLGRQPSRRKPMDDHLRKEEQKSTNIEDLHVSQAVNR

SEQ ID NO: 894375 - protein, 128 aa, Homo sapiens
MATVAELKAVLKDTLEKKGVLGHLKARIRAEVFNALDDDREPRPSLSHENLLINELIREYLEFNKYKYTASVLIAAHCILRLLGSSSSPASASRVPGTTESGQPVVPLDRQFLIHELNAFEESKDNTI

SEQ ID NO: 894376 - protein, 104 aa, Homo sapiens
MATVAELKAVLKDTLEKKGVLGHLKARIRAEVFNALDDDREPRPSLSHENLLINELIREYLEFNKYKYTASVLIAESGQPVVPLDRQFLIHELNAFEESKDNTI

SEQ ID NO: 894377 - protein, 174 aa, Homo sapiens; identical to SEQ ID NO: 894374

SEQ ID NO: 894378 - protein, 198 aa, Homo sapiens
MATVAELKAVLKDTLEKKGVLGHLKARIRAEVFNALDDDREPRPSLSHENLLINELIREYLEFNKYKYTASVLIAAHCILRLLGSSSSPASASRVPGTTESGQPVVPLDRQFLIHELNAFEESKDNTIPLLYGILAHFLRGTKDGIQNAFLKGPSLQPSDPSLGRQPSRRKPMDDHLRKEEQKSTNIEDLHVSQAVNR

SEQ ID NO: 894379 - protein, 174 aa, Homo sapiens; identical to SEQ ID NO: 894374

SEQ ID NO: 894380 - protein, 79 aa, Homo sapiens
ETRAGAQGRFEQSGPSQCKDNEDEDLYEDDFHINEYSILHPGTSFMIVREEEQDTMSCQCPSSMRGVHIQLQVLVAAHS

SEQ ID NO: 894381 - protein, 138 aa, Homo sapiens
MAEDKTKPSELDQGKYDADDNVKIICLGDSAVGKSKLMERFLMDGFQPQQLSTYALTLYKHTATVDGKTILVDFWDTAGQERFQSMHASYYHKAHACIMVFDIQRKVTYRNLSTWYTELREFRPEIPCIVVANKIDET

SEQ ID NO: 894382 - protein, 76 aa, Homo sapiens
  misc_feature (44)..(46): Xaa can be any naturally occurring amino acid
RRVLFFLFLGHGGTGTVECKGPGKATGEGKGEGKRGQPCAAASXXXPEFGTSHSVSGALLGKAEITGTAGDRPSYS

SEQ ID NO: 894383 - protein, 141 aa, Homo sapiens
ARLRSSCEDAGRAGSGVRCGASWAGGRGSRARRVQTGGRARGADPQRPWSLQPSLGTAREGKSAPVAGLARGDSPSEASLAVWARGRPGRGKHGKVASRGCCGGRDGQPGDAWTWLVAKNIYRKIAYPLRWRGHRQASLRP

SEQ ID NO: 894384 - protein, 141 aa, Homo sapiens; identical to SEQ ID NO: 894383

SEQ ID NO: 894385 - protein, 104 aa, Homo sapiens
MCCGLCRMCVVSYVTCTEMHQACRSVCVHIADFWDTAGQERFQSMHASYYHKAHACIMVFDIQRKVTYRNLSTWYTELREFRPEIPCIVVANKIDGGAIPAPGC

SEQ ID NO: 894386 - protein, 141 aa, Homo sapiens; identical to SEQ ID NO: 894383

SEQ ID NO: 894387 - protein, 70 aa, Homo sapiens
ARLRSSCEDAGRAGSGVRCGASWAGGRGSRARRVQTGGRARGADPQRPWSRSPHLVIRPPRPPKVLGLQA

SEQ ID NO: 894388 - protein, 138 aa, Homo sapiens; identical to SEQ ID NO: 894381

SEQ ID NO: 894389 - protein, 104 aa, Homo sapiens; identical to SEQ ID NO: 894385

SEQ ID NO: 894390 - protein, 164 aa, Homo sapiens
MAEDKTKPSELDQGKYDADDNVKIICLGDSAVGKSKLMERFLMDGFQPQQLSTYALTLYKHTATVDGKTILVDINVTQKSFNFAKKFSLPLYFVSAADGTNVVKLFNDAIRLAVSYKQNSQDFMDEIFQELENFSLEQEEEDVPDQEQSSSIETPSEEVASPHS

SEQ ID NO: 894391 - protein, 141 aa, Homo sapiens; identical to SEQ ID NO: 894383

SEQ ID NO: 894392 - protein, 141 aa, Homo sapiens; identical to SEQ ID NO: 894383

SEQ ID NO: 894393 - protein, 176 aa, Homo sapiens
MAASTDMAGLEESFRKFAIHGDPKASGQEMNGKNWAKLCKDCKVADGKSVTGTDVDIVFSKVKGKSARVINYEEFKKALEELATKRFKGKSKEEAFDAICQLVAGKEPANVGVTKAKTGGAVDRLTDTSRYTGSHKERFDESGKGKGIAGRQDILDDSGYVSAYKNAGTYDAKVKK

SEQ ID NO: 894394 - protein, 261 aa, Homo sapiens
MTPAVPVGAGRVAPVHGCGHSIHGLQTHGAAACNPAPPDRAEMSGRIHLSTDRSEHCTQDPPSAWAKHPVASKLPWTLPLVNQGGMAASTDMAGLEESFRKFAIHGDPKASGQEMNGKNWAKLCKDCKVADGKSVTGTDVDIVFSKVKGKSARVINYEEFKKALEELATKRFKGKSKEEAFDAICQLVAGKEPANVGVTKAKTGGAVDRLTDTSRYTGSHKERFDESGKGKGIAGRQDILDDSGYVSAYKNAGTYDAKVKK

SEQ ID NO: 894395 - protein, 170 aa, Homo sapiens [sequence omitted]

SEQ ID NO: 894396 - protein, 164 aa, Homo sapiens
MSYKGSDESYKGSDESKEEFSFTPNPTVFFLHPYGKSVTGTDVDIVFSKVKGKSARVINYEEFKKALEELATKRFKGKSKEEAFDAICQLVAGKEPANVGVTKAKTGGAVDRLTDTSRYTGSHKERFDESGKGKGIAGRQDILDDSGYVSAYKNAGTYDAKVKK

SEQ ID NO: 894397 - protein, 178 aa, Homo sapiens
MITKVVLPGQTLYLLPSRVADPCDFPKRGKETQLHNLWWQQMCLSFPLGEKKERGTLMVPTVPVRGKSARVINYEEFKKALEELATKRFKGKSKEEAFDAICQLVAGKEPANVGVTKAKTGGAVDRLTDTSRYTGSHKERFDESGKGKGIAGRQDILDDSGYVSAYKNAGTYDAKVKK

SEQ ID NO: 894398 - protein, 176 aa, Homo sapiens; identical to SEQ ID NO: 894393

SEQ ID NO: 894399 - protein, 183 aa, Homo sapiens
MTPAVPVGAGRVAPVHGCGHSIHGLQTHGAAACNPAPPDRAEMSGRIHLSTDRSEHCTQDPPSAWAKHPVASKLPWTLPLVNQGGMAASTDMAGCPCQRLRPGSKGHVEQEILVPSLLDLPPRASCLVPLGWPTRPLTQAALRPLPPPLPAPTSVHLGTVCACSLMTPTQPQAWLTPDCLPHI

SEQ ID NO: 894400 - protein, 200 aa, Homo sapiens
MTPAVPVGAGRVAPVHGCGHSIHGLQTHGAAACNPAPPDRAEMSGRIHLSTDRSEHCTQDPPSAWAKHPVASKLPWTLPLVNQGGMAASTDMAGLEESFRKFAIHGDPKASGQEMNGKNWAKLCKDCKVADGKSVTGTDVDIVFSKVKGKSARVINYEEFKKALEELATKRFKGKSKEEAFVLFLLQLLSTWGQSVPVAS

SEQ ID NO: 894401 - protein, 147 aa, Homo sapiens
AEPPGAESHPGAGRERSCGAAWSPASIGPFLRRSVLPNAHFRSSREGGMAASTDMAGLEESFRKFAIHGDPKASGQEMNGKNWAKLCKDCKVADGKSVTGTDVDIVFSKVNPLPAPTSVHLGTVCACSLMTPTQPQAWLTPDCLPHI

SEQ ID NO: 894402 - protein, 192 aa, Homo sapiens
  misc_feature (2)..(2): Xaa can be any naturally occurring amino acid
  misc_feature (4)..(4): Xaa can be any naturally occurring amino acid
FXHXGKEEAFDAICQLVAGKEPANVGVTKAKTGGAVDRLTDTSRYTGSHKERFDESGKGKGIAGRQDILDDSGYVSAYKNAGTYDAKVKKGGMAASTDMAGLEESFRKFAIHGDPKASGQEMNGKNWAKLCKDCKVADGKSVTGTDVDIVFSKVKGKSARVINYEEFKKALEELATKRFKGKSKEEAFELPA

SEQ ID NO: 894403 - protein, 254 aa, Homo sapiens
AEPPERSPTREPAGSGAAEPPGLPRPSVHSCVVLSFRTHTSGAAARSEHCTQDPPSAWAKHPVASKLPWTLPLVNQGGMAASTDMAGLEESFRKFAIHGDPKASGQEMNGKNWAKLCKDCKVADGKSVTGTDVDIVFSKVKGKSARVINYEEFKKALEELATKRFKGKSKEEAFDAICQLVAGKEPANVGVTKAKTGGAVDRLTDTSRYTGSHKERFDESGKGKGIAGRQDILDDSGYVSAYKNAGTYDAKVKK

SEQ ID NO: 894404 - protein, 268 aa, Homo sapiens
  misc_feature (2)..(2): Xaa can be any naturally occurring amino acid
  misc_feature (4)..(4): Xaa can be any naturally occurring amino acid
FXHXGKEEAFDAICQLVAGKEPANVGVTKAKTGGAVDRLTDTSRYTGSHKERFDESGKGKGIAGRQDILDDSGYVSAYKNAGTYDAKVKKGGMAASTDMAGLEESFRKFAIHGDPKASGQEMNGKNWAKLCKDCKVADGKSVTGTDVDIVFSKVKGKSARVINYEEFKKALEELATKRFKGKSKEEAFDAICQLVAGKEPANVGVTKAKTGGAVDRLTDTSRYTGSHKERFDESGKGKGIAGRQDILDDSGYVSAYKNAGTYDAKVKK

SEQ ID NO: 894405 - protein, 178 aa, Homo sapiens; identical to SEQ ID NO: 894397

SEQ ID NO: 894406 - protein, 132 aa, Homo sapiens
MAASTDMAGLEESFRKFAIHGDPKASGQEMNGKNWAKLCKDCKVADGKSVTGTDVDIVFSKVKGKSARVINYEEFKKALEELATKRYTGSHKERFDESGKGKGIAGRQDILDDSGYVSAYKNAGTYDAKVKK

SEQ ID NO: 894407 - protein, 255 aa, Homo sapiens
MTPAVPVGAGRVAPVHGCGHSIHGLQTHGAAACNPAPPDRAEMSGRIHLSTDRSEHCTQDPPSAWAKHPVASKLPWTLPLVNQGGMAASTDMAGLEESFRKFAIHGDPKASGQEMNGKNWAKLCKDCKVADGKSVTGTDVDIVFSKVKGKSARVINYEEFKKALEELATKRFKGKSKEEAFDAICQLVAGKEPANVGVTKAKTGGAVDRLTDTSRYTGSHKERFDESGKGKGIAGRQDISSSCSNFCPPGDSLCL

SEQ ID NO: 894408 - protein, 580 aa, Homo sapiens
MTAPAGPRGSETERLLTPNPGYGTQAGPSPAPPTPPEEEDLRRRLKYFFMSPCDKFRAKGRKPCKLMLQVVKILVVTVQLILFGLSNQLAVTFREENTIAFRHLFLLGYSDGADDTFAAYTREQLYQAIFHAVDQYLALPDVSLGRYAYVRGGGDPWTNGSGLALCQRYYHRGHVDPANDTFDIDPMVVTDCIQVDPPERPPPPPSDDLTLLESSSSYKNLTLKFHKLVNVTIHFRLKTINLQSLINNEIPDCYTFSVLITFDNKAHSGRIPISLETQAHIQECKHPSVFQHGDNSFRLLFDVVVILTCSLSFLLCARSLLRGFLLQNEFVGFMWRQRGRVISLWERLEFVNGWYILLVTSDVLTISGTIMKIGIEAKNLASYDVCSILLGTSTLLVWVGVIRYLTFFHNYNILIATLRVALPSVMRFCCCVAVIYLGYCFCGWIVLGPYHVKFRSLSMVSECLFSLINGDDMFVTFAAMQAQQGRSSLVWLFSQLYLYSFISLFIYMVLSLFIALITGAYDTIKHPGGAGAEESELQAYIAQCQDSPTSGKFRRGSGSACSLLCCCGRDPSEEHSLLVN

SEQ ID NO: 894409 - protein, 98 aa, Homo sapiens
QAQQVQRPGGGKRCRYGWRGGRTSRALEVGSHFQAEPPGFSPQHPGGAGAEESELQAYIAQCQDSPTSGKFRRGSGSACSLLCCCGRDPSEEHSLLVN

SEQ ID NO: 894410 - protein, 732 aa, Homo sapiens
MTAPAGPRGSETERLLTPNPGYGTQAGPSPAPPTPPEEEDLRRRLKYFFMSPCDKFRAKGRKPCKLMLQVVKILVVTVQLILFGLSNQLAVTFREENTIAFRHLFLLGYSDGADDTFAAYTREQLYQAIFHAVDQYLALPDVSLGRYAYVRGGGDPWTNGSGLALCQRYYHRGHVDPANDTFDIDPMVVTDCIQVDPPERPPPPPSDDLTLLESSSSYKNLTLKFHKLVNVTIHFRLKTINLQSLINNEIPDCYTFSVLITFDNKAHSGRIPISLETQAHIQECKHPSVFQHGEPLSPRPALTRGPGLSWDSPSPRSALPGGRDLPRNPLSLRSAQTRDPVLCWDPPSPRPALTGVLDSPQASPEPTDQPKPAVQPPRSPAWPGTNASLPRLHAILGPTRSALPAGDNSFRLLFDVVVILTCSLSFLLCARSLLRGFLLQNVRLLRHVCWCPPRLALGQIKARALRVLCLVRPSPRCLLQEFVGFMWRQRGRVISLWERLEFVNGWYILLVTSDVLTISGTIMKIGIEAKNLASYDVCSILLGTSTLLVWVGVIRYLTFFHNYNILIATLRVALPSVMRFCCCVAVIYLGYCFCGWIVLGPYHVKFRSLSMVSECLFSLINGDDMFVTFAAMQAQQGRSSLVWLFSQLYLYSFISLFIYMVLSLFIALITGAYDTIKHPGGAGAEESELQAYIAQCQDSPTSGKFRRGSGSACSLLCCCGRDPSEEHSLLVN

SEQ ID NO: 894411 - protein, 855 aa, Homo sapiens
MTAPAGPRGSETERLLTPNPGYGTQAGPSPAPPTPPEEEDLRRRLKYFFMSPCDKFRAKGRKPCKLMLQVVKILVVTVQLILFGLSNQLAVTFREENTIAFRHLFLLGYSDGADDTFAAYTREQLYQAIFHAVDQYLALPDVSLGRYAYVRGGGDPWTNGSGLALCQRYYHRGHVDPANDTFDIDPMVVTGEWAGRGFTVGSLSCWDENQQLWLGTVAHAYNTSTLEAEEEGLLEARSLRPAWATEEDLVSTHKQISWAWWRAPVVPATQEAEAGGSLESGRLRLQEAMTTLLHSTLGDRVRPCLKKKKKKKKQVCLCECDSCHVESTRCYILIWLIQYNIRRPRECQACRNDPTLGKHREEGHWGLWGDQPGLPGPLRPFPDSLSLDCIQVDPPERPPPPPSDDLTLLESSSSYKNLTLKFHKYCLLTRGGPGWGRQHTRHSHPSNYFPKVGTGPPRPRWCLLGEHFPCQLQSQHVAGDAGTWGRKGPEDAPDPHPSLLPRLVNVTIHFRLKTINLQSLINNEIPDCYTFSVLITFDNKAHSGRIPISLETQAHIQECKHPSVFQHGDNSFRLLFDVVVILTCSLSFLLCARSLLRGFLLQNEFVGFMWRQRGRVISLWERLEFVNGWYILLVTSDVLTISGTIMKIGIEAKNLASYDVCSILLGTSTLLVWVGVIRYLTFFHNYNILIATLRVALPSVMRFCCCVAVIYLGYCFCGWIVLGPYHVKFRSLSMVSECLFSLINGDDMFVTFAAMQAQQGRSSLVWLFSQLYLYSFISLFIYMVLSLFIALITGAYDTIKHPGGAGAEESELQAYIAQCQDSPTSGKFRRGSGSACSLLCCCGRDPSEEHSLLVN

SEQ ID NO: 894412 - protein, 545 aa, Homo sapiens
MTPSQPTRGSSCTRPSSMLWTSTWRCLTCHWAGMRMSVVGVTLGPMAQGLLSASGTTTEATWTRPTTHLTLIRWWLLTASRWIPPSGPLRPPATISPSWKAAPVTRTSRSNSTSTACSLEGGPGWGRQHTRHSHPSNYFPKVGTGPPRPRWCLLGEHFPCQLQSQHVAGDAGTWGRKGPEDAPDPHPSLLPRLVNVTIHFRLKTINLQSLINNEIPDCYTFSVLITFDNKAHSGRIPISLETQAHIQECKHPSVFQHGDNSFRLLFDVVVILTCSLSFLLCARSLLRGFLLQNEFVGFMWRQRGRVISLWERLEFVNGWYILLVTSDVLTISGTIMKIGIEAKNLASYDVCSILLGTSTLLVWVGVIRYLTFFHNYNILIATLRVALPSVMRFCCCVAVIYLGYCFCGWIVLGPYHVKFRSLSMVSECLFSLINGDDMFVTFAAMQAQQGRSSLVWLFSQLYLYSFISLFIYMVLSLFIALITGAYDTIKHPGGAGAEESELQAYIAQCQDSPTSGKFRRGSGSACSLLCCCGRDPSEEHSLLVN

SEQ ID NO: 894413 - protein, 580 aa, Homo sapiens; identical to SEQ ID NO: 894408

SEQ ID NO: 894414 - protein, 221 aa, Homo sapiens
RIPGCACMWAHHEDGTEAKNLASYDVCSILLGTSTLLVWVGVIRYLTFFHNYNILIATLRVALPSVMRFCCCVAVIYLGYCFCGWIVLGPYHVKFRSLSMVSECLFSLINGDDMFVTFAAMQAQQGRSSLVWLFSQLYLYSFISLFIYMVLSLFIALITGAYDTIKHPGGAGAEESELQAYIAQCQDSPTSGKFRRGSGSACSLLCCCGRDPSEEHSLLVN

SEQ ID NO: 894415 - protein, 207 aa, Homo sapiens [sequence omitted]

SEQ ID NO: 894416 - protein, 658 aa, Homo sapiens
MTAPAGPRGSETERLLTPNPGYGTQAGPSPAPPTPPEEEDLRRRLKYFFMSPCDKFRAKGRKPCKLMLQVVKILVVTVQLILFGLSNQLAVTFREENTIAFRHLFLLGYSDGADDTFAAYTREQLYQAIFHAVDQYLALPDVSLGRYAYVRGGGDPWTNGSGLALCQRYYHRGHVDPANDTFDIDPMVVTDCIQVDPPERPPPPPSDDLTLLESSSSYKNLTLKFHKYCLLTRGGPGWGRQHTRHSHPSNYFPKVGTGPPRPRWCLLGEHFPCQLQSQHVAGDAGTWGRKGPEDAPDPHPSLLPRLVNVTIHFRLKTINLQSLINNEIPDCYTFSVLITFDNKAHSGRIPISLETQAHIQECKHPSVFQHGDNSFRLLFDVVVILTCSLSFLLCARSLLRGFLLQNEFVGFMWRQRGRVISLWERLEFVNGWYILLVTSDVLTISGTIMKIGIEAKNLASYDVCSILLGTSTLLVWVGVIRYLTFFHNYNILIATLRVALPSVMRFCCCVAVIYLGYCFCGWIVLGPYHVKFRSLSMVSECLFSLINGDDMFVTFAAMQAQQGRSSLVWLFSQLYLYSFISLFIYMVLSLFIALITGAYDTIKHPGGAGAEESELQAYIAQCQDSPTSGKFRRGSGSACSLLCCCGRDPSEEHSLLVN

SEQ ID NO: 894417 - protein, 102 aa, Homo sapiens
MTAPAGPRGSETERLLTPNPGYGTQAGPSPAPPTPPEEEDLRRRLKYFFMSPCDKFRAKGRKPCKLMLQVVKILVVTVQVRPAKQGPQLKATCGCCAPGRES

SEQ ID NO: 894418 - protein, 556 aa, Homo sapiens
MTAPAGPRGSETERLLTPNPGYGTQAGPSPAPPTPPEEEDLRRRLKYFFMSPCDKFRAKGRKPCKLMLQVVKILVVTVQLILFGLSNQLAVTFREENTIAFRHLFLLGYSDGADDTFAAYTREQLYQAIFHAVDQYLALPDVSLGRYAYVRGGGDPWTNGSGLALCQRYYHRGHVDPANDTFDIDPMVVTDCIQVDPPERPPPPPSDDLTLLESSSSYKNLTLKFHKLVNVTIHFRLKTINLQSLINNEIPDCYTFSVLITFDNKAHSGRIPISLETQAHIQECKHPSVFQHGDNSFRLLFDVVVILTCSLSFLLCARSLLRGFLLQNEFVGFMWRQRGRVISLWERLEFVNGWYILLVTSDVLTISGTIMKIGIEAKNLASYDVCSILLGTSTLLVWVGVIRYLTFFHNYNILIATLRVALPSVMRFCCCVAVIYLGYCFCGWIVLGPYHVKPLHLHGAQPLHRAHHRRLRHHQASRRRRRRGERAAGLHRTVPGQPHLRQVPPRERLGLQPSLLLRKGPLGGAFAAGELIRPDCRWTVGPGLQRPPPPTPLIYL

SEQ ID NO: 894419 - protein, 580 aa, Homo sapiens; identical to SEQ ID NO: 894408

SEQ ID NO: 894420 - protein, 313 aa, Homo sapiens
MTAPAGPRGSETERLLTPNPGYGTQAGPSPAPPTPPEEEDLRRRLKYFFMSPCDKFRAKGRKPCKLMLQVVKILVVTVQLILFGLSNQLAVTFREENTIAFRHLFLLGYSDGADDTFAAYTREQLYQAIFHAVDQYLALPDVSLGRYAYVRGGGDPWTNGSGLALCQRYYHRGHVDPANDTFDIDPMVVTDCIQVDPPERPPPPPSDDLTPLHLHGAQPLHRAHHRRLRHHQASRRRRRRGERAAGLHRTVPGQPHLRQVPPRERLGLQPSLLLRKGPLGGAFAAGELIRPDCRWTVGPGLQRPPPPTPLIYL

SEQ ID NO: 894421 - protein, 185 aa, Homo sapiens
PEEPEKGRRGWGDSHVAAGGFTTFSFAIDVIAKCVREAAAQPGREREGAGQVSSPGGFAAYGTAGRPRAPATRSGSAGSRPGPRSEGSREPWMVQAGPSSCSISGDPGLPRRWRPAQVVRPGRLRIRGWSRRIPKAEVGSPGDSQLLSLWRRGPVTEAPFSNPGAAFSPYRKSDGLMTSWLAAER

SEQ ID NO: 894422 - protein, 180 aa, Homo sapiens
PEGQQKGRRGWGDSHVAAGGFTTFSFAIDVIAKCVREAAAQPGREREGAGQVSSPGGFAAYGTAGRPRAPATRSGSAGSRPGPRSEGSREPWMVQAGPSSCSISGDPGLPRRWRPAQVVRPGRLRIRGWSRRIPKAEVGSPGDSQLLSLWRRGPVTEAPFSNPGAAFQRLNFSNHCFNSF

SEQ ID NO: 894423 - protein, 180 aa, Homo sapiens; identical to SEQ ID NO: 894422

SEQ ID NO: 894424 - protein, 185 aa, Homo sapiens; identical to SEQ ID NO: 894421

SEQ ID NO: 894425 - protein, 156 aa, Homo sapiens
PEEPEKGRRGWGDSHVAAGGFTTFSFAIDVIAKCVREAAAQPGREREGAGQVSSPGGFAAYGTAGRPRAPATRSGSAGSRPGPRSEGSREPWMVQAGPSSCSISGDPGLPRRWRPAQVVRPGRLRIRGWSRRIPKAEVGSPGDSQLLSLVFPLPEI

SEQ ID NO: 894426 - protein, 320 aa, Homo sapiens
MEKPSRWNKPPNHHLKVVDVDRLHPPPPPRSRGPPRGLRGGRGGSGGTRGPPSRGGHMDDGGYSMNFNMSSSRGPLPVKRGPPPRSGGPPPKRSAPSGPVRSSSGMGGRAPVSRGRDSYGGPPRREPLPSRRDVYLSPRDDGYSTKDSYSSRDYPSSRDTRDYAPPPRDYTYRDYGHSSSRDDYPSRGYSDRDGYGRDRDYSDHPSGGSYRDSYESYGNSRSAPPTRGPPPSYGGSSRYDDYSSSRDGYGGSRDSYSSSRSDLYSSGRDRVGRQERGLPPSMERGYPPPRDSYSSSSRGAPRGGGRGGSRSDRGGGRSRY

SEQ ID NO: 894427 - protein, 320 aa, Homo sapiens; identical to SEQ ID NO: 894426

SEQ ID NO: 894428 - protein, 320 aa, Homo sapiens; identical to SEQ ID NO: 894426

SEQ ID NO: 894429 - protein, 320 aa, Homo sapiens; identical to SEQ ID NO: 894426

SEQ ID NO: 894430 - protein, 320 aa, Homo sapiens; identical to SEQ ID NO: 894426

SEQ ID NO: 894431 - protein, 320 aa, Homo sapiens; identical to SEQ ID NO: 894426

SEQ ID NO: 894432 - protein, 320 aa, Homo sapiens; identical to SEQ ID NO: 894426

SEQ ID NO: 894433 - protein, 320 aa, Homo sapiens; identical to SEQ ID NO: 894426

SEQ ID NO: 894434 - protein, 320 aa, Homo sapiens; identical to SEQ ID NO: 894426

SEQ ID NO: 894435 - protein, 320 aa, Homo sapiens; identical to SEQ ID NO: 894426

SEQ ID NO: 894436 - protein, 320 aa, Homo sapiens; identical to SEQ ID NO: 894426

SEQ ID NO: 894437 - protein, 320 aa, Homo sapiens; identical to SEQ ID NO: 894426

SEQ ID NO: 894438 - protein, 320 aa, Homo sapiens; identical to SEQ ID NO: 894426

SEQ ID NO: 894439 - protein, 225 aa, Homo sapiens
MEKPSRWNKPPNHHLKVVDVDRLHPPPPPRSRGPPRGLRGGRGGSGGTRGPPSRGGHMDDGGYSMNFNMSSSRGPLPVKRGPPPRSGGPPPKRSAPSGPVRSSSGMGGRAPVSRGRDSYGGPPRREPLPSRRDVYLSPRDDGYSTKDSYSSRDYPSSRDTRDYAPPPRDYTYRDYGHSSSRDDYPSRGYSDRDGYGRDRDYSDHPSGGSYRDSYESYGKILVKGL

SEQ ID NO: 894440 - protein, 320 aa, Homo sapiens; identical to SEQ ID NO: 894426

SEQ ID NO: 894441 - protein, 320 aa, Homo sapiens; identical to SEQ ID NO: 894426

SEQ ID NO: 894442 - protein, 296 aa, Homo sapiens
MEKPSRWNKPPNHHLKVVDVDRLHPPPPPRSRGPPRGLRGGRGGSGGTRGPPSRGGHMDDGGYSMNFNMSSSRGPLPVKRGPPPRSGGPPPKRSAPSGPVRSSSGMGGRAPVSRGRDSYGGPPRREPLPSRRDVYLSPRDDGYSTKDSYSSRDYPSSRDTRDYAPPPRDYTYRDYGHSSSRDDYPSRGYSDRDGYGRDRDYSDKKEGFPLLWKGGTLLHVIPTAVQAAEHQEVVAVEEADLIEGEAEADTRNKQNFGPKSQFKETKSGNYSIITTQGLLKGKIVLLFLNSLLSSPP

SEQ ID NO: 894443 - protein, 320 aa, Homo sapiens; identical to SEQ ID NO: 894426

SEQ ID NO: 894444 - protein, 320 aa, Homo sapiens; identical to SEQ ID NO: 894426

SEQ ID NO: 894445 - protein, 219 aa, Homo sapiens
MEKPSRWNKPPNHHLKVVDVDRLHPPPPPRSRGPPRGLRGGRGGSGGTRGPPSRGGHMDDGGYSMNFNMSSSRGPLPVKRGPPPRSGGPPPKRSAPSGPVRSSSGMGGRAPVSRGRDSYGGPPRREPLPSRRDVYLSPRDDGYSTKDSYSSRDYPSSRDTRDYAPPPRDYTYRDYGHSSSRDDYPSRGYSDRDGYGRDRDYSDHPSGGSYRDSYESYGW

SEQ ID NO: 894446 - protein, 320 aa, Homo sapiens; identical to SEQ ID NO: 894426

SEQ ID NO: 894447 - protein, 320 aa, Homo sapiens; identical to SEQ ID NO: 894426

SEQ ID NO: 894448 - protein, 320 aa, Homo sapiens; identical to SEQ ID NO: 894426

SEQ ID NO: 894449 - protein, 320 aa, Homo sapiens; identical to SEQ ID NO: 894426

SEQ ID NO: 894450 - protein, 427 aa, Homo sapiens
MEKPSRWNKPPNHHLKVVDVDRLHPPPPPRSRGPPRGLRGGRGGSGGTRGPPSRGGHMDDGGYSMNFNMSSSRGPLPVKRGPPPRSGGPPPKRSAPSGPVRSSSGMGGRAPVSRGRDSYGGPPRREPLPSRRDVYLSPRDDGYSTKDSYSSRDYPSSRDTRDYAPPPRDYTYRDYGHSSSRDDYPSRGYSDRDGYGRDRDYSDHPSGGSYRDSYESYAHAEWFQPTTEGPPAILMAETEPVHDSNYHETCLSRERGNIVVAMDEKLASLRARARVVSYYCSDGLGGIRWSDTTQDEEGAPLHTNGGGKLPPPVRGLTSQQPHTTAEPATKGGLDGPRTDSHQLGRGTGEGKQQATTHANNGMDQTPPEQQNKEGIETEQTNARHTRTEHGTSRKSRPAPPKVGPDGSTYRLPDTAATQTAVTRSAVQ

SEQ ID NO: 894451 - protein, 314 aa, Homo sapiens
QLMSEVVSEDPSGEQSLPPPPPPRSRGPPRGLRGGRGGSGGTRGPPSRGGHMDDGGYSMNFNMSSSRGPLPVKRGPPPRSGGPPPKRSAPSGPVRSSSGMGGRAPVSRGRDSYGGPPRREPLPSRRDVYLSPRDDGYSTKDSYSSRDYPSSRDTRDYAPPPRDYTYRDYGHSSSRDDYPSRGYSDRDGYGRDRDYSDHPSGGSYRDSYESYGNSRSAPPTRGPPPSYGGSSRYDDYSSSRDGYGGSRDSYSSSRSDLYSSGRDRVGRQERGLPPSMERGYPPPRDSYSSSSRGAPRGGGRGGSRSDRGGGRSRY

SEQ ID NO: 894452 - protein, 320 aa, Homo sapiens; identical to SEQ ID NO: 894426

SEQ ID NO: 894453 - protein, 320 aa, Homo sapiens; identical to SEQ ID NO: 894426

SEQ ID NO: 894454 - protein, 315 aa, Homo sapiens
ANSARGLQEVLEGLYFLEVAPPPPRSRGPPRGLRGGRGGSGGTRGPPSRGGHMDDGGYSMNFNMSSSRGPLPVKRGPPPRSGGPPPKRSAPSGPVRSSSGMGGRAPVSRGRDSYGGPPRREPLPSRRDVYLSPRDDGYSTKDSYSSRDYPSSRDTRDYAPPPRDYTYRDYGHSSSRDDYPSRGYSDRDGYGRDRDYSDHPSGGSYRDSYESYGNSRSAPPTRGPPPSYGGSSRYDDYSSSRDGYGGSRDSYSSSRSDLYSSGRDRVGRQERGLPPSMERGYPPPRDSYSSSSRGAPRGGGRGGSRSDRGGGRSRY

SEQ ID NO: 894455 - protein, 263 aa, Homo sapiens
MDDGGYSMNFNMSSSRGPLPVKRGPPPRSGGPPPKRSAPSGPVRSSSGMGGRAPVSRGRDSYGGPPRREPLPSRRDVYLSPRDDGYSTKDSYSSRDYPSSRDTRDYAPPPRDYTYRDYGHSSSRDDYPSRGYSDRDGYGRDRDYSDHPSGGSYRDSYESYGNSRSAPPTRGPPPSYGGSSRYDDYSSSRDGYGGSRDSYSSSRSDLYSSGRDRVGRQERGLPPSMERGYPPPRDSYSSSSRGAPRGGGRGGSRSDRGGGRSRY

SEQ ID NO: 894456 - protein, 267 aa, Homo sapiens
MFKKMIFFLKLLYHVEEIVMEVHLEGNRCPLVEMFICPQEMMGILLKTAIQAEITQVLVILEIMHHHHEIILTVIMVIPVHVMTIHQEDIAIEMDMVVIVTIQIIQVEVPTEIHMRVMVTHVVLHLHEGPRHLMVEAVAMMITAAHVTDMVEVETVTQAAEVISTQVVVIGLADKKEGFPLLWKGGTLLHVIPTAVQAAEHQEVVAVEEADLIEGEAEADTRNKQNFGPKSQFKETKSGNYSIITTQGLLKGKIVLLFLNSLLSSPP

SEQ ID NO: 894457 - protein, 237 aa, Homo sapiens
VATTAWAPQEMMGILLKTAIQAEITQVLVILEIMHHHHEIILTVIMVIPVHVMTIHQEDIAIEMDMVVIVTIQIIQVEVPTEIHMRVMVTHVVLHLHEGPRHLMVEAVAMMITAAHVTDMVEVETVTQAAEVISTQVVVIGLADKKEGFPLLWKGGTLLHVIPTAVQAAEHQEVVAVEEADLIEGEAEADTRNKQNFGPKSQFKETKSGNYSIITTQGLLKGKIVLLFLNSLLSSPP

SEQ ID NO: 894458 - protein, 126 aa, Homo sapiens
MEKPSRWNKPPNHHLKVVDVDRLHPPPPPRSRGPPRGLRGGRGGSGGTRGPPSRGGHMDDGGYSMNFNMSSSRGPLPVKRGPPPRSGGPPPKRSAPSGPVRSSSGMGGRGKCSMYDDLCYYRNTKN

SEQ ID NO: 894459 - protein, 807 aa, Homo sapiens
LQAQLKELQRENDLLRKELDIKDSKLGSSMNSIKTFWSPELKKERVLRKEEAARMSVLKEQMRVSHEENQHLQLTIQALQDELRTQRDLNHLLQQESGNRGAEHFTIELTEENFRRLQAEHDRQAKELFLLRKTLEEMELRIETQKQTLNARDESIKKLLEMLQSKGLPSKSLEDDNERTRRMAEAESQVSHLEVILDQKEKENIHLREELHRRSQLQPEPAKTKALQTVIEMKDTKIASLERNIRDLEDEIQMLKANGVLNTEDREEEIKQIEVYKSHSKFMKTKIDQLKQELSKKESELLALQTKLETLSNQNSDCKQHIEVLKESLTAKEQRAAILQTEVDALRLRLEEKESFLNKKTKQLQDLTEEKGTLAGEIRDMKDMLEVKERKINVLQKKIENLQEQLRDKDKQLTNLKDRVKSLQTDSSNTDTALATLEEALSEKERIIERLKEQRERDDRERLEEIESFRKENKDLKEKVNALQAELTEKESSLIDLKEHASSLASAGLKRDSKLKSLEIAIEQKKEECSKLEAQLKKAHNIEDDSRMNPEFADQIKQLDKEASYYRDECGKAQAEVDRLLEILKEVENEKNDKDKKIAELESFLRHMKDQNKKVANLKHNQQLEKKKNAQLLEEVRRREDSMADNSQHLQIEELMNALEKTRQELDATKARLASTQQSLAEKEAHLANLRIERRKQLEEILEMKQEALLAAISEKDANIALLELSASKKKKTQEEVMALKREKDRLVHQLKQQTQNRMKLMADNYDDDHHHYHHHHHHHHHRSPGRSQHSNHRPSPDQDDEEGIWA

SEQ ID NO: 894460 - protein, 133 aa, Homo sapiens
  misc_feature (6)..(6): Xaa can be any naturally occurring amino acid
  misc_feature (15)..(15): Xaa can be any naturally occurring amino acid
  misc_feature (19)..(19): Xaa can be any naturally occurring amino acid
MLFSGXTRTTEHSLXAGLXGGNSWRRILEMKQEALLAAISEKDANIALLELSASKKKKTQEEVMALKREKDRLVHQLKQQTQNRMKLMADNYDDDHHHYHHHHHHHHHRSPGRSQHSNHRPSPDQDDEEGIWA

SEQ ID NO: 894461 - protein, 807 aa, Homo sapiens; identical to SEQ ID NO: 894459

SEQ ID NO: 894462 - protein, 807 aa, Homo sapiens; identical to SEQ ID NO: 894459

SEQ ID NO: 894463 - protein, 371 aa, Homo sapiens
QLTVRPPPPLPLPLSLSPPPPPAAAAAAAAAAMAQYKGAASEAGRAMHLMKKREKQREQMEQMKQRIAEENIMKSNIDKKFSAHYDAVEAELKSSTVGLVTLNDMKAKQEALVKEREKQLAKKEQSKELQMKLEKLREKERKKEAKRKISSLSFTLEEEEEGGEEEEEAAMYEEEMEREEITTKKRKLGKNPDVDTSFLPDRDREEEENRLREELRQEWEAKQEKIKSEEIEITFSYWDGSGHRRTVKMRKGNTMQQFLQKALEILRKDFSELRSAGVEQLMYIKEDLIIPHHHSFYDFIVTKARGKSGPLFNFDVHDDVRLLSDATVEKDESHAGKVVLRSWYEKNKHIFPASRWEPYDPEKKWDKYTIR

SEQ ID NO: 894464 - protein, 264 aa, Homo sapiens
ARYVAGGPVRPAVPGRLPAPFLTWKLEKLREKERKKEAKRKISSLSFTLEEEEEGGEEEEEAAMYEEEMEREEITTKKRKLGKNPDVDTSFLPDRDREEEENRLREELRQEWEAKQEKIKSEEIEITFSYWDGSGHRRTVKMRKGNTMQQFLQKALEILRKDFSELRSAGVEQLMYIKEDLIIPHHHSFYDFIVTKARGKSGPLFNFDVHDDVRLLSDATVEKDESHAGKVVLRSWYEKNKHIFPASRWEPYDPEKKWDKYTIR

SEQ ID NO: 894465 - protein, 385 aa, Homo sapiens
RSRFSSSSRSRSGQKLVSTSGFFPSFLFFVVISSLSISSSYMAAAAMAQYKGAASEAGRAMHLMKKREKQREQMEQMKQRIAEENIMKSNIDKKFSAHYDAVEAELKSSTVGLVTLNDMKAKQEALVKEREKQLAKKEQSKELQMKLEKLREKERKKEAKRKISSLSFTLEEEEEGGEEEEEAAMYEEEMEREEITTKKRKLGKNPDVDTSFLPDRDREEEENRLREELRQEWEAKQEKIKSEEIEITFSYWDGSGHRRTVKMRKGNTMQQFLQKALEILRKDFSELRSAGVEQLMYIKEDLIIPHHHSFYDFIVTKARGKSGPLFNFDVHDDVRLLSDATVEKDESHAGKVVLRSWYEKNKHIFPASRWEPYDPEKKWDKYTIR

SEQ ID NO: 894466 - protein, 413 aa, Homo sapiens
MTGLRQEGAEPVFLLGGTAGTGLSSPRLGTQRPGSGPSALRARPLPPRPSEPGLCPGPMDTGQGGSSPPGEAGRPEPDLASPLARRLLPEPLAPVEAGTTLPGASGSPTASENIMKSNIDKKFSAHYDAVEAELKSSTVGLVTLNDMKAKQEALVKEREKQLAKKEQSKELQMKLEKLREKERKKEAKRKISSLSFTLEEEEEGGEEEEEAAMYEEEMEREEITTKKRKLGKNPDVDTSFLPDRDREEEENRLREELRQEWEAKQEKIKSEEIEITFSYWDGSGHRRTVKMRKGNTMQQFLQKALEILRKDFSELRSAGVEQLMYIKEDLIIPHHHSFYDFIVTKARGKSGPLFNFDVHDDVRLLSDATVEKDESHAGKVVLRSWYEKNKHIFPASRWEPYDPEKKWDKYTIR

SEQ ID NO: 894467 - protein, 264 aa, Homo sapiens; identical to SEQ ID NO: 894464

SEQ ID NO: 894468 - protein, 251 aa, Homo sapiens
MCDGATCTSLRKLEKLREKERKKEAKRKISSLSFTLEEEEEGGEEEEEAAMYEEEMEREEITTKKRKLGKNPDVDTSFLPDRDREEEENRLREELRQEWEAKQEKIKSEEIEITFSYWDGSGHRRTVKMRKGNTMQQFLQKALEILRKDFSELRSAGVEQLMYIKEDLIIPHHHSFYDFIVTKARGKSGPLFNFDVHDDVRLLSDATVEKDESHAGKVVLRSWYEKNKHIFPASRWEPYDPEKKWDKYTIR

SEQ ID NO: 894469 - protein, 183 aa, Homo sapiens
MYEEEMEREEITTKKSEEEENRLREELRQEWEAKQEKIKSEEIEITFSYWDGSGHRRTVKMRKGNTMQQFLQKALEILRKDFSELRSAGVEQLMYIKEDLIIPHHHSFYDFIVTKARGKSGPLFNFDVHDDVRLLSDATVEKDESHAGKVVLRSWYEKNKHIFPASRWEPYDPEKKWDKYTIR

SEQ ID NO: 894470 - protein, 420 aa, Homo sapiens
QLTVRPPPPLPLPLSLSPPPPPAAAAAAAAAAMAQYKGAASEAGRAMHLMKKREKQREQMEQMKQRIAEENIMKSNIDKKFSAHYDAVEAELKSSTVGLVTLNDMKAKQEALVKEREKQLAKKEQSKELQMKLEKLREKERKKEAKRKISSLSFTLEEEEEGGEEEEEAAMYEEEMEREEITTKKRKLGKNPDVDTSFLPDRDREEEENRLREELRQEWEAKQEKIKSEEIEITFSYWDGSGHRRTVKMRKGNTMQQFLQKALEILRKDFSELRSAGVEQLMYIKEDLIIPHVSPFSPSTRSGCSTLGFGSGWWGQCAQAGGVGRGRDGPSRRRFPALGSQHHSFYDFIVTKARGKSGPLFNFDVHDDVRLLSDATVEKDESHAGKVVLRSWYEKNKHIFPASRWEPYDPEKKWDKYTIR

SEQ ID NO: 894471 - protein, 504 aa, Homo sapiens
QLTVRPPPPLPLPLSLSPPPPPAAAAAAAAAAMAQYKGAASEAGRAMHLMKKREKQREQMEQMKQRIAEENIMKSNIDKKFSAHYDAVEAELKSSTVGLVTLNDMKAKQEALVKEREKQLAKKEQSKELQMKLEKLREKERKKEAKRKISSLSFTLEEEEEGGEEEEEAAMYEEEMEREEITTKKRKLGKNPDVDTSFLPDRDREEEENRLREELRQEWEAKQEKIKSECLRSQTRGAWAQASFPVHSLLGGALSPKAALSGAGDQEAALPCRVRRSRSPSATGMALGTGGQSRRQRAACFLLTMGPASLRFRGKELTFLTWEAPGILRITGSRAWPPVWGVSPGLAEALQRRLDRLGLCLVESPSAASAFPSQLLDSRIQMRKGNTMQQFLQKALEILRKDFSELRSAGVEQLMYIKEDLIIPHHHSFYDFIVTKARGKSGPLFNFDVHDDVRLLSDATVEKDESHAGKVVLRSWYEKNKHIFPASRWEPYDPEKKWDKYTIR

SEQ ID NO: 894472 - protein, 371 aa, Homo sapiens; identical to SEQ ID NO: 894463

SEQ ID NO: 894473 - protein, 241 aa, Homo sapiens
QLTVRPPPPLPLPLSLSPPPPPAAAAAAAAAAMAQYKGAASEAGRAMHLMKKREKQREQMEQMKQRIAEENIMKSNIDKKFSAHYDAVEAELKSSTVGEEIEITFSYWDGSGHRRTVKMRKGNTMQQFLQKALEILRKDFSELRSAGVEQLMYIKEDLIIPHHHSFYDFIVTKARGKSGPLFNFDVHDDVRLLSDATVEKDESHAGKVVLRSWYEKNKHIFPASRWEPYDPEKKWDKYTIR

SEQ ID NO: 894474 - protein, 339 aa, Homo sapiens
MCDGATCTSLRKLEKLREKERKKEAKRKISSLSFTLEEEEEGGEEEEEAAMYEEEMEREEITTKKRKLGKNPDVDTSFLPDRDREEEENRLREELRQEWEAKQEKIKSEEIEITFSYWDGSGHRRTVKVGSVQPGFLLTMGPASLRFRGKELTFLTWEAPGILRITGSRAWPPVWGVSPGLAEALQRRLDRLGLCLVESPSAASAFPSQLLDSRIQMRKGNTMQQFLQKALEILRKDFSELRSAGVEQLMYIKEDLIIPHHHSFYDFIVTKARGKSGPLFNFDVHDDVRLLSDATVEKDESHAGKVVLRSWYEKNKHIFPASRWEPYDPEKKWDKYTIR

SEQ ID NO: 894475 - protein, 123 aa, Homo sapiens
MRKGNTMQQFLQKALEILRKDFSELRSAGVEQLMYIKEDLIIPHHHSFYDFIVTKARGKSGPLFNFDVHDDVRLLSDATVEKDESHAGKVVLRSWYEKNKHIFPASRWEPYDPEKKWDKYTIR

SEQ ID NO: 894476 - protein, 313 aa, Homo sapiens
ARYVAGGPVRPAVPGRLPAPFLTWKLEKLREKERKKEAKRKISSLSFTLEEEEEGGEEEEEAAMYEEEMEREEITTKKRKLGKNPDVDTSFLPDRDREEEENRLREELRQEWEAKQEKIKSEEIEITFSYWDGSGHRRTVKMRKGNTMQQFLQKALEILRKDFSELRSAGVEQLMYIKEDLIIPHVSPFSPSTRSGCSTLGFGSGWWGQCAQAGGVGRGRDGPSRRRFPALGSQHHSFYDFIVTKARGKSGPLFNFDVHDDVRLLSDATVEKDESHAGKVVLRSWYEKNKHIFPASRWEPYDPEKKWDKYTIR

SEQ ID NO: 894477 - protein, 371 aa, Homo sapiens
MAQYKGAASEAGRAMHLMKKREKQREQMEQMKQRIAEENIMKSNIDKKFSAHYDAVEAELKSSTVGLVTLNDMKAKQEALVKEREKQLAKKEQSKELQMKLEKLREKERKKEAKRKISSLSFTLEEEEEGGEEEEEAAMYEEEMEREEITTKKRKLGKNPDVDTSFLPDRDREEEENRLREELRQEWEAKQEKIKSEEIEITFSYWDGSGHRRTVKMRKGNTMQQFLQKALEILRKDFSELRSAGVEQLMYIKEDLIIPHHHSFYDFIVTKARGKSGECRRPSRPHSTLPPMLSLGQQRDIGLHFSPAGPLFNFDVHDDVRLLSDATVEKDESHAGKVVLRSWYEKNKHIFPASRWEPYDPEKKWDKYTIR

SEQ ID NO: 894478 - protein, 371 aa, Homo sapiens; identical to SEQ ID NO: 894463

SEQ ID NO: 894479 - protein, 280 aa, Homo sapiens
QLTVRPPPPLPLPLSLSPPPPPAAAAAAAAAAMAQYKGAASEAGRAMHLMKKREKQREQMEQMKQRIAEENIMKSNIDKKFSAHYDAVEAELKSSTVGLVTLNDMKAKQEALVKEREKQLAKKEQSKELQMKLEKLREKERKKEAKRKISSLSFTLEEEEEGGEEEEEAAMYEEEMEREEITTKKRKLGKNPDVDTSFLPDRDREEEENRLREELRQEWEAKQEKIKSEEIEITFSYWDGSGHRRTVKMRKGNTMQQFLQKALEILRKDFSELSMQRRIG

SEQ ID NO: 894480 - protein, 215 aa, Homo sapiens
QLTVRPPPPLPLPLSLSPPPPPAAAAAAAAAAMAQYKGAASEAGRAMHLMKKREKQREQMEQMKQRIAEENIMKSNIDKKFSAHYDAVEAELKSSTVGLVTLNDMKAKQEALVKEREKQLAKKEQSKELQMKLEKLREKERKKEAKRKISSLSFTLEEEEEGGEEEEEAAMYEEEMEREEITTKKRKLGKNPDLSKPGLACSGLRPCTGRALPAP

SEQ ID NO: 894481 - protein, 245 aa, Homo sapiens
MAQYKGAASEAGRAMHLMKKREKQREQMEQMKQRIAEENIMKSNIDKKFSAHYDAVEAELKSSTVGLVTLNDMKAKQEALVKEREKQLAKKEQSKELQMKLEKLREKERKKEAKRKISSLSFTLEEEEEGGEEEEEAAMYEEEMEREEIHIVGSAAHEVPTTLMPVNTVALKVPANPASVSTVPSKLPTSSKPPGAVPSNALTNPAPSKLPINSTRAGMVPSKVPTSMVLTKVSASTVPTSWAAG

SEQ ID NO: 894482 - protein, 229 aa, Homo sapiens
QLTVRPPPPLPLPLSLSPPPPPAAAAAAAAAAMAQYKGAASEAGRAMHLMKKREKQREQMEQMKQRIAEENIMKSNIDKKFSAHYDAVEAELKSSTVGLVTLNDMKAKQEALVKEREKQLAKKEQSKELQMKLEKLREKELPLVPCNQAKASDVQDLLKDLKAQSQVLGWILIAVVIIILLIFTSVTRCLSPVSFLQLKFWKIYLEQEQQILKSKATEHATDWQRDIKL

SEQ ID NO: 894483 - protein, 181 aa, Homo sapiens
QLTVRPPPPLPLPLSLSPPPPPAAAAAAAAAAMAQYKGAASEAGRAMHLMKKREKQREQMEQMKQRIAEENIMKSNIDKKFSAHYDAVEAELKSSTVGLVTLNDMKAKQEALVKEREKQLAKKEQSKELQMKLEKLREKCAWVRTQAHFSCCSLPSSWNFRRVPPCPINFCIFSRDRVSPC

SEQ ID NO: 894484 - protein, 156 aa, Homo sapiens
MAQYKGAASEAGRAMHLMKKREKQREQMEQMKQRIAEENIMKSNIDKKFSAHYDAVEAELKSSTVDYVANRGLVATRGLVATRGLVANRGLVANRGLVANRGLVANRGLVANRGLVANRGLVANRGLVANRGLVANRGLVANRGLVANLTSSQPWT

SEQ ID NO: 894485 - protein, 599 aa, Homo sapiens
MHETNQGEFITSDSQEALFSKSSRGCLQNEKQDETLSSSEITLWTEKQSNGDKKSIELNDQKFNELIKNCNKHDGRGIIVDARQLPSPEPCEIQKNLNDNEMLFHSCQMVEESHEEEELKPPEQEIEIDRNIIQEEEKQAIPEFFEGRQAKTPERYLKIRNYILDQWEICKPKYLNKTSVRPGLKNCGDVNCIGRIHTYLELIGAINFGCEQAVYNRPQTVDKVRIRDRKDAVEAYQLAQRLQSMRTRRRRVRDPWGNWCDAKDLEGQTFEHLSAEELAKRREEEKGRPVKSLKVPRPTKSSFDPFQLIPCNFFSEEKQEPFQVKVASEALLIMDLHAHVSMAEVIGLLGGRYSEVDKVVEVCAAEPCNSLSTGLQCEMDPVSQTQASETLAVRGFSVIGWYHSHPAFDPNPSLRDIDTQAKYQSYFSRGGAKFIGMIVSPYNRNNPLPYSQITCLVISEEISPDGSYRLPYKFEVQQMLEEPQWGLVFEKTRWIIEKYRLSHSSVPMDKIFRRDSDLTCLQKLLECMRKTLSKVTNCFMAEEFLTEIENLFLSNYKSNQENGVTEENCTKEVVNVIILKLRHFNLDTVDLTFKVINLK

SEQ ID NO: 894486 - protein, 575 aa, Homo sapiens
MHETNQGEFITSDSQEALFSKSSRGCLQNEKQDETLSSSEITLWTEKQSNGDKKSIELNDQKFNELIKNCNKHDGRGIIVDARQLPSPEPCEIQKNLNDNEMLFHSCQMVEESHEEEELKPPEQEIEIDRNIIQEEEKQAIPEFFEGRQAKTPERYLKIRNYILDQWEICKPKYLNKTSVRPGLKNCGDVNCIGRIHTYLELIGAINFGCEQAVYNRPQTVDKVRIRDRKDAVEAYQLAQRLQSMRTRRRRVRDPWGNWCDAKDLEGQTFEHLSAEELAKRREEEKGRPVKSLKVPRPTKSSFDPFQLIPCNFFSEEKQEPFQVKVASEALLIMDLHAHVSMAEVIGLLGGRYSEVDKVVEVCAAEPCNSLSTGLQCEMDPVSQTQASETLAVRGFSVIGWYHSHPAFDPNPSLRDIDTQAKYQSYFSRGGAKFIGMIVSPYNRNNPLPYSQITCLVISEEISPDGSYRLPYKFEVQQMLEEPQWGLVFEKTRWIIEKYRLSHSSVPMDKIFRRDSDLTCLQKLLECMRKTLSKVTNCFMAEEFLTEIENLFLSNYKSNQENGVTEENCTKELLM

SEQ ID NO: 894487 - protein, 575 aa, Homo sapiens; identical to SEQ ID NO: 894486

SEQ ID NO: 894488 - protein, 167 aa, Homo sapiens
MHETNQGEFITSDSQEALFSKSSRGCLQNEKQDETLSSSEITLWTEKQSNGDKKSIELNDQKFNELIKNCNKHDGRGIIVDARQLPSPEPCEIQKNLNDNEMLFHSCQMVEESHEEEELKPPEQEIEIDRNIIQEEEKQAIPEFFEGRQAKTPERYLKIRNYILDQW

SEQ ID NO: 894489 - protein, 575 aa, Homo sapiens; identical to SEQ ID NO: 894486

SEQ ID NO: 894490 - protein, 244 aa, Homo sapiens
MHETNQGEFITSDSQEALFSKSSRGCLQNEKQDETLSSSEITLWTEKQSNGDKKSIELNDQKFNELIKNCNKHDGRGIIVDARQLPSPEPCEIQKNLNDNEMLFHSCQMVEESHEEEELKPPEQEIEIDRNIIQEEEKQAIPEFFEGRQAKTPERYLKIRNYILDQWEICKPKYLNKTSVRPGLKNCGDVNCIGRIHTYLELIGAINFGCGKNKNPTTSFTRHFLSLQHLFISMMVRIQVVIGI

SEQ ID NO: 894491 - protein, 698 aa, Homo sapiens
MWCIVLFSLLAWVYAEPTMYGEILSPNYPQAYPSEVEKSWDIEVPEGYGIHLYFTHLDIELSENCAYDSVQIISGDTEEGRLCGQRSSNNPHSPIVEEFQVPYNKLQVIFKSDFSNEERFTGFAAYYVATDINECTDFVDVPCSHFCNNFIGGYFCSCPPEYFLHDDMKNCGVNCSGDVFTALIGEIASPNYPKPYPENSRCEYQIRLEKGFQVVVTLRREDFDVEAADSAGNCLDSLVFVAGDRQFGPYCGHGFPGPLNIETKSNALDIIFQTDLTGQKKGWKLRYHGDPMPCPKEDTPNSVWEPAKAKYVFRDVVQITCLDGFEVVEKEVVMFIILQGRVGATSFYSTCQSNGKWSNSKLKCQPVDCGIPESIENGKVEDPESTLFGSVIRYTCEEPYYYMENGGGGEYHCAGNGSWVNEVLGPELPKCVPVCGVPREPFEEKQRIIGGSDADIKNFPWQVFFDNPWAGGALINEYWVLTAAHVVEGNREPTMYVGSTSVQTSRLAKSKMLTPEHVFIHPGWKLLEVPEGRTNFDNDIALVRLKDPVKMGPTVSPICLPGTSSDYNLMDGDLGLISGWGRTEKRDRAVRLKAARLPVAPLRKCKEVKVEKPTADAEAYVFTPNMICAGGEKGMDSCKGDSGGAFAVQDPNDKTKFYAAGLVSWGPQCGTYGLYTRVKNYVDWIMKTMQENSTPRED

SEQ ID NO: 894492 - protein, 688 aa, Homo sapiens
MWCIVLFSLLAWVYAEPTMYGEILSPNYPQAYPSEVEKSWDIEVPEGYGIHLYFTHLDIELSENCAYDSVQIISGDTEEGRLCGQRSSNNPHSPIVEEFQVPYNKLQVIFKSDFSNEERFTGFAAYYVATDINECTDFVDVPCSHFCNNFIGGYFCSCPPEYFLHDDMKNCGVNCSGDVFTALIGEIASPNYPKPYPENSRCEYQIRLEKGFQVVVTLRREDFDVEAADSAGNCLDSLVFVAGDRQFGPYCGHGFPGPLNIETKSNALDIIFQTDLTGQKKGWKLRYHGDPMPCPKEDTPNSVWEPAKAKYVFRDVVQITCLDGFEVVEGRVGATSFYSTCQSNGKWSNSKLKCQPVDCGIPESIENGKVEDPESTLFGSVIRYTCEEPYYYMENGGGGEYHCAGNGSWVNEVLGPELPKCVPVCGVPREPFEEKQRIIGGSDADIKNFPWQVFFDNPWAGGALINEYWVLTAAHVVEGNREPTMYVGSTSVQTSRLAKSKMLTPEHVFIHPGWKLLEVPEGRTNFDNDIALVRLKDPVKMGPTVSPICLPGTSSDYNLMDGDLGLISGWGRTEKRDRAVRLKAARLPVAPLRKCKEVKVEKPTADAEAYVFTPNMICAGGEKGMDSCKGDSGGAFAVQDPNDKTKFYAAGLVSWGPQCGTYGLYTRVKNYVDWIMKTMQENSTPRED

SEQ ID NO: 894493 - protein, 688 aa, Homo sapiens; identical to SEQ ID NO: 894492

SEQ ID NO: 894494 - protein, 688 aa, Homo sapiens; identical to SEQ ID NO: 894492

SEQ ID NO: 894495 - protein, 645 aa, Homo sapiens
ETPSQNNNNNIRNRLAVGVSIDAVFANTIISGDTEEGRLCGQRSSNNPHSPIVEEFQVPYNKLQVIFKSDFSNEERFTGFAAYYVATDINECTDFVDVPCSHFCNNFIGGYFCSCPPEYFLHDDMKNCGVNCSGDVFTALIGEIASPNYPKPYPENSRCEYQIRLEKGFQVVVTLRREDFDVEAADSAGNCLDSLVFVAGDRQFGPYCGHGFPGPLNIETKSNALDIIFQTDLTGQKKGWKLRYHGDPMPCPKEDTPNSVWEPAKAKYVFRDVVQITCLDGFEVVEGRVGATSFYSTCQSNGKWSNSKLKCQPVDCGIPESIENGKVEDPESTLFGSVIRYTCEEPYYYMENGGGGEYHCAGNGSWVNEVLGPELPKCVPVCGVPREPFEEKQRIIGGSDADIKNFPWQVFFDNPWAGGALINEYWVLTAAHVVEGNREPTMYVGSTSVQTSRLAKSKMLTPEHVFIHPGWKLLEVPEGRTNFDNDIALVRLKDPVKMGPTVSPICLPGTSSDYNLMDGDLGLISGWGRTEKRDRAVRLKAARLPVAPLRKCKEVKVEKPTADAEAYVFTPNMICAGGEKGMDSCKGDSGGAFAVQDPNDKTKFYAAGLVSWGPQCGTYGLYTRVKNYVDWIMKTMQENSTPRED

SEQ ID NO: 894496 - protein, 645 aa, Homo sapiens
ARYPSPHWLYFTHLDIELSENCAYDSVQIISGDTEEGRLCGQRSSNNPHSPIVEEFQVPYNKLQVIFKSDFSNEERFTGFAAYYVATDINECTDFVDVPCSHFCNNFIGGYFCSCPPEYFLHDDMKNCGVNCSGDVFTALIGEIASPNYPKPYPENSRCEYQIRLEKGFQVVVTLRREDFDVEAADSAGNCLDSLVFVAGDRQFGPYCGHGFPGPLNIETKSNALDIIFQTDLTGQKKGWKLRYHGDPMPCPKEDTPNSVWEPAKAKYVFRDVVQITCLDGFEVVEGRVGATSFYSTCQSNGKWSNSKLKCQPVDCGIPESIENGKVEDPESTLFGSVIRYTCEEPYYYMENGGGGEYHCAGNGSWVNEVLGPELPKCVPVCGVPREPFEEKQRIIGGSDADIKNFPWQVFFDNPWAGGALINEYWVLTAAHVVEGNREPTMYVGSTSVQTSRLAKSKMLTPEHVFIHPGWKLLEVPEGRTNFDNDIALVRLKDPVKMGPTVSPICLPGTSSDYNLMDGDLGLISGWGRTEKRDRAVRLKAARLPVAPLRKCKEVKVEKPTADAEAYVFTPNMICAGGEKGMDSCKGDSGGAFAVQDPNDKTKFYAAGLVSWGPQCGTYGLYTRVKNYVDWIMKTMQENSTPRED

SEQ ID NO: 894497 - protein, 497 aa, Homo sapiens
TSQWSIWDAGLISCHHNHILSQHISTLRREDFDVEAADSAGNCLDSLVFVAGDRQFGPYCGHGFPGPLNIETKSNALDIIFQTDLTGQKKGWKLRYHGDPMPCPKEDTPNSVWEPAKAKYVFRDVVQITCLDGFEVVEGRVGATSFYSTCQSNGKWSNSKLKCQPVDCGIPESIENGKVEDPESTLFGSVIRYTCEEPYYYMENGGGGEYHCAGNGSWVNEVLGPELPKCVPVCGVPREPFEEKQRIIGGSDADIKNFPWQVFFDNPWAGGALINEYWVLTAAHVVEGNREPTMYVGSTSVQTSRLAKSKMLTPEHVFIHPGWKLLEVPEGRTNFDNDIALVRLKDPVKMGPTVSPICLPGTSSDYNLMDGDLGLISGWGRTEKRDRAVRLKAARLPVAPLRKCKEVKVEKPTADAEAYVFTPNMICAGGEKGMDSCKGDSGGAFAVQDPNDKTKFYAAGLVSWGPQCGTYGLYTRVKNYVDWIMKTMQENSTPRED

SEQ ID NO: 894498 - protein, 365 aa, Homo sapiens [sequence omitted]

SEQ ID NO: 894499 - protein, 381 aa, Homo sapiens
SRVSQIPFHPQITCLDGFEVVEGRVGATSFYSTCQSNGKWSNSKLKCQPVDCGIPESIENGKVEDPESTLFGSVIRYTCEEPYYYMENGGGGEYHCAGNGSWVNEVLGPELPKCVPVCGVPREPFEEKQRIIGGSDADIKNFPWQVFFDNPWAGGALINEYWVLTAAHVVEGNREPTMYVGSTSVQTSRLAKSKMLTPEHVFIHPGWKLLEVPEGRTNFDNDIALVRLKDPVKMGPTVSPICLPGTSSDYNLMDGDLGLISGWGRTEKRDRAVRLKAARLPVAPLRKCKEVKVEKPTADAEAYVFTPNMICAGGEKGMDSCKGDSGGAFAVQDPNDKTKFYAAGLVSWGPQCGTYGLYTRVKNYVDWIMKTMQENSTPRED

SEQ ID NO: 894500 - protein, 354 aa, Homo sapiens
PHDSSLEEVAVLTIALLPSSVAVDCGIPESIENGKVEDPESTLFGSVIRYTCEEPYYYMENGGGGEYHCAGNGSWVNEVLGPELPKCVPVCGVPREPFEEKQRIIGGSDADIKNFPWQVFFDNPWAGGALINEYWVLTAAHVVEGNREPTMYVGSTSVQTSRLAKSKMLTPEHVFIHPGWKLLEVPEGRTNFDNDIALVRLKDPVKMGPTVSPICLPGTSSDYNLMDGDLGLISGWGRTEKRDRAVRLKAARLPVAPLRKCKEVKVEKPTADAEAYVFTPNMICAGGEKGMDSCKGDSGGAFAVQDPNDKTKFYAAGLVSWGPQCGTYGLYTRVKNYVDWIMKTMQENSTPRED

SEQ ID NO: 894501 - protein, 363 aa, Homo sapiens
STSVQTSRLAKSKMLTPEHVFIHPGWKLGEVPEGRTNFDDDIALVRLKDPVKMGPTVYPICLEPYYYMENGGGGEYHCAGNGSWVNEVLGPELPKCVPVCGVPREPFEEKQRIIGGSDADIKNFPWQVFFDNPWAGGALINEYWVLTAAHVVEGNREPTMYVGSTSVQTSRLAKSKMLTPEHVFIHPGWKLLEVPEGRTNFDNDIALVRLKDPVKMGPTVSPICLPGTSSDYNLMDGDLGLISGWGRTEKRDRAVRLKAARLPVAPLRKCKEVKVEKPTADAEAYVFTPNMICAGGEKGMDSCKGDSGGAFAVQDPNDKTKFYAAGLVSWGPQCGTYGLYTRVKNYVDWIMKTMQENSTPRED

SEQ ID NO: 894502 - protein, 307 aa, Homo sapiens
MIPFSDRSYYYMENGGGGEYHCAGNGSWVNEVLGPELPKCVPVCGVPREPFEEKQRIIGGSDADIKNFPWQVFFDNPWAGGALINEYWVLTAAHVVEGNREPTMYVGSTSVQTSRLAKSKMLTPEHVFIHPGWKLLEVPEGRTNFDNDIALVRLKDPVKMGPTVSPICLPGTSSDYNLMDGDLGLISGWGRTEKRDRAVRLKAARLPVAPLRKCKEVKVEKPTADAEAYVFTPNMICAGGEKGMDSCKGDSGGAFAVQDPNDKTKFYAAGLVSWGPQCGTYGLYTRVKNYVDWIMKTMQENSTPRED

SEQ ID NO: 894503 - protein, 314 aa, Homo sapiens
QLVETQCSESCRKIGFIIIWGEGGGEYHCAGNGSWVNEVLGPELPKCVPVCGVPREPFEEKQRIIGGSDADIKNFPWQVFFDNPWAGGALINEYWVLTAAHVVEGNREPTMYVGSTSVQTSRLAKSKMLTPEHVFIHPGWKLLEVPEGRTNFDNDIALVRLKDPVKMGPTVSPICLPGTSSDYNLMDGDLGLISGWGRTEKRDRAVRLKAARLPVAPLRKCKEVKVEKPTADAEAYVFTPNMICAGGEKGMDSCKGDSGGAFAVQDPNDKTKFYAAGLVSWGPQCGTYGLYTRVKNYVDWIMKTMQENSTPRED

SEQ ID NO: 894504 - protein, 275 aa, Homo sapiens
MGPGLPKCVPVCGVPREPFEEKQRIIGGSDADIKNFPWQVFFDNPWAGGALINEYWVLTAAHVVEGNREPTMYVGSTSVQTSRLAKSKMLTPEHVFIHPGWKLLEVPEGRTNFDNDIALVRLKDPVKMGPTVSPICLPGTSSDYNLMDGDLGLISGWGRTEKRDRAVRLKAARLPVAPLRKCKEVKVEKPTADAEAYVFTPNMICAGGEKGMDSCKGDSGGAFAVQDPNDKTKFYAAGLVSWGPQCGTYGLYTRVKNYVDWIMKTMQENSTPRED

SEQ ID NO: 894505 - protein, 598 aa, Homo sapiens
MWCIVLFSLLAWVYAEPTMYGEILSPNYPQAYPSEVEKSWDIEVPEGYGIHLYFTHLDIELSENCAYDSVQIISGDTEEGRLCGQRSSNNPHSPIVEEFQVPYNKLQVIFKSDFSNEERFTGFAAYYVATDINECTDFVDVPCSHFCNNFIGGYFCSCPPEYFLHDDMKNCGVNCSGDVFTALIGEIASPNYPKPYPENSRCEYQIRLEKGFQVVVTLRREDFDVEAADSAGNCLDSLVFVAGDRQFGPYCGHGFPGPLNIETKSNALDIIFQTDLTGQKKGWKLRYHGDPMPCPKEDTPNSVWEPAKAKYVFRDVVQITCLDGFEVVEGRVGATSFYSTCQSNGKWSNSKLKCQPVDCGIPESIENGKVEDPESTLFGSVIRYTCEEPYYYMENGGGGEYHCAGNGSWVNEVLGPELPKCVPVCGVPREPFEEKQRIIGGSDADIKNFPWQVFFDNPWAGGALINEYWVLTAAHVVEGNREPTMYVGSTSVQTSRLAKSKMLTPEHVFIHPGWKLLEVPEGRTNFDNDIALVRLKDPVKMGPTVSPICLPGTSSDYNLMDGDLGLISGWGRTEKRDRAVRLKAARLPVAPLRISLLT

SEQ ID NO: 894506 - protein, 688 aa, Homo sapiens; identical to SEQ ID NO: 894492

SEQ ID NO: 894507 - protein, 688 aa, Homo sapiens; identical to SEQ ID NO: 894492

SEQ ID NO: 894508 - protein, 688 aa, Homo sapiens; identical to SEQ ID NO: 894492

SEQ ID NO: 894509 - protein, 688 aa, Homo sapiens; identical to SEQ ID NO: 894492

SEQ ID NO: 894510 - protein, 688 aa, Homo sapiens; identical to SEQ ID NO: 894492

SEQ ID NO: 894511 - protein, 688 aa, Homo sapiens; identical to SEQ ID NO: 894492

SEQ ID NO: 894512 - protein, 628 aa, Homo sapiens
MWCIVLFSLLAWVYAEPTMYGEILSPNYPQAYPSEVEKSWDIEVPEGYGIHLYFTHLDIELSENCAYDSVQIISGDTEEGRLCGQRSSNNPHSPIVEEFQVPYNKLQVIFKSDFSNEERFTGFAAYYVATDINECTDFVDVPCSHFCNNFIGGYFCSCPPEYFLHDDMKNCGVNCSGDVFTALIGEIASPNYPKPYPENSRCEYQIRLEKGFQVVVTLRREDFDVEAADSAGNCLDSLVFVAGDRQFGPYCGHGFPGPLNIETKSNALDIIFQTDLTGQKKGWKLRYHGDPMPCPKEDTPNSVWEPAKAKYVFRDVVQITCLDGFEVVEGRVGATSFYSTCQSNGKWSNSKLKCQPVDCGIPESIENGKVEDPESTLFGSVIRYTCEEPYYYMENGGGGEYHCAGNGSWVNEVLGPELPKCVPVCGVPREPFEEKQRIIGGSDADIKNFPWQVFFDNPWAGGALINEYWVLTAAHVVEGNREPTMYVGSTSVQTSRLAKSKMLTPEHVFIHPGWKLLEVPEGRTNFDNDIALVRLKDPVKMGPTVSPICLPGTSSDYNLMDGDLGLISGWGRTEKRDRAVRLKAARLPVAPLRKCKEVKVEKPTADAEAYVFTPNMICAGGEKGMDSW

SEQ ID NO: 894513 - protein, 596 aa, Homo sapiens
MWCIVLFSLLAWVYAEPTMYGEILSPNYPQAYPSEVEKSWDIEVPEGYGIHLYFTHLDIELSENCAYDSVQIISGDTEEGRLCGQRSSNNPHSPIVEEFQVPYNKLQVIFKSDFSNEERFTGFAAYYVATDINECTDFVDVPCSHFCNNFIGGYFCSCPPEYFLHDDMKNCGVNCSGDVFTALIGEIASPNYPKPYPENSRCEYQIRLEKGFQVVVTLRREDFDVEAADSAGNCLDSLVFVAGDRQFGPYCGHGFPGPLNIETKSNALDIIFQTDLTGQKKGWKLRYHGDPMPCPKEDTPNSVWEPAKAKYVFRDVVQITCLDGFEVVEGRVGATSFYSTCQSNGKWSNSKLKCQPVDCGIPESIENGKVEDPESTLFGSVIRYTCEEPYYYMENGGGGEYHCAGNGSWVNEVLGPELPKCVPVCGVPREPFEEKQRIIGGSDADIKNFPWQVFFDNPWAGGALINEYWVLTAAHVVEGNREPTMYVGSTSVQTSRLAKSKMLTPEHVFIHPGWKLLEVPEGRTNFDNDIALVRLKDPVKMGPTVSPICLPGTSSDYNLMDGDLGLISGWGRTEKRDRAVRLKAARLPVAPLRNKR

SEQ ID NO: 894514 - protein, 514 aa, Homo sapiens
MWCIVLFSLLAWVYAEPTMYGEILSPNYPQAYPSEVEKSWDIEVPEGYGIHLYFTHLDIELSENCAYDSVQIISGDTEEGRLCGQRSSNNPHSPIVEEFQVPYNKLQVIFKSDFSNEERFTGFAAYYVATDINECTDFVDVPCSHFCNNFIGGYFCSCPPEYFLHDDMKNCGVNCSGDVFTALIGEIASPNYPKPYPENSRCEYQIRLEKGFQVVVTLRREDFDVEAADSAGNCLDSLVFVAGDRQFGPYCGHGFPGPLNIETKSNALDIIFQTDLTGQKKGWKLRYHGDPMPCPKEDTPNSVWEPAKAKYVFRDVVQITCLDGFEVVEGRVGATSFYSTCQSNGKWSNSKLKCQPVDCGIPESIENGKVEDPESTLFGSVIRYTCEEPYYYMENGGGGEYHCAGNGSWVNEVLGPELPKCVPVCGVPREPFEEKQRIIGGSDADIKNFPWQVFFDNPWAGGALINEYWVLTAAHVVECHTDPTKDHRYTCRLISPETGTVWASSSVGVDSKWC

SEQ ID NO: 894515 - protein, 206 aa, Homo sapiens
MWCIVLFSLLAWVYAEPTMYGEILSPNYPQAYPSEVEKSWDIEVPEGYGIHLYFTHLDIELSENCAYDSVQIISGDTEEGRLCGQRSSNNPHSPIVEEFQVPYNKLQVIFKSDFSNEERFTGFAAYYVATDINECTDFVDVPCSHFCNNFIGGYFCSCPPEYFLHDDMKNCGVNCSGDVFTALIGEIASPNYPKPYPVWRGSSRTA

SEQ ID NO: 894516 - protein, 684 aa, Homo sapiens
MWCIVLFSLLAWVYAEPTMYGEILSPNYPQAYPSEVEKSWDIEVPEGYGIHLYFTHLDIELSENCAYDSVQIISGDTEEGRLCGQRSSNNPHSPIVEEFQVPYNKLQVIFKSDFSNEERFTGFAAYYVATDINECTDFVDVPCSHFCNNFIGGYFCSCPPEYFLHDDMKNCGVNCSGDVFTALIGEIASPNYPKPYPENSRCEYQIRLEKGFQVVVTLRREDFDVEAADSAGNCLDSLVFVAGDRQFGPYCGHGFPGPLNIETKSNALDIIFQTDLTGQKKGWKLRYHGDPMPCPKEDTPNSVWEPAKAKYVFRDVVQITCLDGFEVVEGRVGATSFYSTCQSNGKWSNSKLKCQPVDCGIPESIENGKVEDPESTLFGSVIRYTCEEPYYYMENGGGGEYHCAGNGSWVNEVLGPELPKCVPVCGVPREPFEEKQRIIGGSDADIKNFPWQVFFDNPWAGGALINEYWVLTAAHVVEGNREPTMYVGSTSVQTSRLAKSKMLTPEHVFIHPGWKLLEVPEGRTNFDNDIALVRLKDPVKMGPTVSPICLPGTSSDYNLMDGDLGLISGWGRTEKRDRAVRLKAARLPVAPLRKCKEVKVEKPTADAEAYVFTPNMICAGGEKGMDSCKGDSGGAFAVQDPNDKTKFYAAGLVSWGPQCGTYGLYTRVKNYVDWIMKTMQDQGW

SEQ ID NO: 894517 - protein, 640 aa, Homo sapiens
MWCIVLFSLLAWVYAEPTMYGEILSPNYPQAYPSEVEKSWDIEVPEGYGIHLYFTHLDIELSENCAYDSVQIISGDTEEGRLCGQRSSNNPHSPIVEEFQVPYNKLQVIFKSDFSNEERFTGFAAYYVATDINECTDFVDVPCSHFCNNFIGGYFCSCPPEYFLHDDMKNCGVNCSGDVFTALIGEIASPNYPKPYPENSRCEYQIRLEKGFQVVVTLRREDFDVEAADSAGNCLDSLVFVAGDRQFGPYCGHGFPGPLNIETKSNALDIIFQTDLTGQKKGWKLRYHGDPMPCPKEDTPNSVWEPAKAKYVFRDVVQITCLDGFEVVEGRVGATSFYSTCQSNGKWSNSKLKCQPVDCGIPESIENGKVEDPESTLFGSVIRYTCEEPYYYMENGGGGEYHCAGNGSWVNEVLGPELPKCVPVCGVPREPFEEKQRIIGGSDADIKNFPWQVFFDNPWAGGALINEYWVLTAAHVVEGNREPTMYVGSTSVQTSRLAKSKMLTPEHVFIHPGWKLLEVPEGRTNFDNDIALVRLKDPVKMGPTVSPICLPGTSSDYNLMDGDLGLISGWGRTEKRDRAVRLKAARLPVAPLRKCKEVKVEKPTADAEAYVFTPNMICAGGEKGMDSSKGGDQCITFCSL

SEQ ID NO: 894518 - protein, 601 aa, Homo sapiens
MWCIVLFSLLAWVYAEPTMYGEILSPNYPQAYPSEVEKSWDIEVPEGYGIHLYFTHLDIELSENCAYDSVQIISGDTEEGRLCGQRSSNNPHSPIVEEFQVPYNKLQVIFKSDFSNEERFTGFAAYYVATDINECTDFVDVPCSHFCNNFIGGYFCSCPPEYFLHDDMKNCGVNCSGDVFTALIGEIASPNYPKPYPENSRCEYQIRLEKGFQVVVTLRREDFDVEAADSAGNCLDSLVFVAGDRQFGPYCGHGFPGPLNIETKSNALDIIFQTDLTGQKKGWKLRYHGDPMPCPKEDTPNSVWEPAKAKYVFRDVVQITCLDGFEVVEGRVGATSFYSTCQSNGKWSNSKLKCQPVDCGIPESIENGKVEDPESTLFGSVIRYTCEEPYYYMENGGGGEYHCAGNGSWVNEVLGPELPKCVPVCGVPREPFEEKQRIIGGSDADIKNFPWQVFFDNPWAGGALINEYWVLTAAHVVEGNREPTMYVGSTSVQTSRLAKSKMLTPEHVFIHPGWKLLEVPEGRTNFDNDIALVRLKDPVKMGPTVSPICLPGTSSDYNLMDGDLGLISGWGRTEKRDRAVRLKAARLPVAPLRILSPEYLL

SEQ ID NO: 894519 - protein, 465 aa, Homo sapiens
MWCIVLFSLLAWVYAEPTMYGEILSPNYPQAYPSEVEKSWDIEVPEGYGIHLYFTHLDIELSENCAYDSVQIISGDTEEGRLCGQRSSNNPHSPIVEEFQVPYNKLQVIFKSDFSNEERFTGFAAYYVATDINECTDFVDVPCSHFCNNFIGGYFCSCPPEYFLHDDMKNCGVNCSGDVFTALIGEIASPNYPKPYPENSRCEYQIRLEKGFQVVVTLRREDFDVEAADSAGNCLDSLVFVAGDRQFGPYCGHGFPGPLNIETKSNALDIIFQTDLTGQKKGWKLRYHGDPMPCPKEDTPNSVWEPAKAKYVFRDVVQITCLDGFEVVEGRVGATSFYSTCQSNGKWSNSKLKCQPVDCGIPESIENGKVEDPESTLFGSVIRYTCEEPYYYMENGGGGEYHCAGNGSWVNEVLGPELPKCVPVCGVPREPFEEKQRIIGGPSTPNRRVNSSILSDSSGFWVNCA

SEQ ID NO: 894520 - protein, 139 aa, Homo sapiens
MWCIVLFSLLAWVYAEPTMYGEILSPNYPQAYPSEVEKSWDIEVPEGYGIHLYFTHLDIELSENCAYDSVQIISGDTEEGRLCGQRSSNNPHSPIVEEFQVPYNKLQVIFKSDFSNEERFTGFAAYYVATDINECTVTR

SEQ ID NO: 894521 - protein, 216 aa, Homo sapiens
MGPRNPSPDHLSESESEEEENISYLNESSGEEWDSSEEEDSMVPNLSPLESLAWQVKCLLKYSTTWKPLNPNSWLYHAKLLDPSTPVHILREIGLRLSHCSHCVPKLEPIPEWPPLASCGVPPFQKPLTSPSRLSRDHATLNGALQFATKQLSRTLSRATPIPEYLKQIPNSCVSGCCCGWLTKTVKETTRTEPINTTYSYTDFQKAVNKLLTASL

SEQ ID NO: 894522 - protein, 216 aa, Homo sapiens; identical to SEQ ID NO: 894521

SEQ ID NO: 894523 - protein, 245 aa, Homo sapiens
IRTLALMGPPGLPGQIGPPGAPGIPGQKGEIGLPGPPGHDGKGPRGKPGDMGPPGPQGPPGKDGPPGVKGENGHPGSPGEKGEKGETGQAGSPVPGLPGPEGPPGPPGLQGVPGPKGEAGLDGAKGEKGFQGEKGDRGPLGLPGASGLDGRPGPPGTPGPIGVPGPAGPKGERGSKGDPGMTGPTGAAGLPGLHGPPGDKGNRGERGKKGSRGPKGDKGDQGAPGLDAPCPLGEDGLPVQGCWNK

SEQ ID NO: 894524 - protein, 133 aa, Homo sapiens
EGPPGPPGLQGVPGPKGEAGLDGAKGEKGFQGEKGDRGPLGLPGTPGPIGVPGPAGPKGERGSKGDPGMTGPTGAAGLPGLHGPPGDKGNRGERGKKGSRGPKGDKGDQGAPGLDAPCPLGEDGLPVQGCWNK

SEQ ID NO: 894525 - protein, 127 aa, Homo sapiens
GCSPAGCVRSKLEEEGLGDYGRHREPIRGSRRRRVAGAGPERRQGQPERRQELGGRGAGAVGVGWTCGIDVCAVQEPPRGESGDSGGGCALRPGQGFPSLPSSSLLPSTWARSQDLTAGSAQEDRVP

SEQ ID NO: 894526 - protein, 577 aa, Homo sapiens
MSKPELKEDKMLEVHFVGDDDVLNHILDREGGAKLKKERAQLLVNPKKIIKKPEYDLEEDDQEVLKDQNYVEIMGRDVQESLKNGSATGGGNKVYSFQNRKHSEKMAKLASELAKTPQKSVSFSLKNDPEITINVPQSSKGHSASDKVQPKNNDKSEFLSTAPRSLRKRLIVPRSHSDSESEYSASNSEDDEGVAQEHEEDTNAVIFSQKIQAQNRVVSAPVGKETPSKRMKRDKTSDLVEEYFEAHSSSKVLTSDRTLQKLKRAKLDQQTLRNLLSKVSPSFSAELKQLNQQYEKLFHKWMLQLHLGFNIVLYGLGSKRDLLERFRTTMLQDSIHVVINGFFPGISVKSVLNSITEEVLDHMGTFRSILDQLDWIVNKFKEDSSLELFLLIHNLDSQMLRGEKSQQIIGQLSSLHNIYLIASIDHLNAPLMWDHAKQSLFNWLWYETTTYSPYTEETSYENSLLVKQSGSLPLSSLTHVLRSLTPNARGIFRLLIKYQLDNQDNPSYIGLSFQDFYQQCREAFLVNSDLTLRAQLTEFRDHKLIRTKKGTDGVEYLLIPVDNGTLTDFLEKEEEEA

SEQ ID NO: 894527 - protein, 577 aa, Homo sapiens; identical to SEQ ID NO: 894526

SEQ ID NO: 894528 - protein, 577 aa, Homo sapiens; identical to SEQ ID NO: 894526

SEQ ID NO: 894529 - protein, 577 aa, Homo sapiens; identical to SEQ ID NO: 894526

SEQ ID NO: 894530 - protein, 514 aa, Homo sapiens
MSKPELKEDKMLEVHFVGDDDVLNHILDREGGAKLKKERAQLLVNPKKIIKKPEYDLEEDDQEVLKDQNYVEIMGRDVQESLKNGSATGGGNKVYSFQNRKHSEKMAKLASELAKTPQKSVSFSLKNDPEITINVPQSSKGHSASDKVQPKNNDKSEFLSTAPRSLRKRLIVPRSHSDSESEYSASNSEDDEGVAQEHEEDTNAVIFSQKIQAQNRVVSAPVGKETPSKRMKRDKTSDLVEEYFEAHSSSKVLTSDRTLQKLKRAKLDQQTLRNLLSKVSPSFSAELKQLNQQYEKLFHKWMLQLHLGFNIVLYGLGSKRDLLERFRTTMLQDSIHVVINGFFPGISVKSVLNSITEEVLDHMGTFRSILDQLDWIVNKFKEDSSLELFLLIHNLDSQMLRGEKSQQIIGQLSSLHNIYLIASIDHLNAPLMWDHAKQSLFNWLWYETTTYSPYTEETSYENSLLVKQSGSLPLSSLTHVLRSLTPNARGIFRLLIKYQLDNQDNPSYIGIQYL

SEQ ID NO: 894531 - protein, 514 aa, Homo sapiens; identical to SEQ ID NO: 894530

SEQ ID NO: 894532 - protein, 424 aa, Homo sapiens
MPLLSNHEIVQIAIFPPTVPRSHSDSESEYSASNSEDDEGVAQEHEEDTNAVIFSQKIQAQNRVVSAPVGKETPSKRMKRDKTSDLVEEYFEAHSSSKVLTSDRTLQKLKRAKLDQQTLRNLLSKVSPSFSAELKQLNQQYEKLFHKWMLQLHLGFNIVLYGLGSKRDLLERFRTTMLQDSIHVVINGFFPGISVKSVLNSITEEVLDHMGTFRSILDQLDWIVNKFKEDSSLELFLLIHNLDSQMLRGEKSQQIIGQLSSLHNIYLIASIDHLNAPLMWDHAKQSLFNWLWYETTTYSPYTEETSYENSLLVKQSGSLPLSSLTHVLRSLTPNARGIFRLLIKYQLDNQDNPSYIGLSFQDFYQQCREAFLVNSDLTLRAQLTEFRDHKLIRTKKGTDGVEYLLIPVDNGTLTDFLEKEEEEA

SEQ ID NO: 894533 - protein, 347 aa, Homo sapiens
MKRDKTSDLVEEYFEAHSSSKVLTSDRTLQKLKRAKLDQQTLRNLLSKVSPSFSAELKQLNQQYEKLFHKWMLQLHLGFNIVLYGLGSKRDLLERFRTTMLQDSIHVVINGFFPGISVKSVLNSITEEVLDHMGTFRSILDQLDWIVNKFKEDSSLELFLLIHNLDSQMLRGEKSQQIIGQLSSLHNIYLIASIDHLNAPLMWDHAKQSLFNWLWYETTTYSPYTEETSYENSLLVKQSGSLPLSSLTHVLRSLTPNARGIFRLLIKYQLDNQDNPSYIGLSFQDFYQQCREAFLVNSDLTLRAQLTEFRDHKLIRTKKGTDGVEYLLIPVDNGTLTDFLEKEEEEA

SEQ ID NO: 894534 - protein, 277 aa, Homo sapiens [sequence omitted]

SEQ ID NO: 894535 - protein, 114 aa, Homo sapiens
VRRLEKEDARPRPRRRSRLGDRLVPGQSWEAVFREPPGLGCGGREAAPSCALGRGRAALLSSYSDPQVSGPHTVWLSEIKTSTIAMLIGQRMCCGHKTKLWRTEDSFQGSACIQ

SEQ ID NO: 894536 - protein, 114 aa, Homo sapiens; identical to SEQ ID NO: 894535

SEQ ID NO: 894537 - protein, 186 aa, Homo sapiens
GKSFQLQVSLSAHQRSCGAPDGSGPGTGGGGSGSGGGGGGSGGGSARDGSALRCGECGRCFTRPAHLIRHRMLHTGERPFPCTECEKRFTERSKLIDHYRTHTGVRPFTCTVCGKSFIRKDHLRKHQRNHAAGAKTPARGQPLPTPPAPPDPFKSPASKGPLASTDLVTDWTCGLSVLGPTDGGDM

SEQ ID NO: 894538 - protein, 66 aa, Homo sapiens
MYYFLCHLALVDAGFTTSVVPPLLANLRGPALWLPRSHCTAQLCASLALGSAECVLLAVMALDRAA

SEQ ID NO: 894539 - protein, 264 aa, Homo sapiens
MLQKPRNRGRSGGQAERDRDWSHSGNPGASRAGEDARVLRDGFAEEAPSTSRGPGGSQGSQGPSPQGARRAQAAPAVGPRSQKQLELKVSELVQFLLIKDQKKIPIKRADILKHVIGDYKDIFPDLFKRAAERLQYVFGYKLVELEPKSNTYILINTLEPVEEDAEMRGDQGTPTTGLLMIVLGLIFMKGNTIKETEAWDFLRRLGVYPTKKHLIFGDPKKLITEDFVRQRLPGIPADTPHRPRRLRIPVGPANQPGNQQDESS

SEQ ID NO: 894540 - protein, 264 aa, Homo sapiens; identical to SEQ ID NO: 894539

SEQ ID NO: 894541 - protein, 264 aa, Homo sapiens; identical to SEQ ID NO: 894539

SEQ ID NO: 894542 - protein, 264 aa, Homo sapiens; identical to SEQ ID NO: 894539

SEQ ID NO: 894543 - protein, 4206 aa, Homo sapiens
MGRHLALLLLLLLLFQHFGDSDGSQRLEQTPLQFTHLEYNVTVQENSAAKTYVGHPVKMGVYITHPAWEVRYKIVSGDSENLFKAEEYILGDFCFLRIRTKGGNTAILNREVKDHYTLIVKALEKNTNVEARTKVRVQVLDTNDLRPLFSPTSYSVSLPENTAIRTSIARVSATDADIGTNGEFYYSFKDRTDMFAIHPTSGVIVLTGRLDYLETKLYEMEILAADRGMKLYGSSGISSMAKLTVHIEQANECAPVITAVTLSPSELDRDPAYAIVTVDDCDQGANGDIASLSIVAGDLLQQFRTVRSFPGSKEYKVKAIGDIDWDSHPFGYNLTLQAKDKGTPPQFSSVKVIHVTSPQFKAGPVKFEKDVYRAEISEFAPPNTPVVMVKAIPAYSHLRYVFKRTPGKAKFSLNYNTGLISILEPVKRQQAAHFELEVTTSDRKASTKVLVKVLGANSNPPEFTQTAYKAAFDENVPIGTTVMSLSAVDPDEGENGYVTYSIANLNHVPFAIDHFTGAVSTSENLDYELMPRVYTLRIRASDWGLPYRREVEVLATITLNNLNDNTPLFEKINCEGTIPRDLGVGEQITTVSAIDADELQLVQYQIEAGNELDLFSLNPNSGVLSLKRSLMDGLGAKVSFHSLRITATDGENFATPLYINITVAASHKLVNLQCEETGVAKMLAEKLLQANKLHNQGEVEDIFFDSHSVNAHIPQFRSTLPTGIQVKENQPVGSSVIFMNSTDLDTGFNGKLVYAVSGGNEDSCFMIDMETGMLKILSPLDRETTDKYTLNITVYDLGIPQKAAWRLLHVVVVDANDNPPEFLQESYFVEVSEDKEVHSEIMQVEATDKDLGPNGHVTYSILTDTDTFSIDSVTGVVNIARPLDRELQHEHSLKIEARDQAREEPQLFSTVVVKVSLEDVNDNPPTFIPPNYRVKVREDLPEGTVIMWLEAHDPDLGQSGQVRYSLLDHGEGNFDVDKLSGAVRIVQQLDFEKKQVYNLTVRAKDKGKPVSLSSTCYVEVEVVDVNENLHPPVFSSFVEKGTVKEDAPVGSLVMTVSAHDEDAGRDGEIRYSIRDGSGVGVFKIGEETGVIETSDRLDRESTSHYWLTVFATDQGVVPLSSFIEIYIEVEDVNDNAPQTSEPVYYPEIMENSPKDVSVVQIEAFDPDSSSNDKLMYKITSGNPQGFFSIHPKTGLITTTSRKLDREQQDEHILEVTVTDNGSPPKSTIARVIVKILDENDNKPQFLQKFYKIRLPEREKPDRERNARREPLYRVIATDKDEGPNAEISYSIEDGNEHGKFFIEPKTGVVSSKRFSAAGEYDILSIKAVDNGRPQKSSTTRLHIEWISKPKQSLEPISFEESFFTFTVMESDPVAHMIGVISVEPPGIPLWFDITGGNYDSHFDVDKGTGTIIVAKPLDAEQKSNYNLTVEATDGTTTILTQVFIKVIDTNDHRPQFSTSKYEVVIPEDTAPETEILQISAVDQDEKNKLIYTLQSSRDPLSLKKFRLDPATGSLYTSEKLDHEAVSPAHLTVMVRDQDVPVKRNFARIVVNVSDTNDHAPWFTASSYKGRVYESAAVGSVVLQVTALDKDKGKNAEVLYSIESGNIGNIGNSFMIDPVLGSIKTAKELDRSNQAEYDLMVKATDKGSPPMSEITSVRIFVTIADNASPKFTSKEYSVELSETVSIGSFVGMVTAHSQSSVVYEIKDGNTGDAFDINPHSGTIITQKALDFETLPIYTLIIQGTNMAGLSTNTTVLVHLQDENDNAPVFMQAEYTGLISESASINSVVLTDRNVPLVIRAADADKDSNALLVYHIVEPSVHTYFAIDSSTGAIHTVLSLDYEETSIFHFTVQVHDMGTPRLFAEYAANVTVHVIDINDCPPVFAKPLYEASLLLPTYKGVKVITVNATDADSSAFSQLIYSITEGNIGEKFSMDYKTGALTVQNTTQLRSRYELTVRASDGRFAGLTSVKINVKESKESHLKFTQDVYSAVVKENSTEAETLAVITAIGSPINEPLFYHILNPDRRFKISRTSGVLSTTGTPFDREQQEAFDVVVEVIEEHKPSAVAHVVVKVIVEDQNDNAPVFVNLPYYAVVKVDTEVGHVIRYVTAVDRDSGRNGEVHYYLKEHHEHFQIGPLGEISLKKQFELDTLNKEYLVTVVAKDGGNPAFSAEVIVPITVMNKAMPVFEKPFYSAEIAESIQVHSPVVHVQANSPEGLKVFYSITDGDPFSQFTINFNTGVINVIAPLDFEAHPAYKLSIRATDSLTGAHAEVFVDIIVDDINDNPPVFAQQSYAVTLSEASVIGTSVVQVRATDSDSEPNRGISYQMFGNHSKSHDHFHVDSSTGLISLLRTLDYEQSRQHTIFVRAVDGGMPTLSSDVIVTVDVTDLNGNPPLFEQQIYEARISEHAPHGHFVTCVKAYDADSSDIDKLQYSILSGNDHKHFVIDSATGIITLSNLHRHALKPFYSLNLSVSDGVFRSSTQVHVTVIGGNLHSPAFLQNEYEVELAENAPLHTLVMEVKTTDGDSGIYGHVTYHIVNDFAKDRFYINERGQIFTLEKLDRETPAEKVISVRLMAKDAGGKVAFCTVNVILTDDNDNAPQFRATKYEVNIGSSAAKGTSVVKSASDADEGSNADITYAIEADSESVKENLEINKLSGVITTKESLIGLENEFFTFFVRAVDNGSPSKESVVLVYVKILPPEMQLPKFSEPFYTFTVSEDVPVGTEIDLIRAEHSGTVLYSLVKGNTPESNRDESFVIDRQSGRLKLEKSLDHETTKWYQFSILARCTQDDHEMVASVDVSIQVKDANDNSPVFESSPYEAFIVENLPGGSRVIQIRASDADSGTNGQVMYSLDQSQSVEVIESFAINMETGWITTLKELDHEKRDNYQIKVVASDHGEKIQLSSTAIVDVTVTDVNDSPPRFTAEIYKGTVSEDDPQGGVIAILSTTDADSEEINRQVTYFITGGDPLGQFAVETIQNEWKVYVKKPLDREKRDNYLLTITATDGTFSSKAIVEVKVLDANDNSPVCEKTLYSDTIPEDVLPGKLIMQISATDADIRSNAEITYTLLGSGAEKFKLNPDTGELKTSTPLDREEQAVYHLLVRATDGGGRFCQASIVLTLEDVNDNAPEFSADPYAITVFENTEPGTLLTRVQATDADAGLNRKILYSLIDSADGQFSINELSGIIQLEKPLDRELQAVYTLSLKAVDQGLPRRLTATGTVIVSVLDINDNPPVFEYREYGATVSEDILVGTEVLQVYAASRDIEANAEITYSIISGNEHGKFSIDSKTGAVFIIENLDYESSHEYYLTVEATDGGTPSLSDVATVNVNVTDINDNTPVFSQDTYTTVISEDAVLEQSVITVMADDADGPSNSHIHYSIIDGNQGSSFTIDPVRGEVKVTKLLDRETISGYTLTVQASDNGSPPRVNTTTVNIDVSDVNDNAPVFSRGNYSVIIQENKPVGFSVLQLVVTDEDSSHNGPPFFFTIVTGNDEKAFEVNPQGVLLTSSAIKRKEKDHYLLQVKVADNGKPQLSSLTYIDIRVIEESIYPPAILPLEIFITSSGEEYSGGVIGKIHATDQDVYDTLTYSLDPQMDNLFSVSSTGGKLIAHKKLDIGQYLLNVSVTDGKFTTVADITVHIRQVTQEMLNHTIAIRFANLTPEEFVGDYWRNFQRALRNILGVRRNDIQIVSLQSSEPHPHLDVLLFVEKPGSAQISTKQLLHKINSSVTDIEEIIGVRILNVFQKLCAGLDCPWKFCDEKVSVDESVMSTHSTARLSFVTPRHHRAAVCLCKEGRCPPVHHGCEDDPCPEGSECVSDPWEEKHTCVCPSGRFGQCPGSSSMTLTGNSYVKYRLTENENKLEMKLTMRLRTYSTHAVVMYARGTDYSILEIHHGRLQYKFDCGSGPGIVSVQSIQVNDGQWHAVALEVNGNYARLVLDQVHTASGTAPGTLKTLNLDNYVFFGGHIRQQGTRHGRSPQVGNGFRGCMDSIYLNGQELPLNSKPRSYAHIEESVDVSPGCFLTATEDCASNPCQNGGVCNPSPAGGYYCKCSALYIGTHCEISVNPCSSNPCLYGGTCVVDNGGFVCQCRGLYTGQRCQLSPYCKDEPCKNGGTCFDSLDGAVCQCDSGFRGERCQSDIDECSGNPCLHGALCENTHGSYHCNCSHEYRGRHCEDAAPNQYVSTPWNIGLAEGIGIVVFVQGYFYWWWCLFSAVR

SEQ ID NO: 894544 - protein, 162 aa, Homo sapiens
EGGGRAFHPRHSCGRPERPQRPGPPQPPRPLLPLSGWRAQPENPVRARGGGRGGALTSPPLPHRLQGGGSGERGSESPQPAAATPQLGGWLPGHVLTNLAAPGPSFRPRALSFRLRLVLKFALVGSLRRCGRLGPGGTDVGTLVRDMLKIPGRQSWYFKPGS

SEQ ID NO: 894545 - protein, 4206 aa, Homo sapiens; identical to SEQ ID NO: 894543

SEQ ID NO: 894546 - protein, 3749 aa, Homo sapiens
MQVEATDKDLGPNGHVTYSILTDTDTFSIDSVTGVVNIARPLDRELQHEHSLKIEARDQAREEPQLFSTVVVKVSLEDVNDNPPTFIPPNYRVKVREDLPEGTVIMWLEAHDPDLGQSGQVRYSLLDHGEGNFDVDKLSGAVRIVQQLDFEKKQVYNLTVRAKDKGKPVSLSSTCYVEVEVVDVNENLHPPVFSSFVEKGTVKEDAPVGSLVMTVSAHDEDAGRDGEIRYSIRDGSGVGVFKIGEETGVIETSDRLDRESTSHYWLTVFATDQGVVPLSSFIEIYIEVEDVNDNAPQTSEPVYYPEIMENSPKDVSVVQIEAFDPDSSSNDKLMYKITSGNPQGFFSIHPKTGLITTTSRKLDREQQDEHILEVTVTDNGSPPKSTIARVIVKILDENDNKPQFLQKFYKIRLPEREKPDRERNARREPLYRVIATDKDEGPNAEISYSIEDGNEHGKFFIEPKTGVVSSKRFSAAGEYDILSIKAVDNGRPQKSSTTRLHIEWISKPKQSLEPISFEESFFTFTVMESDPVAHMIGVISVEPPGIPLWFDITGGNYDSHFDVDKGTGTIIVAKPLDAEQKSNYNLTVEATDGTTTILTQVFIKVIDTNDHRPQFSTSKYEVVIPEDTAPETEILQISAVDQDEKNKLIYTLQSSRDPLSLKKFRLDPATGSLYTSEKLDHEAVSPAHLTVMVRDQDVPVKRNFARIVVNVSDTNDHAPWFTASSYKGRVYESAAVGSVVLQVTALDKDKGKNAEVLYSIESGNIGNIGNSFMIDPVLGSIKTAKELDRSNQAEYDLMVKATDKGSPPMSEITSVRIFVTIADNASPKFTSKEYSVELSETVSIGSFVGMVTAHSQSSVVYEIKDGNTGDAFDINPHSGTIITQKALDFETLPIYTLIIQGTNMAGLSTNTTVLVHLQDENDNAPVFMQAEYTGLISESASINSVVLTDRNVPLVIRAADADKDSNALLVYHIVEPSVHTYFAIDSSTGAIHTVLSLDYEETSIFHFTVQVHDMGTPRLFAEYAANVTVHVIDINDCPPVFAKPLYEASLLLPTYKGVKVITVNATDADSSAFSQLIYSITEGNIGEKFSMDYKTGALTVQNTTQLRSRYELTVRASDGRFAGLTSVKINVKESKESHLKFTQDVYSAVVKENSTEAETLAVITAIGSPINEPLFYHILNPDRRFKISRTSGVLSTTGTPFDREQQEAFDVVVEVIEEHKPSAVAHVVVKVIVEDQNDNAPVFVNLPYYAVVKVDTEVGHVIRYVTAVDRDSGRNGEVHYYLKEHHEHFQIGPLGEISLKKQFELDTLNKEYLVTVVAKDGGNPAFSAEVIVPITVMNKAMPVFEKPFYSAEIAESIQVHSPVVHVQANSPEGLKVFYSITDGDPFSQFTINFNTGVINVIAPLDFEAHPAYKLSIRATDSLTGAHAEVFVDIIVDDINDNPPVFAQQSYAVTLSEASVIGTSVVQVRATDSDSEPNRGISYQMFGNHSKSHDHFHVDSSTGLISLLRTLDYEQSRQHTIFVRAVDGGMPTLSSDVIVTVDVTDLNGNPPLFEQQIYEARISEHAPHGHFVTCVKAYDADSSDIDKLQYSILSGNDHKHFVIDSATGIITLSNLHRHALKPFYSLNLSVSDGVFRSSTQVHVTVIGGNLHSPAFLQNEYEVELAENAPLHTLVMEVKTTDGDSGIYGHVTYHIVNDFAKDRFYINERGQIFTLEKLDRETPAEKVISVRLMAKDAGGKVAFCTVNVILTDDNDNAPQFRATKYEVNIGSSAAKGTSVVKSASDADEGSNADITYAIEADSESVKENLEINKLSGVITTKESLIGLENEFFTFFVRAVDNGSPSKESVVLVYVKILPPEMQLPKFSEPFYTFTVSEDVPVGTEIDLIRAEHSGTVLYSLVKGNTPESNRDESFVIDRQSGRLKLEKSLDHETTKWYQFSILARCTQDDHEMVASVDVSIQVKDANDNSPVFESSPYEAFIVENLPGGSRVIQIRASDADSGTNGQVMYSLDQSQSVEVIESFAINMETGWITTLKELDHEKRDNYQIKVVASDHGEKIQLSSTAIVDVTVTDVNDSPPRFTAEIYKGTVSEDDPQGGVIAILSTTDADSEEINRQVTYFITGGDPLGQFAVETIQNEWKVYVKKPLDREKRDNYLLTITATDGTFSSKAIVEVKVLDANDNSPVCEKTLYSDTIPEDVLPGKLIMQISATDADIRSNAEITYTLLGSGAEKFKLNPDTGELKTSTPLDREEQAVYHLLVRATDGGGRFCQASIVLTLEDVNDNAPEFSADPYAITVFENTEPGTLLTRVQATDADAGLNRKILYSLIDSADGQFSINELSGIIQLEKPLDRELQAVYTLSLKAVDQGLPRRLTATGTVIVSVLDINDNPPVFEYREYGATVSEDILVGTEVLQVYAASRDIEANAEITYSIISGNEHGKFSIDSKTGAVFIIENLDYESSHEYYLTVEATDGGTPSLSDVATVNVNVTDINDNTPVFSQDTYTTVISEDAVLEQSVITVMADDADGPSNSHIHYSIIDGNQGSSFTIDPVRGEVKVTKLLDRETISGYTLTVQASDNGSPPRVNTTTVNIDVSDVNDNAPVFSRGNYSVIIQENKPVGFSVLQLVVTDEDSSHNGPPFFFTIVTGNDEKAFEVNPQGVLLTSSAIKRKEKDHYLLQVKVADNGKPQLSSLTYIDIRVIEESIYPPAILPLEIFITSSGEEYSGGVIGKIHATDQDVYDTLTYSLDPQMDNLFSVSSTGGKLIAHKKLDIGQYLLNVSVTDGKFTTVADITVHIRQVTQEMLNHTIAIRFANLTPEEFVGDYWRNFQRALRNILGVRRNDIQIVSLQSSEPHPHLDVLLFVEKPGSAQISTKQLLHKINSSVTDIEEIIGVRILNVFQKLCAGLDCPWKFCDEKVSVDESVMSTHSTARLSFVTPRHHRAAVCLCKEGRCPPVHHGCEDDPCPEGSECVSDPWEEKHTCVCPSGRFGQCPGSSSMTLTGNSYVKYRLTENENKLEMKLTMRLRTYSTHAVVMYARGTDYSILEIHHGRLQYKFDCGSGPGIVSVQSIQVNDGQWHAVALEVNGNYARLVLDQVHTASGTAPGTLKTLNLDNYVFFGGHIRQQGTRHGRSPQVGNGFRGCMDSIYLNGQELPLNSKPRSYAHIEESVDVSPGCFLTATEDCASNPCQNGGVCNPSPAGGYYCKCSALYIGTHCEISVNPCSSNPCLYGGTCVVDNGGFVCQCRGLYTGQRCQLSPYCKDEPCKNGGTCFDSLDGAVCQCDSGFRGERCQSDIDECSGNPCLHGALCENTHGSYHCNCSHEYRGRHCEDAAPNQYVSTPWNIGLAEGIGIVVFVAGIFLLVVVFVLCRKMISRKKKHQAEPKDKHLGPATAFLQRPYFDSKLNKNIYSDIPPQVPVRPISYTPSIPSDSRNNLDRNSFEGSAIPEHPEFSTFNPESVHGHRKAVAVCSVAPNLPPPPPSNSPSDSDSIQKPSWDFDYDTKVVDLDPCLSKKPLEEKPSQPYSARESLSEVQSLSSFQSESCDDNGYHWDTSDWMPSVPLPDIQEFPNYEVIDEQTPLYSADPNAIDTDYYPGGYDIESDFPPPPEDFPAADELPPLPPEFSNQFESIHPPRDMPAAGSLGSSSRNRQRFNLNQYLPNFYPLDMSEPQTKGTGENSTCREPHAPYPPGYQRHFEAPAVESMPMSVYASTASCSDVSACCEVESEVMMSDYESGDDGHFEEVTIPPLDSQQHTEV

SEQ ID NO: 894547 - protein, 4130 aa, Homo sapiens
MGRHLALLLLLLLLFQHFGDSDGSQRLEQTPLQFTHLEYNVTVQENSAAKTYVGHPVKMGVYITHPAWEVRYKIVSGDSENLFKAEEYILGDFCFLRIRTKGGNTAILNREVKDHYTLIVKALEKNTNVEARTKVRVQVLDTNDLRPLFSPTSYSVSLPENTAIRTSIARVSATDADIGTNGEFYYSFKDRTDMFAIHPTSGVIVLTGRLDYLETKLYEMEILAADRGMKLYGSSGISSMAKLTVHIEQANECAPVITAVTLSPSELDRDPAYAIVTVDDCDQGANGDIASLSIVAGDLLQQFRTVRSFPGSKEYKVKAIGDIDWDSHPFGYNLTLQAKDKGTPPQFSSVKVIHVTSPQFKAGPVKFEKDVYRAEISEFAPPNTPVVMVKAIPAYSHLRYVFKRTPGKAKFSLNYNTGLISILEPVKRQQAAHFELEVTTSDRKASTKVLVKVLGANSNPPEFTQTAYKAAFDENVPIGTTVMSLSAVDPDEGENGYVTYSIANLNHVPFAIDHFTGAVSTSENLDYELMPRVYTLRIRASDWGLPYRREVEVLATITLNNLNDNTPLFEKINCEGTIPRDLGVGEQITTVSAIDADELQLVQYQIEAGNELDLFSLNPNSGVLSLKRSLMDGLGAKVSFHSLRITATDGENFATPLYINITVAASHKLVNLQCEETGVAKMLAEKLLQANKLHNQGEVEDIFFDSHSVNAHIPQFRSTLPTGIQVKENQPVGSSVIFMNSTDLDTGFNGKLVYAVSGGNEDSCFMIDMETGMLKILSPLDRETTDKYTLNITVYDLGIPQKAAWRLLHVVVVDANDNPPEFLQESYFVEVSEDKEVHSEIMQVEATDKDLGPNGHVTYSILTDTDTFSIDSVTGVVNIARPLDRELQHEHSLKIEARDQAREEPQLFSTVVVKVSLEDVNDNPPTFIPPNYRVKVREDLPEGTVIMWLEAHDPDLGQSGQVRYSLLDHGEGNFDVDKLSGAVRIVQQLDFEKKQVYNLTVRAKDKGKPVSLSSTCYVEVEVVDVNENLHPPVFSSFVEKGTVKEDAPVGSLVMTVSAHDEDAGRDGEIRYSIRDGSGVGVFKIGEETGVIETSDRLDRESTSHYWLTVFATDQGVVPLSSFIEIYIEVEDVNDNAPQTSEPVYYPEIMENSPKDVSVVQIEAFDPDSSSNDKLMYKITSGNPQGFFSIHPKTGLITTTSRKLDREQQDEHILEVTVTDNGSPPKSTIARVIVKILDENDNKPQFLQKFYKIRLPEREKPDRERNARREPLYRVIATDKDEGPNAEISYSIEDGNEHGKFFIEPKTGVVSSKRFSAAGEYDILSIKAVDNGRPQKSSTTRLHIEWISKPKQSLEPISFEESFFTFTVMESDPVAHMIGVISVEPPGIPLWFDITGGNYDSHFDVDKGTGTIIVAKPLDAEQKSNYNLTVEATDGTTTILTQVFIKVIDTNDHRPQFSTSKYEVVIPEDTAPETEILQISAVDQDEKNKLIYTLQSSRDPLSLKKFRLDPATGSLYTSEKLDHEAVSPAHLTVMVRDQDVPVKRNFARIVVNVSDTNDHAPWFTASSYKGRVYESAAVGSVVLQVTALDKDKGKNAEVLYSIESGNIGNIGNSFMIDPVLGSIKTAKELDRSNQAEYDLMVKATDKGSPPMSEITSVRIFVTIADNASPKFTSKEYSVELSETVSIGSFVGMVTAHSQSSVVYEIKDGNTGDAFDINPHSGTIITQKALDFETLPIYTLIIQGTNMAGLSTNTTVLVHLQDENDNAPVFMQAEYTGLISESASINSVVLTDRNVPLVIRAADADKDSNALLVYHIVEPSVHTYFAIDSSTGAIHTVLSLDYEETSIFHFTVQVHDMGTPRLFAEYAANVTVHVIDINDCPPVFAKPLYEASLLLPTYKGVKVITVNATDADSSAFSQLIYSITEGNIGEKFSMDYKTGALTVQNTTQLRSRYELTVRASDGRFAGLTSVKINVKESKESHLKFTQDVYSAVVKENSTEAETLAVITAIGSPINEPLFYHILNPDRRFKISRTSGVLSTTGTPFDREQQEAFDVVVEVIEEHKPSAVAHVVVKVIVEDQNDNAPVFVNLPYYAVVKVDTEVGHVIRYVTAVDRDSGRNGEVHYYLKEHHEHFQIGPLGEISLKKQFELDTLNKEYLVTVVAKDGGNPAFSAEVIVPITVMNKAMPVFEKPFYSAEIAESIQVHSPVVHVQANSPEGLKVFYSITDGDPFSQFTINFNTGVINVIAPLDFEAHPAYKLSIRATDSLTGAHAEVFVDIIVDDINDNPPVFAQQSYAVTLSEASVIGTSVVQVRATDSDSEPNRGISYQMFGNHSKSHDHFHVDSSTGLISLLRTLDYEQSRQHTIFVRAVDGGMPTLSSDVIVTVDVTDLNGNPPLFEQQIYEARISEHAPHGHFVTCVKAYDADSSDIDKLQYSILSGNDHKHFVIDSATGIITLSNLHRHALKPFYSLNLSVSDGVFRSSTQVHVTVIGGNLHSPAFLQNEYEVELAENAPLHTLVMEVKTTDGDSGIYGHVTYHIVNDFAKDRFYINERGQIFTLEKLDRETPAEKVISVRLMAKDAGGKVAFCTVNVILTDDNDNAPQFRATKYEVNIGSSAAKGTSVVKSASDADEGSNADITYAIEADSESVKENLEINKLSGVITTKESLIGLENEFFTFFVRAVDNGSPSKESVVLVYVKILPPEMQLPKFSEPFYTFTVSEDVPVGTEIDLIRAEHSGTVLYSLVKGNTPESNRDESFVIDRQSGRLKLEKSLDHETTKWYQFSILARCTQDDHEMVASVDVSIQVKDANDNSPVFESSPYEAFIVENLPGGSRVIQIRASDADSGTNGQVMYSLDQSQSVEVIESFAINMETGWITTLKELDHEKRDNYQIKVVASDHGEKIQLSSTAIVDVTVTDVNDSPPRFTAEIYKGTVSEDDPQGGVIAILSTTDADSEEINRQVTYFITGGDPLGQFAVETIQNEWKVYVKKPLDREKRDNYLLTITATDGTFSSKAIVEVKVLDANDNSPVCEKTLYSDTIPEDVLPGKLIMQISATDADIRSNAEITYTLLGSGAEKFKLNPDTGELKTSTPLDREEQAVYHLLVRATDGGGRFCQASIVLTLEDVNDNAPEFSADPYAITVFENTEPGTLLTRVQATDADAGLNRKILYSLIDSADGQFSINELSGIIQLEKPLDRELQAVYTLSLKAVDQGLPRRLTATGTVIVSVLDINDNPPVFEYREYGATVSEDILVGTEVLQVYAASRDIEANAEITYSIISGNEHGKFSIDSKTGAVFIIENLDYESSHEYYLTVEATDGGTPSLSDVATVNVNVTDINDNTPVFSQDTYTTVISEDAVLEQSVITVMADDADGPSNSHIHYSIIDGNQGSSFTIDPVRGEVKVTKLLDRETISGYTLTVQASDNGSPPRVNTTTVNIDVSDVNDNAPVFSRGNYSVIIQENKPVGFSVLQLVVTDEDSSHNGPPFFFTIVTGNDEKAFEVNPQGVLLTSSAIKRKEKDHYLLQVKVADNGKPQLSSLTYIDIRVIEESIYPPAILPLEIFITSSGEEYSGGVIGKIHATDQDVYDTLTYSLDPQMDNLFSVSSTGGKLIAHKKLDIGQYLLNVSVTDGKFTTVADITVHIRQVTQEMLNHTIAIRFANLTPEEFVGDYWRNFQRALRNILGVRRNDIQIVSLQSSEPHPHLDVLLFVEKPGSAQISTKQLLHKINSSVTDIEEIIGVRILNVFQKLCAGLDCPWKFCDEKVSVDESVMSTHSTARLSFVTPRHHRAAVCLCKEGRCPPVHHGCEDDPCPEGSECVSDPWEEKHTCVCPSGRFGQCPGSSSMTLTGNSYVKYRLTENENKLEMKLTMRLRTYSTHAVVMYARGTDYSILEIHHGRLQYKFDCGSGPGIVSVQSIQVNDGQWHAVALEVNGNYARLVLDQVHTASGTAPGTLKTLNLDNYVFFGGHIRQQGTRHGRSPQVGNGFRGCMDSIYLNGQELPLNSKPRSYAHIEESVDVSPGCFLTATEDCASNPCQNGGVCNPSPAGGYYCKCSALYIGTHCEISVNPCSSNPCLYGGTCVVDNGGFVCQCRGLYTGQRCQLSPYCKDEPCKNGGTCFDSLDGAVCQCDSGFRGESSSRRD

SEQ ID NO: 894548 - protein, 4176 aa, Homo sapiens
MGRHLALLLLLLLLFQHFGDSDGSQRLEQTPLQFTHLEYNVTVQENSAAKTYVGHPVKMGVYITHPAWEVRYKIVSGDSENLFKAEEYILGDFCFLRIRTKGGNTAILNREVKDHYTLIVKALEKNTNVEARTKVRVQVLDTNDLRPLFSPTSYSVSLPENTAIRTSIARVSATDADIGTNGEFYYSFKDRTDMFAIHPTSGVIVLTGRLDYLETKLYEMEILAADRGMKLYGSSGISSMAKLTVHIEQANECAPVITAVTLSPSELDRDPAYAIVTVDDCDQGANGDIASLSIVAGDLLQQFRTVRSFPGSKEYKVKAIGDIDWDSHPFGYNLTLQAKDKGTPPQFSSVKVIHVTSPQFKAGPVKFEKDVYRAEISEFAPPNTPVVMVKAIPAYSHLRYVFKRTPGKAKFSLNYNTGLISILEPVKRQQAAHFELEVTTSDRKASTKVLVKVLGANSNPPEFTQTAYKAAFDENVPIGTTVMSLSAVDPDEGENGYVTYSIANLNHVPFAIDHFTGAVSTSENLDYELMPRVYTLRIRASDWGLPYRREVEVLATITLNNLNDNTPLFEKINCEGTIPRDLGVGEQITTVSAIDADELQLVQYQIEAGNELDLFSLNPNSGVLSLKRSLMDGLGAKVSFHSLRITATDGENFATPLYINITVAASHKLVNLQCEETGVAKMLAEKLLQANKLHNQGEVEDIFFDSHSVNAHIPQFRSTLPTGIQVKENQPVGSSVIFMNSTDLDTGFNGKLVYAVSGGNEDSCFMIDMETGMLKILSPLDRETTDKYTLNITVYDLGIPQKAAWRLLHVVVVDANDNPPEFLQESYFVEVSEDKEVHSEIMQVEATDKDLGPNGHVTYSILTDTDTFSIDSVTGVVNIARPLDRELQHEHSLKIEARDQAREEPQLFSTVVVKVSLEDVNDNPPTFIPPNYRVKVREDLPEGTVIMWLEAHDPDLGQSGQVRYSLLDHGEGNFDVDKLSGAVRIVQQLDFEKKQVYNLTVRAKDKGKPVSLSSTCYVEVEVVDVNENLHPPVFSSFVEKGTVKEDAPVGSLVMTVSAHDEDAGRDGEIRYSIRDGSGVGVFKIGEETGVIETSDRLDRESTSHYWLTVFATDQGVVPLSSFIEIYIEVEDVNDNAPQTSEPVYYPEIMENSPKDVSVVQIEAFDPDSSSNDKLMYKITSGNPQGFFSIHPKTGLITTTSRKLDREQQDEHILEVTVTDNGSPPKSTIARVIVKILDENDNKPQFLQKFYKIRLPEREKPDRERNARREPLYRVIATDKDEGPNAEISYSIEDGNEHGKFFIEPKTGVVSSKRFSAAGEYDILSIKAVDNGRPQKSSTTRLHIEWISKPKQSLEPISFEESFFTFTVMESDPVAHMIGVISVEPPGIPLWFDITGGNYDSHFDVDKGTGTIIVAKPLDAEQKSNYNLTVEATDGTTTILTQVFIKVIDTNDHRPQFSTSKYEVVIPEDTAPETEILQISAVDQDEKNKLIYTLQSSRDPLSLKKFRLDPATGSLYTSEKLDHEAVSPAHLTVMVRDQDVPVKRNFARIVVNVSDTNDHAPWFTASSYKGRVYESAAVGSVVLQVTALDKDKGKNAEVLYSIESGNIGNIGNSFMIDPVLGSIKTAKELDRSNQAEYDLMVKATDKGSPPMSEITSVRIFVTIADNASPKFTSKEYSVELSETVSIGSFVGMVTAHSQSSVVYEIKDGNTGDAFDINPHSGTIITQKALDFETLPIYTLIIQGTNMAGLSTNTTVLVHLQDENDNAPVFMQAEYTGLISESASINSVVLTDRNVPLVIRAADADKDSNALLVYHIVEPSVHTYFAIDSSTGAIHTVLSLDYEETSIFHFTVQVHDMGTPRLFAEYAANVTVHVIDINDCPPVFAKPLYEASLLLPTYKGVKVITVNATDADSSAFSQLIYSITEGNIGEKFSMDYKTGALTVQNTTQLRSRYELTVRASDGRFAGLTSVKINVKESKESHLKFTQDVYSAVVKENSTEAETLAVITAIGSPINEPLFYHILNPDRRFKISRTSGVLSTTGTPFDREQQEAFDVVVEVIEEHKPSAVAHVVVKVIVEDQNDNAPVFVNLPYYAVVKVDTEVGHVIRYVTAVDRDSGRNGEVHYYLKEHHEHFQIGPLGEISLKKQFELDTLNKEYLVTVVAKDGGNPAFSAEVIVPITVMNKAMPVFEKPFYSAEIAESIQVHSPVVHVQANSPEGLKVFYSITDGDPFSQFTINFNTGVINVIAPLDFEAHPAYKLSIRATDSLTGAHAEVFVDIIVDDINDNPPVFAQQSYAVTLSEASVIGTSVVQVRATDSDSEPNRGISYQMFGNHSKSHDHFHVDSSTGLISLLRTLDYEQSRQHTIFVRAVDGGMPTLSSDVIVTVDVTDLNGNPPLFEQQIYEARISEHAPHGHFVTCVKAYDADSSDIDKLQYSILSGNDHKHFVIDSATGIITLSNLHRHALKPFYSLNLSVSDGVFRSSTQVHVTVIGGNLHSPAFLQNEYEVELAENAPLHTLVMEVKTTDGDSGIYGHVTYHIVNDFAKDRFYINERGQIFTLEKLDRETPAEKVISVRLMAKDAGGKVAFCTVNVILTDDNDNAPQFRATKYEVNIGSSAAKGTSVVKSASDADEGSNADITYAIEADSESVKENLEINKLSGVITTKESLIGLENEFFTFFVRAVDNGSPSKESVVLVYVKILPPEMQLPKFSEPFYTFTVSEDVPVGTEIDLIRAEHSGTVLYSLVKGNTPESNRDESFVIDRQSGRLKLEKSLDHETTKWYQFSILARCTQDDHEMVASVDVSIQVKDANDNSPVFESSPYEAFIVENLPGGSRVIQIRASDADSGTNGQVMYSLDQSQSVEVIESFAINMETGWITTLKELDHEKRDNYQIKVVASDHGEKIQLSSTAIVDVTVTDVNDSPPRFTAEIYKGTVSEDDPQGGVIAILSTTDADSEEINRQVTYFITGGDPLGQFAVETIQNEWKVYVKKPLDREKRDNYLLTITATDGTFSSKAIVEVKVLDANDNSPVCEKTLYSDTIPEDVLPGKLIMQISATDADIRSNAEITYTLLGSGAEKFKLNPDTGELKTSTPLDREEQAVYHLLVRATDGGGRFCQASIVLTLEDVNDNAPEFSADPYAITVFENTEPGTLLTRVQATDADAGLNRKILYSLIDSADGQFSINELSGIIQLEKPLDRELQAVYTLSLKAVDQGLPRRLTATGTVIVSVLDINDNPPVFEYREYGATVSEDILVGTEVLQVYAASRDIEANAEITYSIISGNEHGKFSIDSKTGAVFIIENLDYESSHEYYLTVEATDGGTPSLSDVATVNVNVTDINDNTPVFSQDTYTTVISEDAVLEQSVITVMADDADGPSNSHIHYSIIDGNQGSSFTIDPVRGEVKVTKLLDRETISGYTLTVQASDNGSPPRVNTTTVNIDVSDVNDNAPVFSRGNYSVIIQENKPVGFSVLQLVVTDEDSSHNGPPFFFTIVTGNDEKAFEVNPQGVLLTSSAIKRKEKDHYLLQVKVADNGKPQLSSLTYIDIRVIEESIYPPAILPLEIFITSSGEEYSGGVIGKIHATDQDVYDTLTYSLDPQMDNLFSVSSTGGKLIAHKKLDIGQYLLNVSVTDGKFTTVADITVHIRQVTQEMLNHTIAIRFANLTPEEFVGDYWRNFQRALRNILGVRRNDIQIVSLQSSEPHPHLDVLLFVEKPGSAQISTKQLLHKINSSVTDIEEIIGVRILNVFQKLCAGLDCPWKFCDEKVSVDESVMSTHSTARLSFVTPRHHRAAVCLCKEGRCPPVHHGCEDDPCPEGSECVSDPWEEKHTCVCPSGRFGQCPGSSSMTLTGNSYVKYRLTENENKLEMKLTMRLRTYSTHAVVMYARGTDYSILEIHHGRLQYKFDCGSGPGIVSVQSIQVNDGQWHAVALEVNGNYARLVLDQVHTASGTAPGTLKTLNLDNYVFFGGHIRQQGTRHGRSPQVGNGFRGCMDSIYLNGQELPLNSKPRSYAHIEESVDVSPGCFLTATEDCASNPCQNGGVCNPSPAGGYYCKCSALYIGTHCEISVNPCSSNPCLYGGTCVVDNGGFVCQCRGLYTGQRCQLSPYCKDEPCKNGGTCFDSLDGAVCQCDSGFRGERCQSDIDECSGNPCLHGALCENTHGSYHCNCSHEYRGRHCEDAAPNHKSGGS

SEQ ID NO: 894549 - protein, 1450 aa, Homo sapiens
MGWYRIRKCAGTDADAGLNRKILYSLIDSADGQFSINELSGIIQLEKPLDRELQAVYTLSLKAVDQGLPRRLTATGTVIVSVLDINDNPPVFEYREYGATVSEDILVGTEVLQVYAASRDIEANAEITYSIISGNEHGKFSIDSKTGAVFIIENLDYESSHEYYLTVEATDGGTPSLSDVATVNVNVTDINDNTPVFSQDTYTTVISEDAVLEQSVITVMADDADGPSNSHIHYSIIDGNQGSSFTIDPVRGEVKVTKLLDRETISGYTLTVQASDNGSPPRVNTTTVNIDVSDVNDNAPVFSRGNYSVIIQENKPVGFSVLQLVVTDEDSSHNGPPFFFTIVTGNDEKAFEVNPQGVLLTSSAIKRKEKDHYLLQVKVADNGKPQLSSLTYIDIRVIEESIYPPAILPLEIFITSSGEEYSGGVIGKIHATDQDVYDTLTYSLDPQMDNLFSVSSTGGKLIAHKKLDIGQYLLNVSVTDGKFTTVADITVHIRQVTQEMLNHTIAIRFANLTPEEFVGDYWRNFQRALRNILGVRRNDIQIVSLQSSEPHPHLDVLLFVEKPGSAQISTKQLLHKINSSVTDIEEIIGVRILNVFQKLCAGLDCPWKFCDEKVSVDESVMSTHSTARLSFVTPRHHRAAVCLCKEGRCPPVHHGCEDDPCPEGSECVSDPWEEKHTCVCPSGRFGQCPGSSSMTLTGNSYVKYRLTENENKLEMKLTMRLRTYSTHAVVMYARGTDYSILEIHHGRLQYKFDCGSGPGIVSVQSIQVNDGQWHAVALEVNGNYARLVLDQVHTASGTAPGTLKTLNLDNYVFFGGHIRQQGTRHGRSPQVGNGFRGCMDSIYLNGQELPLNSKPRSYAHIEESVDVSPGCFLTATEDCASNPCQNGGVCNPSPAGGYYCKCSALYIGTHCEISVNPCSSNPCLYGGTCVVDNGGFVCQCRGLYTGQRCQLSPYCKDEPCKNGGTCFDSLDGAVCQCDSGFRGERCQSDIDECSGNPCLHGALCENTHGSYHCNCSHEYRGRHCEDAAPNQYVSTPWNIGLAEGIGIVVFVAGIFLLVVVFVLCRKMISRKKKHQAEPKDKHLGPATAFLQRPYFDSKLNKNIYSDIPPQVPVRPISYTPSIPSDSRNNLDRNSFEGSAIPEHPEFSTFNPESVHGHRKAVAVCSVAPNLPPPPPSNSPSDSDSIQKPSWDFDYDTKVVDLDPCLSKKPLEEKPSQPYSARESLSEVQSLSSFQSESCDDNGYHWDTSDWMPSVPLPDIQEFPNYEVIDEQTPLYSADPNAIDTDYYPGGYDIESDFPPPPEDFPAADELPPLPPEFSNQFESIHPPRDMPAAGSLGSSSRNRQRFNLNQYLPNFYPLDMSEPQTKGTGENSTCREPHAPYPPGYQRHFEAPAVESMPMSVYASTASCSDVSACCEVESEVMMSDYESGDDGHFEEVTIPPLDSQQHTEV

SEQ ID NO: 894550 - protein, 1093 aa, Homo sapiens
LEESNDTVQRKEKDHNLLQVKVADNGKPQLSSLTYIDIRVIEESIYPPAILPLEIFITSSGEEYSGGVIGKIHATDQDVYDTLTYSLDPQMDNLFSVSSTGGKLIAHKKLDIGQYLLNVSVTDGKFTTVADITVHIRQVTQEMLNHTIAIRFANLTPEEFVGDYWRNFQRALRNILGVRRNDIQIVSLQSSEPHPHLDVLLFVEKPGSAQISTKQLLHKINSSVTDIEEIIGVRILNVFQKLCAGLDCPWKFCDEKVSVDESVMSTHSTARLSFVTPRHHRAAVCLCKEGRCPPVHHGCEDDPCPEGSECVSDPWEEKHTCVCPSGRFGQCPGSSSMTLTGNSYVKYRLTENENKLEMKLTMRLRTYSTHAVVMYARGTDYSILEIHHGRLQYKFDCGSGPGIVSVQSIQVNDGQWHAVALEVNGNYARLVLDQVHTASGTAPGTLKTLNLDNYVFFGGHIRQQGTRHGRSPQVGNGFRGCMDSIYLNGQELPLNSKPRSYAHIEESVDVSPGCFLTATEDCASNPCQNGGVCNPSPAGGYYCKCSALYIGTHCEISVNPCSSNPCLYGGTCVVDNGGFVCQCRGLYTGQRCQLSPYCKDEPCKNGGTCFDSLDGAVCQCDSGFRGERCQSDIDECSGNPCLHGALCENTHGSYHCNCSHEYRGRHCEDAAPNQYVSTPWNIGLAEGIGIVVFVAGIFLLVVVFVLCRKMISRKKKHQAEPKDKHLGPATAFLQRPYFDSKLNKNIYSDIPPQVPVRPISYTPSIPSDSRNNLDRNSFEGSAIPEHPEFSTFNPESVHGHRKAVAVCSVAPNLPPPPPSNSPSDSDSIQKPSWDFDYDTKVVDLDPCLSKKPLEEKPSQPYSARESLSEVQSLSSFQSESCDDNGYHWDTSDWMPSVPLPDIQEFPNYEVIDEQTPLYSADPNAIDTDYYPGGYDIESDFPPPPEDFPAADELPPLPPEFSNQFESIHPPRDMPAAGSLGSSSRNRQRFNLNQYLPNFYPLDMSEPQTKGTGENSTCREPHAPYPPGYQRHFEAPAVESMPMSVYASTASCSDVSACCEVESEVMMSDYESGDDGHFEEVTIPPLDSQQHTEV

SEQ ID NO: 894551 - protein, 565 aa, Homo sapiens
MTLSQKIKILKGYYCKCSALYIGTHCEISVNPCSSNPCLYGGTCVVDNGGFVCQCRGLYTGQRCQLSPYCKDEPCKNGGTCFDSLDGAVCQCDSGFRGERCQSDIDECSGNPCLHGALCENTHGSYHCNCSHEYRGRHCEDAAPNQYVSTPWNIGLAEGIGIVVFVAGIFLLVVVFVLCRKMISRKKKHQAEPKDKHLGPATAFLQRPYFDSKLNKNIYSDIPPQVPVRPISYTPSIPSDSRNNLDRNSFEGSAIPEHPEFSTFNPESVHGHRKAVAVCSVAPNLPPPPPSNSPSDSDSIQKPSWDFDYDTKVVDLDPCLSKKPLEEKPSQPYSARESLSEVQSLSSFQSESCDDNGYHWDTSDWMPSVPLPDIQEFPNYEVIDEQTPLYSADPNAIDTDYYPGGYDIESDFPPPPEDFPAADELPPLPPEFSNQFESIHPPRDMPAAGSLGSSSRNRQRFNLNQYLPNFYPLDMSEPQTKGTGENSTCREPHAPYPPGYQRHFEAPAVESMPMSVYASTASCSDVSACCEVESEVMMSDYESGDDGHFEEVTIPPLDSQQHTEV

SEQ ID NO: 894552 - protein, 4206 aa, Homo sapiens; identical to SEQ ID NO: 894543

SEQ ID NO: 894553 - protein, 261 aa, Homo sapiens
SQWARYTKVVDLDPCLSKKPLEEKPSQPYSARESLSEVQSLSSFQSESCDDNGYHWDTSDWMPSVPLPDIQEFPNYEVIDEQTPLYSADPNAIDTDYYPGGYDIESDFPPPPEDFPAADELPPLPPEFSNQFESIHPPRDMPAAGSLGSSSRNRQRFNLNQYLPNFYPLDMSEPQTKGTGENSTCREPHAPYPPGYQRHFEAPAVESMPMSVYASTASCSDVSACCEVESEVMMSDYESGDDGHFEEVTIPPLDSQQHTEV

SEQ ID NO: 894554 - protein, 135 aa, Homo sapiens
RIPGRRYLIHPPRDMPAAGSLGSSSRNRQRFNLNQYLPNFYPLDMSEPQTKGTGENSTCREPHAPYPPGYQRHFEAPAVESMPMSVYASTASCSDVSACCEVESEVMMSDYESGDDGHFEEVTIPPLDSQQHTEV

SEQ ID NO: 894555 - protein, 4206 aa, Homo sapiens; identical to SEQ ID NO: 894543

SEQ ID NO: 894556 - protein, 4169 aa, Homo sapiens
MGRHLALLLLLLLLFQHFGDSDGSQRLEQTPLQFTHLEYNVTVQENSAAKTYVGHPVKMGVYITHPAWEVRYKIVSGDSENLFKAEEYILGDFCFLRIRTKGGNTAILNREVKDHYTLIVKALEKNTNVEARTKVRVQVLDTNDLRPLFSPTSYSVSLPENTAIRTSIARVSATDADIGTNGEFYYSFKDRTDMFAIHPTSGVIVLTGRLDYLETKLYEMEILAADRGMKLYGSSGISSMAKLTVHIEQANECAPVITAVTLSPSELDRDPAYAIVTVDDCDQGANGDIASLSIVAGDLLQQFRTVRSFPGSKEYKVKAIGDIDWDSHPFGYNLTLQAKDKGTPPQFSSVKVIHVTSPQFKAGPVKFEKDVYRAEISEFAPPNTPVVMVKAIPAYSHLRYVFKRTPGKAKFSLNYNTGLISILEPVKRQQAAHFELEVTTSDRKASTKVLVKVLGANSNPPEFTQTAYKAAFDENVPIGTTVMSLSAVDPDEGENGYVTYSIANLNHVPFAIDHFTGAVSTSENLDYELMPRVYTLRIRASDWGLPYRREVEVLATITLNNLNDNTPLFEKINCEGTIPRDLGVGEQITTVSAIDADELQLVQYQIEAGNELDLFSLNPNSGVLSLKRSLMDGLGAKVSFHSLRITATDGENFATPLYINITVAASHKLVNLQCEETGVAKMLAEKLLQANKLHNQGEVEDIFFDSHSVNAHIPQFRSTLPTGIQVKENQPVGSSVIFMNSTDLDTGFNGKLVYAVSGGNEDSCFMIDMETGMLKILSPLDRETTDKYTLNITVYDLGIPQKAAWRLLHVVVVDANDNPPEFLQESYFVEVSEDKEVHSEIMQVEATDKDLGPNGHVTYSILTDTDTFSIDSVTGVVNIARPLDRELQHEHSLKIEARDQAREEPQLFSTVVVKVSLEDVNDNPPTFIPPNYRVKVREDLPEGTVIMWLEAHDPDLGQSGQVRYSLLDHGEGNFDVDKLSGAVRIVQQLDFEKKQVYNLTVRAKDKGKPVSLSSTCYVEVEVVDVNENLHPPVFSSFVEKGTVKEDAPVGSLVMTVSAHDEDAGRDGEIRYSIRDGSGVGVFKIGEETGVIETSDRLDRESTSHYWLTVFATDQGVVPLSSFIEIYIEVEDVNDNAPQTSEPVYYPEIMENSPKDVSVVQIEAFDPDSSSNDKLMYKITSGNPQGFFSIHPKTGLITTTSRKLDREQQDEHILEVTVTDNGSPPKSTIARVIVKILDENDNKPQFLQKFYKIRLPEREKPDRERNARREPLYRVIATDKDEGPNAEISYSIEDGNEHGKFFIEPKTGVVSSKRFSAAGEYDILSIKAVDNGRPQKSSTTRLHIEWISKPKQSLEPISFEESFFTFTVMESDPVAHMIGVISVEPPGIPLWFDITGGNYDSHFDVDKGTGTIIVAKPLDAEQKSNYNLTVEATDGTTTILTQVFIKVIDTNDHRPQFSTSKYEVVIPEDTAPETEILQISAVDQDEKNKLIYTLQSSRDPLSLKKFRLDPATGSLYTSEKLDHEAVSPAHLTVMVRDQDVPVKRNFARIVVNVSDTNDHAPWFTASSYKGRVYESAAVGSVVLQVTALDKDKGKNAEVLYSIESGNIGNIGNSFMIDPVLGSIKTAKELDRSNQAEYDLMVKATDKGSPPMSEITSVRIFVTIADNASPKFTSKEYSVELSETVSIGSFVGMVTAHSQSSVVYEIKDGNTGDAFDINPHSGTIITQKALDFETLPIYTLIIQGTNMAGLSTNTTVLVHLQDENDNAPVFMQAEYTGLISESASINSVVLTDRNVPLVIRAADADKDSNALLVYHIVEPSVHTYFAIDSSTGAIHTVLSLDYEETSIFHFTVQVHDMGTPRLFAEYAANVTVHVIDINDCPPVFAKPLYEASLLLPTYKGVKVITVNATDADSSAFSQLIYSITEGNIGEKFSMDYKTGALTVQNTTQLRSRYELTVRASDGRFAGLTSVKINVKESKESHLKFTQDVYSAVVKENSTEAETLAVITAIGSPINEPLFYHILNPDRRFKISRTSGVLSTTGTPFDREQQEAFDVVVEVIEEHKPSAVAHVVVKVIVEDQNDNAPVFVNLPYYAVVKVDTEVGHVIRYVTAVDRDSGRNGEVHYYLKEHHEHFQIGPLGEISLKKQFELDTLNKEYLVTVVAKDGGNPAFSAEVIVPITVMNKAMPVFEKPFYSAEIAESIQVHSPVVHVQANSPEGLKVFYSITDGDPFSQFTINFNTGVINVIAPLDFEAHPAYKLSIRATDSLTGAHAEVFVDIIVDDINDNPPVFAQQSYAVTLSEASVIGTSVVQVRATDSDSEPNRGISYQMFGNHSKSHDHFHVDSSTGLISLLRTLDYEQSRQHTIFVRAVDGGMPTLSSDVIVTVDVTDLNGNPPLFEQQIYEARISEHAPHGHFVTCVKAYDADSSDIDKLQYSILSGNDHKHFVIDSATGIITLSNLHRHALKPFYSLNLSVSDGVFRSSTQVHVTVIGGNLHSPAFLQNEYEVELAENAPLHTLVMEVKTTDGDSGIYGHVTYHIVNDFAKDRFYINERGQIFTLEKLDRETPAEKVISVRLMAKDAGGKVAFCTVNVILTDDNDNAPQFRATKYEVNIGSSAAKGTSVVKSASDADEGSNADITYAIEADSESVKENLEINKLSGVITTKESLIGLENEFFTFFVRAVDNGSPSKESVVLVYVKILPPEMQLPKFSEPFYTFTVSEDVPVGTEIDLIRAEHSGTVLYSLVKGNTPESNRDESFVIDRQSGRLKLEKSLDHETTKWYQFSILARCTQDDHEMVASVDVSIQVKDANDNSPVFESSPYEAFIVENLPGGSRVIQIRASDADSGTNGQVMYSLDQSQSVEVIESFAINMETGWITTLKELDHEKRDNYQIKVVASDHGEKIQLSSTAIVDVTVTDVNDSPPRFTAEIYKGTVSEDDPQGGVIAILSTTDADSEEINRQVTYFITGGDPLGQFAVETIQNEWKVYVKKPLDREKRDNYLLTITATDGTFSSKAIVEVKVLDANDNSPVCEKTLYSDTIPEDVLPGKLIMQISATDADIRSNAEITYTLLGSGAEKFKLNPDTGELKTSTPLDREEQAVYHLLVRATDGGGRFCQASIVLTLEDVNDNAPEFSADPYAITVFENTEPGTLLTRVQATDADAGLNRKILYSLIDSADGQFSINELSGIIQLEKPLDRELQAVYTLSLKAVDQGLPRRLTATGTVIVSVLDINDNPPVFEYREYGATVSEDILVGTEVLQVYAASRDIEANAEITYSIISGNEHGKFSIDSKTGAVFIIENLDYESSHEYYLTVEATDGGTPSLSDVATVNVNVTDINDNTPVFSQDTYTTVISEDAVLEQSVITVMADDADGPSNSHIHYSIIDGNQGSSFTIDPVRGEVKVTKLLDRETISGYTLTVQASDNGSPPRVNTTTVNIDVSDVNDNAPVFSRGNYSVIIQENKPVGFSVLQLVVTDEDSSHNGPPFFFTIVTGNDEKAFEVNPQGVLLTSSAIKRKEKDHYLLQVKVADNGKPQLSSLTYIDIRVIEESIYPPAILPLEIFITSSGEEYSGGVIGKIHATDQDVYDTLTYSLDPQMDNLFSVSSTGGKLIAHKKLDIGQYLLNVSVTDGKFTTVADITVHIRQVTQEMLNHTIAIRFANLTPEEFVGDYWRNFQRALRNILGVRRNDIQIVSLQSSEPHPHLDVLLFVEKPGSAQISTKQLLHKINSSVTDIEEIIGVRILNVFQKLCAGLDCPWKFCDEKVSVDESVMSTHSTARLSFVTPRHHRAAVCLCKEGRCPPVHHGCEDDPCPEGSECVSDPWEEKHTCVCPSGRFGQCPGSSSMTLTGNSYVKYRLTENENKLEMKLTMRLRTYSTHAVVMYARGTDYSILEIHHGRLQYKFDCGSGPGIVSVQSIQVNDGQWHAVALEVNGNYARLVLDQVHTASGTAPGTLKTLNLDNYVFFGGHIRQQGTRHGRSPQVGNGFRGCMDSIYLNGQELPLNSKPRSYAHIEESVDVSPGCFLTATEDCASNPCQNGGVCNPSPAGGYYCKCSALYIGTHCEISVNPCSSNPCLYGGTCVVDNGGFVCQCRGLYTGQRCQLSPYCKDEPCKNGGTCFDSLDGAVCQCDSGFRGERCQSDIDECSGNPCLHGALCENTHGSYHCNCSHEYRGQLLLHSDG

SEQ ID NO: 894557 - protein, 2352 aa, Homo sapiens
MGRHLALLLLLLLLFQHFGDSDGSQRLEQTPLQFTHLEYNVTVQENSAAKTYVGHPVKMGVYITHPAWEVRYKIVSGDSENLFKAEEYILGDFCFLRIRTKGGNTAILNREVKDHYTLIVKALEKNTNVEARTKVRVQVLDTNDLRPLFSPTSYSVSLPENTAIRTSIARVSATDADIGTNGEFYYSFKDRTDMFAIHPTSGVIVLTGRLDYLETKLYEMEILAADRGMKLYGSSGISSMAKLTVHIEQANECAPVITAVTLSPSELDRDPAYAIVTVDDCDQGANGDIASLSIVAGDLLQQFRTVRSFPGSKEYKVKAIGDIDWDSHPFGYNLTLQAKDKGTPPQFSSVKVIHVTSPQFKAGPVKFEKDVYRAEISEFAPPNTPVVMVKAIPAYSHLRYVFKRTPGKAKFSLNYNTGLISILEPVKRQQAAHFELEVTTSDRKASTKVLVKVLGANSNPPEFTQTAYKAAFDENVPIGTTVMSLSAVDPDEGENGYVTYSIANLNHVPFAIDHFTGAVSTSENLDYELMPRVYTLRIRASDWGLPYRREVEVLATITLNNLNDNTPLFEKINCEGTIPRDLGVGEQITTVSAIDADELQLVQYQIEAGNELDLFSLNPNSGVLSLKRSLMDGLGAKVSFHSLRITATDGENFATPLYINITVAASHKLVNLQCEETGVAKMLAEKLLQANKLHNQGEVEDIFFDSHSVNAHIPQFRSTLPTGIQVKENQPVGSSVIFMNSTDLDTGFNGKLVYAVSGGNEDSCFMIDMETGMLKILSPLDRETTDKYTLNITVYDLGIPQKAAWRLLHVVVVDANDNPPEFLQESYFVEVSEDKEVHSEIMQVEATDKDLGPNGHVTYSILTDTDTFSIDSVTGVVNIARPLDRELQHEHSLKIEARDQAREEPQLFSTVVVKVSLEDVNDNPPTFIPPNYRVKVREDLPEGTVIMWLEAHDPDLGQSGQVRYSLLDHGEGNFDVDKLSGAVRIVQQLDFEKKQVYNLTVRAKDKGKPVSLSSTCYVEVEVVDVNENLHPPVFSSFVEKGTVKEDAPVGSLVMTVSAHDEDAGRDGEIRYSIRDGSGVGVFKIGEETGVIETSDRLDRESTSHYWLTVFATDQGVVPLSSFIEIYIEVEDVNDNAPQTSEPVYYPEIMENSPKDVSVVQIEAFDPDSSSNDKLMYKITSGNPQGFFSIHPKTGLITTTSRKLDREQQDEHILEVTVTDNGSPPKSTIARVIVKILDENDNKPQFLQKFYKIRLPEREKPDRERNARREPLYRVIATDKDEGPNAEISYSIEDGNEHGKFFIEPKTGVVSSKRFSAAGEYDILSIKAVDNGRPQKSSTTRLHIEWISKPKQSLEPISFEESFFTFTVMESDPVAHMIGVISVEPPGIPLWFDITGGNYDSHFDVDKGTGTIIVAKPLDAEQKSNYNLTVEATDGTTTILTQVFIKVIDTNDHRPQFSTSKYEVVIPEDTAPETEILQISAVDQDEKNKLIYTLQSSRDPLSLKKFRLDPATGSLYTSEKLDHEAVSPAHLTVMVRDQDVPVKRNFARIVVNVSDTNDHAPWFTASSYKGRVYESAAVGSVVLQVTALDKDKGKNAEVLYSIESGNIGNIGNSFMIDPVLGSIKTAKELDRSNQAEYDLMVKATDKGSPPMSEITSVRIFVTIADNASPKFTSKEYSVELSETVSIGSFVGMVTAHSQSSVVYEIKDGNTGDAFDINPHSGTIITQKALDFETLPIYTLIIQGTNMAGLSTNTTVLVHLQDENDNAPVFMQAEYTGLISESASINSVVLTDRNVPLVIRAADADKDSNALLVYHIVEPSVHTYFAIDSSTGAIHTVLSLDYEETSIFHFTVQVHDMGTPRLFAEYAANVTVHVIDINDCPPVFAKPLYEASLLLPTYKGVKVITVNATDADSSAFSQLIYSITEGNIGEKFSMDYKTGALTVQNTTQLRSRYELTVRASDGRFAGLTSVKINVKESKESHLKFTQDVYSAVVKENSTEAETLAVITAIGSPINEPLFYHILNPDRRFKISRTSGVLSTTGTPFDREQQEAFDVVVEVIEEHKPSAVAHVVVKVIVEDQNDNAPVFVNLPYYAVVKVDTEVGHVIRYVTAVDRDSGRNGEVHYYLKEHHEHFQIGPLGEISLKKQFELDTLNKEYLVTVVAKDGGNPAFSAEVIVPITVMNKAMPVFEKPFYSAEIAESIQVHSPVVHVQANSPEGLKVFYSITDGDPFSQFTINFNTGVINVIAPLDFEAHPAYKLSIRATDSLTGAHAEVFVDIIVDDINDNPPVFAQQSYAVTLSEASVIGTSVVQVRATDSDSEPNRGISYQMFGNHSKSHDHFHVDSSTGLISLLRTLK

SEQ ID NO: 894558 - protein, 110 aa, Homo sapiens
NKNIYSDIPPQVPVRPISYTPSIPSDSRNNLDRNSFEGSAIPEHPEFSTFNPESVHGHRKAVAVCSVAPNLPPPPPSNSPSDSDSIQKPSWDFDYDSKSHFFISLKCHLR

SEQ ID NO: 894559 - protein, 383 aa, Homo sapiens [sequence omitted]

SEQ ID NO: 894560 - protein, 351 aa, Homo sapiens [sequence omitted]

SEQ ID NO: 894561 - protein, 541 aa, Homo sapiens
MAQTQGTRRKVCYYYDGDVGNYYYGQGHPMKPHRIRMTHNLLLNYGLYRKMEIYRPHKANAEEMTKYHSDDYIKFLRSIRPDNMSEYSKQMQRFNVGEDCPVFDGLFEFCQLSTGGSVASAVKLNKQQTDIAVNWAGGLHHAKKSEASGFCYVNDIVLAILELLKYHQRVLYIDIDIHHGDGVEEAFYTTDRVMTVSFHKYGEYFPGTGDLRDIGAGKGKYYAVNYPLRDGIDDESYEAIFKPVMSKVMEMFQPSAVVLQCGSDSLSGDRLGCFNLTIKGHAKCVEFVKSFNLPMLMLGGGGYTIRNVARCWTYETAVALDTEIPNELPYNDYFEYFGPDFKLHISPSNMTNQNTNEYLEKIKQRLFENLRMLPHAPARFKCRRFLRTPSLRRVAMRTKTTLTRRISICSSDKRIACEEEFSDSEEEGEGGRKGTLPTSKKPRESKQRMKKRKTQRRRKKSPKEEKTKEEKPEAKGGQGGGQVGLNGPLQLWLPAESLTFLPQPLRFYIFYFSVYLYKNLLNINIPRDKKPRPRAQGSCAG

SEQ ID NO: 894562 - protein, 178 aa, Homo sapiens
SDAAGRSRGSPRAPARFKCRRFLRTPSLRRVAMRTKTTLTRRISICSSDKRIACEEEFSDSEEEGEGGRKGTLPTSKKPRESKQRMKKRKTQRRRKKSPKEEKTKEEKPEAKGGQGGGQVGLNGPLQLWLPAESLTFLPQPLRFYIFYFSVYLYKNLLNINIPRDKKPRPRAQGSCAG

SEQ ID NO: 894563 - protein, 140 aa, Homo sapiens
PRVADAWVDPPRRGRVGEEFSDSEEEGEGGRKGTLPTSKKPRESKQRMKKRKTQRRRKKSPKEEKTKEEKPEAKGGQGGGQVGLNGPLQLWLPAESLTFLPQPLRFYIFYFSVYLYKNLLNINIPRDKKPRPRAQGSCAG

SEQ ID NO: 894564 - protein, 541 aa, Homo sapiens; identical to SEQ ID NO: 894561

SEQ ID NO: 894565 - protein, 541 aa, Homo sapiens; identical to SEQ ID NO: 894561

SEQ ID NO: 894566 - protein, 541 aa, Homo sapiens; identical to SEQ ID NO: 894561

SEQ ID NO: 894567 - protein, 541 aa, Homo sapiens; identical to SEQ ID NO: 894561

SEQ ID NO: 894568 - protein, 541 aa, Homo sapiens; identical to SEQ ID NO: 894561

SEQ ID NO: 894569 - protein, 478 aa, Homo sapiens
MTKYHSDDYIKFLRSIRPDNMSEYSKQMQRFNVGEDCPVFDGLFEFCQLSTGGSVASAVKLNKQQTDIAVNWAGGLHHAKKSEASGFCYVNDIVLAILELLKYHQRVLYIDIDIHHGDGVEEAFYTTDRVMTVSFHKYGEYFPGTGDLRDIGAGKGKYYAVNYPLRDGIDDESYEAIFKPVMSKVMEMFQPSAVVLQCGSDSLSGDRLGCFNLTIKGHAKCVEFVKSFNLPMLMLGGGGYTIRNVARCWTYETAVALDTEIPNELPYNDYFEYFGPDFKLHISPSNMTNQNTNEYLEKIKQRLFENLRMLPHAPARFKCRRFLRTPSLRRVAMRTKTTLTRRISICSSDKRIACEEEFSDSEEEGEGGRKGTLPTSKKPRESKQRMKKRKTQRRRKKSPKEEKTKEEKPEAKGGQGGGQVGLNGPLQLWLPAESLTFLPQPLRFYIFYFSVYLYKNLLNINIPRDKKPRPRAQGSCAG

SEQ ID NO: 894570 - protein, 541 aa, Homo sapiens; identical to SEQ ID NO: 894561

SEQ ID NO: 894571 - protein, 668 aa, Homo sapiens
MAQTQGTRRKVCYYYDGDVGNYYYGQGHPMKPHRIRMTHNLLLNYGLYRKMEIYRPHKANAEEMTKYHSDDYIKFLRSIRPDNMSEYSKQMQRFNVGEDCPVFDGLFEFCQLSTGGSVASAVKLNKQQTDIAVNWAGGLHHAKKSEASGFCYVNDIVLAILELLKYACLALSLGRAPSGQVPISLFPWACLPSLLFLPMCWLGCARGVSLAIISLMGSWFDLSHGMTGADAAQILPPECPCVAGVDPGCRVGRSDLVGLVRPLETPGRSSTFLQPVSTSLVLRDTSGRQPARYHQRVLYIDIDIHHGDGVEEAFYTTDRVMTVSFHKYGEYFPGTGDLRDIGAGKGKYYAVNYPLRDGIDDESYEAIFKPVMSKVMEMFQPSAVVLQCGSDSLSGDRLGCFNLTIKGHAKCVEFVKSFNLPMLMLGGGGYTIRNVARCWTYETAVALDTEIPNELPYNDYFEYFGPDFKLHISPSNMTNQNTNEYLEKIKQRLFENLRMLPHAPARFKCRRFLRTPSLRRVAMRTKTTLTRRISICSSDKRIACEEEFSDSEEEGEGGRKGTLPTSKKPRESKQRMKKRKTQRRRKKSPKEEKTKEEKPEAKGGQGGGQVGLNGPLQLWLPAESLTFLPQPLRFYIFYFSVYLYKNLLNINIPRDKKPRPRAQGSCAG

SEQ ID NO: 894572 - protein, 516 aa, Homo sapiens
MAQTQGTRRKVCYYYDGDVGNYYYGQGHPMKPHRIRMTHNLLLNYGLYRKMEIYRPHKANAEEMTKYHSDDYIKFLRSIRPDNMSEYSKQMQRSSAVKLNKQQTDIAVNWAGGLHHAKKSEASGFCYVNDIVLAILELLKYHQRVLYIDIDIHHGDGVEEAFYTTDRVMTVSFHKYGEYFPGTGDLRDIGAGKGKYYAVNYPLRDGIDDESYEAIFKPVMSKVMEMFQPSAVVLQCGSDSLSGDRLGCFNLTIKGHAKCVEFVKSFNLPMLMLGGGGYTIRNVARCWTYETAVALDTEIPNELPYNDYFEYFGPDFKLHISPSNMTNQNTNEYLEKIKQRLFENLRMLPHAPARFKCRRFLRTPSLRRVAMRTKTTLTRRISICSSDKRIACEEEFSDSEEEGEGGRKGTLPTSKKPRESKQRMKKRKTQRRRKKSPKEEKTKEEKPEAKGGQGGGQVGLNGPLQLWLPAESLTFLPQPLRFYIFYFSVYLYKNLLNINIPRDKKPRPRAQGSCAG

SEQ ID NO: 894573 - protein, 559 aa, Homo sapiens
MAQTQGTRRKVCYYYDGDVGNYYYGQGHPMKPHRIRMTHNLLLNYGLYRKMEIYRPHKANAEEMTKYHSDDYIKFLRSIRPDNMSEYSKQMQRFNVGEDCPVFDGLFEFCQLSTGGSVASAVKLNKQQTDIAVNWAGGLHHAKKSEASGFCYVNDIVLAILELLNQFPRLWCLEIPEGGSQPWYHQRVLYIDIDIHHGDGVEEAFYTTDRVMTVSFHKYGEYFPGTGDLRDIGAGKGKYYAVNYPLRDGIDDESYEAIFKPVMSKVMEMFQPSAVVLQCGSDSLSGDRLGCFNLTIKGHAKCVEFVKSFNLPMLMLGGGGYTIRNVARCWTYETAVALDTEIPNELPYNDYFEYFGPDFKLHISPSNMTNQNTNEYLEKIKQRLFENLRMLPHAPARFKCRRFLRTPSLRRVAMRTKTTLTRRISICSSDKRIACEEEFSDSEEEGEGGRKGTLPTSKKPRESKQRMKKRKTQRRRKKSPKEEKTKEEKPEAKGGQGGGQVGLNGPLQLWLPAESLTFLPQPLRFYIFYFSVYLYKNLLNINIPRDKKPRPRAQGSCAG

SEQ ID NO: 894574 - protein, 440 aa, Homo sapiens
NRLVRGRVLNRPRLVCGASAVKLNKQQTDIAVNWAGGLHHAKKSEASGFCYVNDIVLAILELLKYHQRVLYIDIDIHHGDGVEEAFYTTDRVMTVSFHKYGEYFPGTGDLRDIGAGKGKYYAVNYPLRDGIDDESYEAIFKPVMSKVMEMFQPSAVVLQCGSDSLSGDRLGCFNLTIKGHAKCVEFVKSFNLPMLMLGGGGYTIRNVARCWTYETAVALDTEIPNELPYNDYFEYFGPDFKLHISPSNMTNQNTNEYLEKIKQRLFENLRMLPHAPARFKCRRFLRTPSLRRVAMRTKTTLTRRISICSSDKRIACEEEFSDSEEEGEGGRKGTLPTSKKPRESKQRMKKRKTQRRRKKSPKEEKTKEEKPEAKGGQGGGQVGLNGPLQLWLPAESLTFLPQPLRFYIFYFSVYLYKNLLNINIPRDKKPRPRAQGSCAG

SEQ ID NO: 894575 - protein, 420 aa, Homo sapiens
MAQTQGTRRKVCYYYDGDVGNYYYGQGHPMKPHRIRMTHNLLLNYGLYRKMEIYRPHKANAEEMTKYHSDDYIKFLRSIRPDNMSEYSKQMQRFNVGEDCPVFDGLFEFCQLSTGGSVASAVKLNKQQTDIAVNWAGGLHHAKKSEASGFCYVNDIVLAILELLKYHQRVLYIDIDIHHGDGVEEAFYTTDRVMTVSFHKYGEYFPGTGDLRDIGAGKDFKLHISPSNMTNQNTNEYLEKIKQRLFENLRMLPHAPARFKCRRFLRTPSLRRVAMRTKTTLTRRISICSSDKRIACEEEFSDSEEEGEGGRKGTLPTSKKPRESKQRMKKRKTQRRRKKSPKEEKTKEEKPEAKGGQGGGQVGLNGPLQLWLPAESLTFLPQPLRFYIFYFSVYLYKNLLNINIPRDKKPRPRAQGSCAG

SEQ ID NO: 894576 - protein, 384 aa, Homo sapiens
NRLVRGRVLNRPRLVCGIDIHHGDGVEEAFYTTDRVMTVSFHKYGEYFPGTGDLRDIGAGKGKYYAVNYPLRDGIDDESYEAIFKPVMSKVMEMFQPSAVVLQCGSDSLSGDRLGCFNLTIKGHAKCVEFVKSFNLPMLMLGGGGYTIRNVARCWTYETAVALDTEIPNELPYNDYFEYFGPDFKLHISPSNMTNQNTNEYLEKIKQRLFENLRMLPHAPARFKCRRFLRTPSLRRVAMRTKTTLTRRISICSSDKRIACEEEFSDSEEEGEGGRKGTLPTSKKPRESKQRMKKRKTQRRRKKSPKEEKTKEEKPEAKGGQGGGQVGLNGPLQLWLPAESLTFLPQPLRFYIFYFSVYLYKNLLNINIPRDKKPRPRAQGSCAG

SEQ ID NO: 894577 - protein, 297 aa, Homo sapiens
MSKVMEMFQPSAVVLQCGSDSLSGDRLGCFNLTIKGHAKCVEFVKSFNLPMLMLGGGGYTIRNVARCWTYETAVALDTEIPNELPYNDYFEYFGPDFKLHISPSNMTNQNTNEYLEKIKQRLFENLRMLPHAPARFKCRRFLRTPSLRRVAMRTKTTLTRRISICSSDKRIACEEEFSDSEEEGEGGRKGTLPTSKKPRESKQRMKKRKTQRRRKKSPKEEKTKEEKPEAKGGQGGGQVGLNGPLQLWLPAESLTFLPQPLRFYIFYFSVYLYKNLLNINIPRDKKPRPRAQGSCAG

SEQ ID NO: 894578 - protein, 241 aa, Homo sapiens
NRLVRGRVLNRPRLVCGCGLDTEIPNELPYNDYFEYFGPDFKLHISPSNMTNQNTNEYLEKIKQRLFENLRMLPHAPARFKCRRFLRTPSLRRVAMRTKTTLTRRISICSSDKRIACEEEFSDSEEEGEGGRKGTLPTSKKPRESKQRMKKRKTQRRRKKSPKEEKTKEEKPEAKGGQGGGQVGLNGPLQLWLPAESLTFLPQPLRFYIFYFSVYLYKNLLNINIPRDKKPRPRAQGSCAG

SEQ ID NO: 894579 - protein, 178 aa, Homo sapiens; identical to SEQ ID NO: 894562

SEQ ID NO: 894580 - protein, 412 aa, Homo sapiens
MAQTQGTRRKVCYYYDGDVGNYYYGQGHPMKPHRIRMTHNLLLNYGLYRKMEIYRPHKANAEEMTKYHSDDYIKFLRSIRPDNMSEYSKQMQRFNVGEDCPVFDGLFEFCQLSTGGSVASAVKLNKQQTDIAVNWAGGLHHAKKSEASGFCYVNDIVLAILELLKYHQRVLYIDIDIHHGDGVEEAFYTTDRVMTVSFHKYGEYFPGTGDLRDIGAGKGKYYAVNYPLRDGIDDESYEAIFKPVMSKVMEMFQPSAVVLQCGSDSLSGDRLGCFNLTIKGHAKCVEFVKSFNLPMLMLGGGGYTIRNVARCWTYETAVALDTEIPNELPYNDYFEYFGPDFKLHISPSNMTNQNTNEYLEKIKQRLFENLRMLPHAPARFKCRRFLRTPSLRRVAMRTKTTLTRRISSETQT

SEQ ID NO: 894581 - protein, 550 aa, Homo sapiens
MAQTQGTRRKVCYYYDGDVGNYYYGQGHPMKPHRIRMTHNLLLNYGLYRKMEIYRPHKANAEEMTKYHSDDYIKFLRSIRPDNMSEYSKQMQRFNVGEDCPVFDGLFEFCQLSTGGSVASAVKLNKQQTDIAVNWAGGLHHAKKSEASGFCYVNDIVLAILELLKYHQRVLYIDIDIHHGDGVEEAFYTTDRVMTVSFHKYGEYFPGTGDLRDIGAGKGKYYAVNYPLRDGIDDESYEAIFKPVMSKVMEMFQPSAVVLQCGSDSLSGDRLGCFNLTIKGHAKCVEFVKSFNLPMLMLGGGGYTIRNVARCWTYETAVALDTEIPNELPYNDYFEYFGPDFKLHISPSNMTNQNTNEYLEKIKQRLFENLRMLPHAPARFKCRRFLRTPSLRRVAMRTKTTLTRRISICSSDKRIACEEEFSDSEEEGEGGRKGTLPTSKKPRESKQRMKKRKTQRRRKKSPKEEKTKEEKPEAKGGQGGGQVGLNGPLQLWLPAESLTFLPQPLRFYIFYFSVYLYKAAVLGELFQEPPCHPFFPFLTLKPTIKGARSG

SEQ ID NO: 894582 - protein, 175 aa, Homo sapiens
GLTLEDPHAAPARFKCRRFLRTPSLRRVAMRTKTTLTRRISICSSDKRIACEEEFSDSEEEGEGGRKGTLPTSKKPRESKQRMKKRKTQRRRKKSPKEEKTKEEKPEAKGGQGGGQVGLNGPLQLWLPAESLTFLPQPLRFYIFYFSVYLYKNLLNINIPRDKKPRPRAQGSCAG

SEQ ID NO: 894583 - protein, 524 aa, Homo sapiens
MAQTQGTRRKVCYYYDGDVGNYYYGQGHPMKPHRIRMTHNLLLNYGLYRKMEIYRPHKANAEEMTKYHSDDYIKFLRSIRPDNMSEYSKQMQRFNVGEDCPVFDGLFEFCQLSTGGSVASAVKLNKQQTDIAVNWAGGLHHAKKSEASGFCYVNDIVLAILELLKYHQRVLYIDIDIHHGDGVEEAFYTTDRVMTVSFHKYGEYFPGTGDLRDIGAGKGKYYAVNYPLRDGIDDESYEAIFKPVMSKVMEMFQPSAVVLQCGSDSLSGDRLGCFNLTIKGHAKCVEFVKSFNLPMLMLGGGGYTIRNVARCWTYETAVALDTEIPNELPYNDYFEYFGPDFKLHISPSNMTNQNTNEYLEKIKQRLFENLRMLPHAPARFKCRRFLRTPSLRRVAMRTKTTLTRRISICSSDKRIACEEEFSDSEEEGEGGRKGTLPTSKKPRESKQRMKKRKTQRRRKGQGGGQVGLNGPLQLWLPAESLTFLPQPLRFYIFYFSVYLYKNLLNINIPRDQKPRPRAQGSCAG

SEQ ID NO: 894584 - protein, 176 aa, Homo sapiens
MIRFELVPHAAPARFKCRRFLRTPSLRRVAMRTKTTLTRRISICSSDKRIACEEEFSDSEEEGEGGRKGTLPTSKKPRESKQRMKKRKTQRRRKKSPKEEKTKEEKPEAKGGQGGGQVGLNGPLQLWLPAESLTFLPQPLRFYIFYFSVYLYKNLLNINIPRDKKPRPRAQGSCAG

SEQ ID NO: 894585 - protein, 400 aa, Homo sapiens
MAQTQGTRRKVCYYYDGDVGNYYYGQGHPMKPHRIRMTHNLLLNYGLYRKMEIYRPHKANAEEMTKYHSDDYIKFLRSIRPDNMSEYSKQMQRFNVGEDCPVFDGLFEFCQLSTGGSVASAVKLNKQQTDIAVNWAGGLHHAKKSEASGFCYVNDIVLAILELLKYHQRVLYIDIDIHHGDGVEEAFYTTDRVMTVSFHKYGEYFPGTGDLRDIGAGKGKYYAVNYPLRDGIDDESYEAIFKPVMSKVMEMFQPSAVVLQCGSDSLSGDRLGCFNLTIKGHAKCVEFVKSFNLPMLMLGGGGYTIRNVARCWTYETAVALDTEIPNELPYNDYFEYFGPDFKLHISPSNMTNQNTNEYLEKIKQRLFENLRMLPHAPARFKCRRFLRTPSLRRVAGSCAG

SEQ ID NO: 894586 - protein, 483 aa, Homo sapiens
MAQTQGTRRKVCYYYDGDVGNYYYGQGHPMKPHRIRMTHNLLLNYGLYRKMEIYRPHKANAEEMTKYHSDDYIKFLRSIRPDNMSEYSKQMQRFNVGEDCPVFDGLFEFCQLSTGGSVASAVKLNKQQTDIAVNWAGGLHHAKKSEASGFCYVNDIVLAILELLKYHQRVLYIDIDIHHGDGVEEAFYTTDRVMTVSFHKYGEYFPGTGDLRDIGAGKGKYYAVNYPLRDGIDDESYEAIFKPVMSKVMEMFQPSAVVLQCGSDSLSGDRLGCFNLTIKGHAKCVEFVKSFNLPMLMLGGGGYTIRNVARCWTYETAVALDTEIPNELPYNDYFEYFGPDFKLHISPSNMTNQNTNEYLEKIKQRLFENLRMLPHAPARFKCRRFLRTPSLRRVAMRTKTTLTRRISICSSDKRIACEEEFSDSEEEGEGGRKGTLPTSKKPRESKQRMKKRKTQRRRKKSPKEEKTKEEKPEAKGVRKELPV

SEQ ID NO: 894587 - protein, 438 aa, Homo sapiens
MAQTQGTRRKVCYYYDGDVGNYYYGQGHPMKPHRIRMTHNLLLNYGLYRKMEIYRPHKANAEEMTKYHSDDYIKFLRSIRPDNMSEYSKQMQRFNVGEDCPVFDGLFEFCQLSTGGSVASAVKLNKQQTDIAVNWAGGLHHAKKSEASGFCYVNDIVLAILELLKYHQRVLYIDIDIHHGDGVEEAFYTTDRVMTVSFHKYGEYFPGTGDLRDIGAGKGKYYAVNYPLRDGIDDESYEAIFKPVMSKVMEMFQPSAVVLQCGSDSLSGDRLGCFNLTIKGHAKCVEFVKSFNLPMLMLGGGGYTIRNVARCWTYETAVALDTEIPNELPYNDYFEYFGPDFKLHISPSNMTNQNTNEYLEKIKQRLFENLRMLPHAPARFKCRRFLRTPSLRRVAMRTKTTLTRRISICSSDKRIACEEEQTPEMPSACLVALERCPY

SEQ ID NO: 894588 - protein, 408 aa, Homo sapiens
MAQTQGTRRKVCYYYDGDVGNYYYGQGHPMKPHRIRMTHNLLLNYGLYRKMEIYRPHKANAEEMTKYHSDDYIKFLRSIRPDNMSEYSKQMQRFNVGEDCPVFDGLFEFCQLSTGGSVASAVKLNKQQTDIAVNWAGGLHHAKKSEASGFCYVNDIVLAILELLKYHQRVLYIDIDIHHGDGVEEAFYTTDRVMTVSFHKYGEYFPGTGDLRDIGAGKGKYYAVNYPLRDGIDDESYEAIFKPVMSKVMEMFQPSAVVLQCGSDSLSGDRLGCFNLTIKGHAKCVEFVKSFNLPMLMLGGGGYTIRNVARCWTYETAVALDTEIPNELPYNDYFEYFGPDFKLHISPSNMTNQNTNEYLEKIKQRLFENLRMLPHAPARFKCRRFLRTPSLRRVAMRTKTTLTRRIST

SEQ ID NO: 894589 - protein, 403 aa, Homo sapiens
MAQTQGTRRKVCYYYDGDVGNYYYGQGHPMKPHRIRMTHNLLLNYGLYRKMEIYRPHKANAEEMTKYHSDDYIKFLRSIRPDNMSEYSKQMQRFNVGEDCPVFDGLFEFCQLSTGGSVASAVKLNKQQTDIAVNWAGGLHHAKKSEASGFCYVNDIVLAILELLKYHQRVLYIDIDIHHGDGVEEAFYTTDRVMTVSFHKYGEYFPGTGDLRDIGAGKGKYYAVNYPLRDGIDDESYEAIFKPVMSKVMEMFQPSAVVLQCGSDSLSGDRLGCFNLTIKGHAKCVEFVKSFNLPMLMLGGGGYTIRNVARCWTYETAVALDTEIPNELPYNDYFEYFGPDFKLHISPSNMTNQNTNEYLEKIKQRLFENLRMLPHAPARFKCRRFLRTPSLRRVADLLFFSGS

SEQ ID NO: 894590 - protein, 104 aa, Homo sapiens
ELGAPAPSSHLGSCGSHCLHFCPEALGWVISCQSLLSPQGQGGGQVGLNGPLQLWLPAESLTFLPQPLRFYIFYFSVYLYKNLLNINIPRDKKPRPRAQGSCAG

SEQ ID NO: 894591 - protein, 133 aa, Homo sapiens
MKKRKTQRRRKVGLGSAGTWVSRPERMNLCRAVGGGSDSGPASSCGALPQFLEPFSGSQKWQSPQNNEPLLPEHGSHIPPQPFSQHCTPVSQGAASAHQVLAVAGWETSPTCSQQGSLGGPGMGFSLFMSSEL

SEQ ID NO: 894592 - protein, 1393 aa, Homo sapiens
MLSRPKPGESEVDLLHFQSQFLAAGAAPAVQLVKKGNRGGGDANSDRPPLQDHRDVVMLDNLPDLPPALVPSPPKRARPSPGHCLPEDEDPEERLRRHDQHITAVLTKIIERDTSSVAVNLPVPSGVAFPAVFLRSRDTQGKSATSGKRSIFAQEIAARRIAEAKGPSVGEVVPNVGPPEGAVTCETPTPRNQGCQLPGSSHSFQGPNLVTGKGLRDQEAEQEAQTIHEENIARLQAMAPEEILQEQQRLLAQLDPSLVAFLRSHSHTQEQTGETASEEQRPGGPSANVTKEEPLMSAFASEPRKRDKLEPEAPALALPVTPQKEWLHMDTVELEKLHWTQDLPPVRRQQTQERMQARFSLQGELLAPDVDLPTHLGLHHHGEEAERAGYSLQELFHLTRSQVSQQRALALHVLAQVISRAQAGEFGDRLAGSVLSLLLDAGFLFLLRFSLDDRVDGVIATAIRALRALLVAPGDEELLDSTFSWYHGALTFPLMPSQEDKEDEDKDEECPAGKAKRKSPEEESRPPPDLARHDVIKGLLATSLLPRLRYVLEVTYPGPAVVLDILAVLIRLARHSLESATRVLECPRLIETIVREFLPTSWSPVGAGPTPSLYKVPCATAMKLLRVLASAGRNIAARLLSSFDLRSRLCRIIAEAPQELALPPEEAEMLSTEALRLWAVAASYGQGGYLYRELYPVLMRALQVVPRELSTHPPQPLSMQRIASLLTLLTQLTLAAGSTPAETISDSAEASLSATPSLVTWTQVSGLQPLVEPCLRQTLKLLSRPEMWRAVGPVPVACLLFLGAYYQAWSQQPSSCPEDWLQDMERLSEELLLPLLSQPTLGSLWDSLRHCSLLCNPLSCVPALEAPPSLVSLGCSGGCPRLSLAGSASPFPFLTALLSLLNTLAQIHKGLCGQLAAILAAPGLQNYFLQCVAPGAAPHLTPFSAWALRHEYHLQYLALALAQKAAALQPLPATHAALYHGMALALLSRLLPGSEYLTHELLLSCVFRLEFLPERTSGGPEAADFSDQLSLGSSRVPRCGQGTLLAQACQDLPSIRNCYLTHCSPARASLLASQALHRGELQRVPTLLLPMPTEPLLPTDWPFLPLIRLYHRASDTPSGLSPTDTMGTAMRVLQWVLVLESWRPQALWAVPPAARLARLMCVFLVDSELFRESPVQHLVAALLAQLCQPQVLPNLNLDCRLPGLTSFPDLYANFLDHFEAVSFGDHLFGALVLLPLQRRFSVTLRLALFGEHVGALRALSLPLTQLPVSLECYTVPPEDNLALLQLYFRTLVTGALRPRWCPVLYAVAVAHVNSFIFSQDPQSSDEVKAARRSMLQKTWLLADEGLRQHLLHYKLPNSTLPEGFELYSQLPPLRQHYLQRLTSTVLQNGVSET

SEQ ID NO: 894593 - protein, 1315 aa, Homo sapiens [sequence omitted]

SEQ ID NO: 894594 - protein, 1393 aa, Homo sapiens; identical to SEQ ID NO: 894592

SEQ ID NO: 894595 - protein, 725 aa, Homo sapiens
MLSTEALRLWAVAASYGQGGYLYRELYPVLMRALQVVPRELSTHPPQPLSMQRIASLLTLLTQLTLAAGSTPAETISDSAEASLSATPSLVTWTQVSGLQPLVEPCLRQTLKLLSRPEMWRAVGPVPVACLLFLGAYYQAWSQQPSSCPEDWLQDMERLSEELLLPLLSQPTLGSLWDSLRHCSLLCNPLSCVPALEAPPSLVSLGCSGGCPRLSLAGSASPFPFLTALLSLLNTLAQIHKGLCGQLAAILAAPGLQNYFLQCVAPGAAPHLTPFSAWALRHEYHLQYLALALAQKAAALQPLPATHAALYHGMALALLSRLLPGSEYLTHELLLSCVFRLEFLPERTSGGPEAADFSDQLSLGSSRVPRCGQGTLLAQACQDLPSIRNCYLTHCSPARASLLASQALHRGELQRVPTLLLPMPTEPLLPTDWPFLPLIRLYHRASDTPSGLSPTDTMGTAMRVLQWVLVLESWRPQALWAVPPAARLARLMCVFLVDSELFRESPVQHLVAALLAQLCQPQVLPNLNLDCRLPGLTSFPDLYANFLDHFEAVSFGDHLFGALVLLPLQRRFSVTLRLALFGEHVGALRALSLPLTQLPVSLECYTVPPEDNLALLQLYFRTLVTGALRPRWCPVLYAVAVAHVNSFIFSQDPQSSDEVKAARRSMLQKTWLLADEGLRQHLLHYKLPNSTLPEGFELYSQLPPLRQHYLQRLTSTVLQNGVSET

SEQ ID NO: 894596 - protein, 1375 aa, Homo sapiens
MLSRPKPGESEVDLLHFQSQFLAAGAAPAVQLVKKGNRGGGDANSDRPPLQDHRDVVMLDNLPDLPPALVPSPPKRARPSPGHCLPEDEDPEERLRRHDQHITAVLTKIIERDTSSVAVNLPVPSGVAFPAVFLRSRDTQGKSATSGKRSIFAQEIAARRIAEAKGPSVGEVVPNVGPPEGAVTCETPTPRNQGCQLPGSSHSFQGPNLVTGKGLRDQEAEQEAQTIHEENIARLQAMAPEEILQEQQRLLAQLDPSLVAFLRSHSHTQEQTGETASEEQRPGGPSANVTKEEPLMSAFASEPRKRDKLEPEAPALALPVTPQKEWLHMDTVELEKLHWTQDLPPVRRQQTQERMQARFSLQGELLAPDVDLPTHLGLHHHGEEAERAGYSLQELFHLTRSQVSQQRALALHVLAQVISRAQAGEFGDRLAGSVLSLLLDAGFLFLLRFSLDDRVDGVIATAIRALRALLVAPGDEELLDSTFSWYHGALTFPLMPSQEDKEDEDKDEECPAGKAKRKSPEEESRPPPDLARHDVIKGLLATSLLPRLRYVLEVTYPGPAVVLDILAVLIRLARHSLESATRVLECPRLIETIVREFLPTSWSPVGAGPTPSLYKVPCATAMKLLRVLASAGRNIAARLLSSFDLRSRLCRIIAEAPQELALPPEEAEMLSTEALRLWAVAASYGQGGYLYRELYPVLMRALQVVPRELSTHPPQPLSMQRIASLLTLLTQLTLAAGSTPAETISDSAEASLSATPSLVTWTQVSGLQPLVEPCLRQTLKLLSRPEMWRAVGPVPVACLLFLGAYYQAWSQQPSSCPEDWLQDMERLSEELLLPLLSQPTLGSLWDSLRHCSLLCNPLSCVPALEAPPSLVSLGCSGGCPRLSLAGSASPFPFLTALLSLLNTLAQIHKGLCGQLAAILAAPGLQNYFLQCVAPGAAPHLTPFSAWALRHEYHLQYLALALAQKAAALQPLPATHAALYHGMALALLSRLLPGSEYLTHELLLSCVFRLEFLPERTSGGPEAADFSDQLSLGSSRVPRCGQGTLLAQACQDLPSIRNCYLTHCSPARASLLASQALHRGELQRVPTLLLPMPTEPLLPTDWPFLPLIRLYHRASDTPSGLSPTDTMGTAMRVLQWVLVLESWRPQALWAVPPAARLARLMCVFLVDSELFRESPVQHLVAALLAQLCQPQVLPNLNLDCRLPGLTSFPDLYANFLDHFEAVSFGDHLFGALVLLPLQRRFSVTLRLALFGEHVGALRALSLPLTQLPVSLECYTVPPEDNLALLQLYFRTLVTGALRPRWCPVLYAVAVAHVNSFIFSQDPQSSDEVKAARRSMLQLPNSTLPEGFELYSQLPPLRQHYLQRLTSTVLQNGVSET

SEQ ID NO: 894597 - protein, 173 aa, Homo sapiens
QLGWYEPGESAEALPIHRRFSVTLRLALFGEHVGALRALSLPLTQLPVSLECYTVPPEDNLALLQLYFRTLVTGALRPRWCPVLYAVAVAHVNSFIFSQDPQSSDEVKAARRSMLQKTWLLADEGLRQHLLHYKLPNSTLPEGFELYSQLPPLRQHYLQRLTSTVLQNGVSET

SEQ ID NO: 894598 - protein, 122 aa, Homo sapiens
RRSRGPITQLALLQLYFRTLVTGALRPRWCPVLYAVAVAHVNSFIFSQDPQSSDEVKAARRSMLQKTWLLADEGLRQHLLHYKLPNSTLPEGFELYSQLPPLRQHYLQRLTSTVLQNGVSET

SEQ ID NO: 894599 - protein, 772 aa, Homo sapiens
MKLLRVLASAGRNIAARLLSSFDLRSRLCRIIAEAPQELALPPEEAEMLSTEALRLWAVAASYGQGGYLYRELYPVLMRALQVVPRELSTHPPQPLSMQRIASLLTLLTQLTLAAGSTPAETISDSAEASLSATPSLVTWTQVSGLQPLVEPCLRQTLKLLSRPEMWRAVGPVPVACLLFLGAYYQAWSQQPSSCPEDWLQDMERLSEELLLPLLSQPTLGSLWDSLRHCSLLCNPLSCVPALEAPPSLVSLGCSGGCPRLSLAGSASPFPFLTALLSLLNTLAQIHKGLCGQLAAILAAPGLQNYFLQCVAPGAAPHLTPFSAWALRHEYHLQYLALALAQKAAALQPLPATHAALYHGMALALLSRLLPGSEYLTHELLLSCVFRLEFLPERTSGGPEAADFSDQLSLGSSRVPRCGQGTLLAQACQDLPSIRNCYLTHCSPARASLLASQALHRGELQRVPTLLLPMPTEPLLPTDWPFLPLIRLYHRASDTPSGLSPTDTMGTAMRVLQWVLVLESWRPQALWAVPPAARLARLMCVFLVDSELFRESPVQHLVAALLAQLCQPQVLPNLNLDCRLPGLTSFPDLYANFLDHFEAVSFGDHLFGALVLLPLQRRFSVTLRLALFGEHVGALRALSLPLTQLPVSLECYTVPPEDNLALLQLYFRTLVTGALRPRWCPVLYAVAVAHVNSFIFSQDPQSSDEVKAARRSMLQKTWLLADEGLRQHLLHYKLPNSTLPEGFELYSQLPPLRQHYLQRLTSTVLQNGVSET

SEQ ID NO: 894600 - protein, 1340 aa, Homo sapiens
MLSRPKPGESEVDLLHFQSQFLAAGAAPAVQLVKKGNRGGGDANSDRPPLQDHRDVVMLDNLPDLPPALVPSPPKRARPSPGHCLPEDEDPEERLRRHDQHITAVLTKIIERDTSSVAVNLPVPSGVAFPAVFLRSRDTQGKSATSGKRSIFAQEIAARRIAEAKGPSVGEVVPNVGPPEGAVTCETPTPRNQGCQLPGSSHSFQGPNLVTGKGLRDQEAEQEAQTIHEENIARLQAMAPEEILQEQQRLLAQLDPSLVAFLRSHSHTQEQTGETASEEQRPGGPSANVTKEEPLMSAFASEPRKRDKLEPEAPALALPVTPQKEWLHMDTVELEKLHWTQDLPPVRRQQTQERMQARFSLQGELLAPDVDLPTHLGLHHHGEEAERAGYSLQELFHLTRSQVSQQRALALHVLAQVISRAQAGEFGDRLAGSVLSLLLDAGFLFLLRFSLDDRVDGVIATAIRALRALLVAPGDEELLDSTFSWYHGALTFPLMPSQEDKEDEDKDEECPAGKAKRKSPEEESRPPPDLARHDVIKGLLATSLLPRLRYVLEVTYPGPAVVLDILAVLIRLARHSLESATRVLECPRLIETIVREFLPTSWSPVGAGPTPSLYKVPCATAMKLLRVLASAGRNIAARLLSSFDLRSRLCRIIAEAPQELALPPEEAEMLSTEALRLWAVAASYGQGGYLYRELYPVLMRALQVVPRELSTHPPQPLSMQRIASLLTLLTQLTLAAGSTPAETISDSAEASLSATPSLVTWTQVSGLQPLVEPCLRQTLKLLSRPEMWRAVGPVPVACLLFLGAYYQAWSQQPSSCPEDWLQDMERLSEELLLPLLSQPTLGSLWDSLRHCSLLCNPLSCVPALEAPPSLVSLGCSGGCPRLSLAGSASPFPFLTALLSLLNTLAQIHKGLCGQLAAILAAPGLQNYFLQCVAPGAAPHLTPFSAWALRHEYHLQYLALALAQKAAALQPLPATHAALYHGMALALLSRLLPGSEYLTHELLLSCVFRLEFLPERTSGGPEAADFSDQLSLGSSRVPRCGQGTLLAQACQDLPSIRNCYLTHCSPARASLLASQALHRGELQRVPTLLLPMPTEPLLPTDWPFLPLIRLYHRASDTPSGLSPTDTMGTAMRVLQWVLVLESWRPQALWAVPPAARLARLMCVFLVDSELFRESPVQHLVAALLAQLCQPQVLPNLNLDCRLPGLTSFPDLYANFLDHFEAVSFGDHLFGALVLLPLQRRFSVTLRLALFGEHVGALRALSLPLTQLPVSLECYTVPPEDNLALLQLYFRTLVTGALRPRWCPVLYAVAVAHVNSFIFSQDPQSSSVSYISIFRGRKGASN

SEQ ID NO: 894601 - protein, 1330 aa, Homo sapiens
MLSRPKPGESEVDLLHFQSQFLAAGAAPAVQLVKKGNRGGGDANSDRPPLQDHRDVVMLDNLPDLPPALVPSPPKRARPSPGHCLPEDEDPEERLRRHDQHITAVLTKIIERDTSSVAVNLPVPSGVAFPAVFLRSRDTQGKSATSGKRSIFAQEIAARRIAEAKGPSVGEVVPNVGPPEGAVTCETPTPRNQGCQLPGSSHSFQGPNLVTGKGLRDQEAEQEAQTIHEENIARLQAMAPEEILQEQQRLLAQLDPSLVAFLRSHSHTQEQTGETASEEQRPGGPSANVTKEEPLMSAFASEPRKRDKLEPEAPALALPVTPQKEWLHMDTVELEKLHWTQDLPPVRRQQTQERMQARFSLQGELLAPDVDLPTHLGLHHHGEEAERAGYSLQELFHLTRSQVSQQRALALHVLAQVISRAQAGEFGDRLAGSVLSLLLDAGFLFLLRFSLDDRVDGVIATAIRALRALLVAPGDEELLDSTFSWYHGALTFPLMPSQEDKEDEDKDEECPAGKAKRKSPEEESRPPPDLARHDVIKGLLATSLLPRLRYVLEVTYPGPAVVLDILAVLIRLARHSLESATRVLECPRLIETIVREFLPTSWSPVGAGPTPSLYKVPCATAMKLLRVLASAGRNIAARLLSSFDLRSRLCRIIAEAPQELALPPEEAEMLSTEALRLWAVAASYGQGGYLYRELYPVLMRALQVVPRELSTHPPQPLSMQRIASLLTLLTQLTLAAGSTPAETISDSAEASLSATPSLVTWTQVSGLQPLVEPCLRQTLKLLSRPEMWRAVGPVPVACLLFLGAYYQAWSQQPSSCPEDWLQDMERLSEELLLPLLSQPTLGSLWDSLRHCSLLCNPLSCVPALEAPPSLVSLGCSGGCPRLSLAGSASPFPFLTALLSLLNTLAQIHKGLCGQLAAILAAPGLQNYFLQCVAPGAAPHLTPFSAWALRHEYHLQYLALALAQKAAALQPLPATHAALYHGMALALLSRLLPGSEYLTHELLLSCVFRLEFLPERTSGGPEAADFSDQLSLGSSRVPRCGQGTLLAQACQDLPSIRNCYLTHCSPARASLLASQALHRGELQRVPTLLLPMPTEPLLPTDWPFLPLIRLYHRASDTPSGLSPTDTMGTAMRVLQWVLVLESWRPQALWAVPPAARLARLMCVFLVDSELFRESPVQHLVAALLAQLCQPQVLPNLNLDCRLPGLTSFPDLYANFLDHFEAVSFGDHLFGALVLLPLQRRFSVTLRLALFGEHVGALRALSLPLTQLPVSLECYTVPPEDNLALLQLYFRTLVTGALRPRWCPVLYAVAVAHVNSFIFSQDPQSSGIRDLG

SEQ ID NO: 894602 - protein, 106 aa, Homo sapiens
MIWFHVIVIHTPYVCIYIPTLPLSTSFPLSQLPVSLECYTVPPEDNLALLQLYFRTLVTGALRPRWCPVLYAVAVAHVNSFIFSQDPQSSSVSYISIFRGRKGASN

SEQ ID NO: 894603 - protein, 207 aa, Homo sapiens
MYSAPSACTCLCLHFLLLCFQVQVLVAEENVDFRIHVENQTRARDDVSRKQLRLYQLYSRTSGKHIQVLGRRISARGEDGDKYAQLLVETDTFGSQVRIKGKETEFYLCMNRKGKLVGKPDGTSKECVFIEKVLENNYTALMSAKYSGWYVGFTKKGRPRKGPKTRENQQDVHFMKRYPKGQPELQKPFKYTTVTKRSRRIRPTHPA

SEQ ID NO: 894604 - protein, 207 aa, Homo sapiens; identical to SEQ ID NO: 894603

SEQ ID NO: 894605 - protein, 170 aa, Homo sapiens
NFFSFPSPLLEFFKFKGFGSLSNLPRSFTLRRSSASISRQSHLEPDTFEATQDDMVTVPKSPPAYARSSDMYSHMGTMPRPSIKKAQNSQAARQAQEAGPKPNLVPGGVPDPPGLEAAKEVMVKATGPLEDTPAMEPNPSAVEVDPIRKPEVPTGDVEEERPPRDVHSER

SEQ ID NO: 894606 - protein, 703 aa, Homo sapiens
MTAVGRRCPALGSRGAAGEPEAGSDYVKFSKEKYILDSSPEKLHKELEEELKLSSTDLRSHAWYHGRIPREVSETLVQRNGDFLIRDSLTSLGDYVLTCRWRNQALHFKINKVVVKAGESYTHIQYLFEQESFDHVPALVRYHVGSRKAVSEQSGAIIYCPVNRTFPLRYLEASYGLGQGSSKPASPVSPSGPKGSHMKRRSVTMTDGLTADKVTRSDGCPTSTSLPRPRDSIRSCALSMDQIPDLHSPMSPISESPSSPAYSTVTRVHAAPAAPSATALPASPVARRSSEPQLCPGSAPKTHGESDKGPHTSPSHTLGKASPSPSLSSYSDPDSGHYCQLQPPVRGSREWAATETSSQQARSYGERLKELSENGAPEGDWGKTFTVPIVEVTSSFNPATFQSLLIPRDNRPLEVGLLRKVKELLAEVDARTLARHVTKVDCLVARILGVTKEMQTLMGVRWGMELLTLPHGRQLRLDLLERFHTMSIMLAVDILGCTGSAEERAALLHKTIQLAAELRGTMGNMFSFAAVMGALDMAQISRLEQTWVTLRQRHTEGAILYEKKLKPFLKSLNEGKEGPPLSNTTFPHVLPLITLLECDSAPPEGPEPWGSTEHGVEVVLAHLEAARTVAHHGGLYHTNAEVKLQGFQARPELLEVFSTEFQMRLLWGSQGASSSQARRYEKFDKVLTALSHKLEPAVRSSEL

SEQ ID NO: 894607 - protein, 860 aa, Homo sapiens
MTEGTKKTSKKFKFFKFKGFGSLSNLPRSFTLRRSSASISRQSHLEPDTFEATQDDMVTVPKSPPAYARSSDMYSHMGTMPRPSIKKAQNSQAARQAQEAGPKPNLVPGGVPDPPGLEAAKEVMVKATGPLEDTPAMEPNPSAVEVDPIRKPEVPTGDVEEERPPRDVHSERAAGEPEAGSDYVKFSKEKYILDSSPEKLHKELEEELKLSSTDLRSHAWYHGRIPREVSETLVQRNGDFLIRDSLTSLGDYVLTCRWRNQALHFKINKVVVKAGESYTHIQYLFEQESFDHVPALVRYHVGSRKAVSEQSGAIIYCPVNRTFPLRYLEASYGLGQGSSKPASPVSPSGPKGSHMKRRSVTMTDGLTADKVTRSDGCPTSTSLPRPRDSIRSCALSMDQIPDLHSPMSPISESPSSPAYSTVTRVHAAPAAPSATALPASPVARRSSEPQLCPGSAPKTHGESDKGPHTSPSHTLGKASPSPSLSSYSDPDSGHYCQLQPPVRGSREWAATETSSQQARSYGERLKELSENGAPEGDWGKTFTVPIVEVTSSFNPATFQSLLIPRDNRPLEVGLLRKVKELLAEVDARTLARHVTKVDCLVARILGVTKEMQTLMGVRWGMELLTLPHGRQLRLDLLERFHTMSIMLAVDILGCTGSAEERAALLHKTIQLAAELRGTMGNMFSFAAVMGALDMAQISRLEQTWVTLRQRHTEGAILYEKKLKPFLKSLNEGKEGPPLSNTTFPHVLPLITLLECDSAPPEGPEPWGSTEHGVEVVLAHLEAARTVAHHGGLYHTNAEVKLQGFQARPELLEVFSTEFQMRLLWGSQGASSSQARRYEKFDKVLTALSHKLEPAVRSSEL

SEQ ID NO: 894608 - protein, 482 aa, Homo sapiens
MTAVGRRCPALGSRGAAGEPEAGSDYVKFSKEKYILDSSPEKLHKELEEELKLSSTDLRSHAWYHGRIPREVSETLVQRNGDFLIRDSLTSLGDYVLTCRWRNQALHFKINKVVVKAGESYTHIQYLFEQESFDHVPALVRYHVGSRKAVSEQSGAIIYCPVNRTFPLRYLEASYGLGQGSSKPASPVSPSGPKGSHMKRRSVTMTDGLTADKVTRSDGCPTSTSLPRPRDSIRSCALSMDQIPDLHSPMSPISESPSSPAYSTVTRVHAAPAAPSATALPASPVARRSSEPQLCPGSAPKTHGESDKGPHTSPSHTLGKASPSPSLSSYSDPDSGHYCQLQPPVRGSREWAATETSSQQARSYGERLKELSENGAPEGDWGKTFTVPIVEVTSSFNPATFQSLLIPRDNRPLEVGLLRKVKELLAEVDARTLARHVTKVDCLVARILGVTKEMQTLMGVRWGMELLTLPHGRQLRLDLLER

SEQ ID NO: 894609 - protein, 703 aa, Homo sapiens; identical to SEQ ID NO: 894606

SEQ ID NO: 894610 - protein, 692 aa, Homo sapiens [sequence omitted]

SEQ ID NO: 894611 - protein, 326 aa, Homo sapiens
HVTMWTAWLLGYGRYQGDADPNGSPLGHGTAHPPPLEVGLLRKVKELLAEVDARTLARHVTKVDCLVARILGVTKEMQTLMGVRWGMELLTLPHGRQLRLDLLERFHTMSIMLAVDILGCTGSAEERAALLHKTIQLAAELRGTMGNMFSFAAVMGALDMAQISRLEQTWVTLRQRHTEGAILYEKKLKPFLKSLNEGKEGPPLSNTTFPHVLPLITLLECDSAPPEGPEPWGSTEHGVEVVLAHLEAARTVAHHGGLYHTNAEVKLQGFQARPELLEVFSTEFQMRLLWGSQGASSSQARRYEKFDKVLTALSHKLEPAVRSSEL

SEQ ID NO: 894612 - protein, 65 aa, Homo sapiens
MSIMLAVDILGCTGSAEERAALLHKTIQLAAELRGTMGNMFSFAAVMGALDMAQVLRAAQSWHPV

SEQ ID NO: 894613 - protein, 410 aa, Homo sapiens
MQRLLFPPLRALKGRQYLPLLAPRAAPRAQCDCIRRPLRPGQYSTISEVALQSGRGTVSLPSKAAERVVGRWLLVCSGTVAGAVILGGVTRLTESGLSMVDWHLIKEMKPPTSQEEWEAEFQRYQQFPEFKILNHDMTLTEFKFIWYMEYSHRMWGRLVGLVYILPAAYFWRKGWLSRGMKGRVLALCGLVCFQGLLGWYMVKSGLEEKSDSHDIPRVSQYRLAAHLGSALVLYCASLWTSLSLLLPPHKLPETHQLLQLRRFAHGTAGLVFLTALSGAFVAGLDAGLVYNSFPKMGESWIPEDLFTFSPILRNVFENPTMVQFDHRILGITSVTAITVLYFLSRRIPLPRRTKMAAVTLLALAYTQVGLGISTLLMYVPTPLAATHQSGSLALLTGALWLMNELRRVPK

SEQ ID NO: 894614 - protein, 388 aa, Homo sapiens [sequence omitted]

SEQ ID NO: 894615 - protein, 410 aa, Homo sapiens; identical to SEQ ID NO: 894613

SEQ ID NO: 894616 - protein, 410 aa, Homo sapiens; identical to SEQ ID NO: 894613

SEQ ID NO: 894617 - protein, 410 aa, Homo sapiens; identical to SEQ ID NO: 894613

SEQ ID NO: 894618 - protein, 410 aa, Homo sapiens; identical to SEQ ID NO: 894613

SEQ ID NO: 894619 - protein, 312 aa, Homo sapiens
MVDWHLIKEMKPPTSQEEWEAEFQRYQQFPEFKILNHDMTLTEFKFIWYMEYSHRMWGRLVGLVYILPAAYFWRKGWLSRGMKGRVLALCGLVCFQGLLGWYMVKSGLEEKSDSHDIPRVSQYRLAAHLGSALVLYCASLWTSLSLLLPPHKLPETHQLLQLRRFAHGTAGLVFLTALSGAFVAGLDAGLVYNSFPKMGESWIPEDLFTFSPILRNVFENPTMVQFDHRILGITSVTAITVLYFLSRRIPLPRRTKMAAVTLLALAYTQVGLGISTLLMYVPTPLAATHQSGSLALLTGALWLMNELRRVPK

SEQ ID NO: 894620 - protein, 253 aa, Homo sapiens
MQRLLFPPLRALKGRQYLPLLAPRAAPRAQCDCIRRPLRPGQYSTISEVALQSGRGTVSLPSKAAERVVGRWPLVLYCASLWTSLSLLLPPHKLPETHQLLQLRRFAHGTAGLVFLTALSGAFVAGLDAGLVYNSFPKMGESWIPEDLFTFSPILRNVFENPTMVQFDHRILGITSVTAITVLYFLSRRIPLPRRTKMAAVTLLALAYTQVGLGISTLLMYVPTPLAATHQSGSLALLTGALWLMNELRRVPK

SEQ ID NO: 894621 - protein, 368 aa, Homo sapiens
MQRLLFPPLRALKGRQYLPLLAPRAAPRAQCDCIRRPLRPGQYSTISEVALQSGRGTVSLPSKAAERVVGRWLLVCSGTVAGAVILGGVTRLTESGLSMVDWHLIKEMKPPTSQEEWEAEFQRYQQFPEFKILNHDMTLTEFKFIWYMEYSHRMWGRLVGLVYILPAAYFWRKGWLSRGMKGRVLALCGLVCFQGLLGWYMVKSGLEEKSDSHDIPRVSQYRLAAHLGSALVLYCASLWTSLSLLLPPHKLPETHQLLQLRRFAHGTAGLVFLTALSGAFVAGLDAGLVYNSFPKMGESWIPEDLFTFSPILRNVFENPTMVQFDHRILGITSVTAITVLYFLSRRIPLPRRTKMAAVTLLALAYTQV

SEQ ID NO: 894622 - protein, 311 aa, Homo sapiens
MQRLLFPPLRALKGRQYLPLLAPRAAPRAQCDCIRRPLRPGQYSTISEVALQSGRGTVSLPSKAAERVVGRWLLVCSGTVAGAVILGGVTRLTESGLSMVDWHLIKEMKPPTSQEEWEAEFQRYQQFPEFKILNHDMTLTEFKFIWYMEYSHRMWGRLVGLVYILPAAYFWRKGWLSRGMKGRVLALCGLVCFQGLLGWYMVKSGLEEKSDSHDIPRVSQYRLAAHLGSALVLYCASLWTSLSLLLPPHKLPETHQLLQLRRFAHGTAGLVFLTALSGAFVAGLMLGKVILPNHTLENVQKKFLVHTSLVS

SEQ ID NO: 894623 - protein, 189 aa, Homo sapiens
MQRLLFPPLRALKGRQYLPLLAPRAAPRAQCDCIRRPLRPGQYSTISEVALQSGRGTVSLPSKAAERVVGRWLLVCSGTVAGAVILGGVTRLTESGLSMVDWHLIKEMKPPTSQEEWEAEFQRYQQFPEFKILNHDMTLTGIKFVVLADPRQAGIDSLLRKIYEIYSDFALKNPFYSLEMPIRCELQTR

SEQ ID NO: 894624 - protein, 343 aa, Homo sapiens
GSLSRGAETRQPAFAMKRPKEPSGSDGESDGPIDVGQEGQLSQMARPLSTPSSSQMQARKKRRGIIEKRRRDRINSSLSELRRLVPTAFEKQGSSKLEKAEVLQMTVDHLKMLHATGGTGFFDARALAVDFRSIGFRECLTEVIRYLGVLEGPSSRADPVRIRLLSHLNSYAAEMEPSPTPTGPLAFPAWPWSFFHSCPGLPALSNQLAILGRVPSPVLPGVSSPAYPIPALRTAPLRRATGIILPARRNVLPSRGASSTRRARPLERPATPVPVAPSSRAARSSHIAPLLQSSSPTPPGPTGSAAYVAVPTPNSSSPGPAGRPAGAMLYHSWVSEITEIGAF

SEQ ID NO: 894625 - protein, 135 aa, Homo sapiens
GSLSRGAETRQPAFAMKRPKEPSGSDGESDGPIDVGQEGQLSQMARPLSTPSSSQMQARKKRRGIIEKRRRDRINSSLSELRRLVPTAFEKQGSSKLEKAEVLQMTVDHLKMLHATGGTGTHALLFQASFIQQIF

SEQ ID NO: 894626 - protein, 204 aa, Homo sapiens
GSLSRGAETRQPAFAMKRPKEPSGSDGESDGPIDVGQEGQLSQMARPLSTPSSSQMQSCPGLPALSNQLAILGRVPSPVLPGVSSPAYPIPALRTAPLRRATGIILPARRNVLPSRGASSTRRARPLERPATPVPVAPSSRAARSSHIAPLLQSSSPTPPGPTGSAAYVAVPTPNSSSPGPAGRPAGAMLYHSWVSEITEIGAF

SEQ ID NO: 894627 - protein, 343 aa, Homo sapiens; identical to SEQ ID NO: 894624

SEQ ID NO: 894628 - protein, 121 aa, Homo sapiens
GSLSRGAETRQPAFAMKRPKEPSGSDGESDGPIDVGQEGQLSQMARPLSTPSSSQMQARKKRRGIIEKRRRDRINSSLSELRRLVPTAFEKQGSSKLEKAEVLQMTVDHLKMLHATGGTDR

SEQ ID NO: 894629 - protein, 264 aa, Homo sapiens
  misc_feature (256)..(256): Xaa can be any naturally occurring amino acid
  misc_feature (258)..(258): Xaa can be any naturally occurring amino acid
MPVARSWVCRKTYVTPRRPFEKSRLDQELKLIGEYGLRNKREVWRVKFTLAKIRKGQPGKLLTLDEKDPRRSVRRQTPCCGGLVRIFGVLDEGKDEAGLHPGGLKIRGFLRRDALQDPGLSKLGLAKVQSKPRSRALIPPAPYQGPQAGGEHPRPSFVLPWDSQKHIDFSLAHASPYGGFGRPGRVKRKNAKKGPGLGLGAGDDRRQEGFKSTLSLPGGCWDCPRFSPGPKLNQGIRRFYKKTKNLSIPQSSIHTXAXYDCVMR

SEQ ID NO: 894630 - protein, 194 aa, Homo sapiens [sequence omitted]

SEQ ID NO: 894631 - protein, 254 aa, Homo sapiens
MPVARSWVCRKTYVTPRRPFEKSRLDQELKLIGEYGLRNKREVWRVKFTLAKIRKGQPGKLLTLDEKDPRRSVRRQTPCCGGLVRIFGVLDEGKDEAGLHPGGLKIRGFLRRDALQDPGLSKLGLAKVQSKPRSRALIPPAPYQGPQAGGEHPRPSFVLPWDSQKHIDFSLAHASPYGGFGRPGRVKRKNAKKGPGLGLGAGDDRRQEGFKSTLSLPGGCWDCPRFSPGPKLNQGIRRFYKKKKQKGGAPKRTP

SEQ ID NO: 894632 - protein, 194 aa, Homo sapiens [sequence omitted]

SEQ ID NO: 894633 - protein, 278 aa, Homo sapiens
MPVARSWVCRKTYVTPRRPFEKSRLDQELKLIGEYGLRNKREVWRVKFTLAKIRKGQPGKLLTLDEKDPRRSVRRQTPCCGGLVRIFGVLDEGKDEAGLHPGGLKIRGFLRRDALQDPGLSKLGLAKVQSKPRSRALIPPAPYQGPQAGGEHPRPSFVLPWDSQKHIDFSLAHASPYGGFGRPGRVKRKNAKKGPGLGLGAGDDRRQEGFKSTLSLPGGCWDCPRFSPGPKLNQGIRRFYNRKTKTKKSKKDSRQKKAENRGGAKKNPEGGQKGPPHF

SEQ ID NO: 894634 - protein, 247 aa, Homo sapiens
MPVARSWVCRKTYVTPRRPFEKSRLDQELKLIGEYGLRNKREVWRVKFTLAKIRKGQPGKLLTLDEKDPRRSVRRQTPCCGGLVRIFGVLDEGKDEAGLHPGGLKIRGFLRRDALQDPGLSKLGLAKVQSKPRSRALIPPAPYQGPQAGGEHPRPSFVLPWDSQKHIDFSLAHASPYGGFGRPGRVKRKNAKKGPGLGLGAGDDRRQEGFKSTLSLPGGCWDCPRFSPGPKLNQGIRRFYKKKNTHN

SEQ ID NO: 894635 - protein, 375 aa, Homo sapiens
MPVARSWVCRKTYVTPRRPFEKSRLDQELKLIGEYGLRNKREVWRVKFTLAKIRKGQPGKLLTLDEKDPRRSVRRQTPCCGGLVRIFGVLDEGKDEAGLHPGGLKIRGFLRRDALQDPGLSKLGLAKVQSKPRSRALIPPAPYQGPQAGGEHPRPSFVLPWDSQKHIDFSLAHASPYGGFGRPGRVKRKNAKKGPGLGLGAGDDRRQEGFKSTLSLPGGCWDCPRFSPGPKLNQGIRRFYKKTINFKKNFGENYSGGRKTRDKMGTGQKGLPRTQILVHQGGHITGNTTTSGGPQKIGEETRGTRRREKKGMRHPKYQNSTMQTEEDPTEQINKNRQREQQKTSKQRPIKSATDKKKLKTNEAHEETNGREEETD

SEQ ID NO: 894636 - protein, 293 aa, Homo sapiens
MPVARSWVCRKTYVTPRRPFEKSRLDQELKLIGEYGLRNKREVWRVKFTLAKIRKGQPGKLLTLDEKDPRRSVRRQTPCCGGLVRIFGVLDEGKDEAGLHPGGLKIRGFLRRDALQDPGLSKLGLAKVQSKPRSRALIPPAPYQGPQAGGEHPRPSFVLPWDSQKHIDFSLAHASPYGGFGRPGRVKRKNAKKGPGLGLGAGDDRRQEGFKSTLSLPGGCWDCPRFSPGPKLNQGIRRFYKKKKKEETKTKKHKQNKGGAKKTRGAHYRRTHFFTVPTTPASNTRGRKREWKL

SEQ ID NO: 894637 - protein, 194 aa, Homo sapiens [sequence omitted]

SEQ ID NO: 894638 - protein, 258 aa, Homo sapiens
MPVARSWVCRKTYVTPRRPFEKSRLDQELKLIGEYGLRNKREVWRVKFTLAKIRKGQPGKLLTLDEKDPRRSVRRQTPCCGGLVRIFGVLDEGKDEAGLHPGGLKIRGFLRRDALQDPGLSKLGLAKVQSKPRSRALIPPAPYQGPQAGGEHPRPSFVLPWDSQKHIDFSLAHASPYGGFGRPGRVKRKNAKKGPGLGLGAGDDRRQEGFKSTLSLPGGCWDCPRFSPGPKLNQGIRRFYKNKQKQKHTHTKPRQKKT

SEQ ID NO: 894639 - protein, 253 aa, Homo sapiens
MPVARSWVCRKTYVTPRRPFEKSRLDQELKLIGEYGLRNKREVWRVKFTLAKIRKGQPGKLLTLDEKDPRRSVRRQTPCCGGLVRIFGVLDEGKDEAGLHPGGLKIRGFLRRDALQDPGLSKLGLAKVQSKPRSRALIPPAPYQGPQAGGEHPRPSFVLPWDSQKHIDFSLAHASPYGGFGRPGRVKRKNAKKGPGLGLGAGDDRRQEGFKSTLSLPGGCWDCPRFSPGPKLNQGIRRFYKKKKKEETKTKKT

SEQ ID NO: 894640 - protein, 298 aa, Homo sapiens
MPVARSWVCRKTYVTPRRPFEKSRLDQELKLIGEYGLRNKREVWRVKFTLAKIRKGQPGKLLTLDEKDPRRSVRRQTPCCGGLVRIFGVLDEGKDEAGLHPGGLKIRGFLRRDALQDPGLSKLGLAKVQSKPRSRALIPPAPYQGPQAGGEHPRPSFVLPWDSQKHIDFSLAHASPYGGFGRPGRVKRKNAKKGPGLGLGAGDDRRQEGFKSTLSLPGGCWDCPRFSPGPKLNQGIRRFYKKKQQQETKNKKNKKKKAGGLFGGGKKGLKGGGLLVFANPSFERGKGGPTRGGDIKRD

SEQ ID NO: 894641 - protein, 252 aa, Homo sapiens
MPVARSWVCRKTYVTPRRPFEKSRLDQELKLIGEYGLRNKREVWRVKFTLAKIRKGQPGKLLTLDEKDPRRSVRRQTPCCGGLVRIFGVLDEGKDEAGLHPGGLKIRGFLRRDALQDPGLSKLGLAKVQSKPRSRALIPPAPYQGPQAGGEHPRPSFVLPWDSQKHIDFSLAHASPYGGFGRPGRVKRKNAKKGPGLGLGAGDDRRQEGFKSTLSLPGGCWDCPRFSPGPKLNQGIRRFYKKKQQQETKNKK

SEQ ID NO: 894642 - protein, 247 aa, Homo sapiens; identical to SEQ ID NO: 894634

SEQ ID NO: 894643 - protein, 254 aa, Homo sapiens; identical to SEQ ID NO: 894631

SEQ ID NO: 894644 - protein, 264 aa, Homo sapiens; identical to SEQ ID NO: 894629
  misc_feature (256)..(256): Xaa can be any naturally occurring amino acid
  misc_feature (258)..(258): Xaa can be any naturally occurring amino acid

SEQ ID NO: 894645 - protein, 243 aa, Homo sapiens
MPVARSWVCRKTYVTPRRPFEKSRLDQELKLIGEYGLRNKREVWRVKFTLAKIRKGQPGKLLTLDEKDPRRSVRRQTPCCGGLVRIFGVLDEGKDEAGLHPGGLKIRGFLRRDALQDPGLSKLGLAKVQSKPRSRALIPPAPYQGPQAGGEHPRPSFVLPWDSQKHIDFSLAHASPYGGFGRPGRVKRKNAKKGPGLGLGAGDDRRQEGFKSTLSLPGGCWDCPRFSPGPKLNQGIRRFYNAK

SEQ ID NO: 894646 - protein, 243 aa, Homo sapiens; identical to SEQ ID NO: 894645

SEQ ID NO: 894647 - protein, 278 aa, Homo sapiens; identical to SEQ ID NO: 894633

SEQ ID NO: 894648 - protein, 323 aa, Homo sapiens
MPVARSWVCRKTYVTPRRPFEKSRLDQELKLIGEYGLRNKREVWRVKFTLAKIRKGQPGKLLTLDEKDPRRSVRRQTPCCGGLVRIFGVLDEGKDEAGLHPGGLKIRGFLRRDALQDPGLSKLGLAKVQSKPRSRALIPPAPYQGPQAGGEHPRPSFVLPWDSQKHIDFSLAHASPYGGFGRPGRVKRKNAKKGPGLGLGAGDDRRQEGFKSTLSLPGGCWDCPRFSPGPKLNQGIRRFYKKKKKKKKKKKKGGPPQKFPPGGPKFRRSPVFCVQKGAPLWGGFNTPRGTAGPASLKTRVARTGGQNGWTEPGGNALVGKGTL

SEQ ID NO: 894649 - protein, 287 aa, Homo sapiens
MPVARSWVCRKTYVTPRRPFEKSRLDQELKLIGEYGLRNKREVWRVKFTLAKIRKGQPGKLLTLDEKDPRRSVRRQTPCCGGLVRIFGVLDEGKDEAGLHPGGLKIRGFLRRDALQDPGLSKLGLAKVQSKPRSRALIPPAPYQGPQAGGEHPRPSFVLPWDSQKHIDFSLAHASPYGGFGRPGRVKRKNAKKGPGLGLGAGDDRRQEGFKSTLSLPGGCWDCPRFSPGPKLNQGIRRFYKKKKKKKKNCVWGGEKSHLKIKGVPWMGGEEKGGGGPGSRFGLLGLV

SEQ ID NO: 894650 - protein, 251 aa, Homo sapiens
  misc_feature (251)..(251): Xaa can be any naturally occurring amino acid
MPVARSWVCRKTYVTPRRPFEKSRLDQELKLIGEYGLRNKREVWRVKFTLAKIRKGQPGKLLTLDEKDPRRSVRRQTPCCGGLVRIFGVLDEGKDEAGLHPGGLKIRGFLRRDALQDPGLSKLGLAKVQSKPRSRALIPPAPYQGPQAGGEHPRPSFVLPWDSQKHIDFSLAHASPYGGFGRPGRVKRKNAKKGPGLGLGAGDDRRQEGFKSTLSLPGGCWDCPRFSPGPKLNQGIRRFYKKITARRLPSX

SEQ ID NO: 894651 - protein, 175 aa, Homo sapiens
MPVARSWVCRKTYVTPRRPFEKSRLDQELKLIGEYGLRNKREVWRVKFTLAKIRKGQPGKLLTLDEKDPRRSVRRQTPCCGGLVRIFGVLDEGKDEAGLHPGGLKIRGFLRRDALQDPGLSKLGLAKVQSKPRSRALIPPAPYQPSEVMGVNSPRGYRFTLAHSSPGSWGSLLPQ

SEQ ID NO: 894652 - protein, 175 aa, Homo sapiens; identical to SEQ ID NO: 894651

SEQ ID NO: 894653 - protein, 151 aa, Homo sapiens
MPVARSWVCRKTYVTPRRPFEKSRLDQELKLIGEYGLRNKREVWRVKFTLAKIRKGQPGKLLTLDEKDPRRSVRRQTPCCGGLVRIFGVLDEGKDEAGLHPGGLKIRGFLRRDALQDPGLSKLGLAKVQSKPRSRALIPPAPYQVPPRMGT

SEQ ID NO: 894654 - protein, 203 aa, Homo sapiens
MPVARSWVCRKTYVTPRRPFEKSRLDQELKLIGEYGLRNKREVWRVKFTLAKIRKGQPGKLLTLDEKDPRRSVRRQTPCCGGLVRIFGVLDEGKDEAGLHPGGLKIRGFLRRDALQDPGLSKLGLAKVQSKPRSRALIPPAPYQGPQAGGEHPRPSFVLPWDSQKHIDFSLAHASPYGGFGRPGRVKRKNANIAPAPPWPFVD

SEQ ID NO: 894655 - protein, 207 aa, Homo sapiens
MPVARSWVCRKTYVTPRRPFEKSRLDQELKLIGEYGLRNKREVWRVKFTLAKIRKGQPGKLLTLDEKDPRRSVRRQTPCCGGLVRIFGVLDEGKDEAGLHPGGLKIRGFLRRDALQDPGLSKLGLAKVQSKPRSRALIPPAPYQGPQAGGEHPRPSFVLPWDSQKHIDFSLAHASPYGGFGRPGRVKRKNAKSAADPELLRYILKSC

SEQ ID NO: 894656 - protein, 175 aa, Homo sapiens; identical to SEQ ID NO: 894651

SEQ ID NO: 894657 - protein, 182 aa, Homo sapiens
MPVARSWVCRKTYVTPRRPFEKSRLDQELKLIGEYGLRNKREVWRVKFTLAKIRKGQPGKLLTLDEKDPRRSVRRQTPCCGGLVRIFGVLDEGKDEAGLHPGGLKIRGFLRRDALQDPGLSKLGLAKVQSKPRSRALIPPAPYQGPQAGGEHPRPSPREEEECQEGARVGAWGWRRQKAGGI

SEQ ID NO: 894658 - protein, 175 aa, Homo sapiens; identical to SEQ ID NO: 894651

SEQ ID NO: 894659 - protein, 175 aa, Homo sapiens; identical to SEQ ID NO: 894651

SEQ ID NO: 894660 - protein, 164 aa, Homo sapiens
MPVARSWVCRKTYVTPRRPFEKSRLDQELKLIGEYGLRNKREVWRVKFTLAKIRKGQPGKLLTLDEKDPRRSVRRQTPCCGGLVRIFGVLDEGKDEAGLHPGGLKIRGFLRRDALQDPGLSKLGLAKVQSKPRSRALIPPAPYQGPQAGGEHPRPSRRQKAGGI

SEQ ID NO: 894661 - protein, 149 aa, Homo sapiens
  misc_feature (119)..(119): Xaa can be any naturally occurring amino acid
  misc_feature (122)..(123): Xaa can be any naturally occurring amino acid
  misc_feature (135)..(135): Xaa can be any naturally occurring amino acid
MPVARSWVCRKTYVTPRRPFEKSRLDQELKLIGEYGLRNKREVWRVKFTLAKIRKGQPGKLLTLDEKDPRRSVRRQTPCCGGLVRIFGVLDEGKDEAGLHPGGLKIRGFLRRDALLLGXKGXXPEVFLFPKKRGXWAWPKSNPNHARVL

SEQ ID NO: 894662 - protein, 175 aa, Homo sapiens; identical to SEQ ID NO: 894651

SEQ ID NO: 894663 - protein, 124 aa, Homo sapiens
MPVARSWVCRKTYVTPRRPFEKSRLDQELKLIGEYGLRNKREVWRVKFTLAKIRKGQPGKLLTLDEKDPRRSVRRQTPCCGGLVRIFGVLDEGKDLSSPGIPRSTSTSLLRMPLLTGGLAARAA

SEQ ID NO: 894664 - protein, 116 aa, Homo sapiens
MPVARSWVCRKTYVTPRRPFEKSRLDQELKLIGEYGLRNKREVWRVKFTLAKIRKGQPGKLLTLDEKDPRRSVRRVRKQVVNIPVLHLSSPGIPRSTSTSLLRMPLLTGGLAARAA

SEQ ID NO: 894665 - protein, 116 aa, Homo sapiens; identical to SEQ ID NO: 894664

SEQ ID NO: 894666 - protein, 117 aa, Homo sapiens
MPVARSWVCRKTYVTPRRPFEKSRLDQELKLIGEYGLRNKREVWRVKFTLAKIRKGQPGKLLTLDEKDPRRSVRRCVWESTAEGWGAGLVRFILPSVASVPVMRVVSLDKWSQPSNF

SEQ ID NO: 894667 - protein, 194 aa, Homo sapiens [sequence omitted]

SEQ ID NO: 894668 - protein, 194 aa, Homo sapiens [sequence omitted]

SEQ ID NO: 894669 - protein, 194 aa, Homo sapiens [sequence omitted]

SEQ ID NO: 894670 - protein, 110 aa, Homo sapiens
MAMFGYMTDTGTVEPLQTVEVETQGDDLQSLLFHFLDEWLYKFSADEFFIPRRQGVAMLSRLVLNSWLPAILLPQFCKVLGLQVGRRIFIVQAPSGNRSQSNNIFSNAGL

SEQ ID NO: 894671 - protein, 167 aa, Homo sapiens
MAQEEEDVRDYNLTEEQKAIKAKYPPVNRKYEYLDHTADVQLHAWGDTLEEAFEQCAMAMFGYMTDTGTVEPLQTVEVETQGDDLQSLLFHFLDEWLYKFSADEFFIPREVKVLSIDQRNFKLRSIGWGEEFSLSKHPQGTEVKAITYSAMQVYNEENPEVFVIIDI

SEQ ID NO: 894672 - protein, 110 aa, Homo sapiens
MAMFGYMTDTGTVEPLQTVEVETQGDDLQSLLFHFLDEWLYKFSADEFFIPREVKVLSIDQRNFKLRSIGWGEEFSLSKHPQGTEVKAITYSAMQVYNEENPEVFVIIDI

SEQ ID NO: 894673 - protein, 146 aa, Homo sapiens
GNSRCRLLLLNSRPRRGVRDYNLTEEQKAIKAKYPPVNRKYEYLDHTADVQLHAWGDTLEEAFEQCAMAMFGYMTDTGTVEPLQTVEVETQGDDLQSLLFHFLDEWLYKFSADEFFIPRVGRRIFIVQAPSGNRSQSNNIFSNAGL

SEQ ID NO: 894674 - protein, 136 aa, Homo sapiens
MAQEEEDVRDYNLTEEQKAIKAKYPPVNRKYEYLDHTADVQLHAWGDTLEEAFEQCAMAMFGYMTDTGTVEPLQTVEVETQGDDLQSLLFHFLDEWLYKFSADEFFIPRVGRRIFIVQAPSGNRSQSNNIFSNAGL

SEQ ID NO: 894675 - protein, 110 aa, Homo sapiens; identical to SEQ ID NO: 894672

SEQ ID NO: 894676 - protein, 110 aa, Homo sapiens; identical to SEQ ID NO: 894672

SEQ ID NO: 894677 - protein, 163 aa, Homo sapiens
MQSVRDYNLTEEQKAIKAKYPPVNRKYEYLDHTADVQLHAWGDTLEEAFEQCAMAMFGYMTDTGTVEPLQTVEVETQGDDLQSLLFHFLDEWLYKFSADEFFIPREVKVLSIDQRNFKLRSIGWGEEFSLSKHPQGTEVKAITYSAMQVYNEENPEVFVIIDI

SEQ ID NO: 894678 - protein, 110 aa, Homo sapiens; identical to SEQ ID NO: 894670

SEQ ID NO: 894679 - protein, 167 aa, Homo sapiens; identical to SEQ ID NO: 894671

SEQ ID NO: 894680 - protein, 136 aa, Homo sapiens; identical to SEQ ID NO: 894674

SEQ ID NO: 894681 - protein, 131 aa, Homo sapiens
MFQSWLHAWGDTLEEAFEQCAMAMFGYMTDTGTVEPLQTVEVETQGDDLQSLLFHFLDEWLYKFSADEFFIPREVKVLSIDQRNFKLRSIGWGEEFSLSKHPQGTEVKAITYSAMQVYNEENPEVFVIIDI

SEQ ID NO: 894682 - protein, 156 aa, Homo sapiens
MAMFGYMTDTGTVEPLQTVEVETQGDDLQSLLFHFLDEWLYKFSADEFFIPRKLCAIVFRKGCKGQARWLTPVIPALWEAEAGGSPEVQEFETSLTNKEVKVLSIDQRNFKLRSIGWGEEFSLSKHPQGTEVKAITYSAMQVYNEENPEVFVIIDI

SEQ ID NO: 894683 - protein, 110 aa, Homo sapiens; identical to SEQ ID NO: 894670

SEQ ID NO: 894684 - protein, 96 aa, Homo sapiens
  misc_feature (72)..(72): Xaa can be any naturally occurring amino acid
MAQEEEDVRDYNLTEEQKAIKAKYPPVNRKYEYPRSCCIVQAEVQWHHHSSLHPLLSDPKAQVILPPEPPEXLRLQACATTPTKFLKFFVETATFY

SEQ ID NO: 894685 - protein, 1951 aa, Homo sapiens
IPRSLSGNEGAELSLRGGGLVWIKETKKPGEVSKNKTVRVPFRRLQAQGGGAKVQQPCEPSWSRSADSRLGARSPRSAESRAPSRPLQGPLDSEKLAAGRGRENSPRASSVPTTKLFAVPARTTLQPPRAMRPRTKARSPGRALRNPWRGFLPLTLALFVGAGHAQRDPVGRYEPAGGDANRLRRPGGSYPAAAAAKVYSLFREQDAPVAGLQPVERAQPGWGSPRRPTEAEARRPSRAQQSRRVQPPAQTRRSTPLGQQQPAPRTRAAPALPRLGTPQRSGAAPPTPPRGRLTGRNVCGGQCCPGWTTANSTNHCIKPVCEPPCQNRGSCSRPQLCVCRSGFRGARCEEVIPDEEFDPQNSRLAPRRWAERSPNLRRSSAAGEGTLARAQPPAPQSPPAPQSPPAGTLSGLSQTHPSQQHVGLSRTVRLHPTATASSQLSSNALPPGPGLEQRDGTQQAVPLEHPSSPWGLNLTEKIKKIKIVFTPTICKQTCARGHCANSCERGDTTTLYSQGGHGHDPKSGFRIYFCQIPCLNGGRCIGRDECWCPANSTGKFCHLPIPQPDREPPGRGSRPRALLEAPLKQSTFTLPLSNQLASVNPSLVKVHIHHPPEASVQIHQVAQVRGGVEEALVENSVETRPPPWLPASPGHSLWDSNNIPARSGEPPRPLPPAAPRPRGLLGRCYLNTVNGQCANPLLELTTQEDCCGSVGAFWGVTLCAPCPPRPASPVIENGQLECPQGYKRLNLTHCQDINECLTLGLCKDAECVNTRGSYLCTCRPGLMLDPSRSRCVSDKAISMLQGLCYRSLGPGTCTLPLAQRITKQICCCSRVGKAWGSECEKCPLPGTEAFREICPAGHGYTYASSDIRLSMRKAEEEELARPPREQGQRSSGALPGPAERQPLRVVTDTWLEAGTIPDKGDSQAGQVTTSVTHAPAWVTGNATTPPMPEQGIAEIQEEQVTPSTDVLVTLSTPGIDRCAAGATNVCGPGTCVNLPDGYRCVCSPGYQLHPSQAYCTDDNECLRDPCKGKGRCINRVGSYSCFCYPGYTLATSGATQECQDINECEQPGVCSGGQCTNTEGSYHCECDQGYIMVRKGHCQDINECRHPGTCPDGRCVNSPGSYTCLACEEGYRGQSGSCVDVNECLTPGVCAHGKCTNLEGSFRCSCEQGYEVTSDEKGCQDVDECASRASCPTGLCLNTEGSFACSACENGYWVNEDGTACEDLDECAFPGVCPSGVCTNTAGSFSCKDCDGGYRPSPLGDSCEDVDECEDPQSSCLGGECKNTVGSYQCLCPQGFQLANGTVCEDVNECMGEEHCAPHGECLNSHGSFFCLCAPGFVSAEGGTSCQDVDECATTDPCVGGHCVNTEGSFNCLCETGFQPSPESGECVDIDECEDYGDPVCGTWKCENSPGSYRCVLGCQPGFHMAPNGDCIDIDECANDTMCGSHGFCDNTDGSFRCLCDQGFEISPSGWDCVDVNECELMLAVCGAALCENVEGSFLCLCASDLEEYDAQEGHCRPRGAGGQSMSEAPTGDHAPAPTRMDCYSGQKGHAPCSSVLGRNTTQAECCCTQGASWGDACDLCPSEDSAEFSEICPSGKGYIPVEGAWTFGQTMYTDADECVIFGPGLCPNGRCLNTVPGYVCLCNPGFHYDASHKKCEDHDECQDLACENGECVNTEGSFHCFCSPPLTLDLSQQRCMNSTSSTEDLPDHDIHMDICWKKVTNDVCSEPLRGHRTTYTECCCQDGEAWSQQCALCPPRSSEVYAQLCNVARIEAEREAGVHFRPGYEYGPGPDDLHYSIYGPDGAPFYNYLGPEDTVPEPAFPNTAGHSADRTPILESPLQPSELQPHYVASHPEPPAGFEGLQAEECGILNGCENGRCVRVREGYTCDCFEGFQLDAAHMACVDVNECDDLNGPAVLCVHGYCENTEGSYRCHCSPGYVAEAGPPHCTAKE

SEQ ID NO: 894686 - protein, 1951 aa, Homo sapiens; identical to SEQ ID NO: 894685

SEQ ID NO: 894687 - protein, 1951 aa, Homo sapiens; identical to SEQ ID NO: 894685

SEQ ID NO: 894688 - protein, 163 aa, Homo sapiens
MTHTFFFKSTAFCSSIFPQEFYDPLCPHPHSSTGAPFVQKGEGPSIRESLDTALSLLLSPDFLLPEPPAGFEGLQAEECGILNGCENGRCVRVREGYTCDCFEGFQLDAAHMACVDVNECDDLNGPAVLCVHGYCENTEGSYRCHCSPGYVAEAGPPHCTAKE

SEQ ID NO: 894689 - protein, 104 aa, Homo sapiens
RGTGVYRCVQVVTTGTEHAGNLCIFSRDGVSPCKPGWFRSPDLVIRPPRPPKLRGLQAGAIALRSSQISNVVFPLHSETPALSLQKTMAGIPLSLQAETHSNPN

SEQ ID NO: 894690 - protein, 484 aa, Homo sapiens
IPRSLSGNEGAELSLRGGGLVWIKETKKPGEVSKNKTVRVPFRRLQAQGGGAKVQQPCEPSWSRSADSRLGARSPRSAESRAPSRPLQGPLDSEKLAAGRGRENSPRASSVPTTKLFAVPARTTLQPPRAMRPRTKARSPGRALRNPWRGFLPLTLALFVGAGHAQRDPVGRYEPAGGDANRLRRPGGSYPAAAAAKVYSLFREQDAPVAGLQPVERAQPGWGSPRRPTEAEARRPSRAQQSRRVQPPAQTRRSTPLGQQQPAPRTRAAPALPRLGTPQRSGAAPPTPPRGRLTGRNVCGGQCCPGWTTANSTNHCIKPVCEPPCQNRGSCSRPQLCVCRSGFRGARCEEVIPDEEFDPQNSRLAPRRWAERSPNLRRSSAAGEGTLARAQPPAPQSPPAPQSPPAGTLSGLSQTHPSQQHVGLSRTVRLHPTATASSQLSSNALPPGPGLEQRDGTQQAVPLEHPSSPWGKDTLSWVLEEQGL

SEQ ID NO: 894691 - protein, 688 aa, Homo sapiens
MSVNSEKSSSSERPEPQQKAPLVPPPPPPPPPPPPPLPDPTPPEPEEEILGSDDEEQEDPADYCKGGYHPVKIGDLFNGRYHVIRKLGWGHFSTVWLCWDMQGKRFVAMKVVKSAQHYTETALDEIKLLKCVRESDPSDPNKDMVVQLIDDFKISGMNGIHVCMVFEVLGHHLLKWIIKSNYQGLPVRCVKSIIRQVLQGLDYLHSKCKIIHTDIKPENILMCVDDAYVRRMAAEATEWQKAGAPPPSGSAVSTAPQQKPIGKISKNKKKKLKKKQKRQAELLEKRLQEIEELEREAERKIIEENITSAAPSNDQDGEYCPEVKLKTTGLEEAAEAETAKDNGEAEDQEEKEDAEKENIEKDEDDVDQELANIDPTWIESPKTNGHIENGPFSLEQQLDDEDDDEEDCPNPEEYNLDEPNAESDYTYSSSYEQFNGELPNGRHKIPESQFPEFSTSLFSGSLEPVACGSVLSEGSPLTEQEESSPSHDRSRTVSASSTGDLPKAKTRAADLLVNPLDPRNADKIRVKIADLGNACWVHKHFTEDIQTRQYRSIEVLIGAGYSTPADIWSTACMAFELATGDYLFEPHSGEDYSRDEDHIAHIIELLGSIPRHFALSGKYSREFFNRRGELRHITKLKPWSLFDVLVEKYGWPHEDAAQFTDFLIPMLEMVPEKRASAGECLRHPWLNS

SEQ ID NO: 894692 - protein, 242 aa, Homo sapiens
RECVSSLPQCWPFRPESGGRKERNIRKKIKQKIELLMSVNSEKSSSSERPEPQQKAPLVPPPPPPPPPPPPPLPDPTPPEPEEEILGSDDEEQEDPADYCKGGYHPVKIGDLFNGRYHVIRKLGWGHFSTVWLCWDMQGKRFVAMKVVKSAQHYTETALDEIKLLKCVRESDPSDPNKDMVVQLIDDFKISGMNGIHVCMVFEVLGHHLLKWIIKSNYQGLPVRCVKSIIRQVRLLTAAPRP

SEQ ID NO: 894693 - protein, 741 aa, Homo sapiens
GGGAGAVLVSSRPAERVEAAAQLVSAPASPSRSPPPRFRRVGMSSRKVLAIQARKRRPKREKHPKKPEPQQKAPLVPPPPPPPPPPPPPLPDPTPPEPEEEILGSDDEEQEDPADYCKGGYHPVKIGDLFNGRYHVIRKLGWGHFSTVWLCWDMQGKRFVAMKVVKSAQHYTETALDEIKLLKCVRESDPSDPNKDMVVQLIDDFKISGMNGIHVCMVFEVLGHHLLKWIIKSNYQGLPVRCVKSIIRQVLQGLDYLHSKCKIIHTDIKPENILMCVDDAYVRRMAAEATEWQKAGAPPPSGSAVSTAPQQKPIGKISKNKKKKLKKKQKRQAELLEKRLQEIEELEREAERKIIEENITSAAPSNDQDGEYCPEVKLKTTGLEEAAEAETAKDNGEAEDQEEKEDAEKENIEKDEDDVDQELANIDPTWIESPKTNGHIENGPFSLEQQLDDEDDDEEDCPNPEEYNLDEPNAESDYTYSSSYEQFNGELPNGRHKIPESQFPEFSTSLFSGSLEPVACGSVLSEGSPLTEQEESSPSHDRSRTVSASSTGDLPKAKTRAADLLVNPLDPRNADKIRVKIADLGNACWVHKHFTEDIQTRQYRSIEVLIGAGYSTPADIWSTACMAFELATGDYLFEPHSGEDYSRDEDHIAHIIELLGSIPRHFALSGKYSREFFNRRGELRHITKLKPWSLFDVLVEKYGWPHEDAAQFTDFLIPMLEMVPEKRASAGECLRHPWLNS

SEQ ID NO: 894694 - protein, 741 aa, Homo sapiens; identical to SEQ ID NO: 894693

SEQ ID NO: 894695 - protein, 741 aa, Homo sapiens; identical to SEQ ID NO: 894693

SEQ ID NO: 894696 - protein, 741 aa, Homo sapiens; identical to SEQ ID NO: 894693

SEQ ID NO: 894697 - protein, 688 aa, Homo sapiens; identical to SEQ ID NO: 894691

SEQ ID NO: 894698 - protein, 699 aa, Homo sapiens
MTAASSDILTHQLNCSQIAGPQKLPEPQQKAPLVPPPPPPPPPPPPPLPDPTPPEPEEEILGSDDEEQEDPADYCKGGYHPVKIGDLFNGRYHVIRKLGWGHFSTVWLCWDMQGKRFVAMKVVKSAQHYTETALDEIKLLKCVRESDPSDPNKDMVVQLIDDFKISGMNGIHVCMVFEVLGHHLLKWIIKSNYQGLPVRCVKSIIRQVLQGLDYLHSKCKIIHTDIKPENILMCVDDAYVRRMAAEATEWQKAGAPPPSGSAVSTAPQQKPIGKISKNKKKKLKKKQKRQAELLEKRLQEIEELEREAERKIIEENITSAAPSNDQDGEYCPEVKLKTTGLEEAAEAETAKDNGEAEDQEEKEDAEKENIEKDEDDVDQELANIDPTWIESPKTNGHIENGPFSLEQQLDDEDDDEEDCPNPEEYNLDEPNAESDYTYSSSYEQFNGELPNGRHKIPESQFPEFSTSLFSGSLEPVACGSVLSEGSPLTEQEESSPSHDRSRTVSASSTGDLPKAKTRAADLLVNPLDPRNADKIRVKIADLGNACWVHKHFTEDIQTRQYRSIEVLIGAGYSTPADIWSTACMAFELATGDYLFEPHSGEDYSRDEDHIAHIIELLGSIPRHFALSGKYSREFFNRRGELRHITKLKPWSLFDVLVEKYGWPHEDAAQFTDFLIPMLEMVPEKRASAGECLRHPWLNS

SEQ ID NO: 894699 - protein, 688 aa, Homo sapiens; identical to SEQ ID NO: 894691

SEQ ID NO: 894700 - protein, 588 aa, Homo sapiens
MQGKRFVAMKVVKSAQHYTETALDEIKLLKCVRESDPSDPNKDMVVQLIDDFKISGMNGIHVCMVFEVLGHHLLKWIIKSNYQGLPVRCVKSIIRQVLQGLDYLHSKCKIIHTDIKPENILMCVDDAYVRRMAAEATEWQKAGAPPPSGSAVSTAPQQKPIGKISKNKKKKLKKKQKRQAELLEKRLQEIEELEREAERKIIEENITSAAPSNDQDGEYCPEVKLKTTGLEEAAEAETAKDNGEAEDQEEKEDAEKENIEKDEDDVDQELANIDPTWIESPKTNGHIENGPFSLEQQLDDEDDDEEDCPNPEEYNLDEPNAESDYTYSSSYEQFNGELPNGRHKIPESQFPEFSTSLFSGSLEPVACGSVLSEGSPLTEQEESSPSHDRSRTVSASSTGDLPKAKTRAADLLVNPLDPRNADKIRVKIADLGNACWVHKHFTEDIQTRQYRSIEVLIGAGYSTPADIWSTACMAFELATGDYLFEPHSGEDYSRDEDHIAHIIELLGSIPRHFALSGKYSREFFNRRGELRHITKLKPWSLFDVLVEKYGWPHEDAAQFTDFLIPMLEMVPEKRASAGECLRHPWLNS

SEQ ID NO: 894701 - protein, 688 aa, Homo sapiens; identical to SEQ ID NO: 894691

SEQ ID NO: 894702 - protein, 703 aa, Homo sapiens
PLMCVFSSPVLAIQARKRRPKREKHPKKPEPQQKAPLVPPPPPPPPPPPPPLPDPTPPEPEEEILGSDDEEQEDPADYCKGGYHPVKIGDLFNGRYHVIRKLGWGHFSTVWLCWDMQGKRFVAMKVVKSAQHYTETALDEIKLLKCVRESDPSDPNKDMVVQLIDDFKISGMNGIHVCMVFEVLGHHLLKWIIKSNYQGLPVRCVKSIIRQVLQGLDYLHSKCKIIHTDIKPENILMCVDDAYVRRMAAEATEWQKAGAPPPSGSAVSTAPQQKPIGKISKNKKKKLKKKQKRQAELLEKRLQEIEELEREAERKIIEENITSAAPSNDQDGEYCPEVKLKTTGLEEAAEAETAKDNGEAEDQEEKEDAEKENIEKDEDDVDQELANIDPTWIESPKTNGHIENGPFSLEQQLDDEDDDEEDCPNPEEYNLDEPNAESDYTYSSSYEQFNGELPNGRHKIPESQFPEFSTSLFSGSLEPVACGSVLSEGSPLTEQEESSPSHDRSRTVSASSTGDLPKAKTRAADLLVNPLDPRNADKIRVKIADLGNACWVHKHFTEDIQTRQYRSIEVLIGAGYSTPADIWSTACMAFELATGDYLFEPHSGEDYSRDEDHIAHIIELLGSIPRHFALSGKYSREFFNRRGELRHITKLKPWSLFDVLVEKYGWPHEDAAQFTDFLIPMLEMVPEKRASAGECLRHPWLNS

SEQ ID NO: 894703 - protein, 588 aa, Homo sapiens; identical to SEQ ID NO: 894700

SEQ ID NO: 894704 - protein, 688 aa, Homo sapiens; identical to SEQ ID NO: 894691

SEQ ID NO: 894705 - protein, 688 aa, Homo sapiens; identical to SEQ ID NO: 894691

SEQ ID NO: 894706 - protein, 691 aa, Homo sapiens
MSVNSEKSSSSERPEPQQKAPLVPPPPPPPPPPPPPLPDPTPPEPEEEILGSDDEEQEDPADYCKGGYHPVKIGDLFNGRYHVIRKLGWGHFSTVWLCWDMQGTPIRSPLTTSYNSAQHYTETSLGMNSPLLTCVRESDPSDPNKDMVVQLIDDFKISGMNGIHVCMVFEVLGHHLLKWIIKSNYQGLPVRCVKSIIRQVLQGLDYLHSKCKIIHTDIKPENILMCVDDAYVRRMAAEATEWQKAGAPPPSGSAVSTAPQQKPIGKISKNKKKKLKKKQKRQAELLEKRLQEIEELEREAERKIIEENITSAAPSNDQDGEYCPEVKLKTTGLEEAAEAETAKDNGEAEDQEEKEDAEKENIEKDEDDVDQELANIDPTWIESPKTNGHIENGPFSLEQQLDDEDDDEEDCPNPEEYNLDEPNAESDYTYSSSYEQFNGELPNGRHKIPESQFPEFSTSLFSGSLEPVACGSVLSEGSPLTEQEESSPSHDRSRTVSASSTGDLPKAKTRAADLLVNPLDPRNADKIRVKIADLGNACWVHKHFTEDIQTRQYRSIEVLIGAGYSTPADIWSTACMAFELATGDYLFEPHSGEDYSRDEDHIAHIIELLGSIPRHFALSGKYSREFFNRRGELRHITKLKPWSLFDVLVEKYGWPHEDAAQFTDFLIPMLEMVPEKRASAGECLRHPWLNS

SEQ ID NO: 894707 - protein, 452 aa, Homo sapiens
MLLVVILSWCFKKKNTDLWSFLNIIGKISKNKKKKLKKKQKRQAELLEKRLQEIEELEREAERKIIEENITSAAPSNDQDGEYCPEVKLKTTGLEEAAEAETAKDNGEAEDQEEKEDAEKENIEKDEDDVDQELANIDPTWIESPKTNGHIENGPFSLEQQLDDEDDDEEDCPNPEEYNLDEPNAESDYTYSSSYEQFNGELPNGRHKIPESQFPEFSTSLFSGSLEPVACGSVLSEGSPLTEQEESSPSHDRSRTVSASSTGDLPKAKTRAADLLVNPLDPRNADKIRVKIADLGNACWVHKHFTEDIQTRQYRSIEVLIGAGYSTPADIWSTACMAFELATGDYLFEPHSGEDYSRDEDHIAHIIELLGSIPRHFALSGKYSREFFNRRGELRHITKLKPWSLFDVLVEKYGWPHEDAAQFTDFLIPMLEMVPEKRASAGECLRHPWLNS

SEQ ID NO: 894708 - protein, 77 aa, Homo sapiens
  misc_feature (13)..(13): Xaa can be any naturally occurring amino acid
SQTFLLRGPETRXLCSGELRHITKLKPWSLFDVLVEKYGWPHEDAAQFTDFLIPMLEMVPEKRASAGECLRHPWLNS

SEQ ID NO: 894709 - protein, 259 aa, Homo sapiens
GGGAGAVLVSSRPAERVEAAAQLVSAPASPSRSPPPRFRRVGMSSRKVLAIQARKRRPKREKHPKKPEPQQKAPLVPPPPPPPPPPPPPLPDPTPPEPEEEILGSDDEEQEDPADYCKGGYHPVKIGDLFNGRYHVIRKLGWGHFSTVWLCWDMQGKRFVAMKVVKSAQHYTETALDEIKLLKCVRESDPSDPNKDMVVQLIDDFKISGMNGIHVCMVFEVLGHHLLKWIIKSNYQGLPVRCVKSIIRQVRLLTAAPRP

SEQ ID NO: 894710 - protein, 106 aa, Homo sapiens
MSVNSEKSSSSERPEPQQKAPLVPPPPPPPPPPPPPLPDPTPPEPEEEILGSDDEEQEDPADYCKGGYHPVKIGDLFNGRYHVIRKLGWGHFSTVWLCWDMQGKAR

SEQ ID NO: 894711 - protein, 249 aa, Homo sapiens
GGGAGAVLVSSRPAERVEAAAQLVSAPASPSRSPPPRFRRVGMSSRKVLAIQARKRRPKREKHPKKPEPQQKAPLVPPPPPPPPPPPPPLPDPTPPEPEEEILGSDDEEQEDPADYCKGGYHPVKIGDLFNGRYHVIRKLGWGHFSTVWLCWDMQGKRFVAMKVVKSAQHYTETALDEIKLLKCVRESDPSDPNKDMVVQLIDDFKISGMNGIHVCMVFEVLGHHLLKWIIKSNYQGLPVRCVKSIIRQ

SEQ ID NO: 894712 - protein, 568 aa, Homo sapiens
GGGAGAVLVSSRPAERVEAAAQLVSAPASPSRSPPPRFRRVGMSSRKVLAIQARKRRPKREKHPKKPEPQQKAPLVPPPPPPPPPPPPPLPDPTPPEPEEEILGSDDEEQEDPADYCKGGYHPVKIGDLFNGRYHVIRKLGWGHFSTVWLCWDMQGKRFVAMKVVKSAQHYTETALDEIKLLKCVRESDPSDPNKDMVVQLIDDFKISGMNGIHVCMVFEVLGHHLLKWIIKSNYQGLPVRCVKSIIRQVLQGLDYLHSKCKIIHTDIKPENILMCVDDAYVRRMAAEATEWQKAGAPPPSGSAVSTAPQQKPIGKISKNKKKKLKKKQKRQAELLEKRLQEIEELEREAERKIIEENITSAAPSNDQDGEYCPEVKLKTTGLEEAAEAETAKDNGEAEDQEEKEDAEKENIEKDEDDVDQELANIDPTWIESPKTNGHIENGPFSLEQQLDDEDDDEEDCPNPEEYNLDEPNAESDYTYSSSYEQFNGELPNGRHKIPESQFPEFSTSLFSGSLEPVACGSVLSEGSPLTEQEESSPSHDRSRTVSASSTGDLPKGKCFFPSTVCHR

SEQ ID NO: 894713 - protein, 271 aa, Homo sapiens
GGGAGAVLVSSRPAERVEAAAQLVSAPASPSRSPPPRFRRVGMSSRKVLAIQARKRRPKREKHPKKPEPQQKAPLVPPPPPPPPPPPPPLPDPTPPEPEEEILGSDDEEQEDPADYCKGGYHPVKIGDLFNGRYHVIRKLGWGHFSTVWLCWDMQGKRFVAMKVVKSAQHYTETALDEIKLLKCVRESDPSDPNKDMVVQLIDDFKISGMNGIHVCMVFEVLGHHLLKWIIKSNYQGLPVRCVKSIIRQPSRVRLLTHEYGSTAETYRKNI

SEQ ID NO: 894714 - protein, 892 aa, Homo sapiens
MDHYDSQQTNDYMQPEEDWDRDLLLDPAWEKQQRKTFTAWCNSHLRKAGTQIENIEEDFRDGLKLMLLLEVISGERLAKPERGKMRVHKISNVNKALDFIASKGVKLVSIGAEEIVDGNVKMTLGMIWTIILRFAIQDISVEETSAKEGLLLWCQRKTAPYKNVNIQNFHISWKDGLGFCALIHRHRPELIDYGKLRKDDPLTNLNTAFDVAEKYLDIPKMLDAEDIVGTARPDEKAIMTYVSSFYHAFSGAQKAETAANRICKVLAVNQENEQLMEDYEKLASDLLEWIRRTIPWLENRVPENTMHAMQQKLEDFRDYRRLHKPPKVQEKCQLEINFNTLQTKLRLSNRPAFMPSEGRMVSDINNAWGCLEQVEKGYEEWLLNEIRRLERLDHLAEKFRQKASIHEAWTDGKEAMLRQKDYETATLSEIKALLKKHEAFESDLAAHQDRVEQIAAIAQELNELDYYDSPSVNARCQKICDQWDNLGALTQKRREALERTEKLLETIDQLYLEYAKRAAPFNNWMEGAMEDLQDTFIVHTIEEIQGLTTAHEQFKATLPDADKERLAILGIHNEVSKIVQTYHVNMAGTNPYTTITPQEINGKWDHVRQLVPRRDQALTEEHARQQHNERLRKQFGAQANVIGPWIQTKMEEIGRISIEMHGTLEDQLSHLRQYEKSIVNYKPKIDQLEGDHQLIQEALIFDNKHTNYTMEHIRVGWEQLLTTIARTINEVENQILTRDAKGISQEQMNEFRASFNHFDRDHSGTLGPEEFKACLISLGYDIGNDPQGEAEFARIMSIVDPNRLGVVTFQAFIDFMSRETADTDTADQVMASFKILAGDKNYITMDELRRELPPDQAEYCIARMAPYTGPDSVPGALDYMSFSTALYGESDL

SEQ ID NO: 894715 - protein, 65 aa, Homo sapiens
MSIVDPNRLGVVTFQAFIDFMSRETADTDTADQVMASFKILAGDKNYITMDEQHHEFAEQHHEFA

SEQ ID NO: 894716 - protein, 149 aa, Homo sapiens
PERGEVAPLAGRSPWGSVVQATLRLLQPSPRGLCSGAVVFRLGLRPRLGAACSGSIFPFLPPLATSPYGVRWQRRFLGRPGFNLSGGPPGTLLPLRRRGERRRDRRPPPDLPGEGPAGVRLGTRKLGGVRGLPRGPCGGGVRTADRFIA

SEQ ID NO: 894717 - protein, 892 aa, Homo sapiens; identical to SEQ ID NO: 894714

SEQ ID NO: 894718 - protein, 892 aa, Homo sapiens; identical to SEQ ID NO: 894714

SEQ ID NO: 894719 - protein, 892 aa, Homo sapiens; identical to SEQ ID NO: 894714

SEQ ID NO: 894720 - protein, 892 aa, Homo sapiens; identical to SEQ ID NO: 894714

SEQ ID NO: 894721 - protein, 892 aa, Homo sapiens; identical to SEQ ID NO: 894714

SEQ ID NO: 894722 - protein, 831 aa, Homo sapiens
MDHYDSQQTNDYMQPEEDWDRDLLLDPAWEKQQRKTFTAWCNSHLRKAGTQIENIEEDFRDGLKLMLLLEVISGERLAKPERGKMRVHKISNVNKALDFIASKGVKLVSIGAEEIVDGNVKMTLGMIWTIILRFAIQDISVEETSAKEGLLLWCQRKTAPYKNVNIQNFHISWKDGLGFCALIHRHRPELIDYGKLRKDDPLTNLNTAFDVAEKYLDIPKMLDAEDIVGTARPDEKAIMTYVSSFYHAFSGAQKAETAANRICKVLAVNQENEQLMEDYEKLASDLLEWIRRTIPWLENRVPENTMHAMQQKLEDFRDYRRLHKPPKVQEKCQLEINFNTLQTKLRLSNRPAFMPSEGRMVSDINNAWGCLEQVEKGYEEWLLNEIRRLERLDHLAEKFRQKASIHEAWTDGKEAMLRQKDYETATLSEIKALLKKHEAFESDLAAHQDRVEQIAAIAQELNELDYYDSPSVNARCQKICDQWDNLGALTQKRREALERTEKLLETIDQLYLEYAKRAAPFNNWMEGAMEDLQDTFIVHTIEEIQGLTTAHEQFKATLPDADKERLAILGIHNEVSKIVQTYHVNMAGTNPYTTITPQEINGKWDHLSHLRQYEKSIVNYKPKIDQLEGDHQLIQEALIFDNKHTNYTMEHIRVGWEQLLTTIARTINEVENQILTRDAKGISQEQMNEFRASFNHFDRDHSGTLGPEEFKACLISLGYDIGNDPQGEAEFARIMSIVDPNRLGVVTFQAFIDFMSRETADTDTADQVMASFKILAGDKNYITMDELRRELPPDQAEYCIARMAPYTGPDSVPGALDYMSFSTALYGESDL

SEQ ID NO: 894723 - protein, 770 aa, Homo sapiens
MCMSQYPACNFSAGTRALVVKTSAKEGLLLWCQRKTAPYKNVNIQNFHISWKDGLGFCALIHRHRPELIDYGKLRKDDPLTNLNTAFDVAEKYLDIPKMLDAEDIVGTARPDEKAIMTYVSSFYHAFSGAQKAETAANRICKVLAVNQENEQLMEDYEKLASDLLEWIRRTIPWLENRVPENTMHAMQQKLEDFRDYRRLHKPPKVQEKCQLEINFNTLQTKLRLSNRPAFMPSEGRMVSDINNAWGCLEQVEKGYEEWLLNEIRRLERLDHLAEKFRQKASIHEAWTDGKEAMLRQKDYETATLSEIKALLKKHEAFESDLAAHQDRVEQIAAIAQELNELDYYDSPSVNARCQKICDQWDNLGALTQKRREALERTEKLLETIDQLYLEYAKRAAPFNNWMEGAMEDLQDTFIVHTIEEIQGLTTAHEQFKATLPDADKERLAILGIHNEVSKIVQTYHVNMAGTNPYTTITPQEINGKWDHVRQLVPRRDQALTEEHARQQHNERLRKQFGAQANVIGPWIQTKMEEIGRISIEMHGTLEDQLSHLRQYEKSIVNYKPKIDQLEGDHQLIQEALIFDNKHTNYTMEHIRVGWEQLLTTIARTINEVENQILTRDAKGISQEQMNEFRASFNHFDRDHSGTLGPEEFKACLISLGYDIGNDPQGEAEFARIMSIVDPNRLGVVTFQAFIDFMSRETADTDTADQVMASFKILAGDKNYITMDELRRELPPDQAEYCIARMAPYTGPDSVPGALDYMSFSTALYGESDL

SEQ ID NO: 894724 - protein, 831 aa, Homo sapiens
MDHYDSQQTNDYMQPEEDWDRDLLLDPAWEKQQRKTFTAWCNSHLRKAGTQIENIEEDFRDGLKLMLLLEVISGERLAKPERGKMRVHKISNVNKALDFIASKGVKLVSIGAEEIVDGNVKMTLGMIWTIILRFAIQDISVEETSAKEGLLLWCQRKTAPYKNVNIQNFHISWKDGLGFCALIHRHRPELIDYGKLRKDDPLTNLNTAFDVAEKYLDIPKMLDAEDIVGTARPDEKAIMTYVSSFYHAFSGAQKAETAANRICKVLAVNQENEQLMEDYEKLASDLLEWIRRTIPWLENRVPENTMHAMQQKLEDFRDYRRLHKPPKVQEKCQLEINFNTLQTKLRLSNRPAFMPSEGRMVSDINNAWGCLEQVEKGYEEWLLNEIRRLERLDHLAEKFRQKASIHEAWTDGKEAMLRQKDYETATLSEIKALLKKHEAFESDLAAHQDRVEQIAAIAQELNELDYYDSPSVNARCQKICDQWDNLGALTQKRREALERTEKLLETIDQLYLEYAKRAAPFNNWMEGAMEDLQDTFIVHTIEEIQVRQLVPRRDQALTEEHARQQHNERLRKQFGAQANVIGPWIQTKMEEIGRISIEMHGTLEDQLSHLRQYEKSIVNYKPKIDQLEGDHQLIQEALIFDNKHTNYTMEHIRVGWEQLLTTIARTINEVENQILTRDAKGISQEQMNEFRASFNHFDRDHSGTLGPEEFKACLISLGYDIGNDPQGEAEFARIMSIVDPNRLGVVTFQAFIDFMSRETADTDTADQVMASFKILAGDKNYITMDELRRELPPDQAEYCIARMAPYTGPDSVPGALDYMSFSTALYGESDL

SEQ ID NO: 894725 - protein, 883 aa, Homo sapiens
  misc_feature (102)..(102): Xaa can be any naturally occurring amino acid
MDSVADCLGRSLIMGETHREHRRASGGQALRDATMISPTLHSERHAGNSTSNAGIRTVKHGARDRQARQEISMRCARMLHTYDTVGHCSLALHSLLVALCPXLTCSNVQSAHEENVLAQGKVDWLPAAPVEEYTDTFLFYHIHMCSTTNSHANSPYDTSWEGSGPCGNVLVRLIHRHRPELIDYGKLRKDDPLTNLNTAFDVAEKYLDIPKMLDAEDIVGTARPDEKAIMTYVSSFYHAFSGAQKAETAANRICKVLAVNQENEQLMEDYEKLASDLLEWIRRTIPWLENRVPENTMHAMQQKLEDFRDYRRLHKPPKVQEKCQLEINFNTLQTKLRLSNRPAFMPSEGRMVSDINNAWGCLEQVEKGYEEWLLNEIRRLERLDHLAEKFRQKASIHEAWTDGKEAMLRQKDYETATLSEIKALLKKHEAFESDLAAHQDRVEQIAAIAQELNELDYYDSPSVNARCQKICDQWDNLGALTQKRREALERTEKLLETIDQLYLEYAKRAAPFNNWMEGAMEDLQDTFIVHTIEEIQGLTTAHEQFKATLPDADKERLAILGIHNEVSKIVQTYHVNMAGTNPYTTITPQEINGKWDHVRQLVPRRDQALTEEHARQQHNERLRKQFGAQANVIGPWIQTKMEEIGRISIEMHGTLEDQLSHLRQYEKSIVNYKPKIDQLEGDHQLIQEALIFDNKHTNYTMEHIRVGWEQLLTTIARTINEVENQILTRDAKGISQEQMNEFRASFNHFDRDHSGTLGPEEFKACLISLGYDIGNDPQGEAEFARIMSIVDPNRLGVVTFQAFIDFMSRETADTDTADQVMASFKILAGDKNYITMDELRRELPPDQAEYCIARMAPYTGPDSVPGALDYMSFSTALYGESDL

SEQ ID NO: 894726 - protein, 887 aa, Homo sapiens
MDHYDSQQTNDYMQPEEDWDRDLLLDPAWEKQQRKTFTAWCNSHLRKAGTQIENIEEDFRDGLKLMLLLEVISGERLAKPERGKMRVHKISNVNKALDFIASKGVKLVSIGAEEIVDGNVKMTLGMIWTIILRFAIQDISVEETSAKEGLLLWCQRKTAPYKNVNIQNFHISWKDGLGFCALIHRHRPELIDYGKLRKDDPLTNLNTAFDVAEKYLDIPKMLDAEDIVGTARPDEKAIMTYVSSFYHAFSGAQKAETAANRICKVLAVNQENEQLMEDYEKLASDLLEWIRRTIPWLENRVPENTMHAMQQKLEDFRDYRRLHKPPKVQEKCQLEINFNTLQTKLRLSNRPAFMPSEGRMVSDINNAWGCLEQVEKGYEEWLLNEIRRLERLDHLAEKFRQKASIHEAWTDGKEAMLRQKDYETATLSEIKALLKKHEAFESDLAAHQDRVEQIAAIAQELNELDYYDSPSVNARCQKICDQWDNLGALTQKRREALERTEKLLETIDQLYLEYAKRAAPFNNWMEGAMEDLQDTFIVHTIEEIQGLTTAHEQFKATLPDADKERLAILGIHNEVSKIVQTYHVNMAGTNPYTTITPQEINGKWDHVRQLVPRRDQALTEEHARQQHNERLRKQFGAQANVIGPWIQTKMEEIGRISIEMHGTLEDQLSHLRQYEKSIVNYKPKIDQLEGDHQLIQEALIFDNKHTNYTMEHIRVGWEQLLTTIARTINEVENQILTRDAKGISQEQMNEFRASFNHFDRKKTGMMDTDDFRACLISMGYNMGEAEFARIMSIVDPNRLGVVTFQAFIDFMSRETADTDTADQVMASFKILAGDKNYITMDELRRELPPDQAEYCIARMAPYTGPDSVPGALDYMSFSTALYGESDL

SEQ ID NO: 894727 - protein, 654 aa, Homo sapiens
MTYVSSFYHAFSGAQKAETAANRICKVLAVNQENEQLMEDYEKLASDLLEWIRRTIPWLENRVPENTMHAMQQKLEDFRDYRRLHKPPKVQEKCQLEINFNTLQTKLRLSNRPAFMPSEGRMVSDINNAWGCLEQVEKGYEEWLLNEIRRLERLDHLAEKFRQKASIHEAWTDGKEAMLRQKDYETATLSEIKALLKKHEAFESDLAAHQDRVEQIAAIAQELNELDYYDSPSVNARCQKICDQWDNLGALTQKRREALERTEKLLETIDQLYLEYAKRAAPFNNWMEGAMEDLQDTFIVHTIEEIQGLTTAHEQFKATLPDADKERLAILGIHNEVSKIVQTYHVNMAGTNPYTTITPQEINGKWDHVRQLVPRRDQALTEEHARQQHNERLRKQFGAQANVIGPWIQTKMEEIGRISIEMHGTLEDQLSHLRQYEKSIVNYKPKIDQLEGDHQLIQEALIFDNKHTNYTMEHIRVGWEQLLTTIARTINEVENQILTRDAKGISQEQMNEFRASFNHFDRDHSGTLGPEEFKACLISLGYDIGNDPQGEAEFARIMSIVDPNRLGVVTFQAFIDFMSRETADTDTADQVMASFKILAGDKNYITMDELRRELPPDQAEYCIARMAPYTGPDSVPGALDYMSFSTALYGESDL

SEQ ID NO: 894728 - protein, 865 aa, Homo sapiens
MDHYDSQQTNDYMQPEEDWDRDLLLDPAWEKQQRKTFTAWCNSHLRKAGTQIENIEEDFRDGLKLMLLLEVISGERLAKPERGKMRVHKISNVNKALDFIASKGVKLVSIGAEEIVDGNVKMTLGMIWTIILRFAIQDISVEETSAKEGLLLWCQRKTAPYKNVNIQNFHISWKDGLGFCALIHRHRPELIDYGKLRKDDPLTNLNTAFDVAEKYLDIPKMLDAEDIVGTARPDEKAIMTYVSSFYHAFSGAQKAETAANRICKVLAVNQENEQLMEDYEKLASDLLEWIRRTIPWLENRVPENTMHAMQQKLEDFRDYRRLHKPPKVQEKCQLEINFNTLQTKLRLSNRPAFMPSEGRMVSDINNAWGCLEQVEKGYEEWLLNEIRRLERLDHLAEKFRQKASIHEAWTDGKEAMLRQKDYETATLSEIKALLKKHEAFESDLAAHQDRVEQIAAIAQELNELDYYDSPSVNARCQKICDQWDNLGALTQKRREALERTEKLLETIDQLYLEYAKRAAPFNNWMEGAMEDLQDTFIVHTIEEIQGLTTAHEQFKATLPDADKERLAILGIHNEVSKIVQTYHVNMAGTNPYTTITPQEINGKWDHVRQLVPRRDQALTEEHARQQHNERLRKQFGAQANVIGPWIQTKMEEIGRISIEMHGTLEDQLSHLRQYEKSIVNYKPKIDQLEGDHQLIQEALIFDNKHTNYTMEHIRVGWEQLLTTIARTINEVENQILTRDAKGISQEQMNEFRASFNHFDRGEAEFARIMSIVDPNRLGVVTFQAFIDFMSRETADTDTADQVMASFKILAGDKNYITMDELRRELPPDQAEYCIARMAPYTGPDSVPGALDYMSFSTALYGESDL

SEQ ID NO: 894729 - protein, 914 aa, Homo sapiens
MDHYDSQQTNDYMQPEEDWDRDLLLDPAWEKQQRKTFTAWCNSHLRKAGTQIENIEEDFRDGLKLMLLLEVISGERLAKPERGKMRVHKISNVNKALDFIASKGVKLVSIGAEEIVDGNVKMTLGMIWTIILRFAIQDISVEETSAKEGLLLWCQRKTAPYKNVNIQNFHISWKDGLGFCALIHRHRPELIDYGKLRKDDPLTNLNTAFDVAEKYLDIPKMLDAEDIVGTARPDEKAIMTYVSSFYHAFSGAQKAETAANRICKVLAVNQENEQLMEDYEKLASDLLEWIRRTIPWLENRVPENTMHAMQQKLEDFRDYRRLHKPPKVQEKCQLEINFNTLQTKLRLSNRPAFMPSEGRMVSDINNAWGCLEQVEKGYEEWLLNEIRRLERLDHLAEKFRQKASIHEAWTDGKEAMLRQKDYETATLSEIKALLKKHEAFESDLAAHQDRVEQIAAIAQELNELDYYDSPSVNARCQKICDQWDNLGALTQKRREALERTEKLLETIDQLYLEYAKRAAPFNNWMEGAMEDLQDTFIVHTIEEIQGLTTAHEQFKATLPDADKERLAILGIHNEVSKIVQTYHVNMAGTNPYTTITPQEINGKWDHVRQLVPRRDQALTEEHARQQHNERLRKQFGAQANVIGPWIQTKMEEIGRISIEMHGTLEDQLSHLRQYEKSIVNYKPKIDQLEGDHQLIQEALIFDNKHTNYTMEHIRVGWEQLLTTIARTINEVENQILTRDAKGISQEQMNEFRASFNHFDRDHSGTLGPEEFKACLISLGYDIGNDPQGEAEFARIMSIVDPNRLGVVTFQATTLPWTSCAASCHPTRLSTASRGWPPTPAPTPCQVLWTTCPSPRRCTARVTSNPPRPAALVLCAVPCLAPPPSPISCLGSVSAPSLHPGELGPTWHRSSLPAK

SEQ ID NO: 894730 - protein, 637 aa, Homo sapiens
FIHLSAMVLNDNHRRIDVCYGKLREAEQVNLLEWIRRTIPWLENRVPENTMHAMQQKLEDFRDYRRLHKPPKVQEKCQLEINFNTLQTKLRLSNRPAFMPSEGRMVSDINNAWGCLEQVEKGYEEWLLNEIRRLERLDHLAEKFRQKASIHEAWTDGKEAMLRQKDYETATLSEIKALLKKHEAFESDLAAHQDRVEQIAAIAQELNELDYYDSPSVNARCQKICDQWDNLGALTQKRREALERTEKLLETIDQLYLEYAKRAAPFNNWMEGAMEDLQDTFIVHTIEEIQGLTTAHEQFKATLPDADKERLAILGIHNEVSKIVQTYHVNMAGTNPYTTITPQEINGKWDHVRQLVPRRDQALTEEHARQQHNERLRKQFGAQANVIGPWIQTKMEEIGRISIEMHGTLEDQLSHLRQYEKSIVNYKPKIDQLEGDHQLIQEALIFDNKHTNYTMEHIRVGWEQLLTTIARTINEVENQILTRDAKGISQEQMNEFRASFNHFDRDHSGTLGPEEFKACLISLGYDIGNDPQGEAEFARIMSIVDPNRLGVVTFQAFIDFMSRETADTDTADQVMASFKILAGDKNYITMDELRRELPPDQAEYCIARMAPYTGPDSVPGALDYMSFSTALYGESDL

SEQ ID NO: 894731 - protein, 609 aa, Homo sapiens
MGLLEWIRRTIPWLENRVPENTMHAMQQKLEDFRDYRRLHKPPKVQEKCQLEINFNTLQTKLRLSNRPAFMPSEGRMVSDINNAWGCLEQVEKGYEEWLLNEIRRLERLDHLAEKFRQKASIHEAWTDGKEAMLRQKDYETATLSEIKALLKKHEAFESDLAAHQDRVEQIAAIAQELNELDYYDSPSVNARCQKICDQWDNLGALTQKRREALERTEKLLETIDQLYLEYAKRAAPFNNWMEGAMEDLQDTFIVHTIEEIQGLTTAHEQFKATLPDADKERLAILGIHNEVSKIVQTYHVNMAGTNPYTTITPQEINGKWDHVRQLVPRRDQALTEEHARQQHNERLRKQFGAQANVIGPWIQTKMEEIGRISIEMHGTLEDQLSHLRQYEKSIVNYKPKIDQLEGDHQLIQEALIFDNKHTNYTMEHIRVGWEQLLTTIARTINEVENQILTRDAKGISQEQMNEFRASFNHFDRDHSGTLGPEEFKACLISLGYDIGNDPQGEAEFARIMSIVDPNRLGVVTFQAFIDFMSRETADTDTADQVMASFKILAGDKNYITMDELRRELPPDQAEYCIARMAPYTGPDSVPGALDYMSFSTALYGESDL

SEQ ID NO: 894732 - protein, 477 aa, Homo sapiens
MLRQKDYETATLSEIKALLKKHEAFESDLAAHQDRVEQIAAIAQELNELDYYDSPSVNARCQKICDQWDNLGALTQKRREALERTEKLLETIDQLYLEYAKRAAPFNNWMEGAMEDLQDTFIVHTIEEIQGLTTAHEQFKATLPDADKERLAILGIHNEVSKIVQTYHVNMAGTNPYTTITPQEINGKWDHVRQLVPRRDQALTEEHARQQHNERLRKQFGAQANVIGPWIQTKMEEIGRISIEMHGTLEDQLSHLRQYEKSIVNYKPKIDQLEGDHQLIQEALIFDNKHTNYTMEHIRVGWEQLLTTIARTINEVENQILTRDAKGISQEQMNEFRASFNHFDRDHSGTLGPEEFKACLISLGYDIGNDPQGEAEFARIMSIVDPNRLGVVTFQAFIDFMSRETADTDTADQVMASFKILAGDKNYITMDELRRELPPDQAEYCIARMAPYTGPDSVPGALDYMSFSTALYGESDL

SEQ ID NO: 894733 - protein, 858 aa, Homo sapiens
MDHYDSQQTNDYMQPEEDWDRDLLLDPAWEKQQRKTFTAWCNSHLRKAGTQIENIEEDFRDGLKLMLLLEVISGERLAKPERGKMRVHKISNVNKALDFIASKGVKLVSIGAEEIVDGNVKMTLGMIWTIILRFAIQDISVEETSAKEGLLLWCQRKTAPYKNVNIQNFHISWKDGLGFCALIHRHRPELIDYGKLRKDDPLTNLNTAFDVAEKYLDIPKMLDAEDIVGTARPDEKAIMTYVSSFYHAFSGAQKAETAANRICKVLAVNQENEQLMEDYEKLASDLLEWIRRTIPWLENRVPENTMHAMQQKLEDFRDYRRLHKPPKVQEKCQLEINFNTLQTKLRLSNRPAFMPSEGRMVSDINNAWGCLEQVEKGYEEWLLNEIRRLERLDHLAEKFRQKASIHEAWTDGKEAMLRQKDYETATLSEIKALLKKHEAFESDLAAHQDRVEQIAAIAQELNELDYYDSPSVNARCQKICDQWDNLGALTQKRREALERTEKLLETIDQLYLEYAKRAAPFNNWMEGAMEDLQDTFIVHTIEEIQGLTTAHEQFKATLPDADKERLAILGIHNEVSKIVQTYHVNMAGTNPYTTITPQEINGKWDHVRQLVPRRDQALTEEHARQQHNERLRKQFGAQANVIGPWIQTKMEEIGRISIEMHGTLEDQLSHLRQYEKSIVNYKPKIDQLEGDHQLIQEALIFDNKHTNYTMEHIRVGWEQLLTTIARTINEVENQILTRDAKGISQEQMNEFRASFNHFDRDHSGTLGPEEFKACLISLGYDIGNDPQGEAEFARIMSIVDPNRLGVVTFQAFIDFMSRETADTDTADQVMASFKILAGDKGALDYMSFSTALYGESDL

SEQ ID NO: 894734 - protein, 930 aa, Homo sapiens
MDHYDSQQTNDYMQPEEDWDRDLLLDPAWEKQQRKTFTAWCNSHLRKAGTQIENIEEDFRDGLKLMLLLEVISGERLAKPERGKMRVHKISNVNKALDFIASKGVKLVSIGAEEIVDGNVKMTLGMIWTIILRFAIQDISVEETSAKEGLLLWCQRKTAPYKNVNIQNFHISWKDGLGFCALIHRHRPELIDYGKLRKDDPLTNLNTAFDVAEKYLDIPKMLDAEDIVGTARPDEKAIMTYVSSFYHAFSGAQKAETAANRICKVLAVNQENEQLMEDYEKLASDLLEWIRRTIPWLENRVPENTMHAMQQKLEDFRDYRRLHKPPKVQEKCQLEINFNTLQTKLRLSNRPAFMPSEGRMVSDINNAWGCLEQVEKGYEEWLLNEIRRLERLDHLAEKFRQKASIHEAWTDGKEAMLRQKDYETATLSEIKALLKKHEAFESDLAAHQDRVEQIAAIAQELNELDYYDSPSVNARCQKICDQWDNLGALTQKRREALERTEKLLETIDQLYLEYAKRAAPFNNWMEGAMEDLQDTFIVHTIEEIQGLTTAHEQFKATLPDADKERLAILGIHNEVSKIVQTYHVNMAGTNPYTTITPQEINGKWDHVRQLVPRRDQALTEEHARQQHNERLRKQFGAQANVIGPWIQTKMEEIGRISIEMHGTLEDQLSHLRQYEKSIVNYKPKIDQLEGDHQLIQEALIFDNKHTNYTMEHIRVGWEQLLTTIARTINEVENQILTRDAKGISQEQMNEFRASFNHFDRKKTGMMDTDDFRACLISMGYNMGEAEFARIMSIVDPNRLGVVTFQAFIDFMSRETADTDTADQVMASFKILAGDKLQEGGKMQTAHAAFTPPGFAAVSGRAALRLLDFAAFLTTLSSQNYITMDELRRELPPDQAEYCIARMAPYTGPDSVPGALDYMSFSTALYGESDL

SEQ ID NO: 894735 - protein, 892 aa, Homo sapiens; identical to SEQ ID NO: 894714

SEQ ID NO: 894736 - protein, 892 aa, Homo sapiens; identical to SEQ ID NO: 894714

SEQ ID NO: 894737 - protein, 880 aa, Homo sapiens
MDHYDSQQTNDYMQPEEDWDRDLLLDPAWEKQQRKTFTAWCNSHLRKAGTQIENIEEDFRDGLKLMLLLEVISGERLAKPERGKMRVHKISNVNKALDFIASKGVKLVSIGAEEIVDGNVKMTLGMIWTIILRFAIQDISVEETSAKEGLLLWCQRKTAPYKNVNIQNFHISWKDGLGFCALIHRHRPELIDYGKLRKDDPLTNLNTAFDVAEKYLDIPKMLDAEDIVGTARPDEKAIMTYVSSFYHAFSGAQKAETAANRICKVLAVNQENEQLMEDYEKLASDLLEWIRRTIPWLENRVPENTMHAMQQKLEDFRDYRRLHKPPKVQEKCQLEINFNTLQTKLRLSNRPAFMPSEGRMVSDINNAWGCLEQVEKGYEEWLLNEIRRLERLDHLAEKFRQKASIHEAWTDGKEAMLRQKDYETATLSEIKALLKKHEAFESDLAAHQDRVEQIAAIAQELNELDYYDSPSVNARCQKICDQWDNLGALTQKRREALERTEKLLETIDQLYLEYAKRAAPFNNWMEGAMEDLQDTFIVHTIEEIQGLTTAHEQFKATLPDADKERLAILGIHNEVSKIVQTYHVNMAGTNPYTTITPQEINGKWDHVRQLVPRRDQALTEEHARQQHNERLRKQFGAQANVIGPWIQTKMEEIGRISIEMHGTLEDQLSHLRQYEKSIVNYKPKIDQLEGDHQLIQEALIFDNKHTNYTMEHIRVGWEQLLTTIARTINEVENQILTRDAKGISQEQMNEFRASFNHFDRDHSGTLGPEEFKACLISLGYDIGNDPQGEAEFARIMSIVDPNRLGVVTFQAFIDFMSRETADTDTADQVMASFKILAGDKNYITMDELRRELPPDQAEYLVKRHIGACVFASSLVHENIL

SEQ ID NO: 894738 - protein, 846 aa, Homo sapiens
MDHYDSQQTNDYMQPEEDWDRDLLLDPAWEKQQRKTFTAWCNSHLRKAGTQIENIEEDFRDGLKLMLLLEVISGERLAKPERGKMRVHKISNVNKALDFIASKGVKLVSIGAEEIVDGNVKMTLGMIWTIILRFAIQDISVEETSAKEGLLLWCQRKTAPYKNVNIQNFHISWKDGLGFCALIHRHRPELIDYGKLRKDDPLTNLNTAFDVAEKYLDIPKMLDAEDIVGTARPDEKAIMTYVSSFYHAFSGAQKAETAANRICKVLAVNQENEQLMEDYEKLASDLLEWIRRTIPWLENRVPENTMHAMQQKLEDFRDYRRLHKPPKVQEKCQLEINFNTLQTKLRLSNRPAFMPSEGRMVSDINNAWGCLEQVEKGYEEWLLNEIRRLERLDHLAEKFRQKASIHEAWTDGKEAMLRQKDYETATLSEIKALLKKHEAFESDLAAHQDRVEQIAAIAQELNELDYYDSPSVNARCQKICDQWDNLGALTQKRREALERTEKLLETIDQLYLEYAKRAAPFNNWMEGAMEDLQDTFIVHTIEEIQGLTTAHEQFKATLPDADKERLAILGIHNEVSKIVQTYHVNMAGTNPYTTITPQEINGKWDHVRQLVPRRDQALTEEHARQQHNERLRKQFGAQANVIGPWIQTKMEEIGRISIEMHGTLEDQLSHLRQYEKSIVNYKPKIDQLEGDHQLIQEALIFDNKHTNYTMEHIRVGWEQLLTTIARTINEVENQILTRDAKGISQEQMNEFRASFNHFDRDHSGTLGPEEFKACLISLGYDIGNDPQCPRSDSLQNYFLQKRKKSYVKNQKTTYFIIEKVFFLHQTNGKKEERLTICTEMSCFVAT

SEQ ID NO: 894739 - protein, 892 aa, Homo sapiens; identical to SEQ ID NO: 894714

SEQ ID NO: 894740 - protein, 503 aa, Homo sapiens
LVREWTLGDVIIVQLIELLCDGGKEAMLRQKDYETATLSEIKALLKKHEAFESDLAAHQDRVEQIAAIAQELNELDYYDSPSVNARCQKICDQWDNLGALTQKRREALERTEKLLETIDQLYLEYAKRAAPFNNWMEGAMEDLQDTFIVHTIEEIQGLTTAHEQFKATLPDADKERLAILGIHNEVSKIVQTYHVNMAGTNPYTTITPQEINGKWDHVRQLVPRRDQALTEEHARQQHNERLRKQFGAQANVIGPWIQTKMEEIGRISIEMHGTLEDQLSHLRQYEKSIVNYKPKIDQLEGDHQLIQEALIFDNKHTNYTMEHIRVGWEQLLTTIARTINEVENQILTRDAKGISQEQMNEFRASFNHFDRDHSGTLGPEEFKACLISLGYDIGNDPQGEAEFARIMSIVDPNRLGVVTFQAFIDFMSRETADTDTADQVMASFKILAGDKNYITMDELRRELPPDQAEYCIARMAPYTGPDSVPGALDYMSFSTALYGESDL

SEQ ID NO: 894741 - protein, 720 aa, Homo sapiens
MDHYDSQQTNDYMQPEEDWDRDLLLDPAWEKQQRKTFTAWCNSHLRKAGTQIENIEEDFRDGLKLMLLLEVISGERLAKPERGKMRVHKISNVNKALDFIASKGVKLVSIGAEEIVDGNVKMTLGMIWTIILRFAIQDISVEETSAKEGLLLWCQRKTAPYKNVNIQNFHISWKDGLGFCALIHRHRPELIDYGKLRKDDPLTNLNTAFDVAEKYLDIPKMLDAEDIVGTARPDEKAIMTYVSSFYHAFSGAQKAETAANRICKVLAVNQENEQLMEDYEKLASDLLEWIRRTIPWLENRVPENTMHAMQQKLEDFRDYRRLHKPPKVQEKCQLEINFNTLQTKLRLSNRPAFMPSEGRMVSDINNAWGCLEQVEKGYEEWLLNEIRRLERLDHLAEKFRQKASIHEAWTDGKEAMLRQKDYETATLSEIKALLKKHEAFESDLAAHQDRVEQIAAIAQELNELDYYDSPSVNARCQKICDQWDNLGALTQKRREALERTEKLLETIDQLYLEYAKRAAPFNNWMEGAMEDLQDTFIVHTIEEIQGLTTAHEQFKATLPDADKERLAILGIHNEVSKIVQTYHVNMAGTNPYTTITPQEINGKWDHVRQLVPRRDQALTEEHARQQHNERLRKQFGAQANVIGPWIQTKMEEIGRISIEMHGTLEDQLSHLRQYEKSIVNYKPKIDQLEGDHQLIQEALIFDGALDYMSFSTALYGESDL

SEQ ID NO: 894742 - protein, 457 aa, Homo sapiens
MDHYDSQQTNDYMQPEEDWDRDLLLDPAWEKQQRKTFTAWCNSHLRKAGTQIENIEEDFRDGLKLMLLLEVISGERLAKPERGKMRVHKISNVNKALDFIASKGVKLVSIGAEEIVDGNVKMTLGMIWTIILRFAIHNEVSKIVQTYHVNMAGTNPYTTITPQEINGKWDHVRQLVPRRDQALTEEHARQQHNERLRKQFGAQANVIGPWIQTKMEEIGRISIEMHGTLEDQLSHLRQYEKSIVNYKPKIDQLEGDHQLIQEALIFDNKHTNYTMEHIRVGWEQLLTTIARTINEVENQILTRDAKGISQEQMNEFRASFNHFDRDHSGTLGPEEFKACLISLGYDIGNDPQGEAEFARIMSIVDPNRLGVVTFQAFIDFMSRETADTDTADQVMASFKILAGDKNYITMDELRRELPPDQAEYCIARMAPYTGPDSVPGALDYMSFSTALYGESDL

SEQ ID NO: 894743 - protein, 368 aa, Homo sapiens
  misc_feature (4)..(4): Xaa can be any naturally occurring amino acid
  misc_feature (6)..(6): Xaa can be any naturally occurring amino acid
  misc_feature (8)..(8): Xaa can be any naturally occurring amino acid
FDGXSXTXTMLREDDTNGEIQGLTTAHEQFKATLPDADKERLAILGIHNEVSKIVQTYHVNMAGTNPYTTITPQEINGKWDHVRQLVPRRDQALTEEHARQQHNERLRKQFGAQANVIGPWIQTKMEEIGRISIEMHGTLEDQLSHLRQYEKSIVNYKPKIDQLEGDHQLIQEALIFDNKHTNYTMEHIRVGWEQLLTTIARTINEVENQILTRDAKGISQEQMNEFRASFNHFDRDHSGTLGPEEFKACLISLGYDIGNDPQGEAEFARIMSIVDPNRLGVVTFQAFIDFMSRETADTDTADQVMASFKILAGDKNYITMDELRRELPPDQAEYCIARMAPYTGPDSVPGALDYMSFSTALYGESDL

SEQ ID NO: 894744 - protein, 823 aa, Homo sapiens
MDHYDSQQTNDYMQPEEDWDRDLLLDPAWEKQQRKTFTAWCNSHLRKAGTQIENIEEDFRDGLKLMLLLEVISGERLAKPERGKMRVHKISNVNKALDFIASKGVKLVSIGAEEIVDGNVKMTLGMIWTIILRFAIQDISVEETSAKEGLLLWCQRKTAPYKNVNIQNFHISWKDGLGFCALIHRHRPELIDYGKLRKDDPLTNLNTAFDVAEKYLDIPKMLDAEDIVGTARPDEKAIMTYVSSFYHAFSGAQKAETAANRICKVLAVNQENEQLMEDYEKLASDLLEWIRRTIPWLENRVPENTMHAMQQKLEDFRDYRRLHKPPKVQEKCQLEINFNTLQTKLRLSNRPAFMPSEGRMVSDINNAWGCLEQVEKGYEEWLLNEIRRLERLDHLAEKFRQKASIHEAWTDGKEAMLRQKDYETATLSEIKALLKKHEAFESDLAAHQDRVEQIAAIAQELNELDYYDSPSVNARCQKICDQWDNLGALTQKRREALERTEKLLETIDQLYLEYAKRAAPFNNWMEGAMEDLQDTFIVHTIEEIQGLTTAHEQFKATLPDADKERLAILGIHNEVSKIVQTYHVNMAGTNPYTTITPQEINGKWDHVRQLVPRRDQALTEEHARQQHNERLRKQFGAQANVIGPWIQTKMEEIGRISIEMHGTLEDQLSHLRQYEKSIVNYKPKIDQLEGDHQLIQEALIFDNKHTNYTMEHIRVGWEQLLTTIARTINEVENQILTRDAKGISQEQMNEFRASVLWTTCPSPRRCTARVTSNPPRPAALVLCAVPCLAPPPSPISCLGSVSAPSLHPGELGPTWHRSSLPAK

SEQ ID NO: 894745 - protein, 660 aa, Homo sapiens
MDHYDSQQTNDYMQPEEDWDRDLLLDPAWEKQQRKTFTAWCNSHLRKAGTQIENIEEDFRDGLKLMLLLEVISGERLAKPERGKMRVHKISNVNKALDFIASKGVKLVSIGAEEIVDGNVKMTLGMIWTIILRFAIQDISVEETSAKEGLLLWCQRKTAPYKNVNIQNFHISWKDGLGFCALIHRHRPELIDYGKLRKDDPLTNLNTAFDVAEKYLDIPKMLDAEDIVGTARPDEKAIMTYVSSFYHAFSGAQKAETAANRICKVLAVNQENEQLMEDYEKLASDLLEWIRRTIPWLENRVPENTMHAMQQKLEDFRDYRRLHKPPKVQEKCQLEINFNTLQTKLRLSNRPAFMPSEGRMVSDINNAWGCLEQVEKGYEEWLLNEIRRLERLDHLAEKFRQKASIHEAWTDGKEAMLRQKDYETATLSEIKALLKKHEAFESDLAAHQDRVEQIAAIAQELNELDYYDSPSVNARCQKICDQWDNLGALTQKRREALERTEKLLETIDQLYLEYAKRAAPFNNWMEGAMEDLQDTFIVHTIEEIQGLTTAHEQFKATLPDADKERLAILGIHNEVSKIVQTYHVNMAGTNPVLWTTCPSPRRCTARVTSNPPRPAALVLCAVPCLAPPPSPISCLGSVSAPSLHPGELGPTWHRSSLPAK

SEQ ID NO: 894746 - protein, 784 aa, Homo sapiens
MDHYDSQQTNDYMQPEEDWDRDLLLDPAWEKQQRKTFTAWCNSHLRKAGTQIENIEEDFRDGLKLMLLLEVISGERLAKPERGKMRVHKISNVNKALDFIASKGVKLVSIGAEEIVDGNVKMTLGMIWTIILRFAIQDISVEETSAKEGLLLWCQRKTAPYKNVNIQNFHISWKDGLGFCALIHRHRPELIDYGKLRKDDPLTNLNTAFDVAEKYLDIPKMLDAEDIVGTARPDEKAIMTYVSSFYHAFSGAQKAETAANRICKVLAVNQENEQLMEDYEKLASDLLEWIRRTIPWLENRVPENTMHAMQQKLEDFRDYRRLHKPPKVQEKCQLEINFNTLQTKLRLSNRPAFMPSEGRMVSDINNAWGCLEQVEKGYEEWLLNEIRRLERLDHLAEKFRQKASIHEAWTDGKEAMLRQKDYETATLSEIKALLKKHEAFESDLAAHQDRVEQIAAIAQELNELDYYDSPSVNARCQKICDQWDNLGALTQKRREALERTEKLLETIDQLYLEYAKRAAPFNNWMEGAMEDLQDTFIVHTIEEIQGLTTAHEQFKATLPDADKERLAILGIHNEVSKIVQTYHVNMAGTNPYTTITPQEINGKWDHVRQLVPRRDQALTEEHARQQHNERLRKQFGAQANVIGPWIQTKMEEIGRISIEMHGTLEDQLSHLRQYEKSIVNYKPKIDQLEGDHQLIQEALIFDNKHTNYTMEHIRVGWEQLLTTIARTINEVENQILTRDAKGISQEQMNEFRASFNHFDRKKTGMMDTDDFRACLISMGYNMVT

SEQ ID NO: 894747 - protein, 780 aa, Homo sapiens
MDHYDSQQTNDYMQPEEDWDRDLLLDPAWEKQQRKTFTAWCNSHLRKAGTQIENIEEDFRDGLKLMLLLEVISGERLAKPERGKMRVHKISNVNKALDFIASKGVKLVSIGAEEIVDGNVKMTLGMIWTIILRFAIQDISVEETSAKEGLLLWCQRKTAPYKNVNIQNFHISWKDGLGFCALIHRHRPELIDYGKLRKDDPLTNLNTAFDVAEKYLDIPKMLDAEDIVGTARPDEKAIMTYVSSFYHAFSGAQKAETAANRICKVLAVNQENEQLMEDYEKLASDLLEWIRRTIPWLENRVPENTMHAMQQKLEDFRDYRRLHKPPKVQEKCQLEINFNTLQTKLRLSNRPAFMPSEGRMVSDINNAWGCLEQVEKGYEEWLLNEIRRLERLDHLAEKFRQKASIHEAWTDGKEAMLRQKDYETATLSEIKALLKKHEAFESDLAAHQDRVEQIAAIAQELNELDYYDSPSVNARCQKICDQWDNLGALTQKRREALERTEKLLETIDQLYLEYAKRAAPFNNWMEGAMEDLQDTFIVHTIEEIQGLTTAHEQFKATLPDADKERLAILGIHNEVSKIVQTYHVNMAGTNPYTTITPQEINGKWDHVRQLVPRRDQALTEEHARQQHNERLRKQFGAQANVIGPWIQTKMEEIGRISIEMHGTLEDQLSHLRQYEKSIVNYKPKIDQLEGDHQLIQEALIFDNKHTNYTMEHIRVGWEQLLTTIARTINEVENQILTRDAKGISQEQMNEFRASFNHFDRVRAPSCAFLVQPPTPAPGPW

SEQ ID NO: 894748 - protein, 257 aa, Homo sapiens
ILPISSILVWIQAKMEEIGRISIEMHGTLEDQLSHLRQYEKSIVNYKPKIDQLEGDHQLIQEALIFDNKHTNYTMEHIRVGWEQLLTTIARTINEVENQILTRDAKGISQEQMNEFRASFNHFDRDHSGTLGPEEFKACLISLGYDIGNDPQGEAEFARIMSIVDPNRLGVVTFQAFIDFMSRETADTDTADQVMASFKILAGDKNYITMDELRRELPPDQAEYCIARMAPYTGPDSVPGALDYMSFSTALYGESDL

SEQ ID NO: 894749 - protein, 259 aa, Homo sapiens
CVASHCAAVGPWIQTKMEEIGRISIEMHGTLEDQLSHLRQYEKSIVNYKPKIDQLEGDHQLIQEALIFDNKHTNYTMEHIRVGWEQLLTTIARTINEVENQILTRDAKGISQEQMNEFRASFNHFDRDHSGTLGPEEFKACLISLGYDIGNDPQGEAEFARIMSIVDPNRLGVVTFQAFIDFMSRETADTDTADQVMASFKILAGDKNYITMDELRRELPPDQAEYCIARMAPYTGPDSVPGALDYMSFSTALYGESDL

SEQ ID NO: 894750 - protein, 740 aa, Homo sapiens
  misc_feature (718)..(718): Xaa can be any naturally occurring amino acid
  misc_feature (724)..(724): Xaa can be any naturally occurring amino acid
MDHYDSQQTNDYMQPEEDWDRDLLLDPAWEKQQRKTFTAWCNSHLRKAGTQIENIEEDFRDGLKLMLLLEVISGERLAKPERGKMRVHKISNVNKALDFIASKGVKLVSIGAEEIVDGNVKMTLGMIWTIILRFAIQDISVEETSAKEGLLLWCQRKTAPYKNVNIQNFHISWKDGLGFCALIHRHRPELIDYGKLRKDDPLTNLNTAFDVAEKYLDIPKMLDAEDIVGTARPDEKAIMTYVSSFYHAFSGAQKAETAANRICKVLAVNQENEQLMEDYEKLASDLLEWIRRTIPWLENRVPENTMHAMQQKLEDFRDYRRLHKPPKVQEKCQLEINFNTLQTKLRLSNRPAFMPSEGRMVSDINNAWGCLEQVEKGYEEWLLNEIRRLERLDHLAEKFRQKASIHEAWTDGKEAMLRQKDYETATLSEIKALLKKHEAFESDLAAHQDRVEQIAAIAQELNELDYYDSPSVNARCQKICDQWDNLGALTQKRREALERTEKLLETIDQLYLEYAKRAAPFNNWMEGAMEDLQDTFIVHTIEEIQGLTTAHEQFKATLPDADKERLAILGIHNEVSKIVQTYHVNMAGTNPYTTITPQEINGKWDHVRQLVPRRDQALTEEHARQQHNERLRKQFGAQANVIGPWIQTKMEEIGRISIEMHGTLEDQLSHLRQYEKSIVNYKPKIDQLEGDHQLIQEALIFDTFQQTRQQPNLQPIGXQQSRFXGLGETKPCFQPNPIRP

SEQ ID NO: 894751 - protein, 719 aa, Homo sapiens
MDHYDSQQTNDYMQPEEDWDRDLLLDPAWEKQQRKTFTAWCNSHLRKAGTQIENIEEDFRDGLKLMLLLEVISGERLAKPERGKMRVHKISNVNKALDFIASKGVKLVSIGAEEIVDGNVKMTLGMIWTIILRFAIQDISVEETSAKEGLLLWCQRKTAPYKNVNIQNFHISWKDGLGFCALIHRHRPELIDYGKLRKDDPLTNLNTAFDVAEKYLDIPKMLDAEDIVGTARPDEKAIMTYVSSFYHAFSGAQKAETAANRICKVLAVNQENEQLMEDYEKLASDLLEWIRRTIPWLENRVPENTMHAMQQKLEDFRDYRRLHKPPKVQEKCQLEINFNTLQTKLRLSNRPAFMPSEGRMVSDINNAWGCLEQVEKGYEEWLLNEIRRLERLDHLAEKFRQKASIHEAWTDGKEAMLRQKDYETATLSEIKALLKKHEAFESDLAAHQDRVEQIAAIAQELNELDYYDSPSVNARCQKICDQWDNLGALTQKRREALERTEKLLETIDQLYLEYAKRAAPFNNWMEGAMEDLQDTFIVHTIEEIQGLTTAHEQFKATLPDADKERLAILGIHNEVSKIVQTYHVNMAGTNPYTTITPQEINGKWDHLSHLRQYEKSIVNYKPKIDQLEGDHQLIQEALIFDNKHTNYTMEHIRVGWEQLLTTIARTINEVENQILTRDAKGISQEQMNEFRASFNHFDRVRAPSCAFLVQPPTPAPGPW

SEQ ID NO: 894752 - protein, 462 aa, Homo sapiens
MDHYDSQQTNDYMQPEEDWDRDLLLDPAWEKQQRKTFTAWCNSHLRKAGTQIENIEEDFRDGLKLMLLLEVISGERLAKPERGKMRVHKISNVNKALDFIASKGVKLVSIGAEEIVDGNVKMTLGMIWTIILRFAIQDISVEETSAKEGLLLWCQRKTAPYKNVNIQNFHISWKDGLGFCALIHRHRPELIDYGKLRKDDPLTNLNTAFDVAEKYLDIPKMLDAEDIVGTARPDEKAIMTYVSSFYHAFSGAQKAETAANRICKVLAVNQENEQLMEDYEKLASDLLEWIRRTIPWLENRVPENTMHAMQQKLEDFRDYRRLHKPPKVQEKCQLEINFNTLQTKLRLSNRPAFMPSEGRMVSDINNAWGCLEQVEKGYEEWLLNEIRRLERLDHLAEKFRQKASIHEAWTDGKEAMLRQKDYETATLSEIKALLKKHEAFESDLAAHQDRVEQIAAIAQELK

SEQ ID NO: 894753 - protein, 187 aa, Homo sapiens
MGSARWHIRVGWEQLLTTIARTINEVENQILTRDAKGISQEQMNEFRASFNHFDRDHSGTLGPEEFKACLISLGYDIGNDPQGEAEFARIMSIVDPNRLGVVTFQAFIDFMSRETADTDTADQVMASFKILAGDKNYITMDELRRELPPDQAEYCIARMAPYTGPDSVPGALDYMSFSTALYGESDL

SEQ ID NO: 894754 - protein, 578 aa, Homo sapiens
MDHYDSQQTNDYMQPEEDWDRDLLLDPAWEKQQRKTFTAWCNSHLRKAGTQIENIEEDFRDGLKLMLLLEVISGERLAKPERGKMRVHKISNVNKALDFIASKGVKLVSIGAEEIVDGNVKMTLGMIWTIILRFAIQDISVEETSAKEGLLLWCQRKTAPYKNVNIQNFHISWKDGLGFCALIHRHRPELIDYGKLRKDDPLTNLNTAFDVAEKYLDIPKMLDAEDIVGTARPDEKAIMTYVSSFYHAFSGAQKAETAANRICKVLAVNQENEQLMEDYEKLASDLLEWIRRTIPWLENRVPENTMHAMQQKLEDFRDYRRLHKPPKVQEKCQLEINFNTLQTKLRLSNRPAFMPSEGRMVSDINNAWGCLEQVEKGYEEWLLNEIRRLERLDHLAEKFRQKASIHEAWTDGKEAMLRQKDYETATLSEIKALLKKHEAFESDLAAHQDRVEQIAAIAQELNELDYYDSPSVNARCQKICDQWDNLGALTQKRREALERTEKLLETIDQLYLEYAKRAAPFNNWMEGAMEDLQDTFIVHTIEEIQLQNTGFKRFCQELRKLMLWEVTWVVSLWSSPSP

SEQ ID NO: 894755 - protein, 504 aa, Homo sapiens
MDHYDSQQTNDYMQPEEDWDRDLLLDPAWEKQQRKTFTAWCNSHLRKAGTQIENIEEDFRDGLKLMLLLEVISGERLAKPERGKMRVHKISNVNKALDFIASKGVKLVSIGAEEIVDGNVKMTLGMIWTIILRFAIQDISVEETSAKEGLLLWCQRKTAPYKNVNIQNFHISWKDGLGFCALIHRHRPELIDYGKLRKDDPLTNLNTAFDVAEKYLDIPKMLDAEDIVGTARPDEKAIMTYVSSFYHAFSGAQKAETAANRICKVLAVNQENEQLMEDYEKLASDLLEWIRRTIPWLENRVPENTMHAMQQKLEDFRDYRRLHKPPKVQEKCQLEINFNTLQTKLRLSNRPAFMPSEGRMVSDINNAWGCLEQVEKGYEEWLLNEIRRLERLDHLAEKFRQKASIHEAWTDGKEAMLRQKDYETATLSEIKALLKKHEAFESDLAAHQDRVEQIAAIAQELNELDYYDSPSVNARCQKICDQWDNLGPPPNWGYSRYDQHACSV

SEQ ID NO: 894756 - protein, 426 aa, Homo sapiens
MDHYDSQQTNDYMQPEEDWDRDLLLDPAWEKQQRKTFTAWCNSHLRKAGTQIENIEEDFRDGLKLMLLLEVISGERLAKPERGKMRVHKISNVNKALDFIASKGVKLVSIGAEEIVDGNVKMTLGMIWTIILRFAIQDISVEETSAKEGLLLWCQRKTAPYKNVNIQNFHISWKDGLGFCALIHRHRPELIDYGKLRKDDPLTNLNTAFDVAEKYLDIPKMLDAEDIVGTARPDEKAIMTYVSSFYHAFSGAQKAETAANRICKVLAVNQENEQLMEDYEKLASDLLEWIRRTIPWLENRVPENTMHAMQQKLEDFRDYRRLHKPPKVQEKCQLEINFNTLQTKLRLSNRPAFMPSEGRMVSDINNAWGCLEQVEKGYEEWLLNEIRRLERLDHLAEKFRQKASIHEAWTDGKEAMLREKGYEERT

SEQ ID NO: 894757 - protein, 71 aa, Homo sapiens
RILKEAMTWSAVSVSAGDKNYITMDELRRELPPDQAEYCIARMAPYTGPDSVPGALDYMSFSTALYGESDL

SEQ ID NO: 894758 - protein, 69 aa, Homo sapiens
VYLLIHTHVTYRPGTLQNYITMDELRRELPPDQAEYCIARMAPYTGPDSVPGALDYMSFSTALYGESDL

SEQ ID NO: 894759 - protein, 458 aa, Homo sapiens
MDHYDSQQTNDYMQPEEDWDRDLLLDPAWEKQQRKTFTAWCNSHLRKAGTQIENIEEDFRDGLKLMLLLEVISGERLAKPERGKMRVHKISNVNKALDFIASKGVKLVSIGAEEIVDGNVKMTLGMIWTIILRFAIQDISVEETSAKEGLLLWCQRKTAPYKNVNIQNFHISWKDGLGFCALIHRHRPELIDYGKLRKDDPLTNLNTAFDVAEKYLDIPKMLDAEDIVGTARPDEKAIMTYVSSFYHAFSGAQKAETAANRICKVLAVNQENEQLMEDYEKLASDLLEWIRRTIPWLENRVPENTMHAMQQKLEDFRDYRRLHKPPKVQEKCQLEINFNTLQTKLRLSNRPAFMPSEGRMVSGEPGGEPGPPDWTASTSELLLVVVKFSFMGVRMGVFASTYIHCSRSHFPLPVTTQAQSQTRPCGAAPSAQTILGQACPSRPLSIYSRPPSHKKSSL

SEQ ID NO: 894760 - protein, 370 aa, Homo sapiens
MDHYDSQQTNDYMQPEEDWDRDLLLDPAWEKQQRKTFTAWCNSHLRKAGTQIENIEEDFRDGLKLMLLLEVISGERLAKPERGKMRVHKISNVNKALDFIASKGVKLVSIGAEEIVDGNVKMTLGMIWTIILRFAIQDISVEETSAKEGLLLWCQRKTAPYKNVNIQNFHISWKDGLGFCALIHRHRPELIDYGKLRKDDPLTNLNTAFDVAEKYLDIPKMLDAEDIVGTARPDEKAIMTYVSSFYHAFSGAQKAETAANRICKVLAVNQENEQLMEDYEKLASDLLEWIRRTIPWLENRVPENTMHAMQQKLEDFRDYRRLHKPPKVQEKCQLEINFNTLQTKLRLSKRITRSKRVMRVAERHRATEES

SEQ ID NO: 894761 - protein, 322 aa, Homo sapiens
MDHYDSQQTNDYMQPEEDWDRDLLLDPAWEKQQRKTFTAWCNSHLRKAGTQIENIEEDFRDGLKLMLLLEVISGERLAKPERGKMRVHKISNVNKALDFIASKGVKLVSIGAEEIVDGNVKMTLGMIWTIILRFAIHNEVSKIVQTYHVNMAGTNPYTTITPQEINGKWDHVRQLVPRRDQALTEEHARQQHNERLRKQFGAQANVIGPWIQTKMEEIGRISIEMHGTLEDQLSHLRQYEKSIVNYKPKIDQVSWGPRGIDPPCPRSDSLQNYFLQKRKKSYVKNQKTTYFIIEKVFFLHQTNGKKEERLTICTEMSCFVAT

SEQ ID NO: 894762 - protein, 95 aa, Homo sapiens
GHVVQSTWHGVGAGVGAIRAMQYSAWVLWTTCPSPRRCTARVTSNPPRPAALVLCAVPCLAPPPSPISCLGSVSAPSLHPGELGPTWHRSSLPAK

SEQ ID NO: 894763 - protein, 217 aa, Homo sapiens
ILPISSILVWIQAKMEEIGRISIEMHGTLEDQLSHLRQYEKSIVNYKPKIDQLEGDHQLIQEALIFDNKHTNYTMEHIRVGWEQLLTTIARTINEVENQILTRDAKGISQEQMNEFRASFNHFDRKKTGMMDTDDFRACLISMGYNMVSWGPRGIDPPCPRSDSLQNYFLQKRKKSYVKNQKTTYFIIEKVFFLHQTNGKKEERLTICTEMSCFVAT

SEQ ID NO: 894764 - protein, 319 aa, Homo sapiens
MDHYDSQQTNDYMQPEEDWDRDLLLDPAWEKQQRKTFTAWCNSHLRKAGTQIENIEEDFRDGLKLMLLLEVISGERLAKPERGKMRVHKISNVNKALDFIASKGVKLVSIGAEEIVDGNVKMTLGMIWTIILRFAIQDISVEETSAKEGLLLWCQRKTAPYKNVNIQNFHISWKDGLGFCALIHRHRPELIDYGKLRKDDPLTNLNTAFDVAEKYLDIPKMLDAEDIVGTARPDEKAIMTYVSSFYHAFSGAQKRRHSSTQSPILPRRRPATQRRPSSPGRHEKTARTGPAPRHTRGETAPTPPPPRRPGRHGNGTAQA

SEQ ID NO: 894765 - protein, 42 aa, Homo sapiens
MHGTLEDQLSHLRQYEKSIVNYKPKIDQLEGDHQLIQEALIF

SEQ ID NO: 894766 - protein, 888 aa, Homo sapiens
APPPWRRVSPAPALPAPRAPARRTVGAASLDSALGNGSASRFGQPLRRPWARITVARFPQREVQMMQNVHLAPETDEDDLYSGYNDYNPIYDIEELENDAAFQQAVRTSHGRRPPITAKISSTAVTRPIATGYGSKTSLASSIGRPMTGAIQDGVTRPMTAVRAAGFTKAALRGSAFDPLSQSRGPASPLEAKKKDSPEEKIKQLEKEVNELVEESCIANSCGDLKLALEKAKDAGRKERVLVRQREQVTTPENINLDLTYSVLFNLASQYSVNEMYAEALNTYQVIVKNKMFSNAGILKMNMGNIYLKQRNYSKAIKFYRMALDQVPSVNKQMRIKIMQNIGVTFIQAGQYSDAINSYEHIMSMAPNLKAGYNLTICYFAIGDREKMKKAFQKLITVPLEIDEDKYISPSDDPHTNLVTEAIKNDHLRQMERERKAMAEKYIMTSAKLIAPVIETSFAAGYDWCVEVVKASQYVELANDLEINKAVTYLRQKDYNQAVEILKVLEKKDNRVKSAAATNLSALYYMGKDFAQASSYADIAVNSDRYNPAALTNKGNTVFANGDYEKAAEFYKEALRNDSSCTEALYNIGLTYEKLNRLDEALDCFLKLHAILRNSAEVLYQIANIYELMENPSQAIEWLMQVVSVIPTDPQVLSKLGELYDREGDKSQAFQYYYESYRYFPCNIEVIEWLGAYYIDTQFWEKAIQYFERASLIQPTQVKWQLMVASCFRRSGNYQKALDTYKDTHRKFPENVECLRFLVRLCTDLGLKDAQEYARKLKRLEKMKEIREQRIKSGRDGSGGSRGKREGSASGDSGQNYSASSKGERLSARLRALPGTNEPYESSSNKEIDASYVDPLGPQIERPKTAAKKRIDEDDFADEELGDDLLPE

SEQ ID NO: 894767 - protein, 140 aa, Homo sapiens
FLVGSGSVRTGHMERDPLNLLPRKSVLPGPEIAKCNYFSGEKYYLSAFLSSSLHRSWIKRCSRICQKTEEVGKNERNKGTAHKVRQRWQEGMTEVQCGKVAFQFQCSSDSTNGTGVQGGQIPELIFYDLRCPGRLQQVSE

SEQ ID NO: 894768 - protein, 833 aa, Homo sapiens [sequence omitted]

SEQ ID NO: 894769 - protein, 833 aa, Homo sapiens [sequence omitted]

SEQ ID NO: 894770 - protein, 799 aa, Homo sapiens
MKFTNTKVQMMQNVHLAPETDEDDLYSGYNDYNPIYDIEELENDAAFQQAVRTSHGRRPPITAKISSTAVTRPIATGYGSKTSLASSIGRPMTGAIQDGVTRPMTAVRAAGFTKAALRGSAFDPLSQSRGPASPLEAKKKDSPEEKIKQLEKEVNELVEESCIANSCGDLKLALEKAKDAGRKERVLVRQREQVTTPENINLDLTYSVLFNLASQYSVNEMYAEALNTYQVIVKNKMFSNAGILKMNMGNIYLKQRNYSKAIKFYRMALDQVPSVNKQMRIKIMQNIGVTFIQADREKMKKAFQKLITVPLEIDEDKYISPSDDPHTNLVTEAIKNDHLRQMERERKAMAEKYIMTSAKLIAPVIETSFAAGYDWCVEVVKASQYVELANDLEINKAVTYLRQKDYNQAVEILKVLEKKDNRVKSAAATNLSALYYMGKDFAQASSYADIAVNSDRYNPAALTNKGNTVFANGDYEKAAEFYKEALRNDSSCTEALYNIGLTYEKLNRLDEALDCFLKLHAILRNSAEVLYQIANIYELMENPSQAIEWLMQVVSVIPTDPQVLSKLGELYDREGDKSQAFQYYYESYRYFPCNIEVIEWLGAYYIDTQFWEKAIQYFERASLIQPTQVKWQLMVASCFRRSGNYQKALDTYKDTHRKFPENVECLRFLVRLCTDLGLKDAQEYARKLKRLEKMKEIREQRIKSGRDGSGGSRGKREGSASGDSGQNYSASSKGERLSARLRALPGTNEPYESSSNKEIDASYVDPLGPQIERPKTAAKKRIDEDDFADEELGDDLLPE

SEQ ID NO: 894771 - protein, 550 aa, Homo sapiens
MQNIGVTFIQAGQYSDAINSYEHIMSMAPNLKAGYNLTICYFAIGDREKMKKAFQKLITVPLEIDEDKYISPSDDPHTNLVTEAIKNDHLRQMERERKAMAEKYIMTSAKLIAPVIETSFAAGYDWCVEVVKASQYVELANDLEINKAVTYLRQKDYNQAVEILKVLEKKDNRVKSAAATNLSALYYMGKDFAQASSYADIAVNSDRYNPAALTNKGNTVFANGDYEKAAEFYKEALRNDSSCTEALYNIGLTYEKLNRLDEALDCFLKLHAILRNSAEVLYQIANIYELMENPSQAIEWLMQVVSVIPTDPQVLSKLGELYDREGDKSQAFQYYYESYRYFPCNIEVIEWLGAYYIDTQFWEKAIQYFERASLIQPTQVKWQLMVASCFRRSGNYQKALDTYKDTHRKFPENVECLRFLVRLCTDLGLKDAQEYARKLKRLEKMKEIREQRIKSGRDGSGGSRGKREGSASGDSGQNYSASSKGERLSARLRALPGTNEPYESSSNKEIDASYVDPLGPQIERPKTAAKKRIDEDDFADEELGDDLLPE

SEQ ID NO: 894772 - protein, 736 aa, Homo sapiens
MKFTNTKVQMMQNVHLAPETDEDDLYSGYNDYNPIYDIEELENDAAFQQAVRTSHGRRPPITAKISSTAVTRPIATGYGSKTSLASSIGRPMTGAIQDGVTRPMTAVRAAGFTKAALRGSAFDPLSQSRGPASPLEAKKKDSPEEKIKQLEKEVNELVEESCIANSCGDLKLALEKAKDAGRKERVLVRQREQVTTPENINLDLTYSVLFNLASQYSVNEMYAEALNTYQVIVKNKMFSNAGILKMNMGNIYLKQRNYSKAIKFYRMALDQVPSVNKQMRIKIMQNIGVTFIQAGQYSDAINSYEHIMSMAPNLKAGYNLTICYFAIGDREKMKKAFQKLITVPLEIDEDKYISPSDDPHTNLVTEAIKNDHLRQMERERKAMAEKYIMTSAKLIAPVIETSFAAGYDWCVEVVKASQYVELANDLEINKAVTYLRQKDYNQAVEILKVLEKKDNRVKSAAATNLSALYYMGKDFAQASSYADIAVNSDRYNPAALTNKGNTVFANGDYEKAAEFYKEALRNDSSCTEALYNIGLTYEKLNRLDEALDCFLKLHAILRNSAEVLYQIANIYELMENPSQAIEWLMQVVSVIPTDPQVLSKLGELYDREGDKSQAFQYYYESYRYFPCNIEVIEWLGAYYIDTQFWEKAIQYFERASLIQPTQVKWQLMVASCFRRSGNYQKALDTYKDTHRSWIKRCSRICQKTEEVGKNERNKGTAHKVRQRWQWGLPWQKRRKC

SEQ ID NO: 894773 - protein, 106 aa, Homo sapiens
MKEIREQRIKSGRDGSGGSRGKREGSASGDSGQNYSASSKGERLSARLRALPGTNEPYESSSNKEIDASYVDPLGPQIERPKTAAKKRIDEDDFADEELGDDLLPE

SEQ ID NO: 894774 - protein, 106 aa, Homo sapiens; identical to SEQ ID NO: 894773

SEQ ID NO: 894775 - protein, 796 aa, Homo sapiens
MKFTNTKVQMMQNVHLAPETDEDDLYSGYNDYNPIYDIEELENDAAFQQAVRTSHGRRPPITAKISSTAVTRPIATGYGSKTSLASSIGRPMTGAIQDGVTRPMTAVRAAGFTKAALRGSAFDPLSQSRGPASPLEAKKKDSPEEKIKQLEKEVNELVEESCIANSCGDLKLALEKAKDAGRKERVLVRQREQVTTPENINLDLTYSVLFNLASQYSVNEMYAEALNTYQVIVKNKMFSNAGILKMNMGNIYLKQRNYSKAIKFYRMALDQVPSVNKQMRIKIMQNIGVTFIQAGQYSDAINSYEHIMSMAPNLKAGYNLTICYFAIGDREKMKKAFQKLITVPLEIDEDKYISPSDDPHTNLVTEAIKNDHLRQMERERKAMAEKYIMTSAKLIAPVIETSFAAGYDWCVEVVKASQYVELANDLEINKAVTYLRQKDYNQAVEILKVLEKKDNRVKSAAATNLSALYYMGKDFAQASSYADIAVNSDRYNPAALTNKGNTVFANGDYEKAAEFYKEALRNDSSCTEALYNIGLTYEKLNRLDEALDCFLKLHAILRNSAEVLYQIANIYELMENPSQAIEWLMQVVSVIPTDPQVLSKLGELYDREGDKSQAFQYYYESYRYFPCNIEVIEWLGAYYIDTQFWEKAIQYFERASLIQPTQVKWQLMVASCFRRSGNYQKALDTYKDTHRKFPENVECLRFLVRLCTDLGLKDAQEYARKLKRLEKMKEIREQRIKSGRDGSGGSRGKREGSASGDASYVDPLGPQIERPKTAAKKRIDEDDFADEELGDDLLPE

SEQ ID NO: 894776 - protein, 119 aa, Homo sapiens
GYVIRSRVRMSGKKKEIREQRIKSGRDGSGGSRGKREGSASGDSGQNYSASSKGERLSARLRALPGTNEPYESSSNKEIDASYVDPLGPQIERPKTAAKKRIDEDDFADEELGDDLLPE

SEQ ID NO: 894777 - protein, 573 aa, Homo sapiens
MKFTNTKVQMMQNVHLAPETDEDDLYSGYNDYNPIYDIEELENDAAFQQAVRTSHGRRPPITAKISSTAVTRPIATGYGSKTSLASSIGRPMTGAIQDGVTRPMTAVRAAGFTKAALRGSAFDPLSQSRGPASPLEAKKKDSPEEKIKQLEKEVNELVEESCIANSCGDLKLALEKAKDAGRKERVLVRQREQVTTPENINLDLTYSVLFNLASQYSVNEMYAEALNTYQVIVKNKMFSNAGILKMNMGNIYLKQRNYSKAIKFYRMALDQVPSVNKQMRIKIMQNIGVTFIQAGQYSDAINSYEHIMSMAPNLKAGYNLTICYFAIGDREKMKKAFQKLITVPLEIDEDKYISPSDDPHTNLVTEAIKNDHLRQMERERKAMAEKYIMTSAKLIAPVIETSFAAGYDWCVEVVKASQYVELANDLEINKAVTYLRQKDYNQAVEILKVLEKKDNRVKSAAATNLSALYYMGKDFAQASSYADIAVNSDRYNPAALTNKGNTVFANGDYEKAAEFYKEALRNDSSCTEALYNIGLTYEKLNRLDEALDCFLKLHAILRNSAEVLYQIANMYLI

SEQ ID NO: 894778 - protein, 238 aa, Homo sapiens
MRFKNRFQRFMNHRAPANGRYKPTCYEHAANCYTHAFLIVPAIVGSALLHRLSDDCWEKITAWIYGMGLCALFIVSTVFHIVSWKKSHLRTVEHCFHMCDRMVIYFFIAASYAPWLNLRELGPLASHMRWFIWLMAAGGTIYVFLYHEKYKVVELFFYLTMGFSPALVVTSMNNTDGLQELACGGLIYCLGVVFFKSDGIIPFAHAIWHLFVATAAAVHYYAIWKYLYRSPTDFMRHL

SEQ ID NO: 894779 - protein, 84 aa, Homo sapiens
AGLRGGAQEPRGGGAGEAGGGRREVLGPLKRPPSRPQPPGLAPALSRPAAWPTPTLPGRRVPLDTQAASGAAQAHEGRAPGRRC

SEQ ID NO: 894780 - protein, 102 aa, Homo sapiens
MGAPASPGSPLAICGPQMDSRPRDSKPVLLPGDPFAPGAHPPDPHTGWALALSGNPNPSPGHRPRVLRPGFGLHPFTSRVGVSRGARNGVAPCGEICRKAGC

SEQ ID NO: 894781 - protein, 238 aa, Homo sapiens; identical to SEQ ID NO: 894778

SEQ ID NO: 894782 - protein, 205 aa, Homo sapiens
MAATSQLAMNMLLTVTHTQSDDCWEKITAWIYGMGLCALFIVSTVFHIVSWKKSHLRTVEHCFHMCDRMVIYFFIAASYAPWLNLRELGPLASHMRWFIWLMAAGGTIYVFLYHEKYKVVELFFYLTMGFSPALVVTSMNNTDGLQELACGGLIYCLGVVFFKSDGIIPFAHAIWHLFVATAAAVHYYAIWKYLYRSPTDFMRHL

SEQ ID NO: 894783 - protein, 238 aa, Homo sapiens; identical to SEQ ID NO: 894778

SEQ ID NO: 894784 - protein, 1380 aa, Homo sapiens
MASGRDERPPWRLGRLLLLMCLLLLGSSARAAHIKKAEATTTTTSAGAEAAEGQFDRYYHEEELESALREAAAAGLPGLARLFSIGRSVEGRPLWVLRLTAGLGSLIPEGDAGPDAAGPDAAGPLLPGRPQVKLVGNMHGDETVSRQVLIYLARELAAGYRRGDPRLVRLLNTTDVYLLPSLNPDGFERAREGDCGFGDGGPSGASGRDNSRGRDLNRSFPDQFSTGEPPALDEVPEVRALIEWIRRNKFVLSGNLHGGSVVASYPFDDSPEHKATGIYSKTSDDEVFKYLAKAYASNHPIMKTGEPHCPGDEDETFKDGITNGAHWYDVEGGMQDYNYVWANCFEITLELSCCKYPPASQLRQEWENNRESLITLIEKVHIGVKGFVKDSITGSGLENATISVAGINHNITTGRFGDFYRLLVPGTYNLTVVLTGYMPLTVTNVVVKEGPATEVDFSLRPTVTSVIPDTTEAVSTASTVAIPNILSGTSSSYQPIQPKDFHHHHFPDMEIFLRRFANEYPNITRLYSLGKSVESRELYVMEISDNPGVHEPGEPEFKYIGNMHGNEVVGRELLLNLIEYLCKNFGTDPEVTDLVHNTRIHLMPSMNPDGYEKSQEGDSISVIGRNNSNNFDLNRNFPDQFVQITDPTQPETIAVMSWMKSYPFVLSANLHGGSLVVNYPFDDDEQGLATYSKSPDDAVFQQIALSYSKENSQMFQGRPCKNMYPNEYFPHGITNGASWYNVPGGMQDWNYLQTNCFEVTIELGCVKYPLEKELPNFWEQNRRSLIQFMKQVHQGVRGFVLDATDGRGILNATISVAEINHPVTTYKTGDYWRLLVPGTYKITASARGYNPVTKNVTVKSEGAIQVNFTLVRSSTDSNNESKKGKGASSSTNDASDPTTKEFETLIKDLSAENGLESLMLRSSSNLALALYRYHSYKDLSEFLRGLVMNYPHITNLTNLGQSTEYRHIWSLEISNKPNVSEPEEPKIRFVAGIHGNAPVGTELLLALAEFLCLNYKKNPAVTQLVDRTRIVIVPSLNPDGRERAQEKDCTSKIGQTNARGKDLDTDFTNNASQPETKAIIENLIQKQDFSLSVALDGGSMLVTYPYDKPVQTVENKETLKHLASLYANNHPSMHMGQPSCPNKSDENIPGGVMRGAEWHSHLGSMKDYSVTYGHCPEITVYTSCCYFPSAARLPSLWADNKRSLLSMLVEVHKGVHGFVKDKTGKPISKAVIVLNEGIKVQTKEGGYFHVLLAPGVHNIIAIADGYQQQHSQVFVHHDAASSVVIVFDTDNRIFGLPRELVVTVSGATMSALILTACIIWCICSIKSNRHKDGFHRLRQHHDEYEDEIRMMSTGSKKSLLSHEFQDETDTEEETLYSSKH

SEQ ID NO: 894785 - protein, 353 aa, Homo sapiens
MASGRDERPPWRLGRLLLLMCLLLLGSSARAAHIKKAEATTTTTSAGAEAAEGQFDRYYHEEELESALREAAAAGLPGLARLFSIGRSVEGRPLWVLRLTAGLGSLIPEGDAGPDAAGPDAAGPLLPGRPQVKLVGNMHGDETVSRQVLIYLARELAAGYRRGDPRLVRLLNTTDVYLLPSLNPDGFERAREGDCGFGDGGPSGASGRDNSRGRDLNRSFPDQFSTGEPPALDEVPEVRALIEWIRRNKFVLSGNLHGGSVVASYPFDDSPEHKATGIYSKTSDDEVFKYLAKAYASNHPIMKTGEPHCPGDEDETFKDGITNGAHWYDVEGMQSIEFATFSPLFVEFCYVYS

SEQ ID NO: 894786 - protein, 1380 aa, Homo sapiens; identical to SEQ ID NO: 894784

SEQ ID NO: 894787 - protein, 1380 aa, Homo sapiens; identical to SEQ ID NO: 894784

SEQ ID NO: 894788 - protein, 1380 aa, Homo sapiens; identical to SEQ ID NO: 894784

SEQ ID NO: 894789 - protein, 1380 aa, Homo sapiens; identical to SEQ ID NO: 894784

SEQ ID NO: 894790 - protein, 1380 aa, Homo sapiens; identical to SEQ ID NO: 894784

SEQ ID NO: 894791 - protein, 1134 aa, Homo sapiens
MASGRDERPPWRLGRLLLLMCLLLLGSSARAAHIKKAEATTTTTSAGAEAAEGQFDRYYHEEELESALREAAAAGLPGLARLFSIGRSVEGRPLWVLRLTAGLGSLIPEGDAGPDAAGPDAAGPLLPGRPQVKLVGNMHGDETVSRQVLIYLARELAAGYRRGDPRLVRLLNTTDVYLLPSLNPDGFERAREGDCGFGDGGPSGASGRDNSRGRDLNRSFPDQFSTGEPPALDEVPEVRALIEWIRRNKFVLSGNLHGGSVVASYPFDDSPEHKATGIYSKTSDDEVFKYLAKAYASNHPIMKTGEPHCPGDEDETFKDGITNGAHWYDVEGGMQDYNYVWANCFEITLELSCCKYPPASQLRQEWENNRESLITLIEKVHIGVKGFVKDSITGSGLENATISVAGINHNITTGRFGDFYRLLVPGTYNLTVVLTGYMPLTVTNVVVKEGPATEVDFSLRPTVTSVIPDTTEAVSTASTVAIPNILSGTSSSYQPIQPKDFHHHHFPDMEIFLRRFANEYPNITRLYSLGKSVESRELYVMEISDNPGVHEPGEPEFKYIGNMHGNEVVGRELLLNLIEYLCKNFGTDPEVTDLVHNTRIHLMPSMNPDGYEKSQEGDSISVIGRNNSNNFDLNRNFPDQFVQITDPTQPETIAVMSWMKSYPFVLSANLHGGSLVVNYPFDDDEQGLATYSKSPDDAVFQQIALSYSKENSQMFQGRPCKNMYPNEYFPHGITNGASWYNVPGGMQDWNYLQTNCFEVTIELGCVKYPLEKELPNFWEQNRRSLIQFMKQVHQGVRGFVLDATDGRGILNATISVAEINHPVTTYKTGDYWRLLVPGTYKITASARGYNPVTKNVTVKSEGAIQVNFTLVRSSTDSNNESKKGKGASSSTNDASDPTTKEFETLIKDLSAENGLESLMLRSSSNLALALYRYHSYKDLSEFLRGLVMNYPHITNLTNLGQSTEYRHIWSLEISNKPNVSEPEEPKIRFVAGIHGNAPVGTELLLALAEFLCLNYKKNPAVTQLVDRTRIVIVPSLNPDGRERAQEKDCTSKIGQTNARGKDLDTDFTNNASQPETKAIIENLIQKQDFSLSVALDGGSMLVTYPYDKPVQTVENKETLKHLASLYANNRLCAS

SEQ ID NO: 894792 - protein, 1380 aa, Homo sapiens; identical to SEQ ID NO: 894784

SEQ ID NO: 894793 - protein, 462 aa, Homo sapiens [sequence omitted]

SEQ ID NO: 894794 - protein, 369 aa, Homo sapiens
FDGDSLSPAVTQLVDRTRIVIVPSLNPDGRERAQEKDCTSKIGQTNARGKDLDTDFTNNASQPETKAIIENLIQKQDFSLSVALDGGSMLVTYPYDKPVQTVENKETLKHLASLYANNHPSMHMGQPSCPNKSDENIPGGVMRGAEWHSHLGSMKDYSVTYGHCPEITVYTSCCYFPSAARLPSLWADNKRSLLSMLVEVHKGVHGFVKDKTGKPISKAVIVLNEGIKVQTKEGGYFHVLLAPGVHNIIAIADGYQQQHSQVFVHHDAASSVVIVFDTDNRIFGLPRELVVTVSGATMSALILTACIIWCICSIKSNRHKDGFHRLRQHHDEYEDEIRMMSTGSKKSLLSHEFQDETDTEEETLYSSKH

SEQ ID NO: 894795 - protein, 974 aa, Homo sapiens
MASGRDERPPWRLGRLLLLMCLLLLGSSARAAHIKKAEATTTTTSAGAEAAEGQFDRYYHEEELESALREAAAAGLPGLARLFSIGRSVEGRPLWVLRLTAGLGSLIPEGDAGPDAAGPDAAGPLLPGRPQVKLVGNMHGDETVSRQVLIYLARELAAGYRRGDPRLVRLLNTTDVYLLPSLNPDGFERAREGDCGFGDGGPSGASGRDNSRGRDLNRSFPDQFSTGEPPALDEVPEVRALIEWIRRNKFVLSGNLHGGSVVASYPFDDSPEHKATGIYSKTSDDEVFKYLAKAYASNHPIMKTGEPHCPGDEDETFKDGITNGAHWYDVEGGMQDYNYVWANCFEITLELSCCKYPPASQLRQEWENNRESLITLIEKVHIGVKGFVKDSITGSGLENATISVAGINHNITTGRFGDFYRLLVPGTYNLTVVLTGYMPLTVTNVVVKEGPATEVDFSLRPTVTSVIPDTTEAVSTASTVAIPNILSGTSSSYQPIQPKDFHHHHFPDMEIFLRRFANEYPNITRLYSLGKSVESRELYVMEISDNPGVHEPGEPEFKYIGNMHGNEVVGRELLLNLIEYLCKNFGTDPEVTDLVHNTRIHLMPSMNPDGYEKSQEGDSISVIGRNNSNNFDLNRNFPDQFVQITDPTQPETIAVMSWMKSYPFVLSANLHGGSLVVNYPFDDDEQGLATYSKSPDDAVFQQIALSYSKENSQMFQGRPCKNMYPNEYFPHGITNGASWYNVPGGMQDWNYLQTNCFEVTIELGCVKYPLEKELPNFWEQNRRSLIQFMKQVHQGVRGFVLDATDGRGILNATISVAEINHPVTTYKTGDYWRLLVPGTYKITASARGYNPVTKNVTVKSEGAIQVNFTLVRSSTDSNNESKKGKGASSSTNDASDPTTKEFETLIKDLSAENGLESLMLRSSSNLALALYRYHSYKDLSEFLRGLVMNYPHITNLTKGPKNLLLSSQIVFYIH

SEQ ID NO: 894796 - protein, 655 aa, Homo sapiens
MASGRDERPPWRLGRLLLLMCLLLLGSSARAAHIKKAEATTTTTSAGAEAAEGQFDRYYHEEELESALREAAAAGLPGLARLFSIGRSVEGRPLWVLRLTAGLGSLIPEGDAGPDAAGPDAAGPLLPGRPQVKLVGNMHGDETVSRQVLIYLARELAAGYRRGDPRLVRLLNTTDVYLLPSLNPDGFERAREGDCGFGDGGPSGASGRDNSRGRDLNRSFPDQFSTGEPPALDEVPEVRALIEWIRRNKFVLSGNLHGGSVVASYPFDDSPEHKATGIYSKTSDDEVFKYLAKAYASNHPIMKTGEPHCPGDEDETFKDGITNGAHWYDVEGGMQDYNYVWANCFEITLELSCCKYPPASQLRQEWENNRESLITLIEKVHIGVKGFVKDSITGSGLENATISVAGINHNITTGRFGDFYRLLVPGTYNLTVVLTGYMPLTVTNVVVKEGPATEVDFSLRPTVTSVIPDTTEAVSTASTVAIPNILSGTSSSYQPIQPKDFHHHHFPDMEIFLRRFANEYPNITRLYSLGKSVESRELYVMEISDNPGVHEPGEPEFKYIGNMHGNEVVGRELLLNLIEYLCKNFGTDPEVTDLVHNTRIHLMPSMNPDGYEKSQEGDSISVIGRNNSNNFDLNRMHFFSVSPRDFPFPWSYGGK

SEQ ID NO: 894797 - protein, 1413 aa, Homo sapiens
MASGRDERPPWRLGRLLLLMCLLLLGSSARAAHIKKAEATTTTTSAGAEAAEGQFDRYYHEEELESALREAAAAGLPGLARLFSIGRSVEGRPLWVLRLTAGLGSLIPEGDAGPDAAGPDAAGPLLPGRPQVKLVGNMHGDETVSRQVLIYLARELAAGYRRGDPRLVRLLNTTDVYLLPSLNPDGFERAREGDCGFGDGGPSGASGRDNSRGRDLNRSFPDQFSTGEPPALDEVPEVRALIEWIRRNKFVLSGNLHGGSVVASYPFDDSPEHKATGIYSKTSDDEVFKYLAKAYASNHPIMKTGEPHCPGDEDETFKDGITNGAHWYDVEGGMQDYNYVWANCFEITLELSCCKYPPASQLRQEWENNRESLITLIEKVHIGVKGFVKDSITGSGLENATISVAGINHNITTGRFGDFYRLLVPGTYNLTVVLTGYMPLTVTNVVVKEGPATEVDFSLRPTVTSVIPDTTEAVSTASTVAIPNILSGTSSSYQPIQPKDFHHHHFPDMEIFLRRFANEYPNITRLYSLGKSVESRELYVMEISDNPGVHEPGEPEFKYIGNMHGNEVVGRELLLNLIEYLCKNFGTDPEVTDLVHNTRIHLMPSMNPDGYEKSQEGDSISVIGRNNSNNFDLNRNFPDQFVQITDPTQPETIAVMSWMKSYPFVLSANLHGGSLVVNYPFDDDEQGLATYSKSPDDAVFQQIALSYSKENSQMFQGRPCKNMYPNEYFPHGITNGASWYNVPGGMQDWNYLQTNCFEVTIELGCVKYPLEKELPNFWEQNRRSLIQFMKQVHQGVRGFVLDATDGRGILNATISVAEINHPVTTYKTGDYWRLLVPGTYKITASARGYNPVTKNVTVKSEGAIQVNFTLVRSSTDSNNESKKGKGASSSTNDASDPTTKEFETLIKDLSAENGLESLMLRSSSNLALALYRYHSYKDLSEFLRGLVMNYPHITNLTNLGQSTEYRHIWSLEISNKPNVSEPEEPKIRFVAGIHGNAPVGTELLLALAEFLCLNYKKNPAVTQLVDRTRIVIVPSLNPDGRERAQEKDCTSKIGQTNARGKDLDTDFTNNASQPETKAIIENLIQKQDFSLSVALDGGSMLVTYPYDKPVQTVENKETLKHLASLYANNHPSMHMGQPSCPNKSDENIPGGVMRGAEWHSHLGSMKDYSVTYGHCPEITVYTSCCYFPSAARLPSLWADNKRSLLSMLVEVHKGVHGFVKDKTGKPISKAVIVLNEGIKVQTKEGGYFHVLLAPGVHNIIAIADGYQQQHSQVFVHHDAASSVVIVFDTDNRIFGLPRELVVTVSGATMSALILTACIIWCICSIKSNRHKDGFHRLRQHHDEYEDEIRMMSTGSKKSLLSHEFQDETDTLHPETLCIQRHFASRDTLHPEALCIQRHFASRGTLHPETLCIQ

SEQ ID NO: 894798 - protein, 848 aa, Homo sapiens
MASGRDERPPWRLGRLLLLMCLLLLGSSARAAHIKKAEATTTTTSAGAEAAEGQFDRYYHEEELESALREAAAAGLPGLARLFSIGRSVEGRPLWVLRLTAGLGSLIPEGDAGPDAAGPDAAGPLLPGRPQVKLVGNMHGDETVSRQVLIYLARELAAGYRRGDPRLVRLLNTTDVYLLPSLNPDGFERAREGDCGFGDGGPSGASGRDNSRGRDLNRSFPDQFSTGEPPALDEVPEVRALIEWIRRNKFVLSGNLHGGSVVASYPFDDSPEHKATGIYSKTSDDEVFKYLAKAYASNHPIMKTGEPHCPGDEDETFKDGITNGAHWYDVEGGMQDYNYVWANCFEITLELSCCKYPPASQLRQEWENNRESLITLIEKVHIGVKGFVKDSITGSGLENATISVAGINHNITTGRFGDFYRLLVPGTYNLTVVLTGYMPLTVTNVVVKEGPATEVDFSLRPTVTSVIPDTTEAVSTASTVAIPNILSGTSSSYQPIQPKDFHHHHFPDMEIFLRRFANEYPNITRLYSLGKSVESRELYVMEISDNPGVHEPGEPEFKYIGNMHGNEVVGRELLLNLIEYLCKNFGTDPEVTDLVHNTRIHLMPSMNPDGYEKSQEGDSISVIGRNNSNNFDLNRNFPDQFVQITDPTQPETIAVMSWMKSYPFVLSANLHGGSLVVNYPFDDDEQGLATYSKSPDDAVFQQIALSYSKENSQMFQGRPCKNMYPNEYFPHGITNGASWYNVPGGMQDWNYLQTNCFEVTIELGCVKYPLEKELPNFWEQNRRSLIQFMKQVHQGVRGFVLDATDGRGILNATISVAEINHPVTTYKTGDYWRLLVPGTYKITASARG

SEQ ID NO: 894799 - protein, 725 aa, Homo sapiens
MASGRDERPPWRLGRLLLLMCLLLLGSSARAAHIKKAEATTTTTSAGAEAAEGQFDRYYHEEELESALREAAAAGLPGLARLFSIGRSVEGRPLWVLRLTAGLGSLIPEGDAGPDAAGPDAAGPLLPGRPQVKLVGNMHGDETVSRQVLIYLARELAAGYRRGDPRLVRLLNTTDVYLLPSLNPDGFERAREGDCGFGDGGPSGASGRDNSRGRDLNRSFPDQFSTGEPPALDEVPEVRALIEWIRRNKFVLSGNLHGGSVVASYPFDDSPEHKATGIYSKTSDDEVFKYLAKAYASNHPIMKTGEPHCPGDEDETFKDGITNGAHWYDVEGGMQDYNYVWANCFEITLELSCCKYPPASQLRQEWENNRESLITLIEKVHIGVKGFVKDSITGSGLENATISVAGINHNITTGRFGDFYRLLVPGTYNLTVVLTGYMPLTVTNVVVKEGPATEVDFSLRPTVTSVIPDTTEAVSTASTVAIPNILSGTSSSYQPIQPKDFHHHHFPDMEIFLRRFANEYPNITRLYSLGKSVESRELYVMEISDNPGVHEPGEPEFKYIGNMHGNEVVGRELLLNLIEYLCKNFGTDPEVTDLVHNTRIHLMPSMNPDGYEKSQEGDSISVIGRNNSNNFDLNRNFPDQFVQITDPTQPETIAVMSWMKSYPFVLSANLHGGSLVVNYPFDDDEQGLATYSKSPDDAVFQQIALSYSKVGLSLNIKCYKINSFI

SEQ ID NO: 894800 - protein, 329 aa, Homo sapiens
MGRTSKDKRDVYYRLAKENGWRARSAFKLLQLDKEFQLFQGVTRAVDLCAAPGSWSQVLSQKIGGQGSGHVVAVDLQAMAPLPGVVQIQGDITQLSTAKEIIQHFKGCPADLVVCDGAPDVTGLHDVDEYMQAQLLLAALNIATHVLKPGGCFVAKIFRGRDVTLLYSQLQVFFSSVLCAKPRSSRNSSIEAFAVCQGYDPPEGFIPDLSKPLLDHSYDPDFNQLDGPTRIIVPFVTCGDLSSYDSDRSYPLDLEGGSEYKYTPPTQPPISPPYQEACTLKRKGQLAKEIRPQDCPISRVDTFPQPLAAPQCHTLLAPEMEDNEMSCSP

SEQ ID NO: 894801 - protein, 329 aa, Homo sapiens; identical to SEQ ID NO: 894800

SEQ ID NO: 894802 - protein, 80 aa, Homo sapiens
GCKGQEAGGTEVHTAPEKCALPHDHTHQTEAKRSTACIRTPTPEQHELQQESESNQRTGSGTLILPLSIAVHCQGDHPAL

SEQ ID NO: 894803 - protein, 329 aa, Homo sapiens; identical to SEQ ID NO: 894800

SEQ ID NO: 894804 - protein, 337 aa, Homo sapiens
MGRTSKDKRDVYYRLAKENGWRARSAFKLLQLDKEFQLFQGVTRAVDLCAAPGSWSQVLSQKIGGQGSGHVVAVDLQAMAPLPGVVQIQGDITQLSTAKEIIQHFKGCPADLVVCDGAPDVTGLHDVDEYMQAQLLLAALNIATHVLKPGGCFVAKIFRGRDVTLLYSQLQVFFSSVLCAKPRSSRNSSIEAFAVCQGYDPPEGFIPDLSKPLLDHSYDPDFNQLDGPTRIIVPFVTCGDLSSYDSDRSYPLDLEGGSEYKYTPPTQPPISPPYQEACTLKRKGQLAKEIRPQDCPISRVDTFPQPLAAPQCHTLLAPEVWKCDSQPALTPSPCAFF

SEQ ID NO: 894805 - protein, 263 aa, Homo sapiens
MGRTSKDKRDVYYRLAKENGWRARSAFKLLQLDKEFQLFQGVTRAVDLCAAPGSWSQVLSQKIGGQGSGHVVAVDLQAMAPLPGVVQIQGDITQLSTAKEIIQHFKGCPADLVVCDGAPDVTGLHDVDEYMQAQLLLAALNIATHVLKPGGCFVAKIFRGRDVTLLYSQLQVFFSSVLCAKPRSSRNSSIEAFAVCQGYDPPEGFIPDLSKPLLDHSYDPDFNQLDGPTRIIVPFVTCGDLSSYDSDRSYPLDMEDNEMSCSP

SEQ ID NO: 894806 - protein, 329 aa, Homo sapiens; identical to SEQ ID NO: 894800

SEQ ID NO: 894807 - protein, 363 aa, Homo sapiens
MGRTSKDKRDVYYRLAKENGWRARSAFKLLQLDKEFQLFQGVTRAVDLCAAPGSWSQVLSQKIGGQGSGHVVAVDLQAMAPLPGVVQIQGDITQLSTAKEIIQHFKGCPADLVVCDGAPDVTGLHDVDEYMQAQLLLAALNIATHVLKPGGCFVAKIFRGRDVTLLYSQLQVFFSSVLCAKPRSSRNSSIGQWGGGARQAEGDLWDADCTRRKRQSCLIHLPLAEAFAVCQGYDPPEGFIPDLSKPLLDHSYDPDFNQLDGPTRIIVPFVTCGDLSSYDSDRSYPLDLEGGSEYKYTPPTQPPISPPYQEACTLKRKGQLAKEIRPQDCPISRVDTFPQPLAAPQCHTLLAPEMEDNEMSCSP

SEQ ID NO: 894808 - protein, 329 aa, Homo sapiens; identical to SEQ ID NO: 894800

SEQ ID NO: 894809 - protein, 329 aa, Homo sapiens; identical to SEQ ID NO: 894800

SEQ ID NO: 894810 - protein, 329 aa, Homo sapiens; identical to SEQ ID NO: 894800

SEQ ID NO: 894811 - protein, 337 aa, Homo sapiens; identical to SEQ ID NO: 894804

SEQ ID NO: 894812 - protein, 357 aa, Homo sapiens
MGRTSKDKRDVYYRLAKENGWRARSAFKLLQLDKEFQLFQGVTRAVDLCAAPGSWSQVLSQKIGGQGSGHVVAVDLQAMAPLPGVVQIQGDITQLSTAKEIIQHFKGCPADLVVCDGAPDVTGLHDVDEYMQAQLLLAVSNLATPDPLWPPPGCLHLSLSRLSCPQALNIATHVLKPGGCFVAKIFRGRDVTLLYSQLQVFFSSVLCAKPRSSRNSSIEAFAVCQGYDPPEGFIPDLSKPLLDHSYDPDFNQLDGPTRIIVPFVTCGDLSSYDSDRSYPLDLEGGSEYKYTPPTQPPISPPYQEACTLKRKGQLAKEIRPQDCPISRVDTFPQPLAAPQCHTLLAPEMEDNEMSCSP

SEQ ID NO: 894813 - protein, 337 aa, Homo sapiens; identical to SEQ ID NO: 894804

SEQ ID NO: 894814 - protein, 251 aa, Homo sapiens
MAPLPGVVQIQGDITQLSTAKEIIQHFKGCPADLVVCDGAPDVTGLHDVDEYMQAQLLLAALNIATHVLKPGGCFVAKIFRGRDVTLLYSQLQVFFSSVLCAKPRSSRNSSIEAFAVCQGYDPPEGFIPDLSKPLLDHSYDPDFNQLDGPTRIIVPFVTCGDLSSYDSDRSYPLDLEGGSEYKYTPPTQPPISPPYQEACTLKRKGQLAKEIRPQDCPISRVDTFPQPLAAPQCHTLLAPEMEDNEMSCSP

SEQ ID NO: 894815 - protein, 251 aa, Homo sapiens; identical to SEQ ID NO: 894814

SEQ ID NO: 894816 - protein, 300 aa, Homo sapiens [sequence omitted]

SEQ ID NO: 894817 - protein, 220 aa, Homo sapiens
MGRTSKDKRDVYYRLAKENGWRARSAFKLLQLDKEFQLFQGVTRAVDLCAAPGSWSQVLSQKIGGQGSGHVVAVDLQAMAPLPGVVQIQGDITQLSTAKEIIQHFKGCPADLVVCDGAPDVTGLHDVDEYMQAQLLLAALNIATHVLKPGGCFVAKIFRGRDVTLLYSQLQVFFSSVLCAKPRSSRNSSIETSPEEGSATTLKTTRKETMKVCLYCSGNS

SEQ ID NO: 894818 - protein, 305 aa, Homo sapiens [sequence omitted]

SEQ ID NO: 894819 - protein, 233 aa, Homo sapiens
MQAQLLLAALNIATHVLKPGGCFVAKIFRGRDVTLLYSQLQVFFSSVLCAKPRSSRNSSIGQWGGGARQAEGDLWDADCTRRKRQSCLIHLPLAEAFAVCQGYDPPEGFIPDLSKPLLDHSYDPDFNQLDGPTRIIVPFVTCGDLSSYDSDRSYPLDLEGGSEYKYTPPTQPPISPPYQEACTLKRKGQLAKEIRPQDCPISRVDTFPQPLAAPQCHTLLAPEMEDNEMSCSP

SEQ ID NO: 894820 - protein, 371 aa, Homo sapiens
MGRTSKDKRDVYYRLAKENGWRARSAFKLLQLDKEFQLFQGVTRAVDLCAAPGSWSQVLSQKIGGQGSGHVVAVDLQAMAPLPGVVQIQGDITQLSTAKEIIQHFKGCPADLVVCDGAPDVTGLHDVDEYMQAQLLLAALNIATHVLKPGGCFVAKIFRGRDVTLLYSQLQVFFSSVLCAKPRSSRNSSIGQWGGGARQAEGDLWDADCTRRKRQSCLIHLPLAEAFAVCQGYDPPEGFIPDLSKPLLDHSYDPDFNQLDGPTRIIVPFVTCGDLSSYDSDRSYPLDLEGGSEYKYTPPTQPPISPPYQEACTLKRKGQLAKEIRPQDCPISRVDTFPQPLAAPQCHTLLAPEVWKCDSQPALTPSPCAFF

SEQ ID NO: 894821 - protein, 158 aa, Homo sapiens
  misc_feature (6)..(6): Xaa can be any naturally occurring amino acid
  misc_feature (11)..(11): Xaa can be any naturally occurring amino acid
  misc_feature (16)..(16): Xaa can be any naturally occurring amino acid
  misc_feature (23)..(23): Xaa can be any naturally occurring amino acid
MQLLFXPMWFXFDCEXRNALKKXVSVFVFSSMHFPDSETNTLSGPFLYPDFNQLDGPTRIIVPFVTCGDLSSYDSDRSYPLDLEGGSEYKYTPPTQPPISPPYQEACTLKRKGQLAKEIRPQDCPISRVDTFPQPLAAPQCHTLLAPEMEDNEMSCSP

SEQ ID NO: 894822 - protein, 334 aa, Homo sapiens
MGRTSKDKRDVYYRLAKENGWRARSAFKLLQLDKEFQLFQGVTRAVDLCAAPGSWSQVLSQKIGGQGSGHVVAVDLQAMAPLPGVVQIQGDITQLSTAKEIIQHFKGCPADLVVCDGAPDVTGLHDVDEYMQAQLLLAALNIATHVLKPGGCFVAKIFRGRDVTLLYSQLQVFFSSVLCAKPRSSRNSSIGQWGGGARQAEGDLWDADCTRRKRQSCLIHLPLAEAFAVCQGYDPPEGFIPDLSKPLLDHSYDPDFNQLDGPTRIIVPFVTCGDLSSYDSDRSYPLDLEGGSEYKYTPPTQPPISPPYQEACTLKRKGQLAKEIRPSVPHPAGP

SEQ ID NO: 894823 - protein, 111 aa, Homo sapiens
MVRTKADSVPGTYRKVVAARAPRKVLGSSTSATNSTSVSSRKAENKYAGGNPVCVRPTPKWQKGIGEFFRLSPKDSEKENQIPEEAGSSGLGKAKRKACPLQPDHTNDEKE

SEQ ID NO: 894824 - protein, 111 aa, Homo sapiens; identical to SEQ ID NO: 894823

SEQ ID NO: 894825 - protein, 127 aa, Homo sapiens
KVILLFWIARLSSPSCWGPGLGVGTLLPLLNTLFCLSSQWWLLEPPERCCGSSTSATNSTSVSSRKAENKYAGGNPVCVRPTPKWQKGIGEFFRLSPKDSEKENQIPEEAGSSGLGKAKRKACPCAT

SEQ ID NO: 894826 - protein, 104 aa, Homo sapiens
MVLCKIKQHVEGIVSAWWLLEPPERCCGSSTSATNSTSVSSRKAENKYAGGNPVCVRPTPKWQKGIGEFFRLSPKDSEKENQIPEEAGSSGLGKAKRKACPCAT

SEQ ID NO: 894827 - protein, 111 aa, Homo sapiens; identical to SEQ ID NO: 894823

SEQ ID NO: 894828 - protein, 399 aa, Homo sapiens
MSQVTFSDVAIDFSHEEWACLDSAQRDLYKDVMVQNYENLVSVGLSVTKPYVIMLLEDGKEPWMMEKKLSKDWESRWENKELSTKKDIYDEDSPQPVTMEKVVKQSYEFSNSNKNLEYTECDTFRSTFHSKSTLSEPQNNSAEGNSHKYDILKKNLSKKSVIKSERINGGKKLLNSNKSGAAFNQSKSLTLPQTCNREKIYTCSECGKAFGKQSILSRHWRIHTGEKPYECRECGKTFSHGSSLTRHQISHSGEKPYKCIECGKAFSHGSSLTNHQSTHTGEKPYECMNCGKSFSRVSLLIQHLRIHTQEKRYECRICGKAFIHSSSLIHHQKSHTGEKPYECRECGKAFCCSSHLTQHQRIHSMKKKYECNKCLKVFSSFSFLVQHQSIHTEEKPFEV

SEQ ID NO: 894829 - protein, 399 aa, Homo sapiens; identical to SEQ ID NO: 894828

SEQ ID NO: 894830 - protein, 131 aa, Homo sapiens
MSQVTFSDVAIDFSHEEWACLDSAQRDLYKDVMVQNYENLVSVGLSVTKPYVIMLLEDGKEPWMMEKKLSKAYPFPLSHSVPASVNFGFSALFEHCSEVTEIFELSELCVFWVLHFLSNSPNSTVEAFFKK

SEQ ID NO: 894831 - protein, 131 aa, Homo sapiens; identical to SEQ ID NO: 894830

SEQ ID NO: 894832 - protein, 368 aa, Homo sapiens
MPRFCSEGLIQGCLSVTKPYVIMLLEDGKEPWMMEKKLSKDWESRWENKELSTKKDIYDEDSPQPVTMEKVVKQSYEFSNSNKNLEYTECDTFRSTFHSKSTLSEPQNNSAEGNSHKYDILKKNLSKKSVIKSERINGGKKLLNSNKSGAAFNQSKSLTLPQTCNREKIYTCSECGKAFGKQSILSRHWRIHTGEKPYECRECGKTFSHGSSLTRHQISHSGEKPYKCIECGKAFSHGSSLTNHQSTHTGEKPYECMNCGKSFSRVSLLIQHLRIHTQEKRYECRICGKAFIHSSSLIHHQKSHTGEKPYECRECGKAFCCSSHLTQHQRIHSMKKKYECNKCLKVFSSFSFLVQHQSIHTEEKPFEV

SEQ ID NO: 894833 - protein, 87 aa, Homo sapiens [sequence omitted]

SEQ ID NO: 894834 - protein, 131 aa, Homo sapiens; identical to SEQ ID NO: 894830

SEQ ID NO: 894835 - protein, 105 aa, Homo sapiens
MSQRQYPECYLAPNGCLVSNCGVNKMSNEELVGQNHGMEGEACTGGDVTFSDVAIDFSHEEWACLDSAQRDLYKDVMVQNYENLVSVGKDITPSTPIGDTFLLPP

SEQ ID NO: 894836 - protein, 399 aa, Homo sapiens; identical to SEQ ID NO: 894828

SEQ ID NO: 894837 - protein, 199 aa, Homo sapiens
MSQVTFSDVAIDFSHEEWACLDSAQRDLYKDVMVQNYENLVSVGLSVTKPYVIMLLEDGKEPWMMEKKLSKDWESRWENKELSTKKDIYDEDSPQPVTMEKVVKQSYEFSNSNKNLEYTECDTFRSTFHSKSTLSEPQNNSAEGNSHKYDILKKNLSKKSVIKSERINGGKKLLNSNKSGAAFNQSKSLTLPQTCNREN

SEQ ID NO: 894838 - protein, 944 aa, Homo sapiens
MSGSHTPACGPFSALTPSIWPQEILAKYTQKEESAEQPEFYYDEFGFRVYKEEGDEPGSSLLANSPLMEDAPQRLRWQAHLEFTHNHDVGDLTWDKIAVSLPRSEKLRSLVLAGIPHGMRPQVKVATGTHRVLRGSWPHDQVSRERLSALAAPFPQLWMRLSGALQKKRNSELSYREIVKNSSNDETIAAKQIEKDLLRTMPSNACFASMGSIGVPRLRRVLRALAWLYPEIGYCQGTGMVAACLLLFLEEEDAFWMMSAIIEDLLPASYFSTTLLGVQTDQRVLRHLIVQYLPRLDKLLQEHDIELSLITLHWFLTAFASVVDIKLLLRIWDLFFYEGSRVLFQLTLGMLHLKEEELIQSENSASIFNTLSDIPSQMEDAELLLGVAMRLAGSLTDVAVETQRRKHLAYLIADQGQLLGAGTLTNLSQVAQDGGPHLDPQHTGRRGHLEVQSAGAAENKPALPALPPSLAQSDHSCGVIQASSGFVHLQVLILARFGRKADPALIICFQFLEPASEAISDEKYKPRAGGFSSSRGQDHPDPLLLVQVVRRRTQRRKSTITALLFGESSASARQCGHAGVCPHAHVDVELPPRGPGVGCGHHGSLGLLGEDDLEALKAKNIKQTELVADLREAILRVARHFQCTDPKNCSVELTPDYSMESHQRDHENYVACSRSHRRRAKALLDFERHDDDELGFRKNDIITIVSQKDEHCWVGELNGLRGWFPAKFVEVLDERSKEYSIAGDDSVTEGVTDLVRGTLCPALKALFEHGLKKPSLLGGACHPWLFIEEAAGREVERDFASVYSRLVLCKTFRLDEDGKVLTPEELLYRAVQSVNVTHDAVHAQMDVKLRSLICVGLNEQVLHLWLEVLCSSLPTVEKWYQPWSFLRSPGWVQIKCELRVLCCFAFSLSQDWELPAKREAQQPLKEGVRDMLVKHHLFSWDVDG

SEQ ID NO: 894839 - protein, 973 aa, Homo sapiens
MSGSHTPACGPFSALTPSIWPQEILAKYTQKEESAEQPEFYYDEFGFRVYKEEGDEPGSSLLANSPLMEDAPQRLRWQAHLEFTHNHDVGDLTWDKIAVSLPRSEKLRSLVLAGIPHGMRPQVKVATGTHRVLRGSWPHDQVSRERLSALAAPFPQLWMRLSGALQKKRNSELSYREIVKNSSNDETIAAKQIEKDLLRTMPSNACFASMGSIGVPRLRRVLRALAWLYPEIGYCQGTGMVAACLLLFLEEEDAFWMMSAIIEDLLPASYFSTTLLGVQTDQRVLRHLIVQYLPRLDKLLQEHDIELSLITLHWFLTAFASVVDIKLLLRIWDLFFYEGSRVLFQLTLGMLHLKEEELIQSENSASIFNTLSDIPSQMEDAELLLGVAMRLAGSLTDVAVETQRRKHLAYLIADQGQLLGAGTLTNLSQVAQDGGPHLDPQHTGRRGHLEVQSAGAAENKPALPALPPSLAQSDHSCGVIQASSGFVHLQVLILARFGRKADPALIICFQFLEPASEAISDEKYKPRAGGFSSSRGQDHPDPLLLVQVVRRRTQRRKSTITALLFGESSASARQCGHAGVCPHAHVDVELPPRGPGVGCGHHGSLGLLGEDDLEALKAKNIKQTELVADLREAILRVARHFQCTDPKNCSVVVSRQLPGLLPNTALTPPTPLVGLCSLWQELTPDYSMESHQRDHENYVACSRSHRRRAKALLDFERHDDDELGFRKNDIITIVSQKDEHCWVGELNGLRGWFPAKFVEVLDERSKEYSIAGDDSVTEGVTDLVRGTLCPALKALFEHGLKKPSLLGGACHPWLFIEEAAGREVERDFASVYSRLVLCKTFRLDEDGKVLTPEELLYRAVQSVNVTHDAVHAQMDVKLRSLICVGLNEQVLHLWLEVLCSSLPTVEKWYQPWSFLRSPGWVQIKCELRVLCCFAFSLSQDWELPAKREAQQPLKEGVRDMLVKHHLFSWDVDG

SEQ ID NO: 894840 - protein, 1017 aa, Homo sapiens
MSGSHTPACGPFSALTPSIWPQEILAKYTQKEESAEQPEFYYDEFGFRVYKEEGDEPGSSLLANSPLMEDAPQRLRWQAHLEFTHNHDVGDLTWDKIAVSLPRSEKLRSLVLAGIPHGMRPQVKVATGTHRVLRGSWPHDQVSRERLSALAAPFPQLWMRLSGALQKKRNSELSYREIVKNSSNDETIAAKQIEKDLLRTMPSNACFASMGSIGVPRLRRVLRALAWLYPEIGYCQGTGMVAACLLLFLEEEDAFWMMSAIIEDLLPASYFSTTLLGVQTDQRVLRHLIVQYLPRLDKLLQEHDIELSLITLHWFLTAFASVVDIKLLLRIWDLFFYEGSRVLFQLTLGMLHLKEEELIQSENSASIFNTLSDIPSQMEDAELLLGVAMRLAGSLTDVAVETQRRKHLAYLIADQGQLLGAGTLTNLSQVAQDGGPHLDPQHTGRRGHLEVQSAGAAENKPALPALPPSLAQSDHSCGVIQASSGFVHLQVLILARFGRKADPALIICFQFLEPASEAISDEKYKPRAGGFSSSRGQDHPDPLLLVQVVRRRTQRRKSTITALLFGESSASARQCGHAGVCPHAHVDVELPPRGPGVGCGHHGSLGLLGEDDLEALKAKNIKQTELVADLREAILRVARHFQCTDPKNCSVELTPDYSMESHQRDHENYVACSRSHRRRAKALLDFERHDDDELGFRKNDIITVRGGAGLPGPQAVAGSPDSLHQAPPQPLSLPRASLVKMYGSWPGLLLRSHIGGAGGAGPGHPALVPAVFPPVQIVSQKDEHCWVGELNGLRGWFPAKFVEVLDERSKEYSIAGDDSVTEGVTDLVRGTLCPALKALFEHGLKKPSLLGGACHPWLFIEEAAGREVERDFASVYSRLVLCKTFRLDEDGKVLTPEELLYRAVQSVNVTHDAVHAQMDVKLRSLICVGLNEQVLHLWLEVLCSSLPTVEKWYQPWSFLRSPGWVQIKCELRVLCCFAFSLSQDWELPAKREAQQPLKEGVRDMLVKHHLFSWDVDG

SEQ ID NO: 894841 - protein, 1046 aa, Homo sapiens
MSGSHTPACGPFSALTPSIWPQEILAKYTQKEESAEQPEFYYDEFGFRVYKEEGDEPGSSLLANSPLMEDAPQRLRWQAHLEFTHNHDVGDLTWDKIAVSLPRSEKLRSLVLAGIPHGMRPQVKVATGTHRVLRGSWPHDQVSRERLSALAAPFPQLWMRLSGALQKKRNSELSYREIVKNSSNDETIAAKQIEKDLLRTMPSNACFASMGSIGVPRLRRVLRALAWLYPEIGYCQGTGMVAACLLLFLEEEDAFWMMSAIIEDLLPASYFSTTLLGVQTDQRVLRHLIVQYLPRLDKLLQEHDIELSLITLHWFLTAFASVVDIKLLLRIWDLFFYEGSRVLFQLTLGMLHLKEEELIQSENSASIFNTLSDIPSQMEDAELLLGVAMRLAGSLTDVAVETQRRKHLAYLIADQGQLLGAGTLTNLSQVAQDGGPHLDPQHTGRRGHLEVQSAGAAENKPALPALPPSLAQSDHSCGVIQASSGFVHLQVLILARFGRKADPALIICFQFLEPASEAISDEKYKPRAGGFSSSRGQDHPDPLLLVQVVRRRTQRRKSTITALLFGESSASARQCGHAGVCPHAHVDVELPPRGPGVGCGHHGSLGLLGEDDLEALKAKNIKQTELVADLREAILRVARHFQCTDPKNCSVVVSRQLPGLLPNTALTPPTPLVGLCSLWQELTPDYSMESHQRDHENYVACSRSHRRRAKALLDFERHDDDELGFRKNDIITVRGGAGLPGPQAVAGSPDSLHQAPPQPLSLPRASLVKMYGSWPGLLLRSHIGGAGGAGPGHPALVPAVFPPVQIVSQKDEHCWVGELNGLRGWFPAKFVEVLDERSKEYSIAGDDSVTEGVTDLVRGTLCPALKALFEHGLKKPSLLGGACHPWLFIEEAAGREVERDFASVYSRLVLCKTFRLDEDGKVLTPEELLYRAVQSVNVTHDAVHAQMDVKLRSLICVGLNEQVLHLWLEVLCSSLPTVEKWYQPWSFLRSPGWVQIKCELRVLCCFAFSLSQDWELPAKREAQQPLKEGVRDMLVKHHLFSWDVDG

SEQ ID NO: 894842 - protein, 988 aa, Homo sapiens
MSGSHTPACGPFSALTPSIWPQEILAKYTQKEESAEQPEFYYDEFGFRVYKEEGDEPGSSLLANSPLMEDAPQRLRWQAHLEFTHNHDVGDLTWDKIAVSLPRSEKLRSLVLAGIPHGMRPQVKVATGTHRVLRGSWPHDQVSRERLSALAAPFPQLWMRLSGALQKKRNSELSYREIVKNSSNDETIAAKQIEKDLLRTMPSNACFASMGSIGVPRLRRVLRALAWLYPEIGYCQGTGMVAACLLLFLEEEDAFWMMSAIIEDLLPASYFSTTLLGVQTDQRVLRHLIVQYLPRLDKLLQEHDIELSLITLHWFLTAFASVVDIKLLLRIWDLFFYEGSRVLFQLTLGMLHLKEEELIQSENSASIFNTLSDIPSQMEDAELLLGVAMRLAGSLTDVAVETQRRKHLAYLIADQGQLLGAGTLTNLSQVAQDGGPHLDPQHTGRRGHLEVQSAGAAENKPALPALPPSLAQSDHSCGVIQASSGFVHLQVLILARFGRKADPALIICFQFLEPASEAISDEKYKPRAGGFSSSRGQDHPDPLLLVQVVRRRTQRRKSTITALLFGESSASARQCGHAGVCPHAHVDVELPPRGPGVGCGHHGSLGLLGEDDLEALKAKNIKQTELVADLREAILRVARHFQCTDPKNCSVVVSRQLPGLLPNTALTPPTPLVGLCSLWQELTPDYSMESHQRDHENYVACSRSHRRRAKALLDFERHDDDELGFRKNDIITVRGGAGLQIVSQKDEHCWVGELNGLRGWFPAKFVEVLDERSKEYSIAGDDSVTEGVTDLVRGTLCPALKALFEHGLKKPSLLGGACHPWLFIEEAAGREVERDFASVYSRLVLCKTFRSFGVTLRLDEDGKVLTPEELLYRAVQSVNVTHDAVHAQMDVKLRSLICVGLNEQVLHLWLEVLCSSLPTVEKWYQPWSFLRSPGWVQIKCELRVLCCFAFSLSQDWELPAKREAQQPLKEGVRDMLVKHHLFSWDVDG

SEQ ID NO: 894843 - protein, 858 aa, Homo sapiens
MSGSHTPACGPFSALTPSIWPQEILAKYTQKEESAEQPEFYYDEFGFRVYKEEGDEPGSSLLANSPLMEDAPQRLRWQAHLEFTHNHDVGDLTWDKIAVSLPRSEKLRSLVLAGIPHGMRPQVKVATGTHRVLRGSWPHDQVSRERLSALAAPFPQLWMRLSGALQKKRNSELSYREIVKNSSNDETIAAKQIEKDLLRTMPSNACFASMGSIGVPRLRRVLRALAWLYPEIGYCQGTGMVAACLLLFLEEEDAFWMMSAIIEDLLPASYFSTTLLGVQTDQRVLRHLIVQYLPRLDKLLQEHDIELSLITLHWFLTAFASVVDIKLLLRIWDLFFYEGSRVLFQLTLGMLHLKEEELIQSENSASIFNTLSDIPSQMEDAELLLGVAMRLAGSLTDVAVETQRRKHLAYLIADQGQLLGAGTLTNLSQVAQDGGPHLDPQHTGRRGHLEVQSAGAAENKPALPALPPSLAQSDHSCGVIQASSGFVHLQVLILARFGRKADPALIICFQFLEPASEAISDEKYKPRAGGFSSSRGQDHPDPLLLVQVVRRRTQRRKSTITALLFGESSASARQCGHAGVCPHAHVDVELPPRGPGVGCGHHGSLGLLGEDDLEALKAKNIKQTELVADLREAILRVARHFQCTDPKNCSVELTPDYSMESHQRDHENYVACSRSHRRRAKALLDFERHDDDELGFRKNDIITIVSQKDEHCWVGELNGLRGWFPAKFVEVLDERSKEYSIAGDDSVTEGVTDLVRGTLCPALKALFEHGLKKPSLLGGACHPWLFIEEAAGREVERDFASVYSRLVLCKTFRLDEDGKVLTPEELLYRAVQSVNVTHDAVHAQMDVKLRSLICVGLK

SEQ ID NO: 894844 - protein, 952 aa, Homo sapiens
MSGSHTPACGPFSALTPSIWPQEILAKYTQKEESAEQPEFYYDEFGFRVYKEEGDEPGSSLLANSPLMEDAPQRLRWQAHLEFTHNHDVGDLTWDKIAVSLPRSEKLRSLVLAGIPHGMRPQVKVATGTHRVLRGSWPHDQVSRERLSALAAPFPQLWMRLSGALQKKRNSELSYREIVKNSSNDETIAAKQIEKDLLRTMPSNACFASMGSIGVPRLRRVLRALAWLYPEIGYCQGTGMVAACLLLFLEEEDAFWMMSAIIEDLLPASYFSTTLLGVQTDQRVLRHLIVQYLPRLDKLLQEHDIELSLITLHWFLTAFASVVDIKLLLRIWDLFFYEGSRVLFQLTLGMLHLKEEELIQSENSASIFNTLSDIPSQMEDAELLLGVAMRLAGSLTDVAVETQRRKHLAYLIADQGQLLGAGTLTNLSQVAQDGGPHLDPQHTGRRGHLEVQSAGAAENKPALPALPPSLAQSDHSCGVIQASSGFVHLQVLILARFGRKADPALIICFQFLEPASEAISDEKYKPRAGGFSSSRGQDHPDPLLLVQVVRRRTQRRKSTITALLFGESSASARQCGHAGVCPHAHVDVELPPRGPGVGCGHHGSLGLLGEDDLEALKAKNIKQTELVADLREAILRVARHFQCTDPKNCSVELTPDYSMESHQRDHENYVACSRSHRRRAKALLDFERHDDDELGFRKNDIITIVSQKDEHCWVGELNGLRGWFPAKFVEVLDERSKEYSIAGDDSVTEGVTDLVRGTLCPALKALFEHGLKKPSLLGGACHPWLFIEEAAGREVERDFASVYSRLVLCKTFRLDEDGKVLTPEELLYRAVQSVNVTHDAVHAQMDVKLRSLICVGLNEQVLHLWLEVLCSSLPTVEKWYQPWSFLRSPGWVQIKCELRVLCCFAFSLSQDWELPAKREGGWCGPRRACTDGAAQTVRGVAKVGTRSAGVSG

SEQ ID NO: 894845 - protein, 921 aa, Homo sapiens
MSGSHTPACGPFSALTPSIWPQEILAKYTQKEESAEQPEFYYDEFGFRVYKEEGDEPGSSLLANSPLMEDAPQRLRWQAHLEFTHNHDVGDLTWDKIAVSLPRSEKLRSLVLAGIPHGMRPQVKVATGTHRVLRGSWPHDQVSRERLSALAAPFPQLWMRLSGALQKKRNSELSYREIVKNSSNDETIAAKQIEKDLLRTMPSNACFASMGSIGVPRLRRVLRALAWLYPEIGYCQGTGMVAACLLLFLEEEDAFWMMSAIIEDLLPASYFSTTLLGVQTDQRVLRHLIVQYLPRLDKLLQEHDIELSLITLHWFLTAFASVVDIKLLLRIWDLFFYEGSRVLFQLTLGMLHLKEEELIQSENSASIFNTLSDIPSQMEDAELLLGVAMRLAGSLTDVAVETQRRKHLAYLIADQGQLLGAGTLTNLSQVAQDGGPHLDPQHTGRRGHLEVQSAGAAENKPALPALPPSLAQSDHSCGVIQASSGFVHLQVLILARFGRKADPALIICFQFLEPASEAISDEKYKPRAGGFSSSRGQDHPDPLLLVQVVRRRTQRRKSTITALLFGESSASARQCGHAGVCPHAHVDVELPPRGPGVGCGHHGSLGLLGEDDLEALKAKNIKQTELVADLREAILRVARHFQCTDPKNCSVELTPDYSMESHQRDHENYVACSRSHRRRAKALLDFERHDDDELGFRKNDIITIVSQKDEHCWVGELNGLRGWFPAKFVEVLDERSKEYSIAGDDSVTEGVTDLVRGTLCPALKALFEHGLKKPSLLGGACHPWLFIEEAAGREVERDFASVYSRLVLCKTFRSFGVLLRLDEDGKVLTPEELLYRAVQSVNVTHDAVHAQMDVKLRSLICVGLNPGWVQIKCELRVLCCFAFSLSQDWELPAKREAQQPLKEGVRDMLVKHHLFSWDVDG

SEQ ID NO: 894846 - protein, 944 aa, Homo sapiens; identical to SEQ ID NO: 894838

SEQ ID NO: 894847 - protein, 952 aa, Homo sapiens; identical to SEQ ID NO: 894844

SEQ ID NO: 894848 - protein, 952 aa, Homo sapiens; identical to SEQ ID NO: 894844

SEQ ID NO: 894849 - protein, 944 aa, Homo sapiens; identical to SEQ ID NO: 894838

SEQ ID NO: 894850 - protein, 934 aa, Homo sapiens
MSGSHTPACGPFSALTPSIWPQEILAKYTQKEESAEQPEFYYDEFGFRVYKEEGDEPGSSLLANSPLMEDAPQRLRWQAHLEFTHNHDVGDLTWDKIAVSLPRSEKLRSLVLAGIPHGMRPQVKVATGTHRVLRGSWPHDQVSRERLSALAAPFPQLWMRLSGALQKKRNSELSYREIVKNSSNDETIAAKQIEKDLLRTMPSNACFASMGSIGVPRLRRVLRALAWLYPEIGYCQGTGMVAACLLLFLEEEDAFWMMSAIIEDLLPASYFSTTLLGVQTDQRVLRHLIVQYLPRLDKLLQEHDIELSLITLHWFLTAFASVVDIKLLLRIWDLFFYEGSRVLFQLTLGMLHLKEEELIQSENSASIFNTLSDIPSQMEDAELLLGVAMRLAGSLTDVAVETQRRKHLAYLIADQGQLLGAGTLTNLSQVAQDGGPHLDPQHTGRRGHLEVQSAGAAENKPALPALPPSLAQSDHSCGVIQASSGFVHLQVLILARFGRKADPALIICFQFLEPASEAISDEKYKPRAGGFSSSRGQDHPDPLLLVQVVRRRTQRRKSTITALLFGESSASARQCGHAGVCPHAHVDVELPPRGPGVGCGHHGSLGLLGEDDLEALKAKNIKQTELVADLREAILRVARHFQCTDPKNCSVELTPDYSMESHQRDHENYVACSRSHRRRAKALLDFERHDDDELGFRKNDIITIVSQKDEHCWVGELNGLRGWFPAKFVEVLDERSKEYSIAGDDSVTEGVTDLVRGTLCPALKALFEHGLKKPSLLGGACHPWLFIEEAAGREVERDFASVYSRLVLCKTFRLDEDGKVLTPEELLYRAVQSVNVTHDAVHAQMDVKLRSLICVGLNEQVLHLWLEVLCSSLPTVEKWYQPWSFLRSPGWVQIKCELRVLCCFAFSLSQDWELPAKRELGLQSCIQVQGSALP

SEQ ID NO: 894851 - protein, 741 aa, Homo sapiens
MSGSHTPACGPFSALTPSIWPQEILAKYTQKEESAEQPEFYYDEFGFRVYKEEGDEPGSSLLANSPLMEDAPQRLRWQAHLEFTHNHDVGDLTWDKIAVSLPRSEKLRSLVLAGIPHGMRPQVKVATGTHRVLRGSWPHDQVSRERLSALAAPFPQLWMRLSGALQKKRNSELSYREIVKNSSNDETIAAKQIEKDLLRTMPSNACFASMGSIGVPRLRRVLRALAWLYPEIGYCQGTGMVAACLLLFLEEEDAFWMMSAIIEDLLPASYFSTTLLGVQTDQRVLRHLIVQYLPRLDKLLQEHDIELSLITLHWFLTAFASVVDIKLLLRIWDLFFYEGSRVLFQLTLGMLHLKEEELIQSENSASIFNTLSDIPSQMEDAELLLGVAMRLAGSLTDVAVETQRRKHLAYLIADQGQLLGAGTLTNLSQVAQDGGPHLDPQHTGRRGHLEVQSAGAAENKPALPALPPSLAQSDHSCGVIQASSGFVHLQVLILARFGRKADPALIICFQFLEPASEAISDEKYKPRAGGFSSSRGQDHPDPLLLVQVVRRRTQRRKSTITALLFGESSASARQCGHAGVCPHAHVDVELPPRGPGVGCGHHGSLGLLGEDDLEALKAKNIKQTELVADLREAILRVARHFQCTDPKNCSVELTPDYSMESHQRDHENYVACSRSHRRRAKALLDFERHDDDELGFRKNDIITVRGGAGLPGPQAVAGSPDSLHQAPPQPLSLPRASLVKM

SEQ ID NO: 894852 - protein, 828 aa, Homo sapiens
MSGSHTPACGPFSALTPSIWPQEILAKYTQKEESAEQPEFYYDEFGFRVYKEEGDEPGSSLLANSPLMEDAPQRLRWQAHLEFTHNHDVGDLTWDKIAVSLPRSEKLRSLVLAGIPHGMRPQVKVATGTHRVLRGSWPHDQVSRERLSALAAPFPQLWMRLSGALQKKRNSELSYREIVKNSSNDETIAAKQIEKDLLRTMPSNACFASMGSIGVPRLRRVLRALAWLYPEIGYCQGTGMVAACLLLFLEEEDAFWMMSAIIEDLLPASYFSTTLLGVQTDQRVLRHLIVQYLPRLDKLLQEHDIELSLITLHWFLTAFASVVDIKLLLRIWDLFFYEGSRVLFQLTLGMLHLKEEELIQSENSASIFNTLSDIPSQMEDAELLLGVAMRLAGSLTDVAVETQRRKHLAYLIADQGQLLGAGTLTNLSQVAQDGGPHLDPQHTGRRGHLEVQSAGAAENKPALPALPPSLAQSDHSCGVIQASSGFVHLQVLILARFGRKADPALIICFQFLEPASEAISDEKYKPRAGGFSSSRGQDHPDPLLLVQVVRRRTQRRKSTITALLFGESSASARQCGHAGVCPHAHVDVELPPRGPGVGCGHHGSLGLLGEDDLEALKAKNIKQTELVADLREAILRVARHFQCTDPKNCSVVVSRQLPGLLPNTALTPPTPLVGLCSLWQELTPDYSMESHQRDHENYVACSRSHRRRAKALLDFERHDDDELGFRKNDIITIVSQKDEHCWVGELNGLRGWFPAKFVEVLDERSKEYSIAGDDSVTEGVTDLVRGTSRALAGAAGYQYQAAPLHVPQHIPGGGSRGYPAPPGSLGML

SEQ ID NO: 894853 - protein, 132 aa, Homo sapiens
MSGSHTPACGPFSALTPSIWPQEILAKYTQKEESAEQPEFYYDEFGFRVYKEEGDEPGSSLLANSPLMEDAPQRLRWQAHLEFTHNHDVGDLTWDKIAVSLPRSEKLRSLVLAGIPHGMRPQVRWPQGPTGC

SEQ ID NO: 894854 - protein, 68 aa, Homo sapiens
GLSQTHPSHQYSIAGDDSVTEGVTDLVRGTLCPALKALFEHGLKKPSLLGGACHPWLFIEEVSQWLGP

SEQ ID NO: 894855 - protein, 952 aa, Homo sapiens; identical to SEQ ID NO: 894844

SEQ ID NO: 894856 - protein, 870 aa, Homo sapiens
MSGSHTPACGPFSALTPSIWPQEILAKYTQKEESAEQPEFYYDEFGFRVYKEEGDEPGSSLLANSPLMEDAPQRLRWQAHLEFTHNHDVGDLTWDKIAVSLPRSEKLRSLVLAGIPHGMRPQVKVATGTHRVLRGSWPHDQVSRERLSALAAPFPQLWMRLSGALQKKRNSELSYREIVKNSSNDETIAAKQIEKDLLRTMPSNACFASMGSIGVPRLRRVLRALAWLYPEIGYCQGTGMVAACLLLFLEEEDAFWMMSAIIEDLLPASYFSTTLLGVQTDQRVLRHLIVQYLPRLDKLLQEHDIELSLITLHWFLTAFASVVDIKLLLRIWDLFFYEGSRVLFQLTLGMLHLKEEELIQSENSASIFNTLSDIPSQMEDAELLLGVAMRLAGSLTDVAVETQRRKHLAYLIADQGQLLGAGTLTNLSQVAQDGGPHLDPQHTGRRGHLEVQSAGAAENKPALPALPPSLAQSDHSCGVIQASSGFVHLQVLILARFGRKADPALIICFQFLEPASEAISDEKYKPRAGGFSSSRGQDHPDPLLLVQVVRRRTQRRKSTITALLFGESSASARQCGHAGVCPHAHVDVELPPRGPGVGCGHHGSLGLLGEDDLEALKAKNIKQTELVADLREAILRVARHFQCTDPKNCSVELTPDYSMESHQRDHENYVACSRSHRRRAKALLDFERHDDDELGFRKNDIITIVSQKDEHCWVGELNGLRGWFPAKFVEVLDERSKEYSIAGDDSVTEGVTDLVRGTLCPALKALFEHGLKKPSLLGGACHPWLFIEEAAGREVERDFASVYSRLVLCKTFRLDEDGKVLTPEELLYRSRALAGAAGYQYQAAPLHVPQHIPGGGSRGYPAPPGSLGML

SEQ ID NO: 894857 - protein, 808 aa, Homo sapiens
MSGSHTPACGPFSALTPSIWPQEILAKYTQKEESAEQPEFYYDEFGFRVYKEEGDEPGSSLLANSPLMEDAPQRLRWQAHLEFTHNHDVGDLTWDKIAVSLPRSEKLRSLVLAGIPHGMRPQVKVATGTHRVLRGSWPHDQVSRERLSALAAPFPQLWMRLSGALQKKRNSELSYREIVKNSSNDETIAAKQIEKDLLRTMPSNACFASMGSIGVPRLRRVLRALAWLYPEIGYCQGTGMVAACLLLFLEEEDAFWMMSAIIEDLLPASYFSTTLLGVQTDQRVLRHLIVQYLPRLDKLLQEHDIELSLITLHWFLTAFASVVDIKLLLRIWDLFFYEGSRVLFQLTLGMLHLKEEELIQSENSASIFNTLSDIPSQMEDAELLLGVAMRLAGSLTDVAVETQRRKHLAYLIADQGQLLGAGTLTNLSQVAQDGGPHLDPQHTGRRGHLEVQSAGAAENKPALPALPPSLAQSDHSCGVIQASSGFVHLQVLILARFGRKADPALIICFQFLEPASEAISDEKYKPRAGGFSSSRGQDHPDPLLLVQVVRRRTQRRKSTITALLFGESSASARQCGHAGVCPHAHVDVELPPRGPGVGCGHHGSLGLLGEDDLEALKAKNIKQTELVADLREAILRVARHFQCTDPKNCSVVVSRQLPGLLPNTALTPPTPLVGLCSLWQELTPDYSMESHQRDHENYVACSRSHRRRAKALLDFERHDDDELGFRKNDIITIVSQKDEHCWVGELNGLRGWFPAKFVEVLDERSKESRALAGAAGYQYQAAPLHVPQHIPGGGSRGYPAPPGSLGML

SEQ ID NO: 894858 - protein, 906 aa, Homo sapiens
PAARPRPKRRPRRRLRNVCGEPPPPPVPTPMMADGAAAGAGGSPSLRELRARMVAAANEIAKERRKQDVVNRVATHSSNIRSTFKPVIDGSMLKNDIKQRLARERREEKRRQQDANKETQLLEKERKTKLQYEKQMEERQRKLKERKEKEEQRRIAAEEKRHQKDEAQKEKFTAILYRTLERRRLADDYQQKRWSWGGSAMANSESKTANKRSASTEKLEQGTSALIRQMPLSSAGLQNSVAKRKTDKERSSSLNRRDSNLHSSTDKEQAERKPRVTGVTNYVMQYVTVPLRKCTSDELRAVMFPMSTMKIPPQTKVEESPLEKVETPPKASVDAPPQVNVEVFCNTSMEASPKAGVGMAPEVSTDSFPVVSVDVSPVVSTYDSEMSMDASPELSIEALPKVDLETVPKVSIVASPEASLEAPPEVSLEALPEVSVEAAPEGSLEAPPKGSAEVAPKESVKGSPKESMEASPEAMVKASPKTSLEASMEASPKAKARDAPKKSEMDKQALIPIAKKRLSSYTECYKWSSSPENACGLPSPISTNRQIQKNCPPSPLPLISKQSPQTSFPYKIMPIQHTLSVQSASSTVKKKKETVSKTTNRCEALSQRHMIYEESGNKSTAGIMNAEAATKILTELRRLAREQREKEEEERQREEMQQRVIKKSKDMAKEAVGGQAEDHLKLKDGQQQNETKKKKGWLDQEDQEAPLQKGDAKIKAQEEADKRKKEHERIMLQNLQERLERKKRIEEIMKRTRKTDVNASKVTETSSHDIYEEAEADNEESDKDSLNEMFPSAILNGTGSPTKFKMPFNNAKKMTHKLVFLEDGTSQVRKEPKTYFNGDLKNFRQKSMKDTSIQEVVSRPSSKRMTSHTTKTRKADETNTTSRSSAQTKSEGFHDILPKSSDTFRQ

SEQ ID NO: 894859 - protein, 240 aa, Homo sapiens
MAKEAVGGQAEDHLKLKDGQQQNETKKKKGWLDQEDQEAPLQKGDAKIKAQEEADKRKKEHERIMLQNLQERLERKKRIEEIMKRTRKTDVNASKVTETSSHDIYEEAEADNEESDKDSLNEMFPSAILNGTGSPTKFKMPFNNAKKMTHKLVFLEDGTSQVRKEPKTYFNGDLKNFRQKSMKDTSIQEVVSRPSSKRMTSHTTKTRKADETNTTSRSSAQTKSEGFHDILPKSSDTFRQ

SEQ ID NO: 894860 - protein, 826 aa, Homo sapiens
PAARPRPKRRPRRRLRNVCGEPPPPPVPTPMMADGAAAGAGGSPSLRELRARMVAAANEIAKERRKQDVVNRVATHSSNIRSTFKPVIDGSMLKNDIKQRLARERREEKRRQQDANKETQLLEKERKTKLQYEKQMEERQRKLKERKEKEEQRRIAAEEKRHQKDEAQKEKFTAILYRTLERRRLADDYQQKRWSWGGSAMANSESKTANKRSASTEKLEQGTSALIRQMPLSSAGLQNSVAKRKTDKERSSSLNRRDSNLHSSTDKEQAERKPRVTGVTNYVMQYVTVPLRKCTSDELRAVMFPMSTMKIPPQTKVEESPLEKVETPPKASVDAPPQVNVEVFCNTSMEASPKAGVGMAPEVSTDSFPVVSVDVSPVVSTYDSEMSMDASPELSIEALPKVDLETVPKVSIVASPEASLEAPPEVSLEALPEVSVEAAPEGSLEAPPKGSAEVAPKESVKGSPKESMEASPEAMVKASPKTSLEASMEASPKAKARDAPKKSEMDKQALIPIAKKRLSSYTECYKWSSSPENACGLPSPISTNRQIQKNCPPSPLPLISKQSPQTSFPYKIMPIQHTLSVQSASSTVKKKKETVSKTTNRCEALSQRHMIYEESGNKSTAGIMNAEAATKILTELRRLADDGGGAAAGAGGSPSLRELRARMVAAANEIAKERRKQDVVNRVATHSSNIRSTFKPVIDGSMLKNDIKQRLARERREEKRRQQDANKETQLLEKERKTKLQYEKQMEERQRKLKERKEKEEQRRIAAEEKRHQKDEAQKENFTAILYRTLERRRLADDINQKDGPGEASAWRILRAKLPINNCSTE

SEQ ID NO: 894861 - protein, 283 aa, Homo sapiens
MNAEAATKILTELRRLAREQREKEEEERQREEMQQRVIKKSKDMAKEAVGGQAEDHLKLKDGQQQNETKKKKGWLDQEDQEAPLQKGDAKIKAQEEADKRKKEHERIMLQNLQERLERKKRIEEIMKRTRKTDVNASKVTETSSHDIYEEAEADNEESDKDSLNEMFPSAILNGTGSPTKFKMPFNNAKKMTHKLVFLEDGTSQVRKEPKTYFNGDLKNFRQKSMKDTSIQEVVSRPSSKRMTSHTTKTRKADETNTTSRSSAQTKSEGFHDILPKSSDTFRQ

SEQ ID NO: 894862 - protein, 276 aa, Homo sapiens
PAARPRPKRRPRRRLRNVCGEPPPPPVPTPMMADGAAAGAGGSPSLRELRARMVAAANEIAKERRKQDVVNRVATHSSNIRSTFKPVIDGSMLKNDIKQRLARERREEKRRQQDANKETQLLEKERKTKLQYEKQMEERQRKLKERKEKEEQRRIAAEEKRHQKDEAQKEKFTAILYRTLERRRLADDYQQKRWSWGGSAMANSESKTANKRSASTEKLEQGTSALIRQMPLSSAGLQNSVAKRKTDKERSSSLNRRDSNLHSSTDKEQAERKPRG

SEQ ID NO: 894863 - protein, 253 aa, Homo sapiens
MISSCTTRKMAEQEQRKIPLVPENLLKKRKAYQALKATQAKQALLAKKEQKKGKGLRFKRLESFLHDSWRQKRDKVRLRRLEVKPHALELPDKHSLAFVVRIERIDGVSLLVQRTIARLRLKKIFSGVFVKVTPQNLKMLRIVEPYVTWGFPNLKSVRELILKRGQAKVKNKTIPLTDNTVIEEHLGKLASFAWKTSFMKLPSQGSISRRSHGSCALSTSQWPVMLPKIEWASSRRWAHLAIGVNASISSSVS

SEQ ID NO: 894864 - protein, 253 aa, Homo sapiens; identical to SEQ ID NO: 894863

SEQ ID NO: 894865 - protein, 115 aa, Homo sapiens
MLRIVEPYVTWGFPNLKSVRELILKRGQAKVKNKTIPLTDNTVIEEHLGKLASFAWKTSFMKLPSQGSISRRSHGSCALSTSQWPVMLPKIEWASSRRWAHLAIGVNASISSSVS

SEQ ID NO: 894866 - protein, 253 aa, Homo sapiens; identical to SEQ ID NO: 894863

SEQ ID NO: 894867 - protein, 115 aa, Homo sapiens; identical to SEQ ID NO: 894865

SEQ ID NO: 894868 - protein, 253 aa, Homo sapiens; identical to SEQ ID NO: 894863

SEQ ID NO: 894869 - protein, 115 aa, Homo sapiens; identical to SEQ ID NO: 894865

SEQ ID NO: 894870 - protein, 205 aa, Homo sapiens
MISSCTTRKMAEQEQRKIPLVPENLLKKRKAYQALKATQAKQALLAKKEQKKGKGLRFKRLESFLHDSWRQKRDKVRLRRLEVKPHALELPDKHSLAFVVRIERIDGVSLLVQRTIARLRLKKIFSGVFVKVTPQNLKMLRIVEPYVTWGFPNLKSVRELILKRGQAKVKNKTIPLTDNTVIEEHLGECYSLGVSWGRKPGSLKL

SEQ ID NO: 894871 - protein, 253 aa, Homo sapiens; identical to SEQ ID NO: 894863

SEQ ID NO: 894872 - protein, 253 aa, Homo sapiens; identical to SEQ ID NO: 894863

SEQ ID NO: 894873 - protein, 253 aa, Homo sapiens; identical to SEQ ID NO: 894863

SEQ ID NO: 894874 - protein, 253 aa, Homo sapiens; identical to SEQ ID NO: 894863

SEQ ID NO: 894875 - protein, 253 aa, Homo sapiens; identical to SEQ ID NO: 894863

SEQ ID NO: 894876 - protein, 253 aa, Homo sapiens; identical to SEQ ID NO: 894863

SEQ ID NO: 894877 - protein, 253 aa, Homo sapiens; identical to SEQ ID NO: 894863

SEQ ID NO: 894878 - protein, 253 aa, Homo sapiens; identical to SEQ ID NO: 894863

SEQ ID NO: 894879 - protein, 115 aa, Homo sapiens; identical to SEQ ID NO: 894865

SEQ ID NO: 894880 - protein, 253 aa, Homo sapiens; identical to SEQ ID NO: 894863

SEQ ID NO: 894881 - protein, 253 aa, Homo sapiens; identical to SEQ ID NO: 894863

SEQ ID NO: 894882 - protein, 253 aa, Homo sapiens; identical to SEQ ID NO: 894863

SEQ ID NO: 894883 - protein, 253 aa, Homo sapiens; identical to SEQ ID NO: 894863

SEQ ID NO: 894884 - protein, 253 aa, Homo sapiens; identical to SEQ ID NO: 894863

SEQ ID NO: 894885 - protein, 173 aa, Homo sapiens
MISSCTTRKMAEQEQRKIPLVPENLLKKRKAYQALKATQAKQALLAKKEQKKGKGLRFKRLESFLHDSWRQKRDKVRLRRLEVKPHALELPDKHSLAFVVRIERIDGVSLLVQRTIARLRLKKIFSGVFVKVTPQNLKMLRIVEPYVTWGYRYESPCPQDLVYFFRGKYTQGF

SEQ ID NO: 894886 - protein, 150 aa, Homo sapiens
MISSCTTRKMAEQEQRKIPLVPENLLKKRKAYQALKATQAKQALLAKKEQKKGKGLRFKRLESFLHDSWRQKRDKVRLRRLEVKPHALELPDKHSLAFVVRIERIDGVSLLVQRTIARLRLKKIFSGVFVKVTPQNLKMLRIVEPYVTWG

SEQ ID NO: 894887 - protein, 70 aa, Homo sapiens
ESHAGGGRSRISDPPGLQEIRHELVPIRHEPHPKLLHYNLPQLMPSSLSSSSSQRDFFVNGFIEDIIYIL

SEQ ID NO: 894888 - protein, 1560 aa, Homo sapiens
MEPGSDDFLPPPECPVFEPSWAEFRDPLGYIAKIRPIAEKSGICKIRPPADWQPPFAVEVDNFRFTPRIQRLNELEAQTRVKLNYLDQIAKFWEIQGSSLKIPNVERRILDLYSLSKIVVEEGGYEAICKDRRWARVAQRLNYPPGKNIGSLLRSHYERIVYPYEMYQSGANLVQCNTRPFDNEEKDKEYKPHSIPLRQSVQPSKFNSYGRRAKRLQPDPEPTEEDIEKNPELKKLQIYGAGPKMMGLGLMAKDKTLRKKDKEGPECPPTVVVKEELGGDVKVESTSPKTFLESKEELSHSPEPCTKMTMRLRRNHSNAQFIESYVCRMCSRGDEDDKLLLCDGCDDNYHIFCLLPPLPEIPKGVWRCPKCVMAECKRPPEAFGFEQATREYTLQSFGEMADSFKADYFNMPVHMVPTELVEKEFWRLVNSIEEDVTVEYGADIHSKEFGSGFPVSDSKRHLTPEEEEYATSGWNLNVMPVLEQSVLCHINADISGMKVPWLYVGMVFSAFCWHIEDHWSYSINYLHWGEPKTWYGVPSLAAEHLEEVMKKLTPELFDSQPDLLHQLVTLMNPNTLMSHGVPVVRTNQCAGEFVITFPRAYHSGFNQGYNFAEAVNFCTADWLPAGRQCIEHYRRLRRYCVFSHEELICKMAACPEKLDLNLAAAVHKEMFIMVQEERRLRKALLEKGITEAEREAFELLPDDERQCIKCKTTCFLSALACYDCPDGLVCLSHINDLCKCSSSRQYLRYRYTLDELPAMLHKLKVRAESFDTWANKVRVALEVEDGRKRSLEELRALESEARERRFPNSELLQQLKNCLSEAEACVSRALGLVSGQEAGPHRVAGLQMTLTELRAFLDQMNNLPCAMHQIGDVKGVLEQVEAYQAEAREALASLPSSPGLLQSLLERGRQLGVEVPEAQQLQRQVEQARWLDEVKRTLAPSARRGTLAVMRGLLVAGASVAPSPAVDKAQAELQELLTIAERWEEKAHLCLEARQKHPPATLEAIIREAENIPVHLPNIQALKEALAKARAWIADVDEIQNGDHYPCLDDLEGLVAVGRDLPVGLEELRQLELQVLTAHSWREKASKTFLKKNSCYTLLEVLCPCADAGSDSTKRSRWMEKELGLYKSDTELLGLSAQDLRDPGSVIVAFKEGEQKEKEGILQLRRTNSAKPSPLASSSTASSTTSICVCGQVLAGAGALQCDLCQDWFHGRCVSVPRLLSSPRPNPTSSPLLAWWEWDTKFLCPLCMRSRRPRLETILALLVALQRLPVRLPEGEALQCLTERAISWQGRARQALASEDVTALLGRLAELRQRLQAEPRPEEPPNYPAAPASDPLREGSGKDMPKVQGLLENGDSVTSPEKVAPEEGSGKRDLELLSSLLPQLTGPVLELPEATRAPLEELMMEGDLLEVTLDENHSIWQLLQAGQPPDLERIRTLLELEKAERHGSRARGRALERRRRRKVDRGGEGDDPAREELEPKRVRSSGPEAEEVQEEEELEEETGGEGPPAPIPTTGSPSTQENQNGLEPAEGTTSGPSAPFSTLTPRLHLPCPQQPPQQQL

SEQ ID NO: 894889 - protein, 1560 aa, Homo sapiens; identical to SEQ ID NO: 894888

SEQ ID NO: 894890 - protein, 1560 aa, Homo sapiens; identical to SEQ ID NO: 894888

SEQ ID NO: 894891 - protein, 1560 aa, Homo sapiens; identical to SEQ ID NO: 894888

SEQ ID NO: 894892 - protein, 1490 aa, Homo sapiens
MEPGSDDFLPPPECPVFEPSWAEFRDPLGYIAKIRPIAEKSGICKIRPPADWQPPFAVEVDNFRFTPRIQRLNELEAQTRVKLNYLDQIAKFWEIQGSSLKIPNVERRILDLYSLSKIVVEEGGYEAICKDRRWARVAQRLNYPPGKNIGSLLRSHYERIVYPYEMYQSGANLVQCNTRPFDNEEKDKEYKPHSIPLRQSVQPSKFNSYGRRAKRLQPDPEPTEEDIEKNPELKKLQIYGAGPKMMGLGLMAKDKTLRKKDKEGPECPPTVVVKEELGGDVKVESTSPKTFLESKEELSHSPEPCTKMTMRLRRNHSNAQFIESYVCRMCSRGDEDDKLLLCDGCDDNYHIFCLLPPLPEIPKGVWRCPKCVMAECKRPPEAFGFEQATREYTLQSFGEMADSFKADYFNMPVHMVPTELVEKEFWRLVNSIEEDVTVEYGADIHSKEFGSGFPVSDSKRHLTPEEEEYATSGWNLNVMPVLEQSVLCHINADISGMKVPWLYVGMVFSAFCWHIEDHWSYSINYLHWGEPKTWYGVPSLAAEHLEEVMKKLTPELFDSQPDLLHQLVTLMNPNTLMSHGVPVVRTNQCAGEFVITFPRAYHSGFNQGYNFAEAVNFCTADWLPAGRQCIEHYRRLRRYCVFSHEELICKMAACPEKLDLNLAAAVHKEMFIMVQEERRLRKALLEKGITEAEREAFELLPDDERQCIKCKTTCFLSALACYDCPDGLVCLSHINDLCKCSSSRQYLRYRYTLDELPAMLHKLKVRAESFDTWANKVRVALEVEDGRKRSLEELRALESEARERRFPNSELLQQLKNCLSEAEACVSRALGLVSGQEAGPHRVAGLQMTLTELRAFLDQMNNLPCAMHQIGDVKGVLEQVEAYQAEAREALASLPSSPGLLQSLLERGRQLGVEVPEAQQLQRQVEQARWLDEVKRTLAPSARRGTLAVMRGLLVAGASVAPSPAVDKAQAELQELLTIAERWEEKAHLCLEARQKHPPATLEAIIREAENIPVHLPNIQALKEALAKARAWIADVDEIQNGDHYPCLDDLEGLVAVGRDLPVGLEELRQLELQVLTAHSWREKASKTFLKKNSCYTLLEVLCPCADAGSDSTKRSRWMEKELGLYKSDTELLGLSAQDLRDPGSVLASSALRGPIPPHPHCWPGGEWDTKFLCPLCMRSRRPRLETILALLVALQRLPVRLPEGEALQCLTERAISWQGRARQALASEDVTALLGRLAELRQRLQAEPRPEEPPNYPAAPASDPLREGSGKDMPKVQGLLENGDSVTSPEKVAPEEGSGKRDLELLSSLLPQLTGPVLELPEATRAPLEELMMEGDLLEVTLDENHSIWQLLQAGQPPDLERIRTLLELEKAERHGSRARGRALERRRRRKVDRGGEGDDPAREELEPKRVRSSGPEAEEVQEEEELEEETGGEGPPAPIPTTGSPSTQENQNGLEPAEGTTSGPSAPFSTLTPRLHLPCPQQPPQQQL

SEQ ID NO: 894893 - protein, 1542 aa, Homo sapiens
MEPGSDDFLPPPECPVFEPSWAEFRDPLGYIAKIRPIAEKSGICKIRPPADWQPPFAVEVDNFRFTPRIQRLNELEAQTRVKLNYLDQIAKFWEIQGSSLKIPNVERRILDLYSLSKIVVEEGGYEAICKDRRWARVAQRLNYPPGKNIGSLLRSHYERIVYPYEMYQSGANLVQCNTRPFDNEEKDKEYKPHSIPLRQSVQPSKFNSYGRRAKRLQPDPEPTEEDIEKNPELKKLQIYGAGPKMMGLGLMAKDKTLRKKDKEGPECPPTVVVKEELGGDVKVESTSPKTFLESKEELSHSPEPCTKMTMRLRRNHSNAQFIESYVCRMCSRGDEDDKLLLCDGCDDNYHIFCLLPPLPEIPKGVWRCPKCVMAECKRPPEAFGFEQATREYTLQSFGEMADSFKADYFNMPVHMVPTELVEKEFWRLVNSIEEDVTVEYGADIHSKEFGSGFPVSDSKRHLTPEEEEYATSGWNLNVMPVLEQSVLCHINADISGMKVPWLYVGMVFSAFCWHIEDHWSYSINYLHWGEPKTWYGVPSLAAEHLEEVMKKLTPELFDSQPDLLHQLVTLMNPNTLMSHGVPVVRTNQCAGEFVITFPRAYHSGFNQGYNFAEAVNFCTADWLPAGRQCIEHYRRLRRYCVFSHEELICKMAACPEKLDLNLAAAVHKEMFIMVQEERRLRKALLEKGITEAEREAFELLPDDERQCIKCKTTCFLSALACYDCPDGLVCLSHINDLCKCSSSRQYLRYRYTLDELPAMLHKLKVRAESFDTWANKVRVALEVEDGRKRSLEELRALESEARERRFPNSELLQQLKNCLSEAEACVSRALGLVSGQEAGPHRVAGLQMTLTELRAFLDQMNNLPCAMHQIGDVKGVLEQVEAYQAEAREALASLPSSPGLLQSLLERGRQLGVEVPEAQQLQRQVEQARWLDEVKRTLAPSARRGTLAVMRGLLVAGASVAPSPAVDKAQAELQELLTIAERWEEKAHLCLEARQKHPPATLEAIIREAENIPVHLPNIQALKEALAKARAWIADVDEIQNGDHYPCLDDLEGLVAVGRDLPVGLEELRQLELQVLTAHSWREKASKTFLKTDSTKRSRWMEKELGLYKSDTELLGLSAQDLRDPGSVIVAFKEGEQKEKEGILQLRRTNSAKPSPLASSSTASSTTSICVCGQVLAGAGALQCDLCQDWFHGRCVSVPRLLSSPRPNPTSSPLLAWWEWDTKFLCPLCMRSRRPRLETILALLVALQRLPVRLPEGEALQCLTERAISWQGRARQALASEDVTALLGRLAELRQRLQAEPRPEEPPNYPAAPASDPLREGSGKDMPKVQGLLENGDSVTSPEKVAPEEGSGKRDLELLSSLLPQLTGPVLELPEATRAPLEELMMEGDLLEVTLDENHSIWQLLQAGQPPDLERIRTLLELEKAERHGSRARGRALERRRRRKVDRGGEGDDPAREELEPKRVRSSGPEAEEVQEEEELEEETGGEGPPAPIPTTGSPSTQENQNGLEPAEGTTSGPSAPFSTLTPRLHLPCPQQPPQQQL

SEQ ID NO: 894894 - protein, 1560 aa, Homo sapiens; identical to SEQ ID NO: 894888

SEQ ID NO: 894895 - protein, 1553 aa, Homo sapiens
PPILCHHSQASQHLPPPPGASSPASSCTRQVYERGSTGSLPDWDWQPPFAVEVDNFRFTPRIQRLNELEAQTRVKLNYLDQIAKFWEIQGSSLKIPNVERRILDLYSLSKIVVEEGGYEAICKDRRWARVAQRLNYPPGKNIGSLLRSHYERIVYPYEMYQSGANLVQCNTRPFDNEEKDKEYKPHSIPLRQSVQPSKFNSYGRRAKRLQPDPEPTEEDIEKNPELKKLQIYGAGPKMMGLGLMAKDKTLRKKDKEGPECPPTVVVKEELGGDVKVESTSPKTFLESKEELSHSPEPCTKMTMRLRRNHSNAQFIESYVCRMCSRGDEDDKLLLCDGCDDNYHIFCLLPPLPEIPKGVWRCPKCVMAECKRPPEAFGFEQATREYTLQSFGEMADSFKADYFNMPVHMVPTELVEKEFWRLVNSIEEDVTVEYGADIHSKEFGSGFPVSDSKRHLTPEEEEYATSGWNLNVMPVLEQSVLCHINADISGMKVPWLYVGMVFSAFCWHIEDHWSYSINYLHWGEPKTWYGVPSLAAEHLEEVMKKLTPELFDSQPDLLHQLVTLMNPNTLMSHGVPVVRTNQCAGEFVITFPRAYHSGFNQGYNFAEAVNFCTADWLPAGRQCIEHYRRLRRYCVFSHEELICKMAACPEKLDLNLAAAVHKEMFIMVQEERRLRKALLEKGITEAEREAFELLPDDERQCIKCKTTCFLSALACYDCPDGLVCLSHINDLCKCSSSRQYLRYRYTLDELPAMLHKLKVRAESFDTWANKVRVALEVEDGRKRSLEELRALESEARERRFPNSELLQQLKNCLSEAEACVSRALGLVSGQEAGPHRVAGLQMTLTELRAFLDQMNNLPCAMHQIGDVKGVLEQVEAYQAEAREALASLPSSPGLLQSLLERGRQLGVEVPEAQQLQRQVEQARWLDEVKRTLAPSARRGTLAVMRGLLVAGASVAPSPAVDKAQAELQELLTIAERWEEKAHLCLEARQKHPPATLEAIIREAENIPVHLPNIQALKEALAKARAWIADVDEIQNGDHYPCLDDLEGLVAVGRDLPVGLEELRQLELQVLTAHSWREKASKTFLKKNSCYTLLEVLCPCADAGSDSTKRSRWMEKELGLYKSDTELLGLSAQDLRDPGSVIVAFKEGEQKEKEGILQLRRTNSAKPSPLASSSTASSTTSICVCGQVLAGAGALQCDLCQDWFHGRCVSVPRLLSSPRPNPTSSPLLAWWEWDTKFLCPLCMRSRRPRLETILALLVALQRLPVRLPEGEALQCLTERAISWQGRARQALASEDVTALLGRLAELRQRLQAEPRPEEPPNYPAAPASDPLREGSGKDMPKVQGLLENGDSVTSPEKVAPEEGSGKRDLELLSSLLPQLTGPVLELPEATRAPLEELMMEGDLLEVTLDENHSIWQLLQAGQPPDLERIRTLLELEKAERHGSRARGRALERRRRRKVDRGGEGDDPAREELEPKRVRSSGPEAEEVQEEEELEEETGGEGPPAPIPTTGSPSTQENQNGLEPAEGTTSGPSAPFSTLTPRLHLPCPQQPPQQQL

SEQ ID NO: 894896 - protein, 1531 aa, Homo sapiens
MGSGSLGETLGSESVECCIPLFSPKTGPKDSGQWEGVASLFEPFLLQAQTRVKLNYLDQIAKFWEIQGSSLKIPNVERRILDLYSLSKIVVEEGGYEAICKDRRWARVAQRLNYPPGKNIGSLLRSHYERIVYPYEMYQSGANLVQCNTRPFDNEEKDKEYKPHSIPLRQSVQPSKFNSYGRRAKRLQPDPEPTEEDIEKNPELKKLQIYGAGPKMMGLGLMAKDKTLRKKDKEGPECPPTVVVKEELGGDVKVESTSPKTFLESKEELSHSPEPCTKMTMRLRRNHSNAQFIESYVCRMCSRGDEDDKLLLCDGCDDNYHIFCLLPPLPEIPKGVWRCPKCVMAECKRPPEAFGFEQATREYTLQSFGEMADSFKADYFNMPVHMVPTELVEKEFWRLVNSIEEDVTVEYGADIHSKEFGSGFPVSDSKRHLTPEEEEYATSGWNLNVMPVLEQSVLCHINADISGMKVPWLYVGMVFSAFCWHIEDHWSYSINYLHWGEPKTWYGVPSLAAEHLEEVMKKLTPELFDSQPDLLHQLVTLMNPNTLMSHGVPVVRTNQCAGEFVITFPRAYHSGFNQGYNFAEAVNFCTADWLPAGRQCIEHYRRLRRYCVFSHEELICKMAACPEKLDLNLAAAVHKEMFIMVQEERRLRKALLEKGITEAEREAFELLPDDERQCIKCKTTCFLSALACYDCPDGLVCLSHINDLCKCSSSRQYLRYRYTLDELPAMLHKLKVRAESFDTWANKVRVALEVEDGRKRSLEELRALESEARERRFPNSELLQQLKNCLSEAEACVSRALGLVSGQEAGPHRVAGLQMTLTELRAFLDQMNNLPCAMHQIGDVKGVLEQVEAYQAEAREALASLPSSPGLLQSLLERGRQLGVEVPEAQQLQRQVEQARWLDEVKRTLAPSARRGTLAVMRGLLVAGASVAPSPAVDKAQAELQELLTIAERWEEKAHLCLEARQKHPPATLEAIIREAENIPVHLPNIQALKEALAKARAWIADVDEIQNGDHYPCLDDLEGLVAVGRDLPVGLEELRQLELQVLTAHSWREKASKTFLKKNSCYTLLEVLCPCADAGSDSTKRSRWMEKELGLYKSDTELLGLSAQDLRDPGSVIVAFKEGEQKEKEGILQLRRTNSAKPSPLASSSTASSTTSICVCGQVLAGAGALQCDLCQDWFHGRCVSVPRLLSSPRPNPTSSPLLAWWEWDTKFLCPLCMRSRRPRLETILALLVALQRLPVRLPEGEALQCLTERAISWQGRARQALASEDVTALLGRLAELRQRLQAEPRPEEPPNYPAAPASDPLREGSGKDMPKVQGLLENGDSVTSPEKVAPEEGSGKRDLELLSSLLPQLTGPVLELPEATRAPLEELMMEGDLLEVTLDENHSIWQLLQAGQPPDLERIRTLLELEKAERHGSRARGRALERRRRRKVDRGGEGDDPAREELEPKRVRSSGPEAEEVQEEEELEEETGGEGPPAPIPTTGSPSTQENQNGLEPAEGTTSGPSAPFSTLTPRLHLPCPQQPPQQQL

SEQ ID NO: 894897 - protein, 1560 aa, Homo sapiens; identical to SEQ ID NO: 894888

SEQ ID NO: 894898 - protein, 1560 aa, Homo sapiens; identical to SEQ ID NO: 894888

SEQ ID NO: 894899 - protein, 1560 aa, Homo sapiens; identical to SEQ ID NO: 894888

SEQ ID NO: 894900 - protein, 1560 aa, Homo sapiens; identical to SEQ ID NO: 894888

SEQ ID NO: 894901 - protein, 1560 aa, Homo sapiens; identical to SEQ ID NO: 894888

SEQ ID NO: 894902 - protein, 685 aa, Homo sapiens
MPVVPATREAEAREALASLPSSPGLLQSLLERGRQLGVEVPEAQQLQRQVEQARWLDEVKRTLAPSARRGTLAVMRGLLVAGASVAPSPAVDKAQAELQELLTIAERWEEKAHLCLEARQKHPPATLEAIIREAENIPVHLPNIQALKEALAKARAWIADVDEIQNGDHYPCLDDLEGLVAVGRDLPVGLEELRQLELQVLTAHSWREKASKTFLKKNSCYTLLEVLCPCADAGSDSTKRSRWMEKELGLYKSDTELLGLSAQDLRDPGSVIVAFKEGEQKEKEGILQLRRTNSAKPSPLASSSTASSTTSICVCGQVLAGAGALQCDLCQDWFHGRCVSVPRLLSSPRPNPTSSPLLAWWEWDTKFLCPLCMRSRRPRLETILALLVALQRLPVRLPEGEALQCLTERAISWQGRARQALASEDVTALLGRLAELRQRLQAEPRPEEPPNYPAAPASDPLREGSGKDMPKVQGLLENGDSVTSPEKVAPEEGSGKRDLELLSSLLPQLTGPVLELPEATRAPLEELMMEGDLLEVTLDENHSIWQLLQAGQPPDLERIRTLLELEKAERHGSRARGRALERRRRRKVDRGGEGDDPAREELEPKRVRSSGPEAEEVQEEEELEEETGGEGPPAPIPTTGSPSTQENQNGLEPAEGTTSGPSAPFSTLTPRLHLPCPQQPPQQQL

SEQ ID NO: 894903 - protein, 1044 aa, Homo sapiens
MEPGSDDFLPPPECPVFEPSWAEFRDPLGYIAKIRPIAEKSGICKIRPPADWQPPFAVEVDNFRFTPRIQRLNELEAQTRVKLNYLDQIAKFWEIQGSSLKIPNVERRILDLYSLSKIVVEEGGYEAICKDRRWARVAQRLNYPPGKNIGSLLRSHYERIVYPYEMYQSGANLVQCNTRPFDNEEKDKEYKPHSIPLRQSVQPSKFNSYGRRAKRLQPDPEPTEEDIEKNPELKKLQIYGAGPKMMGLGLMAKDKTLRKKDKEGPECPPTVVVKEELGGDVKVESTSPKTFLESKEELSHSPEPCTKMTMRLRRNHSNAQFIESYVCRMCSRGDEDDKLLLCDGCDDNYHIFCLLPPLPEIPKGVWRCPKCVMAECKRPPEAFGFEQATREYTLQSFGEMADSFKADYFNMPVHMVPTELVEKEFWRLVNSIEEDVTVEYGADIHSKEFGSGFPVSDSKRHLTPEEEEYATSGWNLNVMPVLEQSVLCHINADISGMKVPWLYVGMVFSAFCWHIEDHWSYSINYLHWGEPKTWYGVPSLAAEHLEEVMKKLTPELFDSQPDLLHQLVTLMNPNTLMSHGVPVVRTNQCAGEFVITFPRAYHSGFNQGYNFAEAVNFCTADWLPAGRQCIEHYRRLRRYCVFSHEELICKMAACPEKLDLNLAAAVHKEMFIMVQEERRLRKALLEKGITEAEREAFELLPDDERQCIKCKTTCFLSALACYDCPDGLVCLSHINDLCKCSSSRQYLRYRYTLDELPAMLHKLKVRAESFDTWANKVRVALEVEDGRKRSLEELRALESEARERRFPNSELLQQLKNCLSEAEACVSRALGLVSGQEAGPHRVAGLQMTLTELRAFLDQMNNLPCAMHQIGDVKGVLEQVEAYQAEAREALASLPSSPGLLQSLLERGRQLGVEVPEAQQLQRQVEQARWLDEVKRTLAPSARRGTLAVMRGLLVAGASVAPSPAVDKAQAELQELLTIAERWEEKAHLCLEARQKHPPATLEAIIREAENIPTPESLDFCILTPRYCSDLSSWGPAPGVFPPW

SEQ ID NO: 894904 - protein, 1452 aa, Homo sapiens
MEPGSDDFLPPPECPVFEPSWAEFRDPLGYIAKIRPIAEKSGICKIRPPADWQPPFAVEVDNFRFTPRIQRLNELEAQTRVKLNYLDQIAKFWEIQGSSLKIPNVERRILDLYSLSKIVVEEGGYEAICKDRRWARVAQRLNYPPGKNIGSLLRSHYERIVYPYEMYQSGANLVQCNTRPFDNEEKDKEYKPHSIPLRQSVQPSKFNSYGRRAKRLQPDPEPTEEDIEKNPELKKLQIYGAGPKMMGLGLMAKDKTLRKKDKEGPECPPTVVVKEELGGDVKVESTSPKTFLESKEELSHSPEPCTKMTMRLRRNHSNAQFIESYVCRMCSRGDEDDKLLLCDGCDDNYHIFCLLPPLPEIPKGVWRCPKCVMAECKRPPEAFGFEQATREYTLQSFGEMADSFKADYFNMPVHMVPTELVEKEFWRLVNSIEEDVTVEYGADIHSKEFGSGFPVSDSKRHLTPEEEEYATSGWNLNVMPVLEQSVLCHINADISGMKVPWLYVGMVFSAFCWHIEDHWSYSINYLHWGEPKTWYGVPSLAAEHLEEVMKKLTPELFDSQPDLLHQLVTLMNPNTLMSHGVPVVRTNQCAGEFVITFPRAYHSGFNQGYNFAEAVNFCTADWLPAGRQCIEHYRRLRRYCVFSHEELICKMAACPEKLDLNLAAAVHKEMFIMVQEERRLRKALLEKGITEAEREAFELLPDDERQCIKCKTTCFLSALACYDCPDGLVCLSHINDLCKCSSSRQYLRYRYTLDELPAMLHKLKVRAESFDTWANKVRVALEVEDGRKRSLEELRALESEARERRFPNSELLQQLKNCLSEAEACVSRALGLVSGQEAGPHRVAGLQMTLTELRAFLDQMNNLPCAMHQIGDVKGVLEQVEAYQAEAREALASLPSSPGLLQSLLERGRQLGVEVPEAQQLQRQVEQARWLDEVKRTLAPSARRGTLAVMRGLLVAGASVAPSPAVDKAQAELQELLTIAERWEEKAHLCLEARQKHPPATLEAIIREAENIPVHLPNIQALKEALAKARAWIADVDEIQNGDHYPCLDDLEGLVAVGRDLPVGLEELRQLELQVLTAHSWREKASKTFLKKNSCYTLLEVLCPCADAGSDSTKRSRWMEKELGLYKSDTELLGLSAQDLRDPGSVIVAFKEGEQKEKEGILQLRRTNSAKPSPLASSSTASSTTSICVCGQVLAGAGALQCDLCQDWFHGRCVSVPRLLSSPRPNPTSSPLLAWWEWDTKFLCPLCMRSRRPRLETILALLVALQRLPVRLPEGEALQCLTERAISWQGRARQALASEDVTALLGRLAELRQRLQAEPRPEEPPNYPAAPASDPLREGSGKDMPKVQGLLENGDSVTSPEKVAPEEGSGKRDLELLSSLLPQLTGPVLELPEATRAPLEELMMEGDLLEVTLDENHSIWQLLQAGQPPDLERIRTLLEETNHQASQRESRN

SEQ ID NO: 894905 - protein, 890 aa, Homo sapiens
MEPGSDDFLPPPECPVFEPSWAEFRDPLGYIAKIRPIAEKSGICKIRPPADWQPPFAVEVDNFRFTPRIQRLNELEAQTRVKLNYLDQIAKFWEIQGSSLKIPNVERRILDLYSLSKIVVEEGGYEAICKDRRWARVAQRLNYPPGKNIGSLLRSHYERIVYPYEMYQSGANLVQCNTRPFDNEEKDKEYKPHSIPLRQSVQPSKFNSYGRRAKRLQPDPEPTEEDIEKNPELKKLQIYGAGPKMMGLGLMAKDKTLRKKDKEGPECPPTVVVKEELGGDVKVESTSPKTFLESKEELSHSPEPCTKMTMRLRRNHSNAQFIESYVCRMCSRGDEDDKLLLCDGCDDNYHIFCLLPPLPEIPKGVWRCPKCVMAECKRPPEAFGFEQATREYTLQSFGEMADSFKADYFNMPVHMVPTELVEKEFWRLVNSIEEDVTVEYGADIHSKEFGSGFPVSDSKRHLTPEEEEYATSGWNLNVMPVLEQSVLCHINADISGMKVPWLYVGMVFSAFCWHIEDHWSYSINYLHWGEPKTWYGVPSLAAEHLEEVMKKLTPELFDSQPDLLHQLVTLMNPNTLMSHGVPVVRTNQCAGEFVITFPRAYHSGFNQGYNFAEAVNFCTADWLPAGRQCIEHYRRLRRYCVFSHEELICKMAACPEKLDLNLAAAVHKEMFIMVQEERRLRKALLEKGITEAEREAFELLPDDERQCIKCKTTCFLSALACYDCPDGLVCLSHINDLCKCSSSRQYLRYRYTLDELPAMLHKLKVRAESFDTWANKVRVALEVEDGRKRSLEELRALESEARERRFPNSELLQQLKNCLSEAEACVSRALGLVSGQEAGPHRVAGLQMTLTELRAFLDQMNNLPCAMHQIGDVKVRTLGVLMRDQGDQGT

SEQ ID NO: 894906 - protein, 772 aa, Homo sapiens
MEPGSDDFLPPPECPVFEPSWAEFRDPLGYIAKIRPIAEKSGICKIRPPADWQPPFAVEVDNFRFTPRIQRLNELEAQTRVKLNYLDQIAKFWEIQGSSLKIPNVERRILDLYSLSKIVVEEGGYEAICKDRRWARVAQRLNYPPGKNIGSLLRSHYERIVYPYEMYQSGANLVQCNTRPFDNEEKDKEYKPHSIPLRQSVQPSKFNSYGRRAKRLQPDPEPTEEDIEKNPELKKLQIYGAGPKMMGLGLMAKDKTLRKKDKEGPECPPTVVVKEELGGDVKVESTSPKTFLESKEELSHSPEPCTKMTMRLRRNHSNAQFIESYVCRMCSRGDEDDKLLLCDGCDDNYHIFCLLPPLPEIPKGVWRCPKCVMAECKRPPEAFGFEQATREYTLQSFGEMADSFKADYFNMPVHMVPTELVEKEFWRLVNSIEEDVTVEYGADIHSKEFGSGFPVSDSKRHLTPEEEEYATSGWNLNVMPVLEQSVLCHINADISGMKVPWLYVGMVFSAFCWHIEDHWSYSINYLHWGEPKTWYGVPSLAAEHLEEVMKKLTPELFDSQPDLLHQLVTLMNPNTLMSHGVPVVRTNQCAGEFVITFPRAYHSGFNQGYNFAEAVNFCTADWLPAGRQCIEHYRRLRRYCVFSHEELICKMAACPEKLDLNLAAAVHKEMFIMVQEERRLRKALLEKGITEAEREAFELLPDDERQCIKCKTTCFLSALACYDCPDGLVCLSHIKQAGLLAALHVGLGSSQPLLQALLAFSVRCAALLQLVQ

SEQ ID NO: 894907 - protein, 541 aa, Homo sapiens
MEPGSDDFLPPPECPVFEPSWAEFRDPLGYIAKIRPIAEKSGICKIRPPADWQPPFAVEVDNFRFTPRIQRLNELEAQTRVKLNYLDQIAKFWEIQGSSLKIPNVERRILDLYSLSKIVVEEGGYEAICKDRRWARVAQRLNYPPGKNIGSLLRSHYERIVYPYEMYQSGANLVQCNTRPFDNEEKDKEYKPHSIPLRQSVQPSKFNSYGRRAKRLQPDPEPTEEDIEKNPELKKLQIYGAGPKMMGLGLMAKDKTLRKKDKEGPECPPTVVVKEELGGDVKVESTSPKTFLESKEELSHSPEPCTKMTMRLRRNHSNAQFIESYVCRMCSRGDEDDKLLLCDGCDDNYHIFCLLPPLPEIPKGVWRCPKCVMAECKRPPEAFGFEQATREYTLQSFGEMADSFKADYFNMPVHMVPTELVEKEFWRLVNSIEEDVTVEYGADIHSKEFGSGFPVSDSKRHLTPEEEEYATSGWNLNVMPVLEQSVLCHINADISGMKVPWLYVGMVFSAFCWHIEDHWSYSINYLHWGEPKTCSGAHIRS

SEQ ID NO: 894908 - protein, 326 aa, Homo sapiens [sequence omitted]

SEQ ID NO: 894909 - protein, 163 aa, Homo sapiens
GVLRGGPEKGRGRLLTHLLLSWVWQIVAFKEGEQKEKEGILQLRRTNSAKPSPLASSSTASSTTSICVCGQVLAGAGALQCDLCQDWFHGRCVSVPRLLSSPRPNPTSSPLLAWWEWDTKFLCPLCMRSRRPRLETILALLVALQRLPVRLPEGEALQCLTER

SEQ ID NO: 894910 - protein, 250 aa, Homo sapiens
MPSPDSMTFEDIIVDFTQEEWALLDTSQRKLFQDVMLENISHLVSIGKQLCKSVVLSQLEQVEKLSTQRISLLQGREVGIKHQEIPFIQHIYQKGTSTISTMRSHTQEDPFLCNDLGEDFTQHIALTQNVITYMRTKHFVSKKFGKIFSDWLSFNQHKEIHTKCKSYGSHLFDYAFIQNSALRPHSVTHTREITLECRVCGKTFSKNSNLRRHEMIHTGEKPHGCHLCGKAFTHCSDLRKHERTHTGEKP

SEQ ID NO: 894911 - protein, 356 aa, Homo sapiens
LATGHWKRLRRDNPRFNLMLGERNRLPFGRLGHEPGLVQLVNYYRGADKLCRKASLVKLIKTSPELAESCTWFPESYVIYPTNLKTPVAPAQNGIQPPISNSRTDEREFFLASYNRKKEDGEGNVWIAKSSAGAKGEGILISSEASELLDFIDNQGQVHVIQKYLEHPLLLEPGHRKFDIRSWVLVDHQYNIYLYREGVLRTASEPYHVDNFQDKTCHLTNHCIQKEYSKNYGKYEEGNEMFFKEFNQYLTSALNITLESSILLQIKHIIRNCLLSVEPAISTKHLPYQSFQLFGFDFMVDEELKVWLIEVNGAPACAQKLYAELCQGIVDIAISSVFPPPDVEQPQTQPAAFIKL

SEQ ID NO: 894912 - protein, 356 aa, Homo sapiens; identical to SEQ ID NO: 894911

SEQ ID NO: 894913 - protein, 319 aa, Homo sapiens
LATGHWKRLRRDNPRFNLMLGERNRLPFGRLGHEPGLVQLVNYYRGADKLCRKASLVKLIKTSPELAESCTWFPESYVIYPTNLKTPVAPAQNGIQPPISNSRTDEREFFLASYNRKKEDGEGNVWIAKSSAGAKGEGILISSEASELLDFIDNQGQVHVIQKYLEHPLLLEPGHRKFDIRSWVLVDHQYNIYLYREGVLRTASEPYHVDNFQDKTCHLTNHCIQKEYSKNYGKYEEGNEMFFKEFNQYLTSALNITLESSILLQIKHIIRNCLLSVEPAISTKHLPYQSFQLFGFDFMVDEELKVWLIEVNGAPACAQ

SEQ ID NO: 894914 - protein, 247 aa, Homo sapiens
LATGHWKRLRRDNPRFNLMLGERNRLPFGRLGHEPGLVQLVNYYRGADKLCRKASLVKLIKTSPELAESCTWFPESYVIYPTNLKTPVAPAQNGIQPPISNSRTDEREFFLASYNRKKEDGEGNVWIAKSSAGAKGEGILISSEASELLDFIDNQGQVHVIQKYLEHPLLLEPGHRKFDIRSWVLVDEVFKRRGHDIVIFGLMWYGCSVWRKFERKNCQLAGQQGSHLYLARRTWIEAMDDGFQSNL

SEQ ID NO: 894915 - protein, 181 aa, Homo sapiens
LATGHWKRLRRDNPRFNLMLGERNRLPFGRLGHEPGLVQLVNYYRGADKLCRKASLVKLIKTSPELAESCTWFPESYVIYPTNLKTPVAPAQNGIQPPISNSRTDEREFFLASYNRKKEDGEGNVWIAKSSAGAKGEGILISSEASELLDFIDNQGQVHVIQKYLEHPLLLEPGHRKFDIR

SEQ ID NO: 894916 - protein, 941 aa, Homo sapiens
MASPRSSGQPGPPPPPPPPPARLLLLLLLPLLLPLAPGAWGWARGAPRPPPSSPPLSIMGLMPLTKEVAKGSIGRGVLPAVELAIEQIRNESLLRPYFLDLRLYDTECDNAKGLKAFYDAIKYGPNHLMVFGGVCPSVTSIIAESLQGWNLVQLSFAATTPVLADKKKYPYFFRTVPSDNAVNPAILKLLKHYQWKRVGTLTQDVQRFSEVRNDLTGVLYGEDIEISDTESFSNDPCTSVKKLKGNDVRIILGQFDQNMAAKVFCCAYEENMYGSKYQWIIPGWYEPSWWEQVHTEANSSRCLRKNLLAAMEGYIGVDFEPLSSKQIKTISGKTPQQYEREYNNKRSGVGPSKFHGYAYDGIWVIAKTLQRAMETLHASSRHQRIQDFNYTDHTLGRIILNAMNETNFFGVTGQVVFRNGERMGTIKFTQFQDSREVKVGEYNAVADTLEIINDTIRFQGSEPPKDKTIILEQLRKISLPLYSILSALTILGMIMASAFLFFNIKNRNQKLIKMSSPYMNNLIILGGMLSYASIFLFGLDGSFVSEKTFETLCTVRTWILTVGYTTAFGAMFAKTWRVHAIFKNVKMKKKIIKDQKLLVIVGGMLLIDLCILICWQAVDPLRRTVEKYSMEPDPAGRDISIRPLLEHCENTHMTIWLGIVYAYKGLLMLFGCFLAWETRNVSIPALNDSKYIGMSVYNVGIMCIIGAAVSFLTRDQPNVQFCIVALVIIFCSTITLCLVFVPKLITLRTNPDAATQNRRFQFTQNQKKEDSKTSTSVTSVNQASTSRLEGLQSENHRLRMKITELDKDLEEVTMQLQDTPEKTTYIKQNHYQELNDILNLGNFTESTDGGKAILKNHLDQNPQLQWNTTEPSRTCKDPIEDINSPEHIQRRLSLQLPILHHAYLPSIGGVDASCVSPCVSPTASPRHRHVPPSFRVMVSGL

SEQ ID NO: 894917 - protein, 236 aa, Homo sapiens
SASASPSPGAHGSSPSLEAARAAPEQPRLRLPRFLPSALPRPSSRGCRLAAPGGRAVQSAHGGGRRRPGAGRPRWREARAETPAPLSAFARLLPASRTPLAPTPSRRDWSVTGADRSTATARAACYCYCCCRCCCLWRPGPGARARGAPPGPNAQTDRTVIHHGPHADHQREWPKGSIRGSGVTPPPLELAIEQIRKRVISCDPYFHRPAGSMTRSCDNAKGLKAFYDAIKYGPNH

SEQ ID NO: 894918 - protein, 941 aa, Homo sapiens; identical to SEQ ID NO: 894916

SEQ ID NO: 894919 - protein, 941 aa, Homo sapiens; identical to SEQ ID NO: 894916

SEQ ID NO: 894920 - protein, 926 aa, Homo sapiens
MASPRSSGQPGPPPPPPPPPARLLLLLLLPLLLPLAPGAWGWARGAPRPPPSSPPLSIMGLMPLTKEVAKGSIGRGVLPAVELAIEQIRNESLLRPYFLDLRLYDTECDNAKGLKAFYDAIKYGPNHLMVFGGVCPSVTSIIAESLQGWNLVQLSFAATTPVLADKKKYPYFFRTVPSDNAVNPAILKLLKHYQWKRVGTLTQDVQRFSEVRNDLTGVLYGEDIEISDTESFSNDPCTSVKKLKGNDVRIILGQFDQNMAAKVFCCAYEENMYGSKYQWIIPGWYEPSWWEQVHTEANSSRCLRKNLLAAMEGYIGVDFEPLSSKQIKTISGKTPQQYEREYNNKRSGVGPSKFHGYAYDGIWVIAKTLQRAMETLHASSRHQRIQDFNYTDHTLGRIILNAMNETNFFGVTGQVVFRNGERMGTIKFTQFQDSREVKVGEYNAVADTLEIINDTIRFQGSEPPKDKTIILEQLRKISLPLYSILSALTILGMIMASAFLFFNIKNRNQKLIKMSSPYMNNLIILGGMLSYASIFLFGLDGSFVSEKTFETLCTVRTWILTVGYTTAFGAMFAKTWRVHAIFKNVKMKKKIIKDQKLLVIVGGMLLIDLCILICWQAVDPLRRTVEKYSMEPDPAGRDISIRPLLEHCENTHMTIWLGIVYAYKGLLMLFGCFLAWETRNVSIPALNDSKYIGMSVYNVGIMCIIGAAVSFLTRDQPNVQFCIVALVIIFCSTITLCLVFVPKLITLRTNPDAATQNRRFQFTQNQKKEDSKTSTSVTSVNQASTSRLEGLQSENHRLRMKITELDKDLEEVTMQLQDTPEKTTYIKQNHYQELNDILNLGNFTESTDGGKAILKNHLDQNPQLQWNTTEPSRTCKDPIEDINSPEHIQRRLSLQLPILHHACATLLPSHGLGPVRVGGLGPGPPP

SEQ ID NO: 894921 - protein, 233 aa, Homo sapiens
MSVYNVGIMCIIGAAVSFLTRDQPNVQFCIVALVIIFCSTITLCLVFVPKLITLRTNPDAATQNRRFQFTQNQKKEDSKTSTSVTSVNQASTSRLEGLQSENHRLRMKITELDKDLEEVTMQLQDTPEKTTYIKQNHYQELNDILNLGNFTESTDGGKAILKNHLDQNPQLQWNTTEPSRTCKDPIEDINSPEHIQRRLSLQLPILHHACATLLPSHGLGPVRVGGLGPGPPP

SEQ ID NO: 894922 - protein, 855 aa, Homo sapiens
REETVLGELRESREGSLEEVSVSRPGQMSRKYDPRSKKCCILSHSKTRAGAPAPPTPDRCDFNLWTDQRCHIDMRRHDFCSELSFAATTPVLADKKKYPYFFRTVPSDNAVNPAILKLLKHYQWKRVGTLTQDVQRFSEVRNDLTGVLYGEDIEISDTESFSNDPCTSVKKLKGNDVRIILGQFDQNMAAKVFCCAYEENMYGSKYQWIIPGWYEPSWWEQVHTEANSSRCLRKNLLAAMEGYIGVDFEPLSSKQIKTISGKTPQQYEREYNNKRSGVGPSKFHGYAYDGIWVIAKTLQRAMETLHASSRHQRIQDFNYTDHTLGRIILNAMNETNFFGVTGQVVFRNGERMGTIKFTQFQDSREVKVGEYNAVADTLEIINDTIRFQGSEPPKDKTIILEQLRKISLPLYSILSALTILGMIMASAFLFFNIKNRNQKLIKMSSPYMNNLIILGGMLSYASIFLFGLDGSFVSEKTFETLCTVRTWILTVGYTTAFGAMFAKTWRVHAIFKNVKMKKKIIKDQKLLVIVGGMLLIDLCILICWQAVDPLRRTVEKYSMEPDPAGRDISIRPLLEHCENTHMTIWLGIVYAYKGLLMLFGCFLAWETRNVSIPALNDSKYIGMSVYNVGIMCIIGAAVSFLTRDQPNVQFCIVALVIIFCSTITLCLVFVPKLITLRTNPDAATQNRRFQFTQNQKKEDSKTSTSVTSVNQASTSRLEGLQSENHRLRMKITELDKDLEEVTMQLQDTPEKTTYIKQNHYQELNDILNLGNFTESTDGGKAILKNHLDQNPQLQWNTTEPSRTCKDPIEDINSPEHIQRRLSLQLPILHHACATLLPSHGLGPVRVGGLGPGPPP

SEQ ID NO: 894923 - protein, 684 aa, Homo sapiens
MASPRSSGQPGPPPPPPPPPARLLLLLLLPLLLPLAPGAWGWARGAPRPPPSSPPLSIMGLMPLTKEVAKGSIGRGVLPAVELAIEQIRNESLLRPYFLDLRLYDTECDNAKGLKAFYDAIKYGPNHLMVFGGVCPSVTSIIAESLQGWNLVQLSFAATTPVLADKKKYPYFFRTVPSDNAVNPAILKLLKHYQWKRVGTLTQDVQRFSEVRNDLTGVLYGEDIEISDTESFSNDPCTSVKKLKGNDVRIILGQFDQNMAAKVFCCAYEENMYGSKYQWIIPGWYEPSWWEQVHTEANSSRCLRKNLLAAMEGYIGVDFEPLSSKQIKTISGKTPQQYEREYNNKRSGVGPSKFHGYAYDGIWVIAKTLQRAMETLHASSRHQRIQDFNYTDHTLGRIILNAMNETNFFGVTGQVVFRNGERMGTIKFTQFQDSREVKVGEYNAVADTLEIINDTIRFQGSEPPKDKTIILEQLRKISLPLYSILSALTILGMIMASAFLFFNIKNRNQKLIKMSSPYMNNLIILGGMLSYASIFLFGLDGSFVSEKTFETLCTVRTWILTVGYTTAFGAMFAKTWRVHAIFKNVKMKKKIIKDQKLLVIVGGMLLIDLCILICWQAVDPLRRTVEKYSMEVSPPCRQEGSLQMQPLAHEDSEAAQLPDCPVPHWEHFISSISFHLRHVIPGRP

SEQ ID NO: 894924 - protein, 572 aa, Homo sapiens
RSGSGSVAQSVSGCPARVVGGKDSGSVLTRPWPEAQGPPPLPPSPPASPPSPELDRTPWDTVFHFLRTSPRLEERSEEVGVGLFARTPAAGPGEAAEAAAAAAGGDMAEEQDLSEVELSPVGSEEPRCLSPGSAPSLGPDGGGGGSGLRASPGPGELGKVKKEQQDGEADDDKFPVCIREAVSQVLSGYDWTLVPMPVRVNGASKSKPHVKRPMNAFMVWAQAARRKLADQYPHLHNAELSKTLGKLWRLLNESDKRPFIEEAERLRMQHKKDHPDYKYQPRRRKNGKAAQGEAECPGGEAEQGGTAAIQAHYKSAHLDHRHPGEGSPMSDGNPEHPSGQSHGPPTPPTTPKTELQSGKADPKRDGRSMGEGGKPHIDFGNVDIGEISHEVMSNMETFDVAELDQYLPPNGHPGHVSSYSAAGYGLGSALAVASGHSAWISKPPGVALPTVSPPGVDAKAQVKTETAGPQGPPHYTDQPSTSQIAYTSLSLPHYGSAFPSISRPQFDYSDHQPSGPYYGHSGQASGLYSAFSYMGPSQRPLYTAISDPSPSGPQSHSPTHWEQPVYTTLSRP

SEQ ID NO: 894925 - protein, 554 aa, Homo sapiens
GGEGSLLTGGSSARQCHQWASRLTDSPPASPPSPELDRTPWDTVFHFLRTSPRLEERSEEVGVGLFARTPAAGPGEAAEAAAAAAGGDMAEEQDLSEVELSPVGSEEPRCLSPGSAPSLGPDGGGGGSGLRASPGPGELGKVKKEQQDGEADDDKFPVCIREAVSQVLSGYDWTLVPMPVRVNGASKSKPHVKRPMNAFMVWAQAARRKLADQYPHLHNAELSKTLGKLWRLLNESDKRPFIEEAERLRMQHKKDHPDYKYQPRRRKNGKAAQGEAECPGGEAEQGGTAAIQAHYKSAHLDHRHPGEGSPMSDGNPEHPSGQSHGPPTPPTTPKTELQSGKADPKRDGRSMGEGGKPHIDFGNVDIGEISHEVMSNMETFDVAELDQYLPPNGHPGHVSSYSAAGYGLGSALAVASGHSAWISKPPGVALPTVSPPGVDAKAQVKTETAGPQGPPHYTDQPSTSQIAYTSLSLPHYGSAFPSISRPQFDYSDHQPSGPYYGHSGQASGLYSAFSYMGPSQRPLYTAISDPSPSGPQSHSPTHWEQPVYTTLSRP

SEQ ID NO: 894926 - protein, 572 aa, Homo sapiens; identical to SEQ ID NO: 894924

SEQ ID NO: 894927 - protein, 572 aa, Homo sapiens; identical to SEQ ID NO: 894924

SEQ ID NO: 894928 - protein, 572 aa, Homo sapiens; identical to SEQ ID NO: 894924

SEQ ID NO: 894929 - protein, 593 aa, Homo sapiens
RSGSGSVAQSVSGCPARVVGGKDSGSVLTRPWPEAQGPPPLPPSPPASPPSPELDRTPWDTVFHFLRTSPRLEERSEEVGVGLFARTPAAGPGEAAEAAAAAAGGDMAEEQDLSEVELSPVGSEEPRCLSPGSAPSLGPDGGGGGSGLRASPGPGELGKVKKEQQDGEADDDKFPVCIREAVSQVLSGYDWTLVPMPVRVNGASKSKPHVKRPMNAFMVWAQAARRKLADQYPHLHNAELSKTLGKLWRLLNESDKRPFIEEAERLRMQHKKDHPDYKYQPRRRKNGKAAQGEAECPGGEAEQGGTAAIQAHYKSAHLDHRHPGEGSPMSDGNPEHPSGQSHGPPTPPTTPKTELQSGKADPKRDGRSMGEGGKPHIDFGNVDIGEISHEVMSNMETFDVAELDQYLPPNGHPGHVSSYSAAGYGLGSALAVASGHSAWISKPPGVALPTVSPPGVDAKAQVKTETAGPQGPPHYTDQPSTSQIAYTPSSLTRLYGPCSVSPTPWASQRVTAAQALTLGSRRHRAQHPGCCRQAEDTRILTCTFCPCLLPLASQWYLNKVCSYICPYFPVLQPPKSTCNSLLSPVIYLSSPLS

SEQ ID NO: 894930 - protein, 408 aa, Homo sapiens
RSGSGSVAQSVSGCPARVVGGKDSGSVLTRPWPEAQGPPPLPPSPPASPPSPELDRTPWDTVFHFLRTSPRLEERSEEVGVGLFARTPAAGPGEAAEAAAAAAGGDMAEEQDLSEVELSPVGSEEPRCLSPGSAPSLGPDGGGGGSGLRASPGPGELGKVKKEQQDGEADDDKFPVCIREAVSQVLSGYDWTLVPMPVRVNGASKSKPHVKRPMNAFMVWAQAARRKLADQYPHLHNAELSKTLGKLWRLLNESDKRPFIEEAERLRMQHKKDHPDYKYQPRRRKNGKAAQGEAECPGGEAEQGGTAAIQAHYKSAHLDHRHPGEGSPMSDGNPEHPSGQSHGPPTPPTTPKTELQSGKADPKRDGRSMGEGGKPHIDFGNVDIGEISHEMGKLKFARLMLRSAGARI

SEQ ID NO: 894931 - protein, 465 aa, Homo sapiens
RSGSGSVAQSVSGCPARVVGGKDSGSVLTRPWPEAQGPPPLPPSPPASPPSPELDRTPWDTVFHFLRTSPRLEERSEEVSAQPAPPWPAQAWDPAVRWREATPRPCPPPGSPLNPVGAELREEGKVEREDSLLRTPGRLGPGEQVVPRRATRAERARWATMGRKEAGTYSERRQLSPRGHRGGKAPRIDPDPHGGRPQSPNTDIRGHPRLRRYGRAESGTKTETEHAGGPRRRNLETKGPNKRKRRQGTGGRAGHGKRTERVSPRCLANPDRRIRTRSPRVASKSVYHGTLSPALEWPTVTPGSRRSPATTDTGHKGKAPGDGQRPGPTSETGPYPVLVVEAYSGRSSAARHRPRKGTQDNPGTRWSQTRARWTPGKREQSRGRQSYLGTGHGQQGTAAEQKAGRQISECKGKGIDNRLDNEMNSRPSRGQQETSRRGAIAGGVHPGHDKGRGRRQDTGVNKARP

SEQ ID NO: 894932 - protein, 101 aa, Homo sapiens
MTELRVGQGQSVETGDGWMAMRPWTLGRACQAVQLPQQSCRGPEGAPWGFRCQGKWLGEMALARADPTGQRGPVKDCGGRRVWWLTPVIPALWEAEEGRSR

SEQ ID NO: 894933 - protein, 572 aa, Homo sapiens; identical to SEQ ID NO: 894924

SEQ ID NO: 894934 - protein, 572 aa, Homo sapiens; identical to SEQ ID NO: 894924

SEQ ID NO: 894935 - protein, 248 aa, Homo sapiens
RSGSGSVAQSVSGCPARVVGGKDSGSVLTRPWPEAQGPPPLPPSPPASPPSPELDRTPWDTVFHFLRTSPRLEERSEEVGVGLFARTPAAGPGEAAEAAAAAAGGDMAEEQDLSEVELSPVGSEEPRCLSPGSAPSLGPDGGGGGSGLRASPGPGELGKVKKEQQDGEADDDKFPSISRPQFDYSDHQPSGPYYGHSGQASGLYSAFSYMGPSQRPLYTAISDPSPSGPQSHSPTHWEQPVYTTLSRP

SEQ ID NO: 894936 - protein, 593 aa, Homo sapiens; identical to SEQ ID NO: 894929

SEQ ID NO: 894937 - protein, 335 aa, Homo sapiens
RSGSGSVAQSVSGCPARVVGGKDSGSVLTRPWPEAQGPPPLPPSPPASPPSPELDRTPWDTVFHFLRTSPRLEERSEEVGVGLFARTPAAGPGEAAEAAAAAAGGDMAEEQDLSEVELSPVGSEEPRCLSPGSAPSLGPDGGGGGSGLRASPGPGELGKVKKEQQDGEADDDKFPVCIREAVSQVLSGYDWTLVPMPVRVNGASKSKPHVKRPMNAFMVWAQAARRKLADQYPHLHNAELSKTLGKLWRLLNESDKRPFIEEAERLRMQHKKDHPDYKYQPRRRKNGKAAQGEAECPGGEAEQGGTAAIQAHYKSAHLDPPRRVPLLTRPTRGLR

SEQ ID NO: 894938 - protein, 486 aa, Homo sapiens [sequence omitted]

SEQ ID NO: 894939 - protein, 440 aa, Homo sapiens
MFSSPAEAALQRETGVPGLLTPLPDLDGVYELERVAGFVRDLGCERVALQFPDQLLGDAVAVAARLEETTGSKMFILGDTAYGSCCVDVLGAEQAGAQALIHFGPACLSPPARPLPVAFVLRQRSVALELCVKAFEAQNPDPKAPVVLLSEPACAHALEALATLLRPRYLDLLVSSPAFPQPVGSLSPEPMPLERFGRRFPLAPGRRLEEYGAFYVGGSKASPDPDLDPDLSRLLLGWAPGQPFSSCCPDTGKTQDEGARAGRLRARRRYLVERARDARVVGLLAGTLGVAQHREALAHLRNLTQAAGKRSYVLALGRPTPAKLANFPEVDVFVLLACPLGALAPQLSGSFFQPILAPCELEAACNPAWPPPGLAPHLTHYADLLPGSPFHVALPPPESELWETPDVSLIMEPRLGQTPVTEAVSGRRGIAIAYEDEGSG

SEQ ID NO: 894940 - protein, 413 aa, Homo sapiens
MFILGDTAYGSCCVDVLGAEQAGAQALIHFGPACLSPPARPLPVAFVLRQRSVALELCVKAFEAQNPDPKAPVVLLSEPACAHALEALATLLRPRYLDLLVSSPAFPQPVGSLSPEPMPLERFGRRFPLAPGRRLEEYGAFYVGGSKASPDPDLDPDLSRLLLGWAPGQPFSSCCPDTGKTQDEGARAGRLRARRRYLVERARDARVVGLLAGTLGVAQHREALAHLRNLTQAAGKRSYVLALGRPTPAKLANFPEVDVFVLLACPLGALAPQLSGSFFQPILAPCELEAACNPAWPPPGLAPHLTHYADLLPGSPFHVALPPPESELWETPDVSLITGDLRPPPAWKSSNDHGSLALTPRPQLELAESSPAASFLSSRSWQGLEPRLGQTPVTEAVSGRRGIAIAYEDEGSG

SEQ ID NO: 894941 - protein, 296 aa, Homo sapiens
MPLERFGRRFPLAPGRRLEEYGAFYVGGSKASPDPDLDPDLSRLLLGWAPGQPFSSCCPDTGKTQDEGARAGRLRARRRYLVERARDARVVGLLAGTLGVAQHREALAHLRNLTQAAGKRSYVLALGRPTPAKLANFPEVDVFVLLACPLGALAPQLSGSFFQPILAPCELEAACNPAWPPPGLAPHLTHYADLLPGSPFHVALPPPESELWETPDVSLITGDLRPPPAWKSSNDHGSLALTPRPQLELAESSPAASFLSSRSWQGLEPRLGQTPVTEAVSGRRGIAIAYEDEGSG

SEQ ID NO: 894942 - protein, 486 aa, Homo sapiens [sequence omitted]

SEQ ID NO: 894943 - protein, 296 aa, Homo sapiens; identical to SEQ ID NO: 894941

SEQ ID NO: 894944 - protein, 296 aa, Homo sapiens; identical to SEQ ID NO: 894941

SEQ ID NO: 894945 - protein, 296 aa, Homo sapiens; identical to SEQ ID NO: 894941

SEQ ID NO: 894946 - protein, 296 aa, Homo sapiens; identical to SEQ ID NO: 894941

SEQ ID NO: 894947 - protein, 258 aa, Homo sapiens
MFSSPAEAALQRETGVPGLLTPLPDLDGVYELERVAGFVRDLGCERVALQFPDQLLGDAVAVAARLEETTGSKMFILGDTAYGSCCVDVLGAEQAGAQALIHFGPACLSPPARPLPVAFVLRQRSVALELCVKAFEAQNPDPKAPVVLLSEPACAHALGSPFHVALPPPESELWETPDVSLITGDLRPPPAWKSSNDHGSLALTPRPQLELAESSPAASFLSSRSWQGLEPRLGQTPVTEAVSGRRGIAIAYEDEGSG

SEQ ID NO: 894948 - protein, 423 aa, Homo sapiens
KASRGGGNRPRVILGDTAYGSCCVDVLGAEQAGAQALIHFGPACLSPPARPLPVAFVLRQRSVALELCVKAFEAQNPDPKAPVVLLSEPACAHALEALATLLRPRYLDLLVSSPAFPQPVGSLSPEPMPLERFGRRFPLAPGRRLEEYGAFYVGGSKASPDPDLDPDLSRLLLGWAPGQPFSSCCPDTGKTQDEGARAGRLRARRRYLVERARDARVVGLLAGTLGVAQHREALAHLRNLTQAAGKRSYVLALGRPTPAKLANFPEVDVFVLLACPLGALAPQLSGSFFQPILAPCELEAACNPAWPPPGLAPHLTHYADLLPGSPFHVALPPPESELWETPDVSLITGDLRPPPAWKSSNDHGSLALTPRPQLELAESSPAASFLSSRSWQGLEPRLGQTPVTEAVSGRRGIAIAYEDEGSG

SEQ ID NO: 894949 - protein, 395 aa, Homo sapiens
MFSSPAEAALQRETGVPGLLTPLPDLDGVYELERVAGFVRDLGCERVALQFPDQLLGDAVAVAARLEETTGSKMFILGDTAYGSCCVDVLGAEQAGAQALIHFGPACLSPPARPLPVAFVLRQRSVALELCVKAFEAQNPDPKAPVVLLSEPACAHALDTGKTQDEGARAGRLRARRRYLVERARDARVVGLLAGTLGVAQHREALAHLRNLTQAAGKRSYVLALGRPTPAKLANFPEVDVFVLLACPLGALAPQLSGSFFQPILAPCELEAACNPAWPPPGLAPHLTHYADLLPGSPFHVALPPPESELWETPDVSLITGDLRPPPAWKSSNDHGSLALTPRPQLELAESSPAASFLSSRSWQGLEPRLGQTPVTEAVSGRRGIAIAYEDEGSG

SEQ ID NO: 894950 - protein, 78 aa, Homo sapiens
KPGARSQGVSMDFLSSSLSGSPFHVALPPPESELWETPDVSLITGDLRPPPAWKSSNDHGSLALTPRPQLELAESSPA

SEQ ID NO: 894951 - protein, 273 aa, Homo sapiens
IRLEARGDHAPGALLSSQGDSEALLRIMLWRQLIYWQLLALFFLPFCLCQDEYMESPQTGGLPPDCSKCCHGDYSFRGYQGPPGPPGPPGIPGNHGNNGNNGATGHEGAKGEKGDKGDLGPRGERGQHGPKGEKGYPGIPPELQIAFMASLATHFSNQNSGIIFSSVETNIGNFFDVMTGRFGAPVSGVYFFTFSMMKHEDVEEVYVYLMHNGNTVFSMYSYEMKGKSDTSSNHAVLKLAKGDEVWLRMGNGALHGDHQRFSTFAGFLLFETK

SEQ ID NO: 894952 - protein, 102 aa, Homo sapiens
IRLEARGDHAPGALLSSQGDSEALLRIMLWRQLIYWQLLALFFLPFCLCQDEYMESPQTGGLPPDCSKCCHGDYSFRGYQGPPGPPGPPGIPGKDEQDILSI

SEQ ID NO: 894953 - protein, 273 aa, Homo sapiens; identical to SEQ ID NO: 894951

SEQ ID NO: 894954 - protein, 126 aa, Homo sapiens
MASLATHFSNQNSGIIFSSVETNIGNFFDVMTGRFGAPVSGVYFFTFSMMKHEDVEEVYVYLMHNGNTVFSMYSYEMKGKSDTSSNHAVLKLAKGDEVWLRMGNGALHGDHQRFSTFAGFLLFETK

SEQ ID NO: 894955 - protein, 1288 aa, Homo sapiens
MKGGDRAYTRGPSLGWLFAKCCCCFPCRDAYSHSSSENGGKSESVANLQAQPSLNSIHSSPGPKRSTNTLKKWLTSPVRRLNSGKADGNIKKQKKVRDGRKSFDLGSPKPGDETTPQGDSADEKSKKGWGEDEPDEESHTPLPPPMKIFDNDPTQDEMSSSLLAARQASTEVPTAADLVNAIEKLVKNKLSLEGSSYRGSLKDPAGCLNEGMAPPTPPKNPEEEQKAKALRGRMFVLNELVQTEKDYVKDLGIVVEGFMKRIEEKGVPEDMRGKDKIVFGNIHQIYDWHKDFFLAELEKCIQEQDRLAQLFIKHERKLHIYVWYCQNKPRSEYIVAEYDAYFEEVKQEINQRLTLSDFLIKPIQRITKYQLLLKDFLRYSEKAGLECSDIEKAVELMCLVPKRCNDMMNLGRLQGFEGTLTAQGKLLQQDTFYVIELDAGMQSRTKERRVFLFEQIVIFSELLRKGSLTPGYMFKRSIKMNYLVLEENVDNDPCKFALMNRETSERVVLQAANADIQQAWVQDINQVLETQRDFLNALQSPIEYQRKERSTAVMRSQPARLPQASPRPYSSVPAGSEKPPKGSSYNPPLPPLKISTSNGSPGFEYHQPGDKFEASKNDLGGCNGTSSMAVIKDYYALKENEICVSQGEVVQVLAVNQQNMCLVYQPASDHSPAAEGWVPGSILAPLTKATAAESSDGSIKKSCSWHTLRMRKRAEVENTGKNEATGPRKPKDILGNKVSVKETNSSEESECDDLDPNTSMEILNPNFIQEVAPEFLVPLVDVTCLLGDTVILQCKVCGRPKPTITWKGPDQNILDTDNSSATYTVSSCDSGEITLKICNLMPQDSGIYTCIATNDHGTTSTSATVKVQGVPAAPNRPIAQERSCTSVILRWLPPSSTGNCTISGYTVEYREEGSQIWQQSVASTLDTYLVIEDLSPGCPYQFRVSASNPWGISLPSEPSEFVRLPEYDAAADGATISWKENFDSAYTELNEIGRGRFSIVKKCIHKATRKDVAVKFVSKKMKKKEQAAHEAALLQHLQHPQYITLHDTYESPTSYILILELMDDGRLLDYLMNHDELMEEKVAFYIRDIMEALQYLHNCRVAHLDIKPENLLIDLRIPVPRVKLIDLEDAVQISGHFHIHHLLGNPEFAAPEVIQGIPVSLGTDIWSIGVLTYVMLSGVSPFLDESKEETCINVCRVDFSFPHEYFCGVSNAARDFINVILQEDFRRRPTAATCLQHPWLQPHNGSYSKIPLDTSRLACFIERRKHQNDVRPIPNVKSYIVNRVNQGT

SEQ ID NO: 894956 - protein, 123 aa, Homo sapiens
MENIDRETLCPKISRKSCSWHTLRMRKRAEVENTGKNEATGPRKPKDILGNKVSVKETNSSEESECDDLDPNTSMEVEAAIVVLFPTMIAFFDVFCNSDLAKMTSHSKINCDVGASLGIPSQL

SEQ ID NO: 894957 - protein, 377 aa, Homo sapiens
MQSTPVLQFLFLLILLPVFQEVKQEINQRLTLSDFLIKPIQRITKYQLLLKDFLRYSEKAGLECSDIEKAVELMCLVPKRCNDMMNLGRLQGFEGTLTAQGKLLQQDTFYVIELDAGMQSRTKERRVFLFEQIVIFSELLRKGSLTPGYMFKRSIKMNYLVLEENVDNDPCKFALMNRETSERVVLQAANADIQQAWVQDINQVLETQRDFLNALQSPIEYQRKERSTAVMRSQPARLPQASPRPYSSVPAGSEKPPKGSSYNPPLPPLKISTSNGSPGFEYHQPGDKFEASKNDLGGCNGTSSMAVIKDYYALKENEICVSQGEVVQVLAVNQQNMCLVYQPASDHSPAAEGWVPGSILAPLTKATAAESSDGSIK

SEQ ID NO: 894958 - protein, 147 aa, Homo sapiens [sequence omitted]

SEQ ID NO: 894959 - protein, 508 aa, Homo sapiens
MKGGDRAYTRGPSLGWLFAKCCCCFPCRDAYSHSSSENGGKSESVANLQAQPSLNSIHSSPGPKRSTNTLKKWLTSPVRRLNSGKADGNIKKQKKVRDGRKSFDLGSPKPGDETTPQGDSADEKSKKGWGEDEPDEESHTPLPPPMKIFDNDPTQDEMSLEGSSYRGSLKDPAGCLNEGMAPPTPPKNPEEEQKAKALRGRMFVLNELVQTEKDYVKDLGIVVEGFMKRIEEKGVPEDMRGKDKIVFGNIHQIYDWHKDFFLAELEKCIQEQDRLAQLFIKHERKLHIYVWYCQNKPRSEYIVAEYDAYFEEVKQEINQRLTLSDFLIKPIQRITKYQLLLKDFLRYSEKAGLECSDIEKAVELMCLVPKRCNDMMNLGRLQGFEGTLTAQGKLLQQDTFYVIELDAGMQSRTKERRVFLFEQIVIFSELLRKGSLTPGYMFKRSIKMNYLVLEENVDNDPCKFALMNRETSERVVLQAANADIQQAWVQDINLSVDTLLLRYNCVPV

SEQ ID NO: 894960 - protein, 88 aa, Homo sapiens
KWLTSPVRRLNSGKADGNIKKQKKVRDGRKSFDLGSPKPGDETTPQGDSADEVLTGGPGVVHQEGLLTCLLPQVLSTRPSQISISVLP

SEQ ID NO: 894961 - protein, 668 aa, Homo sapiens
MKGGDRAYTRGPSLGWLFAKCCCCFPCRDAYSHSSSENGGKSESVANLQAQPSLNSIHSSPGPKRSTNTLKKWLTSPVRRLNSGKADGNIKKQKKVRDGRKSFDLGSPKPGDETTPQGDSADEKSKKGWGEDEPDEESHTPLPPPMKIFDNDPTQDEMSLEGSSYRGSLKDPAGCLNEGMAPPTPPKNPEEEQKAKALRGRMFVLNELVQTEKDYVKDLGIVVEGFMKRIEEKGVPEDMRGKDKIVFGNIHQIYDWHKDFFLAELEKCIQEQDRLAQLFIKHERKLHIYVWYCQNKPRSEYIVAEYDAYFEEVKQEINQRLTLSDFLIKPIQRITKYQLLLKDFLRYSEKAGLECSDIEKAVELMCLVPKRCNDMMNLGRLQGFEGTLTAQGKLLQQDTFYVIELDAGMQSRTKERRVFLFEQIVIFSELLRKGSLTPGYMFKRSIKMNYLVLEENVDNDPCKFALMNRETSERVVLQAANADIQQAWVQDINQVLETQRDFLNALQSPIEYQRKERSTAVMRSQPARLPQASPRPYSSVPAGSEKPPKGSSYNPPLPPLKISTSNGSPGFEYHQPGDKFEASKNDLGGCNGTSSMAVIKDYYALKENEICVSQGEVVQVLAVNQQNMCLVYQPASDHSPAAEGWVPGSILAPLTKATAAESSDGSIK

SEQ ID NO: 894962 - protein, 1256 aa, Homo sapiens
MKGGDRAYTRGPSLGWLFAKCCCCFPCRDAYSHSSSENGGKSESVANLQAQPSLNSIHSSPGPKRSTNTLKKWLTSPVRRLNSGKADGNIKKQKKVRDGRKSFDLGSPKPGDETTPQGDSADEKSKKGWGEDEPDEESHTPLPPPMKIFDNDPTQDEMSLEGSSYRGSLKDPAGCLNEGMAPPTPPKNPEEEQKAKALRGRMFVLNELVQTEKDYVKDLGIVVEGFMKRIEEKGVPEDMRGKDKIVFGNIHQIYDWHKDFFLAELEKCIQEQDRLAQLFIKHERKLHIYVWYCQNKPRSEYIVAEYDAYFEEVKQEINQRLTLSDFLIKPIQRITKYQLLLKDFLRYSEKAGLECSDIEKAVELMCLVPKRCNDMMNLGRLQGFEGTLTAQGKLLQQDTFYVIELDAGMQSRTKERRVFLFEQIVIFSELLRKGSLTPGYMFKRSIKMNYLVLEENVDNDPCKFALMNRETSERVVLQAANADIQQAWVQDINQVLETQRDFLNALQSPIEYQRKERSTAVMRSQPARLPQASPRPYSSVPAGSEKPPKGSSYNPPLPPLKISTSNGSPGFEYHQPGDKFEASKNDLGGCNGTSSMAVIKDYYALKENEICVSQGEVVQVLAVNQQNMCLVYQPASDHSPAAEGWVPGSILAPLTKATAAESSDGSIKKSCSWHTLRMRKRAEVENTGKNEATGPRKPKDILGNKVSVKETNSSEESECDDLDPNTSMEILNPNFIQEVAPEFLVPLVDVTCLLGDTVILQCKVCGRPKPTITWKGPDQNILDTDNSSATYTVSSCDSGEITLKICNLMPQDSGIYTCIATNDHGTTSTSATVKVQGVPAAPNRPIAQERSCTSVILRWLPPSSTGNCTISGYTVEYREEGSQIWQQSVASTLDTYLVIEDLSPGCPYQFRVSASNPWGISLPSEPSEFVRLPEYDAAADGATISWKENFDSAYTELNEIGRGRFSIVKKCIHKATRKDVAVKFVSKKMKKKEQAAHEAALLQHLQHPQYITLHDTYESPTSYILILELMDDGRLLDYLMNHDELMEEKVAFYIRDIMEALQYLHNCRVAHLDIKPENLLIDLRIPVPRVKLIDLEDAVQISGHFHIHHLLGNPEFAAPEVIQGIPVSLGTDIWSIGVLTYVMLSGVSPFLDESKEETCINVCRVDFSFPHEYFCGVSNAARDFINVILQEDFRRRPTAATCLQHPWLQPHNGSYSKIPLDTSRLACFIERRKHQNDVRPIPNVKSYIVNRVNQGT

SEQ ID NO: 894963 - protein, 603 aa, Homo sapiens
MENIDRETLCPKISRKSCSWHTLRMRKRAEVENTGKNEATGPRKPKDILGNKVSVKETNSSEESECDDLDPNTSMEILNPNFIQEVAPEFLVPLVDVTCLLGDTVILQCKVCGRPKPTITWKGPDQNILDTDNSSATYTVSSCDSGEITLKICNLMPQDSGIYTCIATNDHGTTSTSATVKVQGVPAAPNRPIAQERSCTSVILRWLPPSSTGNCTISGYTVEYREEGSQIWQQSVASTLDTYLVIEDLSPGCPYQFRVSASNPWGISLPSEPSEFVRLPEYDAAADGATISWKENFDSAYTELNEIGRGRFSIVKKCIHKATRKDVAVKFVSKKMKKKEQAAHEAALLQHLQHPQYITLHDTYESPTSYILILELMDDGRLLDYLMNHDELMEEKVAFYIRDIMEALQYLHNCRVAHLDIKPENLLIDLRIPVPRVKLIDLEDAVQISGHFHIHHLLGNPEFAAPEVIQGIPVSLGTDIWSIGVLTYVMLSGVSPFLDESKEETCINVCRVDFSFPHEYFCGVSNAARDFINVILQEDFRRRPTAATCLQHPWLQPHNGSYSKIPLDTSRLACFIERRKHQNDVRPIPNVKSYIVNRVNQGT

SEQ ID NO: 894964 - protein, 35 aa, Homo sapiens
MAVIKDYYALKENEICVSQGEVVQVLAVNQQNMCL

SEQ ID NO: 894965 - protein, 213 aa, Homo sapiens
MDQEPVGGVERGEAVAASGAAAAAAFGESAGQMSNERGFENVELGVIGKKKKVPRRVIHFVSGETMEEYSTDEDEVDGLEKKDVLPTVDPTKLTWGPYLWFYMLRAATSTLSVCDFLGEKIASVLGISTPKYQYAIDEYYRMKKEEEEEEEENRMSEEAEKQYQQNKLQTDSIVQTDQPETVISSSFVNVNFEMEGDSEVIMESKQNPVSVPP

SEQ ID NO: 894966 - protein, 236 aa, Homo sapiens
MEVGLPAITLFLTSASSPVVATTMDQEPVGGVERGEAVAASGAAAAAAFGESAGQMSNERGFENVELGVIGKKKKVPRRVIHFVSGETMEEYSTDEDEVDGLEKKDVLPTVDPTKLTWGPYLWFYMLRAATSTLSVCDFLGEKIASVLGISTPKYQYAIDEYYRMKKEEEEEEEENRMSEEAEKQYQQNKLQTDSIVQTDQPETVISSSFVNVNFEMEGDSEVIMESKQNPVSVPP

SEQ ID NO: 894967 - protein, 213 aa, Homo sapiens; identical to SEQ ID NO: 894965

SEQ ID NO: 894968 - protein, 213 aa, Homo sapiens; identical to SEQ ID NO: 894965

SEQ ID NO: 894969 - protein, 322 aa, Homo sapiens
MAYKFISACRNRKKSKFSTSPKNFNIANTGNGELTNRNTRKCKVLKLQNKNSNLGKAPNLPPQWWGLTQTLPGTLSPEAPRPGTTGTLVQSADARGGRCGASSPVVATTMDQEPVGGVERGEAVAASGAAAAAAFGESAGQMSNERGFENVELGVIGKKKKVPRRVIHFVSGETMEEYSTDEDEVDGLEKKDVLPTVDPTKLTWGPYLWFYMLRAATSTLSVCDFLGEKIASVLGISTPKYQYAIDEYYRMKKEEEEEEEENRMSEEAEKQYQQNKLQTDSIVQTDQPETVISSSFVNVNFEMEGDSEVIMESKQNPVSVPP

SEQ ID NO: 894970 - protein, 213 aa, Homo sapiens; identical to SEQ ID NO: 894965

SEQ ID NO: 894971 - protein, 181 aa, Homo sapiens [sequence omitted]

SEQ ID NO: 894972 - protein, 181 aa, Homo sapiens [sequence omitted]

SEQ ID NO: 894973 - protein, 155 aa, Homo sapiens
MDQEPVGGVERGEAVAASGAAAAAAFGESAGQTKLTWGPYLWFYMLRAATSTLSVCDFLGEKIASVLGISTPKYQYAIDEYYRMKKEEEEEEEENRMSEEAEKQYQQNKLQTDSIVQTDQPETVISSSFVNVNFEMEGDSEVIMESKQNPVSVPP

SEQ ID NO: 894974 - protein, 213 aa, Homo sapiens; identical to SEQ ID NO: 894965

SEQ ID NO: 894975 - protein, 134 aa, Homo sapiens
MAEFGFAVLDCLNSLLMPPYRVRSVQKPRSCGVTAPDAAGDGLRRGRDARLQVHVPEMTSQAVPGGDPRALDACLAGSDAPQGPAPPRPAPREPVVAPPRLQLASSRGAEPGGLGEARAGPAPQAGESPSQRLG

SEQ ID NO: 894976 - protein, 213 aa, Homo sapiens; identical to SEQ ID NO: 894965

SEQ ID NO: 894977 - protein, 213 aa, Homo sapiens; identical to SEQ ID NO: 894965

SEQ ID NO: 894978 - protein, 213 aa, Homo sapiens; identical to SEQ ID NO: 894965

SEQ ID NO: 894979 - protein, 213 aa, Homo sapiens; identical to SEQ ID NO: 894965

SEQ ID NO: 894980 - protein, 181 aa, Homo sapiens [sequence omitted]

SEQ ID NO: 894981 - protein, 181 aa, Homo sapiens [sequence omitted]

SEQ ID NO: 894982 - protein, 213 aa, Homo sapiens
FSSFHTAHWLLVHRRRHHRAAGAAAFGESAGQMSNERGFENVELGVIGKKKKVPRRVIHFVSGETMEEYSTDEDEVDGLEKKDVLPTVDPTKLTWGPYLWFYMLRAATSTLSVCDFLGEKIASVLGISTPKYQYAIDEYYRMKKEEEEEEEENRMSEEAEKQYQQNKLQTDSIVQTDQPETVISSSFVNVNFEMEGDSEVIMESKQNPVSVPP

SEQ ID NO: 894983 - protein, 178 aa, Homo sapiens
MEVGLPAITLFLTSASSPVVATTMDQEPVGGVERGEAVAASGAAAAAAFGESAGQTKLTWGPYLWFYMLRAATSTLSVCDFLGEKIASVLGISTPKYQYAIDEYYRMKKEEEEEEEENRMSEEAEKQYQQNKLQTDSIVQTDQPETVISSSFVNVNFEMEGDSEVIMESKQNPVSVPP

SEQ ID NO: 894984 - protein, 134 aa, Homo sapiens; identical to SEQ ID NO: 894975

SEQ ID NO: 894985 - protein, 486 aa, Homo sapiens
MDENNGLLLLELNPPNPWDLQPRSPEELAFGEVQITYLTHACMDLKLGDKRMVFDPWLIGPAFARGWWLLHEPPSDWLERLCQADLIYISHLHSDHLSYPTLKKLAGRRPDIPIYVGNTERPVFWNLNQSGVQLTNINVVPFGIWQQVDKNLRFMILMDGVHPEMDTCIIVEYKGHKILNIVDCTRPNGGRLPMKVALMMSDFAGGASGFPMTFSGGKFTEEWKAQFIKTERKKLLNYKARLVKNLQPRIYCPFAGYFVESHPSDKYIKETNTKNDPNELNNLIKKNSDVITWTPRPGATLDLGRMLKDRTDSKGIIEPPEGTKIYKDSWDFEPYLEILNAALGDEIFLHSSWIKEYFTWAGFKDYNLVVRMIETDEDFNPFPGGYDYLVDFLDLSFPKERPQREHPYEEIHSRVDVIRHVVKNGLLWDELYIGFQTRLQRDPDIYHHLFWNHFQIKLPLTPPNWKSFLMCCEQNGPAILQECKTT

SEQ ID NO: 894986 - protein, 486 aa, Homo sapiens; identical to SEQ ID NO: 894985

SEQ ID NO: 894987 - protein, 486 aa, Homo sapiens; identical to SEQ ID NO: 894985

SEQ ID NO: 894988 - protein, 221 aa, Homo sapiens [sequence omitted]

SEQ ID NO: 894989 - protein, 221 aa, Homo sapiens [sequence omitted]

SEQ ID NO: 894990 - protein, 221 aa, Homo sapiens [sequence omitted]

SEQ ID NO: 894991 - protein, 221 aa, Homo sapiens [sequence omitted]

SEQ ID NO: 894992 - protein, 226 aa, Homo sapiens [sequence omitted]

SEQ ID NO: 894993 - protein, 486 aa, Homo sapiens; identical to SEQ ID NO: 894985

SEQ ID NO: 894994 - protein, 486 aa, Homo sapiens; identical to SEQ ID NO: 894985

SEQ ID NO: 894995 - protein, 501 aa, Homo sapiens [sequence omitted]

SEQ ID NO: 894996 - protein, 221 aa, Homo sapiens [sequence omitted]

SEQ ID NO: 894997 - protein, 244 aa, Homo sapiens [sequence omitted]

SEQ ID NO: 894998 - protein, 221 aa, Homo sapiens [sequence omitted]

SEQ ID NO: 894999 - protein, 449 aa, Homo sapiens [sequence omitted]

SEQ ID NO: 895000 - protein, 1066 aa, Homo sapiens
MEGLLHYINPAHAISLLSALNEERLKGQLCDVLLIVGDQKFRAHKNVLAASSEYFQSLFTNKENESQTVFQLDFCEPDAFDNVLNYIYSSSLFVEKSSLAAVQELGYSLGISFLTNIVSKTPQAPFPTCPNRKKVFVEDDENSSQKRSVIVCQSRNEAQGKTVSQNQPDVSHTSRPSPSIAVKANTNKPHVPKPIEPLHNLSLTEKSWPKDSSVVYAKSLEHSGSLDDPNRISLVKRNAVLPSKPLQDREAMDDKPGVSGQLPKGKALELALKRPRPPVLSVCSSSETPYLLKETNKGNGQGEDRNLLYYSKLGLVIPSSGSGSGNQSIDRSGPLVKSLLRRSLSMDSQVPVYSPSIDLKSSQGSSSVSSDAPGNVLCALSQKSSLKDCSEKTALDDRPQVLQPHRLRSFSASQSTDREGASPVTEVRIKTEPSSPLSDPSDIIRVTVGDAATTAAASSSSVTRDLSLKTEDDQKDMSRLPAKRRFQADRRLPFKKLKVNEHGSPVSEDNFEEGSSPTLLDADFPDSDLNKDEFGELEGTRPNKKFKCKHCLKIFRSTAGLHRHVNMYHNPEKPYACDICHKRFHTNFKVWTHCQTQHGIVKNPSPASSSHAVLDEKFQRKLIDIVREREIKKALIIKLRRGKPGFQGQSSSQAQQVIKRNLRSRAKGAYICTYCGKAYRFLSQFKQHIKMHPGEKPLGVNKVAKPKEHAPLASPVENKEVYQCRLCNAKLSSLLEQGSHERLCRNAAVCPYCSLRFFSPELKQEHESKCEYKKLTCLECMRTFKSSFSIWRHQVEVHNQNNMAPTENFSLPVLDHNGDVTGSSRPQSQPEPNKVNHIVTTKDDNVFSDSSEQVNFDSEDSSCLPEDLSLSKQLKIQVKEEPVEEAEEEAPEASTAPKEAGPSKEASLWPCEKCGKMFTVHKQLERHQELLCSVKPFICHVCNKAFRTNFRLWSHFQSHMSQASEESAHKESEVCPVPTNSPSPPPLPPPPPLPKIQPLEPDSPTGLSENPTPATEKLFVPQESDTLFYHAPPLSAITFKRQFMCKLCHRTFKTAFSLWSHEQTHN

SEQ ID NO: 895001 - protein, 1066 aa, Homo sapiens; identical to SEQ ID NO: 895000

SEQ ID NO: 895002 - protein, 865 aa, Homo sapiens
MEGLLHYINPAHAISLLSALNEERLKGQLCDVLLIVGDQKFRAHKNVLAASSEYFQSLFTNKENESQTVFQLDFCEPDAFDNVLNYIYSSSLFVEKSSLAAVQELGYSLGISFLTNIVSKTPQAPFPTCPNRKKVFVEDDENSSQKRSVIVCQSRNEAQGKTVSQNQPDVSHTSRPSPSIAVKANTNKPHVPKPIEPLHNLSLTEKSWPKDSSVVYAKSLEHSGSLDDPNRISLVKRNAVLPSKPLQDREAMDDKPGVSGQLPKGKALELALKRPRPPVLSVCSSSETPYLLKETNKGNGQGEDRNLLYYSKLGLVIPSSGSGSGNQSIDRSGPLVKSLLRRSLSMDSQVPVYSPSIDLKSSQGSSSVSSDAPGNVLCALSQKSSLKDCSEKTALDDRPQVLQPHRLRSFSASQSTDREGASPVTEVRIKTEPSSPLSDPSDIIRVTVGDAATTAAASSSSVTRDLSLKTEDDQKDMSRLPAKRRFQADRRLPFKKLKVNEHGSPVSEDNFEEGSSPTLLDADFPDSDLNKDEFEQGSHERLCRNAAVCPYCSLRFFSPELKQEHESKCEYKKLTCLECMRTFKSSFSIWRHQVEVHNQNNMAPTENFSLPVLDHNGDVTGSSRPQSQPEPNKVNHIVTTKDDNVFSDSSEQVNFDSEDSSCLPEDLSLSKQLKIQVKEEPVEEAEEEAPEASTAPKEAGPSKEASLWPCEKCGKMFTVHKQLERHQELLCSVKPFICHVCNKAFRTNFRLWSHFQSHMSQASEESAHKESEVCPVPTNSPSPPPLPPPPPLPKIQPLEPDSPTGLSENPTPATEKLFVPQESDTLFYHAPPLSAITFKRQFMCKLCHRTFKTAFSLWSHEQTHN

SEQ ID NO: 895003 - protein, 1059 aa, Homo sapiens
MEGLLHYINPAHAISLLSALNEERLKGQLCDVLLIVGDQKFRAHKNVLAASSEYFQSLFTNKENESQTVFQLDFCEPDAFDNVLNYIYSSSLFVEKSSLAAVQELGYSLGISFLTNIVSKTPQAPFPTCPNRKKVFVEDDENSSQKRSVIVCQSRNEAQGKTVSQNQPDVSHTSRPSPSIAVKANTNKPHVPKPIEPLHNLSLTEKSWPKDSSVVYAKSLEHSGSLDDPNRISLVKRNAVLPSKPLQDREAMDDKPGVSGQLPKGKALELALKRPRPPVLSVCSSSETPYLLKETNKGNGQGEDRNLLYYSKLGLVIPSSGSGSGNQSIDRSGPLVKSLLRRSLSMDSQVPVYSPSIDLKSSQGSSSVSSDAPGNVLCALSQKSSLKDCSEKTALDDRPQVLQPHRLRSFSASQSTDREGASPVTEVRIKTEPSSPLSDPSDIIRVTVGDAATTAAASSSSVTRDLSLKTEDDQKDMSRLPAKRRFQADRRLPFKKLKVNEHGSPVSEDNFEEGSSPTLLDADFPDSDLNKDEFGELEGTRPNKKFKCKHCLKIFRSTAGLHRHVNMYHNPEKPYACDICHKRFHTNFKVWTHCQTQHGIVKNPSPASSSHAVLDEKFQRKLIDIVREREIKKALIIKLRRGKPGFQGQSSSQAQQVIKRNLRSRAKGAYICTYCGKAYRFLSQFKQHIKMHPGEKPLGVNKVAKPKEHAPLASPVENKEVYQCRLCNAKLSSLLEQGSHERLCRNAAVCPYCSLRFFSPELKQEHESKCEYKKLTCLECMRTFKSSFSIWRHQVEVHNQNNMAPTENFSLPVLDHNGDVTGSSRPQSQPEPNKVNHIVTTKDDNVFSDSSEQVNFDSEDSSCLPEDLSLSKQLKIQVKEEPVEEAEEEAPEASTAPKEAGPSKEASLWPCEKCGKMFTVHKQLERHQELLCSVKPFICHVCNKAFRTNFRLWSHFQSHMSQASEESAHKESEVCPVPTNSPSPPLPKIQPLEPDSPTGLSENPTPATEKLFVPQESDTLFYHAPPLSAITFKRQFMCKLCHRTFKTAFSLWSHEQTHN

SEQ ID NO: 895004 - protein, 1066 aa, Homo sapiens; identical to SEQ ID NO: 895000

SEQ ID NO: 895005 - protein, 500 aa, Homo sapiens
MYHNPEKPYACDICHKRFHTNFKVWTHCQTQHGIVKNPSPASSSHAVLDEKFQRKLIDIVREREIKKALIIKLRRGKPGFQGQSSSQAQQVIKRNLRSRAKGAYICTYCGKAYRFLSQFKQHIKMHPGEKPLGVNKVAKPKEHAPLASPVENKEVYQCRLCNAKLSSLLEQGSHERLCRNAAVCPYCSLRFFSPELKQEHESKCEYKKLTCLECMRTFKSSFSIWRHQVEVHNQNNMAPTENFSLPVLDHNGDVTGSSRPQSQPEPNKVNHIVTTKDDNVFSDSSEQVNFDSEDSSCLPEDLSLSKQLKIQVKEEPVEEAEEEAPEASTAPKEAGPSKEASLWPCEKCGKMFTVHKQLERHQELLCSVKPFICHVCNKAFRTNFRLWSHFQSHMSQASEESAHKESEVCPVPTNSPSPPPLPPPPPLPKIQPLEPDSPTGLSENPTPATEKLFVPQESDTLFYHAPPLSAITFKRQFMCKLCHRTFKTAFSLWSHEQTHN

SEQ ID NO: 895006 - protein, 747 aa, Homo sapiens
MGRGPWDAGPSRRLLPLLLLLGLARGAAGAPGPDGLDVCATCHEHATCQQREGKKICICNYGFVGNGRTQCVDKNECQFGATLVCGNHTSCHNTPGGFYCICLEGYRATNNNKTFIPNDGTFCTDIDECEVSGLCRHGGRCVNTHGSFECYCMDGYLPRNGPEPFHPTTDATSCTEIDCGTPPEVPDGYIIGNYTSSLGSQVRYACREGFFSVPEDTVSSCTGLGTWESPKLHCQEINCGNPPEMRHAILVGNHSSRLGGVARYVCQEGFESPGGKITSVCTEKGTWRESTLTCTEILTKINDVSLFNDTCVRWQINSRRINPKISYVISIKGQRLDPMESVREETVNLTTDSRTPEVCLALYPGTNYTVNISTAPPRRSMPAVIGFQTAEVDLLEDDGSFNISIFNETCLKLNRRSRKVGSEHMYQFTVLGQRWYLANFSHATSFNFTTREQVPVVCLDLYPTTDYTVNVTLLRSPKRHSVQITIATPPAVKQTISNISGFNETCLRWRSIKTADMEEMYLFHIWGQRWYQKEFAQEMTFNISSSSRDPEVCLDLRPGTNYNVSLRALSSELPVVISLTTQITEPPLPEVEFFTVHRGPLPRLRLRKAKEKNGPISSYQVLVLPLALQSTFSCDSEGASSFFSNASDADGYVAAELLAKDVPDDAMEIPIGDRLYYGEYYNAPLKRGSDYCIILRITSEWNKVRRHSCAVWAQVKDSSLMLLQMAGVGLGSLAVVIILTFLSFSAV

SEQ ID NO: 895007 - protein, 595 aa, Homo sapiens [sequence omitted]

SEQ ID NO: 895008 - protein, 134 aa, Homo sapiens
MREDDRRGWFLLLLAQAVWPRVLQVLGDPQLRHRDLLEARFVTHAAADGGCWTGFPGCCDHSHIPLLLKRCDGRWTLSGEDALLLGRCSGSFSGARTEAPCDFRPGSMWACNFLHSQLGPIPGFKMVAIPEESP

SEQ ID NO: 895009 - protein, 747 aa, Homo sapiens; identical to SEQ ID NO: 895006

SEQ ID NO: 895010 - protein, 650 aa, Homo sapiens
  misc_feature (631)..(631): Xaa can be any naturally occurring amino acid
  misc_feature (637)..(637): Xaa can be any naturally occurring amino acid
MGRGPWDAGPSRRLLPLLLLLGLARGAAGAPGPDGLDVCATCHEHATCQQREGKKICICNYGFVGNGRTQCVDKNECQFGATLVCGNHTSCHNTPGGFYCICLEGYRATNNNKTFIPNDGTFCTDIDECEVSGLCRHGGRCVNTHGSFECYCMDGYLPRNGPEPFHPTTDATSCTEIDCGTPPEVPDGYIIGNYTSSLGSQVRYACREGFFSVPEDTVSSCTGLGTWESPKLHCQEINCGNPPEMRHAILVGNHSSRLGGVARYVCQEGFESPGGKITSVCTEKGTWRESTLTCTEILTKINDVSLFNDTCVRWQINSRRINPKISYVISIKGQRLDPMESVREETVNLTTDSRTPEVCLALYPGTNYTVNISTAPPRRSMPAVIGFQTAEVDLLEDDGSFNISIFNETCLKLNRRSRKVGSEHMYQFTVLGQRWYLANFSHATSFNFTTREQVPVVCLDLYPTTDYTVNVTLLRSPKRHSVQITIATPPAVKQTISNISGFNETCLRWRSIKTADMEEMYLFHIWGQRWYQKEFAQEMTFNISSSSRDPEVCLDLRPGTNYNVSLRALSSELPVVISLTTQITEPPLPEVEFFTVHRGPLPRLRLRKAKKAITDAAMMAEELKKEQDNSXHLERMXKNLGTDGEGPAAS

SEQ ID NO: 895011 - protein, 215 aa, Homo sapiens
MEKLYSENEGMASNQGKMENEEQPQDERKPEVTCTLEDKKLENEGKTENKGKTGDEEMLKDKGKPESEGEAKEGKSEREGESEMEGGSEREGKPEIEGKPESEGEPGSETRAAGKRPAEDDVPRKAKRKTNKGLAHYLKEYKEAIHDMNFSNEDMIREFDNMAKVQDEKRKSKQKLGAFLWMQRNLQDPFYPRGPREFRGGCRAPRRDIEDIPYV

SEQ ID NO: 895012 - protein, 215 aa, Homo sapiens; identical to SEQ ID NO: 895011

SEQ ID NO: 895013 - protein, 215 aa, Homo sapiens; identical to SEQ ID NO: 895011

SEQ ID NO: 895014 - protein, 268 aa, Homo sapiens
CCGIHVICTGADVGTGPSACPLSPRLGLVCSGSWAPNSWSSFFQDRKRRGNLDMEKLYSENEGMASNQGKMENEEQPQDERKPEVTCTLEDKKLENEGKTENKGKTGDEEMLKDKGKPESEGEAKEGKSEREGESEMEGGSEREGKPEIEGKPESEGEPGSETRAAGKRPAEDDVPRKAKRKTNKGLAHYLKEYKEAIHDMNFSNEDMIREFDNMAKVQDEKRKSKQKLGAFLWMQRNLQDPFYPRGPREFRGGCRAPRRDIEDIPYV

SEQ ID NO: 895015 - protein, 83 aa, Homo sapiens
CCGIHVICTGADVGTGPSACPLSPRLGLVCSGSWAPNSWSSFFQVCASVVPSALRSLKRRSNLSRIPAGQEKEGKSRHGKTLQ

SEQ ID NO: 895016 - protein, 268 aa, Homo sapiens; identical to SEQ ID NO: 895014

SEQ ID NO: 895017 - protein, 245 aa, Homo sapiens
MEKLYSENEGMASNQGKMENEEQPQDERKPEVTCTLEDKKLENEGKTENKGKTGDEEMLKDKGKPESEGEAKEGKSEREGESEMEGGSEREGKPEIEGKPESEGEPGSETRAAGKRPAEDDVPRKAKRKTNKGLAHYLKEYKEAIHDMNFSNEDMIREFDNMAKVQDEKRKSKQKLGAFLWMQRNLQDLLPKSSIRWCGPETENSRYVLRIKQATTDILDLVEPCLQRPEVGRKWAANWQKPFGR

SEQ ID NO: 895018 - protein, 215 aa, Homo sapiens; identical to SEQ ID NO: 895011

SEQ ID NO: 895019 - protein, 70 aa, Homo sapiens
CCGIHVICTGADVGTGPSACPLSPRLGLVCSGSWAPNSWSSFFQVCASVVPSALRSLKRRSNLSRIPAGP

SEQ ID NO: 895020 - protein, 215 aa, Homo sapiens; identical to SEQ ID NO: 895011

SEQ ID NO: 895021 - protein, 253 aa, Homo sapiens
VLSRPAFHPMHSVSHVSSLSPLSSTPIPQDRKRRGNLDMEKLYSENEGMASNQGKMENEEQPQDERKPEVTCTLEDKKLENEGKTENKGKTGDEEMLKDKGKPESEGEAKEGKSEREGESEMEGGSEREGKPEIEGKPESEGEPGSETRAAGKRPAEDDVPRKAKRKTNKGLAHYLKEYKEAIHDMNFSNEDMIREFDNMAKVQDEKRKSKQKLGAFLWMQRNLQDPFYPRGPREFRGGCRAPRRDIEDIPYV

SEQ ID NO: 895022 - protein, 83 aa, Homo sapiens; identical to SEQ ID NO: 895015

SEQ ID NO: 895023 - protein, 197 aa, Homo sapiens
MEKLYSENEGMASNQGKMENEEQPQDERKPEVTCTLEDKKLENEGKTENKGKTGDEEMLKDKGKPESEGEAKEGKSEREGESEMEGGSEREGKPEIEGKPESEGEPGSETRAAGKRPAEDDVPRKAKRKTNKGLAHYLKEYKEAIHDMNFSNEDMIREFDNMAKVQDEKRPFYPRGPREFRGGCRAPRRDIEDIPYV

SEQ ID NO: 895024 - protein, 346 aa, Homo sapiens
MCEGPSRISGPIPPDPTLCPDNYRRPTSAQGRLEGNALKLDLLTSDRALDTTAPRGPCIGPGAGEILERGQRGVGDVLLQLEGISLGPGASLKRKDPKDHEKENLRRIREIQKRFREQERSREQGQPRPLKALWRSPKYDKVESRVKAQLQEPGPASGTESAHFLRAHSRCGPGLPPPHVSSPQPTPPGPEAKEPGLGVDFIRHNARAAKRAPRRHSCSLQVLAQVLEQQRQAQEHYNATQKGHVPHYLLERRDLWRREAEARKQSQPDPAMPPGHTRMPENQRLETLTKLLQSQSQLLRELVLLPAGADSLRAQSHRAELDRKLVQVEEAIKIFSRPKVFVKMDD

SEQ ID NO: 895025 - protein, 346 aa, Homo sapiens; identical to SEQ ID NO: 895024

SEQ ID NO: 895026 - protein, 367 aa, Homo sapiens
EEEAKQLAEEMNIAFYTSRTDDILLHQDVDLVCISIPPPLTRQISVKALAQGRLEGNALKLDLLTSDRALDTTAPRGPCIGPGAGEILERGQRGVGDVLLQLEGISLGPGASLKRKDPKDHEKENLRRIREIQKRFREQERSREQGQPRPLKALWRSPKYDKVESRVKAQLQEPGPASGTESAHFLRAHSRCGPGLPPPHVSSPQPTPPGPEAKEPGLGVDFIRHNARAAKRAPRRHSCSLQVLAQVLEQQRQAQEHYNATQKGHVPHYLLERRDLWRREAEARKQSQPDPAMPPGHTRMPENQRLETLTKLLQSQSQLLRELVLLPAGADSLRAQSHRAELDRKLVQVEEAIKIFSRPKVFVKMDD

SEQ ID NO: 895027 - protein, 136 aa, Homo sapiens
RLPGNNKSRRVAAAGGKTSRVSPCPSAAGERPRAGPRSGLGAEVAEVASEAGAQAGTGRGPGVAGTPGSRAPRGKRAEAGLADFRPGPGHHRSPWPLHRSRCRRDPGARPARRRGRAVATRGDLPRSWGLSQEEGP

SEQ ID NO: 895028 - protein, 123 aa, Homo sapiens
MCEGPSRISGPIPPDPTLCPDNYRRPTSAQGRLEGNALKLDLLTSDRALDTTAPRGPCIGPGAGEILERGQRGVGDVLLQLEGISLGPGASLKRAWPCLWDRVCPLPAGALPLRPWPPTTPCI

SEQ ID NO: 895029 - protein, 304 aa, Homo sapiens
MCEGPSRISGPIPPDPTLCPDNYRRPTSAQGRLEGNALKLDLLTSDRALDTTAPRGPCIGPGAGEILERGQRGVGDVLLQLEGISLGPGASLKRKDPKDHEKENLRRIREIQKRFREQERSREQGQPRPLKALWRSPKYDKVESRVKAQLQEPGLGVDFIRHNARAAKRAPRRHSCSLQVLAQVLEQQRQAQEHYNATQKGHVPHYLLERRDLWRREAEARKQSQPDPAMPPGHTRMPENQRLETLTKLLQSQSQLLRELVLLPAGADSLRAQSHRAELDRKLVQVEEAIKIFSRPKVFVKMDD

SEQ ID NO: 895030 - protein, 161 aa, Homo sapiens
MCEGPSRISGPIPPDPTLCPDNYRRPTSAQGRLEGNALKLDLLTSDRAQEHYNATQKGHVPHYLLERRDLWRREAEARKQSQPDPAMPPGHTRMPENQRLETLTKLLQSQSQLLRELVLLPAGADSLRAQSHRAELDRKLVQVEEAIKIFSRPKVFVKMDD

SEQ ID NO: 895031 - protein, 140 aa, Homo sapiens
MCEGPSRISGPIPPDPTLCPDNYRRPTSAQGRLEGNALKLDLLTSDRALDTTAPRGPCIGPGAGEILERGQRGVGDVLLQLEGISLGPGASLKRKDPKDHEKENLRRIREIQKRFREQERSREQGQPRPLKALWRTTPCI

SEQ ID NO: 895032 - protein, 205 aa, Homo sapiens
  misc_feature (6)..(6): Xaa can be any naturally occurring amino acid
  misc_feature (26)..(26): Xaa can be any naturally occurring amino acid
  misc_feature (42)..(42): Xaa can be any naturally occurring amino acid
YHDTLXTATGTDLQHKLILTETTPPXKRPLEHSTPPNSKIDXRKTPPGPEAKEPGLGVDFIRHNARAAKRAPRRHSCSLQVLAQVLEQQRQAQEHYNATQKGHVPHYLLERRDLWRREAEARKQSQPDPAMPPGHTRMPENQRLETLTKLLQSQSQLLRELVLLPAGADSLRAQSHRAELDRKLVQVEEAIKIFSRPKVFVKMDD

SEQ ID NO: 895033 - protein, 44 aa, Homo sapiens
MCEGPSRISGPIPPDPTLCPDNYRRPTSGESGGLAVVRGSGVGP

SEQ ID NO: 895034 - protein, 412 aa, Homo sapiens
PPPCTAANRLVRVPGARYKTCAGRDRQAPDQGKASSANLQRRKSRLVKARGESLSMQSVQSTSFCLRKQCLCLTFLLLHLLGQVAATQRCPPQCPGRCPATPPTCAPGVRAVLDGCSCCLVCARQRGESCSDLEPCDESSGLYCDRSADPSNQTGICTAVEGDNCVFDGVIYRSGEKFQPSCKFQCTCRDGQIGCVPRCQLDVLLPEPNCPAPRKVEVPGECCEKWICGPDEEDSLGGLTLAAYRPEATLGVEVSDSSVNCIEQTTEWTACSKSCGMGFSTRVTNRNRQCEMLKQTRLCMVRPCEQEPEQPTDKKGKKCLRTKKSLKAIHLQFKNCTSLHTYKPRFCGVCSDGRCCTPHNTKTIQAEFQCSPGQIVKKPVMVIGTCTCHTNCPKNNEAFLQELELKTTRGKM

SEQ ID NO: 895035 - protein, 412 aa, Homo sapiens; identical to SEQ ID NO: 895034

SEQ ID NO: 895036 - protein, 412 aa, Homo sapiens; identical to SEQ ID NO: 895034

SEQ ID NO: 895037 - protein, 412 aa, Homo sapiens; identical to SEQ ID NO: 895034

SEQ ID NO: 895038 - protein, 136 aa, Homo sapiens
MGFSTRVTNRNRQCEMLKQTRLCMVRPCEQEPEQPTDKKGKKCLRTKKSLKAIHLQFKNCTSLHTYKPRFCGVCSDGRCCTPHNTKTIQAEFQCSPGQIVKKPVMVIGTCTCHTNCPKNNEAFLQELELKTTRGKM

SEQ ID NO: 895039 - protein, 76 aa, Homo sapiens
PPPCTAANRLVRVPGARYKTCAGRDRQAPDQGKASSANLQRRKSRLVKARGESHPPAVQELHQPAHLQAQVLWGLQ

SEQ ID NO: 895040 - protein, 412 aa, Homo sapiens; identical to SEQ ID NO: 895034

SEQ ID NO: 895041 - protein, 425 aa, Homo sapiens
SRVPARPAALPAPRPQPSAPALCRGARAVGRMSRIYHDGALRNKAVQSVRLPGAWDPAAHQGGNGVLLEGELIDVSRHSILDTHGRKERYYVLYIRPSHIHRRKFDAKGNEIEPNFSATRKVNTGFLMSSYKVEAKGDTDRLTPEALKGLVNKPELLALTESLTPDHTVAFWMPESEMEVMELELGAGVRLKTRGDGPFLDSLAKLEAGTVTKCNFTGDGKTGASWTDNIMAQKCSKGAAAEIREQGDGAEDEEWPEEIQQQIVRETFHLVLKRDDNICNFLEGGSLIGGSDYKLIYRHYATLYFVFCVDSSESELGILDLIQVFVETLDKCFENVCELDLIFHMDKVHYILQEVVMGGMVLETNMNEIVAQIEAQNRLEKSEGGLSAAPARAVSAVKNINLPEIPRNINIGDLNIKVPNLSQFV

SEQ ID NO: 895042 - protein, 232 aa, Homo sapiens
  misc_feature (196)..(196): Xaa can be any naturally occurring amino acid
  misc_feature (211)..(211): Xaa can be any naturally occurring amino acid
SRVPARPAALPAPRPQPSAPALCRGARAVGRMSRIYHDGALRNKAVQSVRLPGAWDPAAHQGGNGVLLEGELIDVSRHSILDTHGRKERYYVLYIRPSHIHRRKFDAKGNEIEPNFSATRKVNTGFLMSSYKVEAKGDTDRLTPEALKGLVNKPELLALTESLTPDHTVAFWMPESEMEVMELELGRYVEIGVSFXIMQLSEVTLSCESRXEAHSNVEVRVEEGGERDGDED

SEQ ID NO: 895043 - protein, 193 aa, Homo sapiens
MIQAILVFNNHGKPRLVRFYQRFPEEIQQQIVRETFHLVLKRDDNICNFLEGGSLIGGSDYKLIYRHYATLYFVFCVDSSESELGILDLIQVFVETLDKCFENVCELDLIFHMDKVHYILQEVVMGGMVLETNMNEIVAQIEAQNRLEKSEGGLSAAPARAVSAVKNINLPEIPRNINIGDLNIKVPNLSQFV

SEQ ID NO: 895044 - protein, 193 aa, Homo sapiens; identical to SEQ ID NO: 895043

SEQ ID NO: 895045 - protein, 193 aa, Homo sapiens; identical to SEQ ID NO: 895043

SEQ ID NO: 895046 - protein, 193 aa, Homo sapiens; identical to SEQ ID NO: 895043

SEQ ID NO: 895047 - protein, 193 aa, Homo sapiens; identical to SEQ ID NO: 895043

SEQ ID NO: 895048 - protein, 193 aa, Homo sapiens; identical to SEQ ID NO: 895043

SEQ ID NO: 895049 - protein, 193 aa, Homo sapiens; identical to SEQ ID NO: 895043

SEQ ID NO: 895050 - protein, 175 aa, Homo sapiens
MIQAILVFNNHGKPRLVRFYQRFPEEIQQQIVRETFHLVLKRDDNICNFLEGGSLIGGSDYKLIYRHYATLYFVFCVDSSESELGILDLIQVFVETLDKCFENVCELDLIFHMDKVHYILQEVVMGGMVLETNMNEIVAQIEAQNRLEKSEGGLSAAPARAVSAVIKVPNLSQFV

SEQ ID NO: 895051 - protein, 146 aa, Homo sapiens
MFPIFCSLIGGSDYKLIYRHYATLYFVFCVDSSESELGILDLIQVFVETLDKCFENVCELDLIFHMDKVHYILQEVVMGGMVLETNMNEIVAQIEAQNRLEKSEGGLSAAPARAVSAVKNINLPEIPRNINIGDLNIKVPNLSQFV

SEQ ID NO: 895052 - protein, 185 aa, Homo sapiens
MSSVLILDCLLPHPCLAASNFLKSHLSPIREMLAIFHGQLHIQWTRSELTSRTNTGSCSLIHCSLTLESFCLPKNPVCPGHQARCFTHIYLIQSSLQSWKEAEDTLKVHYILQEVVMGGMVLETNMNEIVAQIEAQNRLEKSEGGLSAAPARAVSAVKNINLPEIPRNINIGDLNIKVPNLSQFV

SEQ ID NO: 895053 - protein, 226 aa, Homo sapiens
MSRIYHDGALRNKAVQSVRLPGAWDPAAHQGGNGVLLEGELIDVSRHSILDTHGRKERYYVLYIRPSHIHRRKFDAKGNEIEPNFSATRKVNTGFLMSSYKVEAKGDTDRLTPEALKGLVNKPELLALTESLTPDHTVAFWMPESEMEVMELELGAGVRLKTRGDGPFLDSLAKLEAGTVTKCNFTGDGKTGASWTDNIMAQKCSKGAAAEIREQGDGAEDEEWDD

SEQ ID NO: 895054 - protein, 226 aa, Homo sapiens; identical to SEQ ID NO: 895053

SEQ ID NO: 895055 - protein, 280 aa, Homo sapiens
SRVPARPAALPAPRPQPSAPALCRGARAVGRMSRIYHDGALRNKAVQSVRLPGAWDPAAHQGGNGVLLEGELIDVSRHSILDTHGRKERYYVLYIRPSHIHRRKFDAKGNEIEPNFSATRKVNTGFLMSSYKVEAKGDTDRLTPEALKGLVNKPELLALTESLTPDHTVAFWMPESEMEVMELELGAGVRLKTRGDGPFLDSLAKLEAGTVTKCNFTGDGKTGASWTDNIMAQKCSKGAAAEIREQGDGAEDEEWVGTWCWCSCISWQEHGTYWLRLWVG

SEQ ID NO: 895056 - protein, 86 aa, Homo sapiens
  misc_feature (83)..(83): Xaa can be any naturally occurring amino acid
MIQAILVFNNHGKPRLVRFYQRFPEEIQQQIVRETFHLVLKRDDNICNFLEGGRFDLVALYYKLINPHYTTPLLFIFVWRLKXVNI

SEQ ID NO: 895057 - protein, 519 aa, Homo sapiens
MAAEREPPPLGDGKPTDFEDLEDGEDLFTSTVSTLESSPSSPEPASLPAEDISANSNGPKPTEVVLDDDREDLFAEATEEVSLDSPEREPILSSEPSPAVTPVTPTTLIAPRIESKSMSAPVIFDRSREEIEEEANGDIFDIEIGVSDPEKVGDGMNAYMAYRVTTKTSLSMFSKSEFSVKRRFSDFLGLHSKLASKYLHVGYIVPPAPEKSIVGMTKVKVGKEDSSSTEFVEKRRAALERYLQRTVKHPTLLQDPDLRQFLESSELPRAVNTQALSGAGILRMVNKAADAVNKMTIKMNESDAWFEEKQQQFENLDQQLRKLHVSVEALVCHRKELSANTAAFAKSAAMLGNSEDHTALSRALSQLAEVEEKIDQLHQEQAFADFYMFSELLSDYIRLIAAVKGVFDHRMKCWQKWEDAQITLLKKREAEAKMMVANKPDKIQQAKNEIREWEAKVQQGERDFEQISKTIRKEVGRFEKERVKDFKTVIIKYLESLVQTQQQLIKYWEAFLPEAKAIA

SEQ ID NO: 895058 - protein, 234 aa, Homo sapiens
  misc_feature (221)..(221): Xaa can be any naturally occurring amino acid
  misc_feature (223)..(223): Xaa can be any naturally occurring amino acid
MAAEREPPPLGDGKPTDFEDLEDGEDLFTSTVSTLESSPSSPEPASLPAEDISANSNGPKPTEVVLDDDREDLFAEATEEVSLDSPEREPILSSEPSPAVTPVTPTTLIAPRIESKSMSAPVIFDRSREEIEEEANGDIFDIEIGVSDPEKVGDGMNAYMAYRVTTKTSLSMFSKSEFSVKRRFSDFLGLHSKLASKYLHVGYIVPPAPEKSIVGGLYPKXGXSKKKGFGGGGF

SEQ ID NO: 895059 - protein, 73 aa, Homo sapiens
FVIQFQLPRAVNTQALSGAGILRMVNKAADAVNKMTIKMNESDAWFEEKQQQFENLDQQLRMLLDVKKHPELT

SEQ ID NO: 895060 - protein, 519 aa, Homo sapiens; identical to SEQ ID NO: 895057

SEQ ID NO: 895061 - protein, 519 aa, Homo sapiens; identical to SEQ ID NO: 895057

SEQ ID NO: 895062 - protein, 509 aa, Homo sapiens [sequence omitted]

SEQ ID NO: 895063 - protein, 418 aa, Homo sapiens
MAAEREPPPLGDGKPTDFEDLEDGEDLFTSTVSTLESSPSSPEPASLPAEDISANSNGPKPTEVVLDDDREDLFAEATEEVSLDSPEREPILSSEPSPAVTPVTPTTLIAPRIESKSMSAPVIFDRSREEIEEEANGDIFDIEIGVSDPEKVGDGMNAYMAYRVTTKTSLSMFSKSEFSVKRRFSDFLGLHSKLASKYLHVGYIVPPAPEKSIVGMTKVKVGKEDSSSTEFVEKRRAALERYLQRTVKHPTLLQDPDLRQFLESSELPRAVNTQALSGAGILRMVNKAADAVNKMTIKMNESDAWFEEKQQQFENLDQQLRKLHVSVEALVCHRKELSANTAAFAKSAAMLGNSEDHTALSRALSQLAEVEEKIDQLHQEQAFADFYMFSELLSDYIRLIAAVKGVFDHRMKCWLPEW

SEQ ID NO: 895064 - protein, 398 aa, Homo sapiens
MMTEKIFLQIEEEANGDIFDIEIGVSDPEKVGDGMNAYMAYRVTTKTSLSMFSKSEFSVKRRFSDFLGLHSKLASKYLHVGYIVPPAPEKSIVGMTKVKVGKEDSSSTEFVEKRRAALERYLQRTVKHPTLLQDPDLRQFLESSELPRAVNTQALSGAGILRMVNKAADAVNKMTIKMNESDAWFEEKQQQFENLDQQLRKLHVSVEALVCHRKELSANTAAFAKSAAMLGNSEDHTALSRALSQLAEVEEKIDQLHQEQAFADFYMFSELLSDYIRLIAAVKGVFDHRMKCWQKWEDAQITLLKKREAEAKMMVANKPDKIQQAKNEIREWEAKVQQGERDFEQISKTIRKEVGRFEKERVKDFKTVIIKYLESLVQTQQQLIKYWEAFLPEAKAIA

SEQ ID NO: 895065 - protein, 311 aa, Homo sapiens
MAAEREPPPLGDGKPTDFEDLEDGEDLFTSTVSTLESSPSSPEPASLPAEDISANSNGPKPTEVVLDDDREDLFAEATEEVSLDSPEREPILSSEPSPAVTPVTPTTLIAPRIESKSMSAPVIFDRSREEIEEEANGDIFDIEIGVSDPEKVGDGMNAYMAYRVTTKTSLSMFSKSEFSVKRRFSDFLGLHSKLASKYLHVGYIVPPAPEKSIVGMTKVKVGKEDSSSTEFVEKRRAALERYLQRTVKHPTLLQDPDLRQFLESSELPRAVNTQALSGAGILRMVNKAADAVNKMTIKMNESDAVRADFSA

SEQ ID NO: 895066 - protein, 241 aa, Homo sapiens
MAAEREPPPLGDGKPTDFEDLEDGEDLFTSTVSTLESSPSSPEPASLPAEDISANSNGPKPTEVVLDDDREDLFAEATEEVSLDSPEREPILSSEPSPAVTPVTPTTLIAPRIESKSMSAPVIFDRSREEIEEEANGDIFDIEIGVSDPEKVGDGMNAYMAYRVTTKTSLSMFSKSEFSVKRRFSDFLGLHSKLASKYLHVGYIVPPAPEKSIVGMTKVKVGKEDSSSTEFVEKRRAALER

SEQ ID NO: 895067 - protein, 223 aa, Homo sapiens
CTPREPRPWFEEKQQQFENLDQQLRKLHVSVEALVCHRKELSANTAAFAKSAAMLGNSEDHTALSRALSQLAEVEEKIDQLHQEQAFADFYMFSELLSDYIRLIAAVKGVFDHRMKCWQKWEDAQITLLKKREAEAKMMVANKPDKIQQAKNEIREWEAKVQQGERDFEQISKTIRKEVGRFEKERVKDFKTVIIKYLESLVQTQQQLIKYWEAFLPEAKAIA

SEQ ID NO: 895068 - protein, 168 aa, Homo sapiens
DFYMFSELLSDYIRLIAAVKGVFDHQNQEQAFADFYMFSELLSDYIRLIAAVKGVFDHRMKCWQKWEDAQITLLKKREAEAKMMVANKPDKIQQAKNEIREWEAKVQQGERDFEQISKTIRKEVGRFEKERVKDFKTVIIKYLESLVQTQQQLIKYWEAFLPEAKAIA

SEQ ID NO: 895069 - protein, 670 aa, Homo sapiens
RLAPPASRLPPPSSCECGLGWRRHQATVVRDLVAVRMAEEQEFTQLCKLPAQPSHPHCVNNTYRSAQHSQALLRGLLALRDSGILFDVVLVVEGRHIEAHRILLAASCDYFRGMFAGGLKEMEQEEVLIHGVSYNAMCQILHFIYTSELELSLSNVQETLVAACQLQIPEIIHFCCDFLMSWVDEENILDVYRLAELFDLSRLTEQLDTYILKNFVAFSRTDKYRQLPLEKVYSLLSSNRLEVSCETEVYEGALLYHYSLEQVQADQISLHEPPKLLETVRFPLMEAEVLQRLHDKLDPSPLRDTVASALMYHRNESLQPSLQSPQTELRSDFQCVVGFGGIHSTPSTVLSDQAKYLNPLLGEWKHFTASLAPRMSNQGIAVLNNFVYLIGGDNNVQGFRAESRCWRYDPRHNRWFQIQSLQQEHADLSVCVVGRYIYAVAGRDYHNDLNAVERYDPATNSWAYVAPLKREVYAHAGATLEGKMYITCGRRGEDYLKETHCYDPGSNTWHTLADGPVRRAWHGMATLLNKLYVIGGSNNDAGYRRDVHQVACYSCTSGQWSSVCPLPAGHGEPGIAVLDNRIYVLGGRSHNRGSRTGYVHIYDVEKDCWEEGPQLDNSISGLAACVLTLPRSLLLEPPRGTPDRSQADPDFASEVMSVSDWEEFDNSSED

SEQ ID NO: 895070 - protein, 541 aa, Homo sapiens
RLAPPASRLPPPSSCECGLGWRRHQATVVRDLVAVRMAEEQEFTQLCKLPAQPSHPHCVNNTYRSAQHSQALLRGLLALRDSGILFDVVLVVEGRHIEAHRILLAASCDYFRGMFAGGLKEMEQEEVLIHGVSYNAMCQILHFIYTSELELSLSNVQETLVAACQLQIPEIIHFCCDFLMSWVDEENILDVYRLAELFDLSRLTEQLDTYILKNFVAFSRTDKYRQLPLEKVYSLLSSNRLEVSCETEVYEGALLYHYSLEQVQADQISLHEPPKLLETVRFPLMEAEVLQRLHDKLDPSPLRDTVASALMYHRNESLQPSLQSPQTELRSDFQCVVGFGGIHSTPSTVLSDQAKYLNPLLGEWKHFTASLAPRMSNQGIAVLNNFVYLIGGDNNVQGFRAESRCWRYDPRHNRWFQIQSLQQEHADLSVCVVGRYIYAVAGRDYHNDLNAVERYDPATNSWAYVAPLKREVYAHAGATLEGKMYITCGRRGEDYLKETHCYDPGSNTWHTLADGPVRRAWHGMATLLNKLYVIGGSGVGG

SEQ ID NO: 895071 - protein, 666 aa, Homo sapiens
MPPPWHPPPRLLAVCLLTTTQATVVRDLVAVRMAEEQEFTQLCKLPAQPSHPHCVNNTYRSAQHSQALLRGLLALRDSGILFDVVLVVEGRHIEAHRILLAASCDYFRGMFAGGLKEMEQEEVLIHGVSYNAMCQILHFIYTSELELSLSNVQETLVAACQLQIPEIIHFCCDFLMSWVDEENILDVYRLAELFDLSRLTEQLDTYILKNFVAFSRTDKYRQLPLEKVYSLLSSNRLEVSCETEVYEGALLYHYSLEQVQADQISLHEPPKLLETVRFPLMEAEVLQRLHDKLDPSPLRDTVASALMYHRNESLQPSLQSPQTELRSDFQCVVGFGGIHSTPSTVLSDQAKYLNPLLGEWKHFTASLAPRMSNQGIAVLNNFVYLIGGDNNVQGFRAESRCWRYDPRHNRWFQIQSLQQEHADLSVCVVGRYIYAVAGRDYHNDLNAVERYDPATNSWAYVAPLKREVYAHAGATLEGKMYITCGRRGEDYLKETHCYDPGSNTWHTLADGPVRRAWHGMATLLNKLYVIGGSNNDAGYRRDVHQVACYSCTSGQWSSVCPLPAGHGEPGIAVLDNRIYVLGGRSHNRGSRTGYVHIYDVEKDCWEEGPQLDNSISGLAACVLTLPRSLLLEPPRGTPDRSQADPDFASEVMSVSDWEEFDNSSED

SEQ ID NO: 895072 - protein, 670 aa, Homo sapiens; identical to SEQ ID NO: 895069

SEQ ID NO: 895073 - protein, 683 aa, Homo sapiens
RLAPPASRLPPPSSCECGLGWRRHQATVVRDLVAVRMAEEQEFTQLCKLPAQPSHPHCVNNTYRSAQHSQALLRGLLALRDSGILFDVVLVVEGRHIEAHRILLAASCDYFRGMFAGGLKEMEQEEVLIHGVSYNAMCQILHFIYTSELELSLSNVQETLVAACQLQIPEIIHFCCDFLMSWVDEENILDVYRLAELFDLSRLTEQLDTYILKNFVAFSRTDKYRQLPLEKVYSLLSSNRLEVSCETEVYEGALLYHYSLEQVQADQISLHEPPKLLETVRFPLMEAEVLQRLHDKLDPSPLRDTVASALMYHRNESLQPSLQSPQTELRSDFQCVVGFGGIHSTPSTVLSDQAKYLNPLLGEWKHFTASLAPRMSNQGIAVLNNFVYLIGGDNNVQGFRAESRCWRYDPRHNRWFQIQSLQQEHADLSVCVVGRYIYAVAGRDYHNDLNAVERYDPATNSWAYVAPLKREVYAHAGATLEGKMYITCGRRGEDYLKETHCYDPGSNTWHTLADGPVRRAWHGMATLLNKLYVIGGSNNDAGYRRDVHQVACYSCTSGQWSSVCPLPAGHGEPGIAVLDNRIYVLGGRSHNRGSRTGYVHIYDVEKDCWEEGPQLDNSISGLAACVLTLPRSLLLEPPRGTPVGHSLWALPSFFTPAPWPACRRHLRAMQIPGCGLRHCRNCF

SEQ ID NO: 895074 - protein, 587 aa, Homo sapiens
RLAPPASRLPPPSSCECGLGWRRHQATVVRDLVAVRMAEEQEFTQLCKLPAQPSHPHCVNNTYRSAQHSQALLRGLLALRDSGILFDVVLVVEGRHIEAHRILLAASCDYFRGMFAGGLKEMEQEEVLIHGVSYNAMCQILHFIYTSELELSLSNVQETLVAACQLQIPEIIHFCCDFLMSWVDEENILDVYRLAELFDLSRLTEQLDTYILKNFVAFSRTDKYRQLPLEKVYSLLSSNRLEVSCETEVYEGALLYHYSLEQVQADQISLHEPPKLLETVRFPLMEAEVLQRLHDKLDPSPLRDTVASALMYHRNESLQPSLQSPQTELRSDFQCVVGFGGIHSTPSTVLSDQAKYLNPLLGEWKHFTASLAPRMSNQGIAVLNNFVYLIGGDNNVQGFRAESRCWRYDPRHNRWFQIQSLQQEHADLSVCVVGRYIYAVAGRDYHNDLNAVERYDPATNSWAYVAPLKREVYAHAGATLEGKMYITCGRRGEDYLKETHCYDPGSNTWHTLADGPVRRAWHGMATLLNKLYVIGGSNNDAGYRRDVHQLRAHLRCGEGLLGGRAPAGQLHLRPGGLCAHPAPLPAP

SEQ ID NO: 895075 - protein, 566 aa, Homo sapiens
RLAPPASRLPPPSSCECGLGWRRHQATVVRDLVAVRMAEEQEFTQLCKLPAQPSHPHCVNNTYRSAQHSQALLRGLLALRDSGILFDVVLVVEGRHIEAHRILLAASCDYFRGMFAGGLKEMEQEEVLIHGVSYNAMCQILHFIYTSELELSLSNVQETLVAACQLQIPEIIHFCCDFLMSWVDEENILDVYRLAELFDLSRLTEQLDTYILKNFVAFSRTDKYRQLPLEKVYSLLSSNRLEVSCETEVYEGALLYHYSLEQVQADQISLHEPPKLLETVRFPLMEAEVLQRLHDKLDPSPLRDTVASALMYHRNESLQPSLQSPQTELRSDFQCVVGFGGIHSTPSTVLSDQAKYLNPLLGEWKHFTASLAPRMSNQGIAVLNNFVYLIGGDNNVQGFRAESRCWRYDPRHNRWFQIQSLQQEHADLSVCVVGRYIYAVAGRDYHNDLNAVERYDPATNSWAYVAPLKREVYAHAGATLEGKMYITCGRRGEDYLKETHCYDPGSNTSTCTFTMWRRTAGRKGPSWTTPSQAWRPVCSPCPAPCSLSRPAGPLTAARPTRTLPLR

SEQ ID NO: 895076 - protein, 371 aa, Homo sapiens
MPPPWHPPPRLLAVCLLTTTQATVVRDLVAVRMAEEQEFTQLCKLPAQPSHPHCVNNTYRSAQHSQALLRGLLALRDSGILFDVVLVVEGRHIEAHRILLAASCDYFRYDPRHNRWFQIQSLQQEHADLSVCVVGRYIYAVAGRDYHNDLNAVERYDPATNSWAYVAPLKREVYAHAGATLEGKMYITCGRRGEDYLKETHCYDPGSNTWHTLADGPVRRAWHGMATLLNKLYVIGGSNNDAGYRRDVHQVACYSCTSGQWSSVCPLPAGHGEPGIAVLDNRIYVLGGRSHNRGSRTGYVHIYDVEKDCWEEGPQLDNSISGLAACVLTLPRSLLLEPPRGTPDRSQADPDFASEVMSVSDWEEFDNSSED

SEQ ID NO: 895077 - protein, 334 aa, Homo sapiens
PTTHWKSDRSSVCGLCRLGCRLSFRWYMRALATVSLKGLGSSYVMQPLQDLSFHQRKPALSKDFEQSPDAGYDPRHNRWFQIQSLQQEHADLSVCVVGRYIYAVAGRDYHNDLNAVERYDPATNSWAYVAPLKREVYAHAGATLEGKMYITCGRRGEDYLKETHCYDPGSNTWHTLADGPVRRAWHGMATLLNKLYVIGGSNNDAGYRRDVHQVACYSCTSGQWSSVCPLPAGHGEPGIAVLDNRIYVLGGRSHNRGSRTGYVHIYDVEKDCWEEGPQLDNSISGLAACVLTLPRSLLLEPPRGTPDRSQADPDFASEVMSVSDWEEFDNSSED

SEQ ID NO: 895078 - protein, 575 aa, Homo sapiens
RLAPPASRLPPPSSCECGLGWRRHQATVVRDLVAVRMAEEQEFTQLCKLPAQPSHPHCVNNTYRSAQHSQALLRGLLALRDSGILFDVVLVVEGRHIEAHRILLAASCDYFRGMFAGGLKEMEQEEVLIHGVSYNAMCQILHFIYTSELELSLSNVQETLVAACQLQIPEIIHFCCDFLMSWVDEENILDVYRLAELFDLSRLTEQLDTYILKNFVAFSRTDKYRQLPLEKVYSLLSSNRLEVSCETEVYEGALLYHYSLEQVQADQISLHEPPKLLETVRFPLMEAEVLQRLHDKLDPSPLRDTVASALMYHRNESLQPSLQSPQTELRSDFQCVVGFGGIHSTPSTVLSDQAKYLNPLLGEWKHFTASLAPRMSNQGIAVLNNFVYLIGGDNNVQGFRAESRCWRYDPRHNRWFQIQSLQQEHADLSVCVVGRYIYAVAGRDYHNDLNAVERYDPATNSWAYVAPLKREVYAHAGATLEGKMYITCGRRGEDYLKETHCYDPGSNTWHTLADGPVRRAWHGMATLLNKLYVIGGSNNDAGYRRDVHQQVSGARGSPHPSSFPSLSVVIDGKCN

SEQ ID NO: 895079 - protein, 516 aa, Homo sapiens
RLAPPASRLPPPSSCECGLGWRRHQATVVRDLVAVRMAEEQEFTQLCKLPAQPSHPHCVNNTYRSAQHSQALLRGLLALRDSGILFDVVLVVEGRHIEAHRILLAASCDYFRGMFAGGLKEMEQEEVLIHGVSYNAMCQILHFIYTSELELSLSNVQETLVAACQLQIPEIIHFCCDFLMSWVDEENILDVYRLAELFDLSRLTEQLDTYILKNFVAFSRTDKYRQLPLEKVYSLLSSNRLEVSCETEVYEGALLYHYSLEQVQADQISLHEPPKLLETVRFPLMEAEVLQRLHDKLDPSPLRDTVASALMYHRNESLQPSLQSPQTELRSDFQCVVGFGGIHSTPSTVLSDQAKYLNPLLGEWKHFTASLAPRMSNQGIAVLNNFVYLIGGDNNVQGFRAESRCWRYDPRHNRWFQIQSLQQEHADLSVCVVGRYIYAVAGRDYHNDLNAVERYDPATNSWAYVAPLKREVYAHAGATLEGKMYITCGRRGEDYLKETHCYDPGSNTLGLEDESS

SEQ ID NO: 895080 - protein, 177 aa, Homo sapiens
LAHGQDVSTLALCHPSRGPDLSEWWVTVATLVSGLVGELAASSQWVLGFILALALQVACYSCTSGQWSSVCPLPAGHGEPGIAVLDNRIYVLGGRSHNRGSRTGYVHIYDVEKDCWEEGPQLDNSISGLAACVLTLPRSLLLEPPRGTPDRSQADPDFASEVMSVSDWEEFDNSSED

SEQ ID NO: 895081 - protein, 508 aa, Homo sapiens
RLAPPASRLPPPSSCECGLGWRRHQATVVRDLVAVRMAEEQEFTQLCKLPAQPSHPHCVNNTYRSAQHSQALLRGLLALRDSGILFDVVLVVEGRHIEAHRILLAASCDYFRGMFAGGLKEMEQEEVLIHGVSYNAMCQILHFIYTSELELSLSNVQETLVAACQLQIPEIIHFCCDFLMSWVDEENILDVYRLAELFDLSRLTEQLDTYILKNFVAFSRTDKYRQLPLEKVYSLLSSNRLEVSCETEVYEGALLYHYSLEQVQADQISLHEPPKLLETVRFPLMEAEVLQRLHDKLDPSPLRDTVASALMYHRNESLQPSLQSPQTELRSDFQCVVGFGGIHSTPSTVLSDQAKYLNPLLGEWKHFTASLAPRMSNQGIAVLNNFVYLIGGDNNVQGFRAESRCWRYDPRHNRWFQIQSLQQEHADLSVCVVGRYIYAVAGRDYHNDLNAVERYDPATNSWAYVAPLKRELGKQQFSSLATEGQPWLSTSCIVAAGVPSCTHSFRNY

SEQ ID NO: 895082 - protein, 180 aa, Homo sapiens
MPPPWHPPPRLLAVCLLTTTQATVVRDLVAVRMAEEQEFTQLCKLPAQPSHPHCVNNTYRSAQHSQALLRGLLALRDSGILFDVVLVVEGRHIEAHRILLAASCDYFRGMFAGGLKEMEQEEVLIHGVSYNAMCQILHFIYTSELELSLSNVQETLVAACQLQVRHVSSSKADPHPGGVP

SEQ ID NO: 895083 - protein, 501 aa, Homo sapiens
MATSFRTASCWGLLSFKDISMEFTWDEWQLLDSTQKYLYRDVILENYHNLISVDGWEEWYQNNQDELESIERSYACSVLGRLNLSKTHDSSRQRLYNTRGKSLTQNSAPSRSYLRKNPDKFHGYEEPYFLKHQRAHSIEKNCVCSECGKAFRCKSQLIVHLRIHTGERPYECSKCERAFSAKSNLNAHQRVHTGEKPYSCSECEKVFSFRSQLIVHQEIHTGGKPYGCSECGKAYSWKSQLLLHQRSHTGVKPYECSECGKAFSLKSPFVVHQRTHTGVKPHKCSECGKAFRSKSYLLVHIRMHTGEKPYQCSDCGKAFNMKTQLIVHQGVHTGNNPYQCGECGKAFGRKEQLTAHLRAHAGEKPYGCSECGKAFSSKSYLVIHRRTHTGERPYECSLCERAFCGKSQLIIHQRTHSTEKPYECNECEKAYPRKASLQIHQKTHSGEKPFKCSECGKAFTQKSSLSEHQRVHTGEKPWKCSECGKSFCWNSGLRIHRKTHK

SEQ ID NO: 895084 - protein, 533 aa, Homo sapiens
MATSFRTASCWGLLSFKDISMEFTWDEWQLLDSTQKYLYRDVILENYHNLISVGYHGTKPDLIFKLEQGEDPWIINAKISRQSCPDGWEEWYQNNQDELESIERSYACSVLGRLNLSKTHDSSRQRLYNTRGKSLTQNSAPSRSYLRKNPDKFHGYEEPYFLKHQRAHSIEKNCVCSECGKAFRCKSQLIVHLRIHTGERPYECSKCERAFSAKSNLNAHQRVHTGEKPYSCSECEKVFSFRSQLIVHQEIHTGGKPYGCSECGKAYSWKSQLLLHQRSHTGVKPYECSECGKAFSLKSPFVVHQRTHTGVKPHKCSECGKAFRSKSYLLVHIRMHTGEKPYQCSDCGKAFNMKTQLIVHQGVHTGNNPYQCGECGKAFGRKEQLTAHLRAHAGEKPYGCSECGKAFSSKSYLVIHRRTHTGERPYECSLCERAFCGKSQLIIHQRTHSTEKPYECNECEKAYPRKASLQIHQKTHSGEKPFKCSECGKAFTQKSSLSEHQRVHTGEKPWKCSECGKSFCWNSGLRIHRKTHK

SEQ ID NO: 895085 - protein, 513 aa, Homo sapiens
MEFTWDEWQLLDSTQKYLYRDVILENYHNLISVGYHGTKPDLIFKLEQGEDPWIINAKISRQSCPDGWEEWYQNNQDELESIERSYACSVLGRLNLSKTHDSSRQRLYNTRGKSLTQNSAPSRSYLRKNPDKFHGYEEPYFLKHQRAHSIEKNCVCSECGKAFRCKSQLIVHLRIHTGERPYECSKCERAFSAKSNLNAHQRVHTGEKPYSCSECEKVFSFRSQLIVHQEIHTGGKPYGCSECGKAYSWKSQLLLHQRSHTGVKPYECSECGKAFSLKSPFVVHQRTHTGVKPHKCSECGKAFRSKSYLLVHIRMHTGEKPYQCSDCGKAFNMKTQLIVHQGVHTGNNPYQCGECGKAFGRKEQLTAHLRAHAGEKPYGCSECGKAFSSKSYLVIHRRTHTGERPYECSLCERAFCGKSQLIIHQRTHSTEKPYECNECEKAYPRKASLQIHQKTHSGEKPFKCSECGKAFTQKSSLSEHQRVHTGEKPWKCSECGKSFCWNSGLRIHRKTHK

SEQ ID NO: 895086 - protein, 85 aa, Homo sapiens
ESGQRVYLAESLWPRRRGAKRLGLSWADQRLDQLNTSVGPGRGRGQISLLLSRVRATERHKSIRATPGTQTGRLSSHARSVLGES

SEQ ID NO: 895087 - protein, 260 aa, Homo sapiens
MARPHPWWLCVLGTLVGLSATPAPKSCPERHYWAQGKLCCQMCEPGTFLVKDCDQHRKAAQCDPCIPGVSFSPDHHTRPHCESCRHCNSGLLVRNCTITANAECACRNGWQCRDKECTECDPLPNPSLTARSSQALSPHPQPTHLPYVSEMLEARTAGHMQTLADFRQLPARTLSTHWPPQRSLCSSDFIRILVIFSGMFLVFTLAGALFLHQRRKYRSNKGESPVEPAEPCRYSCPREEEGSTIPIQEDYRKPEPACSP

SEQ ID NO: 895088 - protein, 72 aa, Homo sapiens
DKGESPVEPAGSLVFTLAGALFLHQRRKYRSNKGESPVEPAEPCRYSCPREEEGSTIPIQEDYRKPEPACSP

SEQ ID NO: 895089 - protein, 319 aa, Homo sapiens
LIPKKKGFLGGFFGPKPLWKKQPLPRGCKEETAAPSLEVLTPEASISNWAQKGAAWAGTMARPHPWWLCVLGTLVGLSATPAPKSCPERHYWAQGKLCCQMCEPGTFLVKDCDQHRKAAQCDPCIPGVSFSPDHHTRPHCESCRHCNSGLLVRNCTITANAECACRNGWQCRDKECTECDPLPNPSLTARSSQALSPHPQPTHLPYVSEMLEARTAGHMQTLADFRQLPARTLSTHWPPQRSLCSSDFIRILVIFSGMFLVFTLAGALFLHQRRKYRSNKGESPVEPAEPCRYSCPREEEGSTIPIQEDYRKPEPACSP

SEQ ID NO: 895090 - protein, 358 aa, Homo sapiens
MARPHPWWLCVLGTLVGLSATPAPKSCPERHYWAQGKLCCQMCEPGTFLVKDCDQHRKAAQCDPCIPGVSFSPDHHTRPHCESCRHCNSGLLVRNCTITANAECACRNGWQCRDKECTECDPLPNPSLTARSSQALSPHPQPTHLPYVSEMLEARTAGHMQTLADFRQLPARTLSTHWPPQRSLCSSDFIRILVIFSGMFLVFTLAGALFLHQRRKYRSTGVLLTPLPQAHPPLPISFSRLPLPPLLAKTHRISFCRQRRKSCGACRALSLQLPQGGGGQHHPHPGGLPKTGACLLPLSQHLRELHYSPGLHPHPADHPRESETWQPQLQSHPLVRALSCVHVTECLFETGRDEDKYG

SEQ ID NO: 895091 - protein, 126 aa, Homo sapiens
EARGAAQDSRMYTLLSGLYKYMFQKDEYCILILGLDNAGKTTFLEQSKTRFNKNYKGMSLSKITTTVGLNIGTVDVGKARLMFWDLGGQEELQSLWDKSGQDKVWGPGDPALLQSECLLSAQRPCC

SEQ ID NO: 895092 - protein, 201 aa, Homo sapiens
MYTLLSGLYKYMFQKDEYCILILGLDNAGKTTFLEQSKTRFNKNYKGMSLSKITTTVGLNIGTVDVGKARLMFWDLGGQEELQSLWDKYYAECHGVIYVIDSTDEERLAESKQAFEKVVTSEALCGVPVLVLANKQDVETCLSIPDIKTAFSDCTSKIGRRDCLTQACSALTGKGVREGIEWMVKCVVRNVHRPPRQRDIT

SEQ ID NO: 895093 - protein, 201 aa, Homo sapiens; identical to SEQ ID NO: 895092

SEQ ID NO: 895094 - protein, 201 aa, Homo sapiens; identical to SEQ ID NO: 895092

SEQ ID NO: 895095 - protein, 228 aa, Homo sapiens
TTTNTQNNYGQVRGCVGYSSGSEGAAEMYTLLSGLYKYMFQKDEYCILILGLDNAGKTTFLEQSKTRFNKNYKGMSLSKITTTVGLNIGTVDVGKARLMFWDLGGQEELQSLWDKYYAECHGVIYVIDSTDEERLAESKQAFEKVVTSEALCGVPVLVLANKQDVETCLSIPDIKTAFSDCTSKIGRRDCLTQACSALTGKGVREGIEWMVKCVVRNVHRPPRQRDIT

SEQ ID NO: 895096 - protein, 154 aa, Homo sapiens
MSLSKITTTVGLNIGTVDVGKARLMFWDLGGQEELQSLWDKYYAECHGVIYVIDSTDEERLAESKQAFEKVVTSEALCGVPVLVLANKQDVETCLSIPDIKTAFSDCTSKIGRRDCLTQACSALTGKGVREGIEWMVKCVVRNVHRPPRQRDIT

SEQ ID NO: 895097 - protein, 201 aa, Homo sapiens; identical to SEQ ID NO: 895092

SEQ ID NO: 895098 - protein, 154 aa, Homo sapiens; identical to SEQ ID NO: 895096

SEQ ID NO: 895099 - protein, 218 aa, Homo sapiens
MYTLLSGLYKYMFQKDEYCILILGLDNAGKTWELGKDDQLMNNEEPLVEQEIYHMNNRMQGQGTSISLINSQDSQVYLGTVDVGKARLMFWDLGGQEELQSLWDKYYAECHGVIYVIDSTDEERLAESKQAFEKVVTSEALCGVPVLVLANKQDVETCLSIPDIKTAFSDCTSKIGRRDCLTQACSALTGKGVREGIEWMVKCVVRNVHRPPRQRDIT

SEQ ID NO: 895100 - protein, 121 aa, Homo sapiens
MYTLLSGLYKYMFQKDEYCILILGLDNAGKTTFLEQSKTRFNKNYKGMSLSKITTTVGLNIGTVDVGKARLMFWDLGGQEELQSLWDKYYAECHGVIYVIDSTDEERLAESKQAFDVPLNP

SEQ ID NO: 895101 - protein, 173 aa, Homo sapiens
MYTLLSGLYKYMFQKDEYCILILGLDNAGKTTFLEQSKTRFNKNYKGMSLSKITTTVGLNIGTVDVGKARLMFWDLGGQEELQSLWDKYYAECHGVIYVIDSTDEERLAESKQAFEKVVTSEALCGVPVLVLANKQDVETCLSIPDIKTAFSDCTSKIGRRDCLTQACSALTG

SEQ ID NO: 895102 - protein, 201 aa, Homo sapiens; identical to SEQ ID NO: 895092

SEQ ID NO: 895103 - protein, 173 aa, Homo sapiens; identical to SEQ ID NO: 895101

SEQ ID NO: 895104 - protein, 163 aa, Homo sapiens [sequence omitted]

SEQ ID NO: 895105 - protein, 299 aa, Homo sapiens
MYTLLSGLYKYMFQKDEYCILILGLDNAGKTTFLEQSKTRFNKNYKGMSLSKITTTVGLNIGTVDVGKARLMFWDLGGQEELQSLWDKYYAECHGVIYVIDSTDEERLAESKQAFEKVVTSEALCGVPVLVLANKQDVETCLSIPDIKTAFSDCTSKIQRGARGHRVDGEVCRAECAPAAAAEGHHVGAAALPSGRLVPWCWRSGLLLAPMLLIWGVGLLCFGVLLFTLFSRRQTFLYVWKSVGIRRLWRGVWQPGWPRPCSGSLSTGRSGGLSRPFLGGLRETWLGIGAPVLRLAWAA

SEQ ID NO: 895106 - protein, 116 aa, Homo sapiens
MYTLLSGLYKYMFQKDEYCILILGLDNAGKTTFLEQSKTRFNKNYKGMSLSKITTTVGLNIGTVDVGKARLMFWDLGGQEELQSLWDKSGQDKVWGPGDPALLQSECLLSAQRPCC

SEQ ID NO: 895107 - protein, 731 aa, Homo sapiens
MSWFVDLAGKAEDLLNRVDQGAATALSRKDNASNIYSKNTDYTELHQQNTDLIYQTGPKSTYISSAADNIRNQKATILAGTANVKVGSRTPVEASHPVENASVPRPSSHFVRRKKSEPDDELLFDFLNSSQKEPTGRVEIRKEKGKTPVFQSSQTSSVSSVNPSVTTIKTIEENSFGSQTHEAASNSDSSHEGQEESSKENVSSNAACPDHTPTPNDDGKSHELSNLRLENQLLRNEVQSLNQEMASLLQRSKETQEELNKARARVEKWNADHSKSDRMTRGLRAQVDDLTEAVAAKDSQLAVLKVRLQEADQLLSTRTEALEALQSEKSRIMQDQSEGNSLQNQALQTLQERLHEADATLKREQESYKQMQSEFAARLNKVEMERQNLAEAITLAERKYSDEKKRVDELQQQVKLYKLNLESSKQELIDYKQKATRILQSKEKLINSLKEGSGFEGLDSSTASSMELEELRHEKEMQREEIQKLMGQIHQLRSELQDMEAQQVNEAESAREQLQDLHDQIAGQKASKQELETELERLKQEFHYIEEDLYRTKNTLQSRIKDRDEEIQKLRNQLTNKTLSNSSQSELENRLHQLTETLIQKQTMLESLSTEKNSLVFQLERLEQQMNSASGSSSNGSSINMSGIDNGEGTRLRNVPVLFNDTETNLAGMYGKVRKAASSIDQFSIRLGIFLRRYPIARVFVIIYMALLHLWVMIVLLTYTPEMHHDQPYGK

SEQ ID NO: 895108 - protein, 731 aa, Homo sapiens; identical to SEQ ID NO: 895107

SEQ ID NO: 895109 - protein, 711 aa, Homo sapiens
MSWFVDLAGKAEDLLNRVDQGAATALSRKDNASNIYSKNTDYTELHQQNTDLIYQTGPKSTYISSAADNIRNQKATILAGTANVKVGSRTPVEASHPVENASVPRPSSHFVRRKKSEPDDELLFDFLNSSQKEPTGRVEIRKEKGKTPVFQSSQTSSVSSVNPSVTTIKTIEENSFGSQTHEAASNSDSSHEGQEESSKENVSSNAACPDHTPTPNDDGKSHELSNLRLENQLLRNEVQSLNQEMASLLQRSKETQEELNKARARVEKWNADHSKSDRMTRGLRAQVDDLTEAVAAKDSQLAVLKVRLQEADQLLSTRTEALEALQSEKSRIMQDQSEGNSLQNQALQTLQERLHEADATLKREQESYKQMQSEFAARLNKVEMERQNLAEAITLAERKYSDEKKRVDELQQQVKLYKLNLESSKQELIDYKQKATRILQSKEKLINSLKEGSGFEGLDSSTASSMELEELRHEKEMQREEIQKLMGQIHQLRSELQDMEAQQVNEAESAREQLQDLHDQIAGQKASKQELETELERLKQEFHYIEEDLYRTKNTLQSRIKDRDEEIQKLRNQLTNKTLSNSSQSELENRLHQLTETLIQKQTMLESLASGSSSNGSSINMSGIDNGEGTRLRNVPVLFNDTETNLAGMYGKVRKAASSIDQFSIRLGIFLRRYPIARVFVIIYMALLHLWVMIVLLTYTPEMHHDQPYGK

SEQ ID NO: 895110 - protein, 694 aa, Homo sapiens
MSWFVDLAGKAEDLLNRVDQGAATALSRKDNASNIYSKNTDYTELHQQNTDLIYQTGPKSTYISSAADNIRNQKATILAGTANVKVGSRTPVEASHPVENASVPRPSSHFVRRKKSEPDDELLFDFLNSSQKEPTGRVEIRKEKEAASNSDSSHEGQEESSKENVSSNAACPDHTPTPNDDGKSHELSNLRLENQLLRNEVQSLNQEMASLLQRSKETQEELNKARARVEKWNADHSKSDRMTRGLRAQVDDLTEAVAAKDSQLAVLKVRLQEADQLLSTRTEALEALQSEKSRIMQDQSEGNSLQNQALQTLQERLHEADATLKREQESYKQMQSEFAARLNKVEMERQNLAEAITLAERKYSDEKKRVDELQQQVKLYKLNLESSKQELIDYKQKATRILQSKEKLINSLKEGSGFEGLDSSTASSMELEELRHEKEMQREEIQKLMGQIHQLRSELQDMEAQQVNEAESAREQLQDLHDQIAGQKASKQELETELERLKQEFHYIEEDLYRTKNTLQSRIKDRDEEIQKLRNQLTNKTLSNSSQSELENRLHQLTETLIQKQTMLESLSTEKNSLVFQLERLEQQMNSASGSSSNGSSINMSGIDNGEGTRLRNVPVLFNDTETNLAGMYGKVRKAASSIDQFSIRLGIFLRRYPIARVFVIIYMALLHLWVMIVLLTYTPEMHHDQPYGK

SEQ ID NO: 895111 - protein, 684 aa, Homo sapiens
MSWFVDLAGKAEDLLNRVDQGAATALSRKDNASNIYSKNTDYTELHQQNTDLIYQTGPKSTYISSAADNIRNQKATILAGTANVKVGSRTPVEASHPVENASVPRPSSHFVRRKKSEPDDELLFDFLNSSQKEPTGRVEIRKEKGKTPVFQSSQTSSVSSVNPSVTTIKTIEENSFGSQTHEAASNSDSSHEGQEESSKENVSSNAACPDHTPTPNDDGKSHELSNLRLENQLLRNEVQSLNQEMASLLQRSKETQEELNKARARVEKWNADHSKSDRMTRGLRAQVDDLTEAVAAKDSQLAVLKVRLQEADQLLSTRTEALEALQSEKSRIMQDQSEGNSLQNQALQTLQERLHEADATLKREQESYKQMQSEFAARLNKVEMERQNLAEAITLAERKYSDEKKRVDELQQQVKLYKLNLESSKQELIDYKQKATRILQSKEKLINSLKEGSGFEGLDSSTASSMELEELRHEKEMQREEIQKLMGQIHQLRSELQDMEAQQVNEAESAREQLQDLHDQIAGQKASKQELETELERLKQEFHYIEEDLYRTKNTLQSRIKDRDEEIQKLRNQLTNKTLSNSSQSELENRLHQLTETLIQKQTMLESLSTEKNSLVFQLERLEQQMNSASGSSSNGSSINMSGIDNGEGTRLRNVPVLFNDTETNLAGMYGKVRKAASSIDQFR

SEQ ID NO: 895112 - protein, 268 aa, Homo sapiens
MSWFVDLAGKAEDLLNRVDQGAATALSRKDNASNIYSKNTDYTELHQQNTDLIYQTGPKSTYISSAADNIRNQKATILAGTANVKVGSRTPVEASHPVENASVPRPSSHFVRRKKSEPDDELLFDFLNSSQKEPTGRVEIRKEKGKTPVFQSSQTSSVSSVNPSVTTIKTIEENSFGSQTHEAASNSDSSHEGQEESSKENVSSNAACPDHTPTPNDDGKSHELSNLRLENQLLRNEVQSLNQEMASLLQRSKETQEGRGLNCSGLGI

SEQ ID NO: 895113 - protein, 731 aa, Homo sapiens; identical to SEQ ID NO: 895107

SEQ ID NO: 895114 - protein, 711 aa, Homo sapiens
MSWFVDLAGKAEDLLNRVDQGAATALSRKDNASNIYSKNTDYTELHQQNTDLIYQTGPKSTYISSAADNIRNQKATILAGTANVKVGSRTPVEASHPVENASVPRPSSHFVRRKKSEPDDELLFDFLNSSQKEPTGRVEIRKEKGKTPVFQSSQTSSVSSVNPSVTTIKTIEENSFGSQTHEAASNSDSSHEGQEESSKENVSSNAACPDHTPTPNDDGKSHELSNLRLENQLLRNEVQSLNQEMASLLQRSKETQEELNKARARVEKWNADHSKSDRMTRGLRAQVDDLTEAVAAKDSQLAVLKVRLQEADQLLSTRTEALEALQSEKSRIMQDQSEGNSLQNQALQTLQERLHEADATLKREQESYKQMQSEFAARLNKVEMERQNLAEAITLAERKYSDEKKRVDELQQQVKLYKLNLESSKQELIDYKQKATRILQSKEKLINSLKEGSGFEGLDSSTASSMELEELRHEKEMQREEIQKLMGQIHQLRSELQDMEAQQVNEAESAREQLQDLHDQIAGQKASKQELETELERLKQEFHYIEEDLYRTKNTLQSRIKDRDEEIQKLRNQLTNKTLSNSSQSELESTEKNSLVFQLERLEQQMNSASGSSSNGSSINMSGIDNGEGTRLRNVPVLFNDTETNLAGMYGKVRKAASSIDQFSIRLGIFLRRYPIARVFVIIYMALLHLWVMIVLLTYTPEMHHDQPYGK

SEQ ID NO: 895115 - protein, 718 aa, Homo sapiens
MSWFVDLAGKAEDLLNRVDQGAATALSRKDNASNIYSKNTDYTELHQQNTDLIYQTGPKSTYISSAADNIRNQKATILAGTANVKVGSRTPVEASHPVENASVPRPSSHFVRRKKSEPDDELLFDFLNSSQKEPTGRVEIRKEKGKTPVFQSSQTSSVSSVNPSVTTIKTIEENSFGSQTHEAASNSDSSHEGQEESSKENVSSNAACPDHTPTPNDDGKSHELSNLRLENQLLRNEVQSLNQEMASLLQRSKETQEELNKARARVEKWNADHSKSDRMTRGLRAQVDDLTEAVAAKDSQLAVLKVRLQEADQLLSTRTEALEALQSEKSRIMQDQSEGNSLQNQALQTLQERLHEADATLKREQESYKQMQSEFAARLNKVEMERQNLAEAITLAERKYSDEKKRVDELQQQVKLYKLNLESSKQELIDYKQKATRILQSKEKLINSLKEGSGFEGLDSSTASSMELEELRHEKEMQREEIQKLMGQIHQLRSELQDMEAQQVNEAESAREQLQDLHDQIAGQKASKQELETELERLKQEFHYIEEDLYRTKNTLQSRIKDRDEEIQKLRNQLTNKTLSNSSQSELENRLHQLTETLIQKQTMLESLSTEKNSLVFQLERLEQQMNSASGSSSNGSSINMSGIDNGEGTRLRNVPVLFNDTETNLAGMYGIRLGIFLRRYPIARVFVIIYMALLHLWVMIVLLTYTPEMHHDQPYGK

SEQ ID NO: 895116 - protein, 115 aa, Homo sapiens
MLESLSTEKNSLVFQLERLEQQMNSASGSSSNGSSINMSGIDNGEGTRLRNVPVLFNDTETNLAGMYGIRLGIFLRRYPIARVFVIIYMALLHLWVMIVLLTYTPEMHHDQPYGK

SEQ ID NO: 895117 - protein, 201 aa, Homo sapiens
MASSSTVPLGFHYETKYVVLSYLGLLSQEKLQEQHLSSPQGVQLDIASQSLDQEILLKVKTEIEEELKSLDKEISEAFTSTGFDRHTSPVFSPANPESSMEDCLAHLGEKVSQELKEPLHKALQMLLSQPVTYQAFRECTLETTVHASGWNKILVPLVLLRQMLLELTRRGQEPLSALLQFGVTYLEDYSAEYIIQQGGWV

SEQ ID NO: 895118 - protein, 143 aa, Homo sapiens
MASSSTVPLGFHYETKYVVLSYLGLLSQEKLQEQHLSSPQGVQLDIASQSLDQEILLKVKTEIEEELKSLDKEISEAFTSTGFDRHTSPVFSPANPESSMEDCLAHLGEKVSQELKEPLHKALQMLLSQFWCLWFCYDKCFWN

SEQ ID NO: 895119 - protein, 485 aa, Homo sapiens
MASSSTVPLGFHYETKYVVLSYLGLLSQEKLQEQHLSSPQGVQLDIASQSLDQEILLKVKTEIEEELKSLDKEISEAFTSTGFDRHTSPVFSPANPESSMEDCLAHLGEKVSQELKEPLHKALQMLLSQPVTYQAFRECTLETTVHASGWNKILVPLVLLRQMLLELTRRGQEPLSALLQFGVTYLEDYSAEYIIQQGGWGTVFSLESEEEEYPGITAEDSNDIYILPSDNSGQVSPPESPTVTTSWQSESLPVSLSASQSWHTESLPVSLGPESWQQIAMDPEEVKSLDSNGAGEKSENNSSNSDIVHVEKEEVPEGMEEAAVASVVLPARELQEALPEAPAPLLPHITATSLLGTREPDTEVITVEKSSPATSLFVELDEEEVKAATTEPTEVEEVVPALEPTETLLSEKEINAREESLVEELSPASEKKPVPPSEGKSRLSPAGEMKPMPLSEGKSILLFGGAAAVAILAVAIGVALALRKK

SEQ ID NO: 895120 - protein, 485 aa, Homo sapiens; identical to SEQ ID NO: 895119

SEQ ID NO: 895121 - protein, 485 aa, Homo sapiens; identical to SEQ ID NO: 895119

SEQ ID NO: 895122 - protein, 485 aa, Homo sapiens; identical to SEQ ID NO: 895119

SEQ ID NO: 895123 - protein, 485 aa, Homo sapiens; identical to SEQ ID NO: 895119

SEQ ID NO: 895124 - protein, 323 aa, Homo sapiens
MLLELTRRGQEPLSALLQFGVTYLEDYSAEYIIQQGGWGTVFSLESEEEEYPGITAEDSNDIYILPSDNSGQVSPPESPTVTTSWQSESLPVSLSASQSWHTESLPVSLGPESWQQIAMDPEEVKSLDSNGAGEKSENNSSNSDIVHVEKEEVPEGMEEAAVASVVLPARELQEALPEAPAPLLPHITATSLLGTREPDTEVITVEKSSPATSLFVELDEEEVKAATTEPTEVEEVVPALEPTETLLSEKEINAREESLVEELSPASEKKPVPPSEGKSRLSPAGEMKPMPLSEGKSILLFGGAAAVAILAVAIGVALALRKK

SEQ ID NO: 895125 - protein, 205 aa, Homo sapiens
MDPEEVKSLDSNGAGEKSENNSSNSDIVHVEKEEVPEGMEEAAVASVVLPARELQEALPEAPAPLLPHITATSLLGTREPDTEVITVEKSSPATSLFVELDEEEVKAATTEPTEVEEVVPALEPTETLLSEKEINAREESLVEELSPASEKKPVPPSEGKSRLSPAGEMKPMPLSEGKSILLFGGAAAVAILAVAIGVALALRKK

SEQ ID NO: 895126 - protein, 205 aa, Homo sapiens; identical to SEQ ID NO: 895125

SEQ ID NO: 895127 - protein, 304 aa, Homo sapiens
ETSVAQSPRLEYIIQQGGWGTVFSLESEEEEYPGITAEDSNDIYILPSDNSGQVSPPESPTVTTSWQSESLPVSLSASQSWHTESLPVSLGPESWQQIAMDPEEVKSLDSNGAGEKSENNSSNSDIVHVEKEEVPEGMEEAAVASVVLPARELQEALPEAPAPLLPHITATSLLGTREPDTEVITVEKSSPATSLFVELDEEEVKAATTEPTEVEEVVPALEPTETLLSEKEINAREESLVEELSPASEKKPVPPSEGKSRLSPAGEMKPMPLSEGKSILLFGGAAAVAILAVAIGVALALRKK

SEQ ID NO: 895128 - protein, 154 aa, Homo sapiens
MGSSATDFLALTPLLPHITATSLLGTREPDTEVITVEKSSPATSLFVELDEEEVKAATTEPTEVEEVVPALEPTETLLSEKEINAREESLVEELSPASEKKPVPPSEGKSRLSPAGEMKPMPLSEGKSILLFGGAAAVAILAVAIGVALALRKK

SEQ ID NO: 895129 - protein, 168 aa, Homo sapiens
MLLELTRRGQEPLSALLQFGVTYLEDYSAEYIIQQGGWGTVFSLESEEEEYPGITAEDSNDIYILPSDNSGQVSPPESPTVTTSWQSESLPVSLSASQSWHTESLPVSLGPESWQQIAMDPEEVKSLDSNGAGEKSENNSSNSDIVHVEKEEVPEGHDVTMQGTRGLV

SEQ ID NO: 895130 - protein, 162 aa, Homo sapiens
MLLELTRRGQEPLSALLQFGVTYLEDYSAEYIIQQGGWGTVFSLESEEEEYPGITAEDSNDIYILPSDNSGQVSPPESPTVTTSWQSESLPVSLSASQSWHTESLPVSLGPESWQQIAMDPEEVKSLDSNGAGEKSENNSSNSDIVHVEGHDVTMQGTRGLV

SEQ ID NO: 895131 - protein, 386 aa, Homo sapiens
MEDCLAHLGEKVSQELKEPLHKALQMLLSQPVTYQAFRECTLETTVHASGWNKILVPLVLLRQMLLELTRRGQEPLSALLQFGVTYLEDYSAEYIIQQGGWGTVFSLESEEEEYPGITAEDSNDIYILPSDNSGQVSPPESPTVTTSWQSESLPVSLSASQSWHTESLPVSLGPESWQQIAMDPEEVKSLDSNGAGEKSENNSSNSDIVHVEKEEVPEGMEEAAVASVVLPARELQEALPEAPAPLLPHITATSLLGTREPDTEVITVEKSSPATSLFVELDEEEVKAATTEPTEVEEVVPALEPTETLLSEKEINAREESLVEELSPASEKKPVPPSEGKSRLSPAGEMKPMPLSEGKSILLFGGAAAVAILAVAIGVALALRKK

SEQ ID NO: 895132 - protein, 340 aa, Homo sapiens
MPNNATAMLSKKSPIIPECSTNVQTAAGGSNSSQYNSNLTIRLSVSWKGQSKSTVGTVFSLESEEEEYPGITAEDSNDIYILPSDNSGQVSPPESPTVTTSWQSESLPVSLSASQSWHTESLPVSLGPESWQQIAMDPEEVKSLDSNGAGEKSENNSSNSDIVHVEKEEVPEGMEEAAVASVVLPARELQEALPEAPAPLLPHITATSLLGTREPDTEVITVEKSSPATSLFVELDEEEVKAATTEPTEVEEVVPALEPTETLLSEKEINAREESLVEELSPASEKKPVPPSEGKSRLSPAGEMKPMPLSEGKSILLFGGAAAVAILAVAIGVALALRKK

SEQ ID NO: 895133 - protein, 323 aa, Homo sapiens; identical to SEQ ID NO: 895124

SEQ ID NO: 895134 - protein, 323 aa, Homo sapiens; identical to SEQ ID NO: 895124

SEQ ID NO: 895135 - protein, 485 aa, Homo sapiens; identical to SEQ ID NO: 895119

SEQ ID NO: 895136 - protein, 322 aa, Homo sapiens
MPNNATAMLSKKSPIIPECSTNVQTAAGGSNSSQYNSNLTIRLSVSWKGQSKSTVGTVFSLESEEEEYPGITAEDSNDIYILPSDNSGQVSPPESPTVTTSWQSESLPVSLSASQSWHTESLPVSLGPESWQQIAMDPEEVSDIVHVEKEEVPEGMEEAAVASVVLPARELQEALPEAPAPLLPHITATSLLGTREPDTEVITVEKSSPATSLFVELDEEEVKAATTEPTEVEEVVPALEPTETLLSEKEINAREESLVEELSPASEKKPVPPSEGKSRLSPAGEMKPMPLSEGKSILLFGGAAAVAILAVAIGVALALRKK

SEQ ID NO: 895137 - protein, 201 aa, Homo sapiens; identical to SEQ ID NO: 895117

SEQ ID NO: 895138 - protein, 168 aa, Homo sapiens; identical to SEQ ID NO: 895129

SEQ ID NO: 895139 - protein, 68 aa, Homo sapiens
MSSGASASALQRLVEQLKLEAGVERIKVSQAAAELQQYCMQNACKDALLVGVPAGSNPFREPRSCALL

SEQ ID NO: 895140 - protein, 68 aa, Homo sapiens; identical to SEQ ID NO: 895139

SEQ ID NO: 895141 - protein, 161 aa, Homo sapiens
AEPPARLGMGAPLLSPGWGAGAAGRRWWMLLAPLLPALLLVRPAGALVEGLYCGTRDCYEVLGVSRSAGKAEIARAYRQLARRYHPDRYRPQPGDEGPGRTPQSAEEAFLLVATAYETLKVSQAAAELQQYCMQNACKDALLVGVPAGSNPFREPRSCALL

SEQ ID NO: 895142 - protein, 68 aa, Homo sapiens; identical to SEQ ID NO: 895139

SEQ ID NO: 895143 - protein, 143 aa, Homo sapiens
AEPPARLGMGAPLLSPGWGAGAAGRRWWMLLAPLLPALLLVRPAGALVEGLYCGTRDCYEVLGVSRSAGKAEIARAYRQLARRYHPDRYRPQPGDEGPGRTPQSAEEAFLLVATAYETLKSSCICPRGLGVEWTPAEAPQLFL

SEQ ID NO: 895144 - protein, 143 aa, Homo sapiens; identical to SEQ ID NO: 895143

SEQ ID NO: 895145 - protein, 68 aa, Homo sapiens; identical to SEQ ID NO: 895139

SEQ ID NO: 895146 - protein, 68 aa, Homo sapiens; identical to SEQ ID NO: 895139

SEQ ID NO: 895147 - protein, 249 aa, Homo sapiens
RGGGGAWARRAPAGSLQVLGPGTLPGDTAMAGLSRGSARALLAALLASTLLALLVSPARGRGGRDHGDWDEASRLPPLPPREDAARVARFVTHVSDWGALATISTLEAVRGRPFADVLSLSDGPPGAGSGVPYFYLSPLQLSVSNLQENPYATLTMTLAQTNFCKKHGFDPQSPLCVHIMLSGTVTKVNETEMDIAKHSLFIRHPEMKTWPSSHNWFFAKLNITNIWVLDYFGGPKIVTPEEYYNVTVQ

SEQ ID NO: 895148 - protein, 249 aa, Homo sapiens; identical to SEQ ID NO: 895147

SEQ ID NO: 895149 - protein, 249 aa, Homo sapiens; identical to SEQ ID NO: 895147

SEQ ID NO: 895150 - protein, 242 aa, Homo sapiens
RGGGGAWARRAPAGSLQVLGPGTLPGDTAMAGLSRGSARALLAALLASTLLALLVSPARGRGGRDHGDWDEASRLPPLPPREDAARVARFVTHVSDWGALATISTLEAVRGRPFADVLSLSDGPPGAGSGVPYFYLSPLQLSVSNLQENPYATLTMTLAQTNFCKKHGFDPQSPLCVHIMLSGTVTKVKQTVVNLATLMKFLKVAHTHLKGLMFLWKASQNISQFSVTCWFVCLLVYLLVYQ

SEQ ID NO: 895151 - protein, 284 aa, Homo sapiens
RGGGGAWARRAPAGSLQVLGPGTLPGDTAMAGLSRGSARALLAALLASTLLALLVSPARGRGGRDHGDWDEASRLPPLPPREDAARVARFVTHVSDWGALATISTLEAVRGRPFADVLSLSDGPPGAGSGVPYFYLSPLQLSVSNLQENPYATLTMTLAQTNFCKKHGFDPQSPLCVHIMLSGTVTKVNETEMDIAKHSLFIRHPEMKTWPSSHNWFFAKLNITNIWVLDYFGGPKIVTPEEYYNVTVHWKTSCGDHLVQLLHCIAEDTQAQRGEVIWSKSHSK

SEQ ID NO: 895152 - protein, 227 aa, Homo sapiens
MAGLSRGSARALLAALLASTLLALLVSPARGRGGRDHGDWDEASRLPPLPPREDAARVARFVTHVSDWGALATISTLEAVRGRPFADVLSLSDGPPGAGSGVPYFYLSPLQLSVSNLQENPYATLTMTLAQTNFCKKHGFDPQSPLCVHIMLSGTVTKVNETEMDIAKHSLFIRHPEMKTWPSSHNWFFAKLNITNIWVLDYFGGPKIVTPEEYYNVTVQSTYTSFT

SEQ ID NO: 895153 - protein, 249 aa, Homo sapiens; identical to SEQ ID NO: 895147

SEQ ID NO: 895154 - protein, 249 aa, Homo sapiens; identical to SEQ ID NO: 895147

SEQ ID NO: 895155 - protein, 249 aa, Homo sapiens; identical to SEQ ID NO: 895147

SEQ ID NO: 895156 - protein, 313 aa, Homo sapiens
RGGGGAWARRAPAGSLQVLGPGTLPGDTAMAGLSRGSARALLAALLASTLLALLVSPARGRGGRDHGDWDEASRLPPLPPREDAARVARFVTHVSDWGALATISTLEAVRGRPFADVLSLSDGPPGAGSGVPYFYLSPLQLSVSNLQENPYATLTMTLAQTNFCKKHGFDPQSPLCVHIMLSGTVTKVNETEMDIAKHSLFIRHPEMKTWPSSHNWFFAKLNITNIWVLDYFGGPKIVTPEEYYNVTVHIFLNSISVRNGILRWPPRLTRHGTIFVIVRRTCEYDELSLLCFCGFMWQRESVLGGPDLIRHIL

SEQ ID NO: 895157 - protein, 103 aa, Homo sapiens [sequence omitted]

SEQ ID NO: 895158 - protein, 1540 aa, Homo sapiens
GVCSGPVIVHVPGGRPLRAAVPTHSWRVSSKLSHISRLELVESLDSDEVDLKSGYMSDSDLMGKTMTEDDDITTGWDESSSISSGLSDASDNLSSEEFNASSSLNSLPSTPTASRRNSTIVLRTDSEKRSLAESGLSWFSESEEKAPKKLEYDSGSLKMEPGTSKWRRERPESCDDSSKGGELKKPISLGHPGSLKKGKTPPVAVTSPITHTAQSALKVAGKPEGKATDKGKLAVKNTGLQRSSSDAGRDRLSDAKKPPSGIARPSTSGSFGYKKPPPATGTATVMQTGGSATLSKIQKSSGIPVKPVNGRKTSLDVSNSAEPGFLAPGARSNIQYRSLPRPAKSSSMSVTGGRGGPRPVSSSIDPSLLSTKQGGLTPSRLKEPTKVASGRTTPAPVNQTDREKEKAKAKAVALDSDNISLKSIGSPESTPKNQASHPTATKLAELPPTPLRATAKSFVKPPSLANLDKVNSNSLDLPSSSDTTHASKVPDLHATSSASGGPLPSCFTPSPAPILNINSASFSQGLELMSGFSVPKETRMYPKLSGLHRSMESLQMPMSLPSAFPSSTPVPTPPAPPAAPTEEETEELTWSGSPRAGQLDSNQRDRNTLPKKGLRYQLQSQEETKERRHSHTIGGLPESDDQSELPSPPALPMSLSAKGQLTNIVSPTAATTPRITRSNSIPTHEAAFELYSGSQMGSTLSLAERPKGMIRSGSFRDPTDDVHGSVLSLASSASSTYSSAEERMQSEQIRKLRRELESSQEKVATLTSQLSANANLVAAFEQSLVNMTSRLRHLAETAEEKDTELLDLRETIDFLKKKNSEAQAVIQGALNASETTPKELRIKRQNSSDSISSLNSITSHSSIGSSKDADAKKKKKKSWLRSSFNKAFSIKKGPKSASSYSDIEEIATPDSSAPSSPKLQHGSTETASPSIKSSTSSSVGTDVTEGPAHPAPHTRLFHANEEEEPEKKEVSELRSELWEKEMKLTDIRLEALNSAHQLDQLRETMHNMQLEVDLLKAENDRLKVAPGPSSGSTPGQVPGSSALSSPRRSLGLALTHSFGPSLADTDLSPMDGISTCGPKEEVTLRVVVRMPPQHIIKGDLKQQEFFLGCSKVSGKVDWKMLDEAVFQVFKDYISKMDPASTLGLSTESIHGYSISHVKRVLDAEPPEMPPCRRGVNNISVSLKGLKEKCVDSLVFETLIPKPMMQHYISLLLKHRRLVLSGPSGTGKTYLTNRLAEYLVERSGREVTEGIVSTFNMHQQSCKDLQLYLSNLANQIDRETGIGDVPLVILLDDLSEAGSISELVNGALTCKYHKCPYIIGTTNQPVKMTPNHGLHLSFRMLTFSNNVEPANGFLVRYLRRKLVESDSDINANKEELLRVLDWVPKLWYHLHTFLEKHSTSDFLIGPCFFLSCPIGIEDFRTWFIDLWNNSIIPYLQEGAKDGIKVHGQKAAWEDPVEWVRDTLPWPSAQQDQSKLYHLPPPTVGPHSIASPPEDRTVKDSTPSSLDSDPLMAMLLKLQEAANYIESPDRETILDPNLQATL

SEQ ID NO: 895159 - protein, 1475 aa, Homo sapiens
GVCSGPVIVHVPGGRPLRAAVPTHSWRVSSKLSHISRLELVESLDSDEVDLKSGYMSDSDLMGKTMTEDDDITTGWDESSSISSGLSDASDNLSSEEFNASSSLNSLPSTPTASRRNSTIVLRTDSEKRSLAESGLSWFSESEEKAPKKLEYDSGSLKMEPGTSKWRRERPESCDDSSKGGELKKPISLGHPGSLKKGKTPPVAVTSPITHTAQSALKVAGKPEGKATDKGKLAVKNTGLQRSSSDAGRDRLSDAKKPPSGIARPSTSGSFGYKKPPPATGTATVMQTGGSATLSKIQKSSGIPVKPVNGRKTSLDVSNSAEPGFLAPGARSNIQYRSLPRPAKSSSMSVTGGRGGPRPVSSSIDPSLLSTKQGGLTPSRLKEPTKVASGRTTPAPVNQTDREKEKAKAKAVALDSDNISLKSIGSPESTPKNQASHPTATKLAELPPTPLRATAKSFVKPPSLANLDKVNSNSLDLPSSSDTTHASKVPDLHATSSASGGPLPSCFTPSPAPILNINSASFSQGLELMSGFSVPKETRMYPKLSGLHRSMESLQMPMSLPSAFPSSTPVPTPPAPPAAPTEEETEELTWSGSPRAGQLDSNQRDRNTLPKKGLRYQLQSQEETKERRHSHTIGGLPESDDQSELPSPPALPMSLSAKGQLTNIVHGSVLSLASSASSTYSSQIRKLRRELESSQEKVATLTSQLSANANLVAAFEQSLVNMTSRLRHLAETAEEKDTELLDLRETIDFLKKKNSEAQAVIQGALNASETTPKELRIKRQNSSDSISSLNSITSHSSIGSSKDADAKKKKKKSWLRSSFNKAFSIKKGPKSASSYSDIEEIATPDSSAPSSPKLQHGSTETASPSIKSSTSSSVGTDVTEGPAHPAPHTRLFHANEEEEPEKKEVSELRSELWEKEMKLTDIRLEALNSAHQLDQLRETMHNMQLEVDLLKAENDRLKVAPGPSSGSTPGQVPGSSALSSPRRSLGLALTHSFGPSLADTDLSPMDGISTCGPKEEVTLRVVVRMPPQHIIKGDLKQQEFFLGCSKVSGKVDWKMLDEAVFQVFKDYISKMDPASTLGLSTESIHGYSISHVKRVLDAEPPEMPPCRRGVNNISVSLKGLKEKCVDSLVFETLIPKPMMQHYISLLLKHRRLVLSGPSGTGKTYLTNRLAEYLVERSGREVTEGIVSTFNMHQQSCKDLQLYLSNLANQIDRETGIGDVPLVILLDDLSEAGSISELVNGALTCKYHKCPYIIGTTNQPVKMTPNHGLHLSFRMLTFSNNVEPANGFLVRYLRRKLVESDSDINANKEELLRVLDWVPKLWYHLHTFLEKHSTSDFLIGPCFFLSCPIGIEDFRTWFIDLWNNSIIPYLQEGAKDGIKVHGQKAAWEDPVEWVRDTLPWPSAQQDQSKLYHLPPPTVGPHSIASPPEDRTVKDSTPSSLDSDPLMAMLLKLQEAANYIESPDRETILDPNLQATL

SEQ ID NO: 895160 - protein, 1412 aa, Homo sapiens
MLRTDSEKRSLAESGLSWFSESEEKAPKKLEYDSGSLKMEPGTSKWRRERPESCDDSSKGGELKKPISLGHPGSLKKGKTPPVAVTSPITHTAQSALKVAGKPEGKATDKGKLAVKNTGLQRSSSDAGRDRLSDAKKPPSGIARPSTSGSFGYKKPPPATGTATVMQTGGSATLSKIQKSSGIPVKPVNGRKTSLDVSNSAEPGFLAPGARSNIQYRSLPRPAKSSSMSVTGGRGGPRPVSSSIDPSLLSTKQGGLTPSRLKEPTKVASGRTTPAPVNQTDREKEKAKAKAVALDSDNISLKSIGSPESTPKNQASHPTATKLAELPPTPLRATAKSFVKPPSLANLDKVNSNSLDLPSSSDTTHASKVPDLHATSSASGGPLPSCFTPSPAPILNINSASFSQGLELMSGFSVPKETRMYPKLSGLHRSMESLQMPMSLPSAFPSSTPVPTPPAPPAAPTEEETEELTWSGSPRAGQLDSNQRDRNTLPKKGLRYQLQSQEETKERRHSHTIGGLPESDDQSELPSPPALPMSLSAKGQLTNIVSPTAATTPRITRSNSIPTHEAAFELYSGSQMGSTLSLAERPKGMIRSGSFRDPTDDVHGSVLSLASSASSTYSSQIRKLRRELESSQEKVATLTSQLSANANLVAAFEQSLVNMTSRLRHLAETAEEKDTELLDLRETIDFLKKKNSEAQAVIQGALNASETTPKELRIKRQNSSDSISSLNSITSHSSIGSSKDADAKKKKKKSWLRSSFNKAFSIKKGPKSASSYSDIEEIATPDSSAPSSPKLQHGSTETASPSIKSSTSSSVGTDVTEGPAHPAPHTRLFHANEEEEPEKKEVSELRSELWEKEMKLTDIRLEALNSAHQLDQLRETMHNMQLEVDLLKAENDRLKVAPGPSSGSTPGQVPGSSALSSPRRSLGLALTHSFGPSLADTDLSPMDGISTCGPKEEVTLRVVVRMPPQHIIKGDLKQQEFFLGCSKVSGKVDWKMLDEAVFQVFKDYISKMDPASTLGLSTESIHGYSISHVKRVLDAEPPEMPPCRRGVNNISVSLKGLKEKCVDSLVFETLIPKPMMQHYISLLLKHRRLVLSGPSGTGKTYLTNRLAEYLVERSGREVTEGIVSTFNMHQQSCKDLQLYLSNLANQIDRETGIGDVPLVILLDDLSEAGSISELVNGALTCKYHKCPYIIGTTNQPVKMTPNHGLHLSFRMLTFSNNVEPANGFLVRYLRRKLVESDSDINANKEELLRVLDWVPKLWYHLHTFLEKHSTSDFLIGPCFFLSCPIGIEDFRTWFIDLWNNSIIPYLQEGAKDGIKVHGQKAAWEDPVEWVRDTLPWPSAQQDQSKLYHLPPPTVGPHSIASPPEDRTVKDSTPSSLDSDPLMAMLLKLQEAANYIESPDRETILDPNLQATL

SEQ ID NO: 895161 - protein, 1412 aa, Homo sapiens; identical to SEQ ID NO: 895160

SEQ ID NO: 895162 - protein, 1186 aa, Homo sapiens
MLRTDSEKRSLAESGLSWFSESEEKAPKKLEYDSGSLKMEPGTSKWRRERPESCDDSSKGGELKKPISLGHPGSLKKGKTPPVAVTSPITHTAQSALKVAGKPEGKATDKGKLAVKNTGLQRSSSDAGRDRLSDAKKPPSGIARPSTSGSFGYKKPPPATGTATVMQTGGSATLSKIQKSSGIPVKPVNGRKTSLDVSNSAEPGFLAPGARSNIQYRSLPRPAKSSSMSVTGGRGGPRPVSSSIDPSLLSTKQGGLTPSRLKEPTKVASGRTTPAPVNQTDREKEKAKAKAVALDSDNISLKSIGSPESTPKNQASHPTATKLAELPPTPLRATAKSFVKPPSLANLDKVNSNSLDLPSSSDTTHASKVPDLHATSSASGGPLPSCFTPSPAPILNINSASFSQGLELMSGFSVPKETRMYPKLSGLHRSMESLQMPMSLPSAFPSSTPVPTPPAPPAAPTEEETEELTWSGSPRAGQLDSNQRDRNTLPKKGLRYQLQSQEETKERRHSHTIGGLPESDDQSELPSPPALPMSLSAKGQLTNIVSPTAATTPRITRSNSIPTHEAAFELYSGSQMGSTLSLAERPKGMIRSGSFRDPTDDVHGSVLSLASSASSTYSSQIRKLRRELESSQEKVATLTSQLSANANLVAAFEQSLVNMTSRLRHLAETAEEKDTELLDLRETIDFLKKKNSEAQAVIQGALNASETTPKELRIKRQNSSDSISSLNSITSHSSIGSSKDADAKKKKKKSWLRSSFNKAFSIKKGPKSASSYSDIEEIATPDSSAPSSPKLQHGSTETASPSIKSSTSSSVGTDVTEGPAHPAPHTRLFHANEEEEPEKKEVSELRSELWEKEMKLTDIRLEALNSAHQLDQLRETMHNMQLEVDLLKAENDRLKVAPGPSSGSTPGQVPGSSALSSPRRSLGLALTHSFGPSLADTDLSPMDGISTCGPKEEVTLRVVVRMPPQHIIKGDLKQQEFFLGCSKVSGKVDWKMLDEAVFQVFKDYISKMDPASTLGLSTESIHGYSISHVKRVLDAEPPEMPPCRRGVNNISVSLKGLKEKCVDSLVFETLIPKPMMQHYISLLLKHRRLVLSGPSGTGKTYLTNRLAEYLVERSGREVTEGIVSTFNMHQQSCKDLQLYLSNLANQIDRETGIGDVPLVILLDDLSEAGSISELVNGALTCKYHKW

SEQ ID NO: 895163 - protein, 856 aa, Homo sapiens
GVCSGPVIVHVPGGRPLRAAVPTHSWRVSSKLSHISRLELVESLDSDEVDLKSGYMSDSDLMGKTMTEDDDITTGWDESSSISSGLSDASDNLSSEEFNASSSLNSLPSTPTASRRNSTIVLRTDSEKRSLAESGLSWFSESEEKAPKKLEYDSGSLKMEPGTSKWRRERPESCDDSSKGGELKKPISLGHPGSLKKGKTPPVAVTSPITHTAQSALKVAGKPEGKATDKGKLAVKNTGLQRSSSDAGRDRLSDAKKPPSGIARPSTSGSFGYKKPPPATGTATVMQTGGSATLSKIQKSSGIPVKPVNGRKTSLDVSNSAEPGFLAPGARSNIQYRSLPRPAKSSSMSVTGGRGGPRPVSSSIDPSLLSTKQGGLTPSRLKEPTKVASGRTTPAPVNQTDREKEKAKAKAVALDSDNISLKSIGSPESTPKNQASHPTATKLAELPPTPLRATAKSFVKPPSLANLDKVNSNSLDLPSSSDTTHASKVPDLHATSSASGGPLPSCFTPSPAPILNINSASFSQGLELMSGFSVPKETRMYPKLSGLHRSMESLQMPMSLPSAFPSSTPVPTPPAPPAAPTEEETEELTWSGSPRAGQLDSNQRDRNTLPKKGLRYQLQSQEETKERRHSHTIGGLPESDDQSELPSPPALPMSLSAKGQLTNIVSPTAATTPRITRSNSIPTHEAAFELYSGSQMGSTLSLAERPKGMIRSGSFRDPTDDVHGSVLSLASSASSTYSSQIRKLRRELESSQEKVATLTSQLSANANLVAAFEQSLVNMTSRLRHLAETAEEKDTELLDLRETIDFLKKKNSEAQAVIQGALNASETTPKGRTSSHRLRGNREQESKSITDFYLGP

SEQ ID NO: 895164 - protein, 471 aa, Homo sapiens [sequence omitted]

SEQ ID NO: 895165 - protein, 1418 aa, Homo sapiens
MLRTDSEKRSLAESGLSWFSESEEKAPKKLEYDSGSLKMEPGTSKWRRERPESCDDSSKGGELKKPISLGHPGSLKKGKTPPVAVTSPITHTAQSALKVAGKPEGKATDKGKLAVKNTGLQRSSSDAGRDRLSDAKKPPSGIARPSTSGSFGYKKPPPATGTATVMQTGGSATLSKIQKSSGIPVKPVNGRKTSLDVSNSAEPGFLAPGARSNIQYRSLPRPAKSSSMSVTGGRGGPRPVSSSIDPSLLSTKQGGLTPSRLKEPTKVASGRTTPAPVNQTDREKEKAKAKAVALDSDNISLKSIGSPESTPKNQASHPTATKLAELPPTPLRATAKSFVKPPSLANLDKVNSNSLDLPSSSDTTHASKVPDLHATSSASGGPLPSCFTPSPAPILNINSASFSQGLELMSGFSVPKETRMYPKLSGLHRSMESLQMPMSLPSAFPSSTPVPTPPAPPAAPTEEETEELTWSGSPRAGQLDSNQRDRNTLPKKGLRYQLQSQEETKERRHSHTIGGLPESDDQSELPSPPALPMSLSAKGQLTNIVSPTAATTPRITRSNSIPTHEAAFELYSGSQMGSTLSLAERPKGMIRSGSFRDPTDDVHGSVLSLASSASSTYSSQIRKLRRELESSQEKVATLTSQLSANANLVAAFEQSLVNMTSRLRHLAETAEEKDTELLDLRETIDFLKKKNSEAQAVIQGALNASETTPKELRIKRQNSSDSISSLNSITSHSSIGSSKDADAKKKKKKSWLRSSFNKAFSIKKGPKSASSYSDIEEIATPDSSAPSSPKLQHGSTETASPSIKSSTSSSVGTDVTEGPAHPAPHTRLFHANEEEEPEKKEVSELRSELWEKEMKLTDIRLEALNSAHQLDQLRETMHNMQLEVDLLKAENDRLKVAPGPSSGSTPGQVPGSSALSSPRRSLGLALTHSFGPSLADTDLSPMDGISTCGPKEEVTLRVVVRMPPQHIIKGDLKQQEFFLGCSKVSGKVDWKMLDEAVFQVFKDYISKMDPASTLGLSTESIHGYSISHVKRVLDAEPPEMPPCRRGVNNISVSLKGLKEKCVDSLVFETLIPKPMMQHYISLLLKHRRLVLSGPSGTGKTYLTNRLAEYLVERSGREVTEGIVSTFNMHQQSCKDLQLYLSNLANQIDRETGIGDVPLVILLDDLSEAGSISELVNGALTCKYHKCPYIIGTTNQPVKMTPNHGLHLSFRMLTFSNNVEPANGFLVRYLRRKLVESDSDINANKEELLRVLDWVPKLWYHLHTFLEKHSTSDFLIGPCFFLSCPIGIEDFRTWFIDLWNNSIIPYLQEGAKDGIKVHGQKAAWEDPVEWVRDTLPWPSAQQDQSKLYHLPPPTVGPHSIASPPEDRTVKDSTPSSLDSDPLMAMLLKLQEAANYIESPDRETILDPNLQAGPESTGRE

SEQ ID NO: 895166 - protein, 132 aa, Homo sapiens
IEDFRTWFIDLEIGNDRVVPQVNEPGPEGAKDGIKVHGQKAAWEDPVEWVRDTLPWPSAQQDQSKLYHLPPPTVGPHSIASPPEDRTVKDSTPSSLDSDPLMAMLLKLQEAANYIESPDRETILDPNLQATL

SEQ ID NO: 895167 - protein, 75 aa, Homo sapiens
GVCSGPVIVHVPGGRPLRAAVPTHSWRVSSKLSHISRLELVESLDSDEVDLKSGYMSDSDLMGKTMTEDDDITTG

SEQ ID NO: 895168 - protein, 163 aa, Homo sapiens
LEETMSSLRGSQVTHSSLEMTCYDSDDANPRSVSSLSNRSSPLSWRYGQSSPRLQAGDAPSVGGSCRSEGTPAWYMHGERAHYSHTMPMRSPSKLSHISRLELVESLDSDEVDLKSGYMSDSDLMGKTMTEDDDITTGPRVPEKEDSAECPGSPAEPGRDHVL

SEQ ID NO: 895169 - protein, 1412 aa, Homo sapiens; identical to SEQ ID NO: 895160

SEQ ID NO: 895170 - protein, 1507 aa, Homo sapiens
GCQARAVLGGAGCPPGEWPPEPGKMLHLPLPRSGRTVNFPRSWDESSSISSGLSDASDNLSSEEFNASSSLNSLPSTPTASRRNSTIVLRTDSEKRSLAESGLSWFSESEEKAPKKLEYDSGSLKMEPGTSKWRRERPESCDDSSKGGELKKPISLGHPGSLKKGKTPPVAVTSPITHTAQSALKVAGKPEGKATDKGKLAVKNTGLQRSSSDAGRDRLSDAKKPPSGIARPSTSGSFGYKKPPPATGTATVMQTGGSATLSKIQKSSGIPVKPVNGRKTSLDVSNSAEPGFLAPGARSNIQYRSLPRPAKSSSMSVTGGRGGPRPVSSSIDPSLLSTKQGGLTPSRLKEPTKVASGRTTPAPVNQTDREKEKAKAKAVALDSDNISLKSIGSPESTPKNQASHPTATKLAELPPTPLRATAKSFVKPPSLANLDKVNSNSLDLPSSSDTTHASKVPDLHATSSASGGPLPSCFTPSPAPILNINSASFSQGLELMSGFSVPKETRMYPKLSGLHRSMESLQMPMSLPSAFPSSTPVPTPPAPPAAPTEEETEELTWSGSPRAGQLDSNQRDRNTLPKKGLRYQLQSQEETKERRHSHTIGGLPESDDQSELPSPPALPMSLSAKGQLTNIVSPTAATTPRITRSNSIPTHEAAFELYSGSQMGSTLSLAERPKGMIRSGSFRDPTDDVHGSVLSLASSASSTYSSAEERMQSEQIRKLRRELESSQEKVATLTSQLSANANLVAAFEQSLVNMTSRLRHLAETAEEKDTELLDLRETIDFLKKKNSEAQAVIQGALNASETTPKELRIKRQNSSDSISSLNSITSHSSIGSSKDADAKKKKKKSWLRSSFNKAFSIKKGPKSASSYSDIEEIATPDSSAPSSPKLQHGSTETASPSIKSSTSSSVGTDVTEGPAHPAPHTRLFHANEEEEPEKKEVSELRSELWEKEMKLTDIRLEALNSAHQLDQLRETMHNMQLEVDLLKAENDRLKVAPGPSSGSTPGQVPGSSALSSPRRSLGLALTHSFGPSLADTDLSPMDGISTCGPKEEVTLRVVVRMPPQHIIKGDLKQQEFFLGCSKVSGKVDWKMLDEAVFQVFKDYISKMDPASTLGLSTESIHGYSISHVKRVLDAEPPEMPPCRRGVNNISVSLKGLKEKCVDSLVFETLIPKPMMQHYISLLLKHRRLVLSGPSGTGKTYLTNRLAEYLVERSGREVTEGIVSTFNMHQQSCKDLQLYLSNLANQIDRETGIGDVPLVILLDDLSEAGSISELVNGALTCKYHKCPYIIGTTNQPVKMTPNHGLHLSFRMLTFSNNVEPANGFLVRYLRRKLVESDSDINANKEELLRVLDWVPKLWYHLHTFLEKHSTSDFLIGPCFFLSCPIGIEDFRTWFIDLWNNSIIPYLQEGAKDGIKVHGQKAAWEDPVEWVRDTLPWPSAQQDQSKLYHLPPPTVGPHSIASPPEDRTVKDSTPSSLDSDPLMAMLLKLQEAANYIESPDRETILDPNLQATL

SEQ ID NO: 895171 - protein, 845 aa, Homo sapiens
MGSTLSLAERPKGMIRSGSFRDPTDDVHGSVLSLASSASSTYSSAEERMQSEQIRKLRRELESSQEKVATLTSQLSANANLVAAFEQSLVNMTSRLRHLAETAEEKDTELLDLRETIDFLKKKNSEAQAVIQGALNASETTPKELRIKRQNSSDSISSLNSITSHSSIGSSKDADAKKKKKKSWLRSSFNKAFSIKKGPKSASSYSDIEEIATPDSSAPSSPKLQHGSTETASPSIKSSTSSSVGTDVTEGPAHPAPHTRLFHANEEEEPEKKEVSELRSELWEKEMKLTDIRLEALNSAHQLDQLRETMHNMQLEVDLLKAENDRLKVAPGPSSGSTPGQVPGSSALSSPRRSLGLALTHSFGPSLADTDLSPMDGISTCGPKEEVTLRVVVRMPPQHIIKGDLKQQEFFLGCSKVSGKVDWKMLDEAVFQVFKDYISKMDPASTLGLSTESIHGYSISHVKRVLDAEPPEMPPCRRGVNNISVSLKGLKEKCVDSLVFETLIPKPMMQHYISLLLKHRRLVLSGPSGTGKTYLTNRLAEYLVERSGREVTEGIVSTFNMHQQSCKDLQLYLSNLANQIDRETGIGDVPLVILLDDLSEAGSISELVNGALTCKYHKCPYIIGTTNQPVKMTPNHGLHLSFRMLTFSNNVEPANGFLVRYLRRKLVESDSDINANKEELLRVLDWVPKLWYHLHTFLEKHSTSDFLIGPCFFLSCPIGIEDFRTWFIDLWNNSIIPYLQEGAKDGIKVHGQKAAWEDPVEWVRDTLPWPSAQQDQSKLYHLPPPTVGPHSIASPPEDRTVKDSTPSSLDSDPLMAMLLKLQEAANYIESPDRETILDPNLQATL

SEQ ID NO: 895172 - protein, 1271 aa, Homo sapiens
MEPGTSKWRRERPESCDDSSKGGELKKPISLGHPGSLKKGKTPPVAVTSPITHTAQSALKVAGKPEGKATDKGKLAVKNTGLQRSSSDAGRDRLSDAKKPPSGIARPSTSGSFGYKKPPPATGTATVMQTGGSATLSKIQKSSGIPVKPVNGRKTSLDVSNSAEPGFLAPGARSNIQYRSLPRPAKSSSMSVTGGRGGPRPVSSSIDPSLLSTKQGGLTPSRLKEPTKVASGRTTPAPVNQTDREKEKAKAKAVALDSDNISLKSIGSPESTPKNQASHPTATKLAELPPTPLRATAKSFVKPPSLANLDKVNSNSLDLPSSSDTTHASKVPDLHATSSASGGPLPSCFTPSPAPILNINSASFSQGLELMSGFSVPKETRMYPKLSGLHRSMESLQMPMSLPSAFPSSTPVPTPPAPPAAPTEEETEELTWSGSPRAGQLDSNQRDRNTLPKKGLRYQLQSQEETKERRHSHTIGGLPESDDQSELPSPPALPMSLSAKGQLTNIVSPTAATTPRITRSNSIPTHEAAFELYSGSQMGSTLSLAERPKGMIRSGSFRDPTDDVHGSVLSLASSASSTYSSQIRKLRRELESSQEKVATLTSQLSANANLVAAFEQSLVNMTSRLRHLAETAEEKDTELLDLRETIDFLKKKNSEAQAVIQGALNASETTPKELRIKRQNSSDSISSLNSITSHSSIGSSKDADAKKKKKKSWLRSSFNKAFSIKKGPKSASSYSDIEEIATPDSSAPSSPKLQHGSTETASPSIKSSTSSSVGTDVTEGPAHPAPHTRLFHANEEEEPEKKEVSELRSELWEKEMKLTDIRLEALNSAHQLDQLRETMHNMQLEVDLLKAENDRLKVAPGPSSGSTPGQVPGSSALSSPRRSLGLALTHSFGPSLADTDLSPMDGISTCGPKEEVTLRVVVRMPPQHIIKGDLKQQEFFLGCSKVSGKVDWKMLDEAVFQVFKDYISKMDPASTLGLSTESIHGYSISHVKRVLDAEPPEMPPCRRGVNNISVSLKGLKEKCVDSLVFETLIPKPMMQHYISLLLKHRRLVLSGPSGTGKTYLTNRLAEYLVERSGREVTEGIVSTFNMHQQSCKDLQLYLSNLANQIDRETGIGDVPLVILLDDLSEAGSISELVNGALTCKYHKCPYIIGTTNQPVKMTPNHGLHLSFRMLTFSNNVEPANGFLVRYLRRKLVESDSDINANKEELLRVLDWVPKLWYHLHTFLEKHSTSDFLIGTGVQLPPGVRRWLPFSTVPPGGMLPSLPGVFGM

SEQ ID NO: 895173 - protein, 1412 aa, Homo sapiens; identical to SEQ ID NO: 895160

SEQ ID NO: 895174 - protein, 1271 aa, Homo sapiens; identical to SEQ ID NO: 895172

SEQ ID NO: 895175 - protein, 780 aa, Homo sapiens
MLRTDSEKRSLAESGLSWFSESEEKAPKKLEYDSGSLKMEPGTSKWRRERPESCDDSSKGGELKKPISLGHPGSLKKGKTPPVAVTSPITHTAQSALKVAGKPEGKATDKGKLAVKNTGLQRSSSDAGRDRLSDAKKPPSGIARPSTSGSFGYKKPPPATGTATVMQTGGSATLSKIQKSSGIPVKPVNGRKTSLDVSNSAEPGFLAPGARSNIQYRSLPRPAKSSSMSVTGGRGGPRPVSSSIDPSLLSTKQGGLTPSRLKEPTKVASGRTTPAPVNQTDREKEKAKAKAVALDSDNISLKSIGSPESTPKNQASHPTATKLAELPPTPLRATAKSFVKPPSLANLDKVNSNSLDLPSSSDTTHASKVPDLHATSSASGGPLPSCFTPSPAPILNINSASFSQGLELMSGFSVPKETRMYPKLSGLHRSMESLQMPMSLPSAFPSSTPVPTPPAPPAAPTEEETEELTWSGSPRAGQLDSNQRDRNTLPKKGLRYQLQSQEETKERRHSHTIGGLPESDDQSELPSPPALPMSLSAKGQLTNIVSPTAATTPRITRSNSIPTHEAAFELYSGSQMGSTLSLAERPKGMIRSGSFRDPTDDVHGSVLSLASSASSTYSSQIRKLRRELESSQEKVATLTSQLSANANLVAAFEQSLVNMTSRLRHLAETAEEKDTELLDLRETIDFLKKKNSEAQAVIQGALNASETTPKELRIKRQNSSDSISSLNSITSHSSIGSSKDADAKKKKKKSWVGKGLGGGEVGRTVVDRLHLSIGIESFQD

SEQ ID NO: 895176 - protein, 512 aa, Homo sapiens
GVCSGPVIVHVPGGRPLRAAVPTHSWRVSSKLSHISRLELVESLDSDEVDLKSGYMSDSDLMGKTMTEDDDITTGWDESSSISSGLSDASDNLSSEEFNASSSLNSLPSTPTASRRNSTIVLRTDSEKRSLAESGLSWFSESEEKAPKKLEYDSGSLKMEPGTSKWRRERPESCDDSSKGGELKKPISLGHPGSLKKGKTPPVAVTSPITHTAQSALKVAGKPEGKATDKGKLAVKNTGLQRSSSDAGRDRLSDAKKPPSGIARPSTSGSFGYKKPPPATGTATVMQTGGSATLSKIQKSSGIPVKPVNGRKTSLDVSNSAEPGFLAPGARSNIQYRSLPRPAKSSSMSVTGGRGGPRPVSSSIDPSLLSTKQGGLTPSRLKEPTKVASGRTTPAPVNQTDREKEKAKAKAVALDSDNISLKSIGSPESTPKNQASHPTATKLAELPPTPLRATAKSFVKPPSLANLDKVNSNSLDLPSSSDTTHASKVPDLHATSSASGGPLPSCFTPSPD

SEQ ID NO: 895177 - protein, 1055 aa, Homo sapiens
MTVEQNVLQQSAAQKHQQTFLNQLREITGINDTQILQQALKDSNGNLELAVAFLTAKNAKTPQQEETTYYQTALPGNDRYISVGSQADTNVIDLTGDDKDDLQRAIALSLAESNRAFRETGITDEEQAISRVLEASIAENKACLKRTPTEVWRDSRNPYDRKRQDKAPVGLKNVGNTCWFSAVIQSLFNLLEFRRLVLNYKPPSNAQDLPRNQKEHRNLPFMRELRYLFALLVGTKRKYVDPSRAVEILKDAFKSNDSQQQDVSEFTHKLLDWLEDAFQMKAEEETDEEKPKNPMVELFYGRFLAVGVLEGKKFENTEMFGQYPLQVNGFKDLHECLEAAMIEGEIESLHSENSGKSGQEHWFTELPPVLTFELSRFEFNQALGRPEKIHNKLEFPQVLYLDRYMHRNREITRIKREEIKRLKDYLTVLQQRLERYLSYGSGPKRFPLVDVLQYALEFASSKPVCTSPVDDIDASSPPSGSIPSQTLPSTTEQQGALSSELPSTSPSSVAAISSRSVIHKPFTQSRIPPDLPMHPAPRHITEEELSVLESCLHRWRTEIENDTRDLQESISRIHRTIELMYSDKSMIQVPYRLHAVLVHEGQANAGHYWAYIFDHRESRWMKYNDIAVTKSSWEELVRDSFGGYRNASAYCLMYINDKAQFLIQEEFNKETGQPLVGIETLPPDLRDFVEEDNQRFEKELEEWDAQLAQKALQEKLLASQKLRESETSVTTAQAAGDPEYLEQPSRSDFSKHLKEETIQIITKASHEHEDKSPETVLQSAIKLEYARLVKLAQEDTPPETDYRLHHVVVYFIQNQAPKKIIEKTLLEQFGDRNLSFDERCHNIMKVAQAKLEMIKPEEVNLEEYEEWHQDYRKFRETTMYLIIGLENFQRESYIDSLLFLICAYQNNKELLSKGLYRGHDEELISHYRRECLLKLNEQAAELFESGEDREVNNGLIIMNEFIVPFLPLLLVDEMEEKDILAVEDMRNRWCSYLGQEMEPHLQEKLTDFLPKLLDCSMEIKSFHEPPKLPSYSTHELCERFARIMLSLSRTPADGR

SEQ ID NO: 895178 - protein, 1055 aa, Homo sapiens; identical to SEQ ID NO: 895177

SEQ ID NO: 895179 - protein, 450 aa, Homo sapiens
MTVEQNVLQQSAAQKHQQTFLNQLREITGINDTQILQQALKDSNGNLELAVAFLTAKNAKTPQQEETTYYQTALPGNDRYISVGSQADTNVIDLTGDDKDDLQRAIALSLAESNRAFRETGITDEEQAISRVLEASIAENKACLKRTPTEVWRDSRNPYDRKRQDKAPVGLKNVGNTCWFSAVIQSLFNLLEFRRLVLNYKPPSNAQDLPRNQKEHRNLPFMRELRYLFALLVGTKRKYVDPSRAVEILKDAFKSNDSQQEWHQDYRKFRETTMYLIIGLENFQRESYIDSLLFLICAYQNNKELLSKGLYRGHDEELISHYRRECLLKLNEQAAELFESGEDREVNNGLIIMNEFIVPFLPLLLVDEMEEKDILAVEDMRNRWCSYLGQEMEPHLQEKLTDFLPKLLDCSMEIKSFHEPPKLPSYSTHELCERFARIMLSLSRTPADGR

SEQ ID NO: 895180 - protein, 343 aa, Homo sapiens
PRAVYAMQSVYVILRHGFQTQAAGDPEYLEQPSRSDFSKHLKEETIQIITKASHEHEDKSPETVLQSAIKLEYARLVKLAQEDTPPETDYRLHHVVVYFIQNQAPKKIIEKTLLEQFGDRNLSFDERCHNIMKVAQAKLEMIKPEEVNLEEYEEWHQDYRKFRETTMYLIIGLENFQRESYIDSLLFLICAYQNNKELLSKGLYRGHDEELISHYRRECLLKLNEQAAELFESGEDREVNNGLIIMNEFIVPFLPLLLVDEMEEKDILAVEDMRNRWCSYLGQEMEPHLQEKLTDFLPKLLDCSMEIKSFHEPPKLPSYSTHELCERFARIMLSLSRTPADGR

SEQ ID NO: 895181 - protein, 653 aa, Homo sapiens
MTVEQNVLQQSAAQKHQQTFLNQLREITGINDTQILQQALKDSNGNLELAVAFLTAKNAKTPQQEETTYYQTALPGNDRYISVGSQADTNVIDLTGDDKDDLQRAIALSLAESNRAFRETGITDEEQAISRVLEASIAENKACLKRTPTEVWRDSRNPYDRKRQDKAPVGLKNVGNTCWFSAVIQSLFNLLEFRRLVLNYKPPSNAQDLPRNQKEHRNLPFMRELRYLFALLVGTKRKYVDPSRAVEILKDAFKSNDSQQQDVSEFTHKLLDWLEDAFQMKAEEETDEEKPKNPMVELFYGRFLAVGVLEGKKFENTEMFGQYPLQVNGFKDLHECLEAAMIEGEIESLHSENSGKSGQEHWFTELPPVLTFELSRFEFNQALGRPEKIHNKLEFPQVLYLDRYMHRNREITRIKREEIKRLKDYLTVLQQRLERYLSYGSGPKRFPLVDVLQYALEFASSKPVCTSPVDDIDASSPPSGSIPSQTLPSTTEQQGALSSELPSTSPSSVAAISSRSVIHKPFTQSRIPPDLPMHPAPRHITEEELSVLESCLHRWRTEIENDTRDLQESISRIHRTIELMYSDKSMIQVPYRLHAVLVHEGQANAGHYWAYIFDHRESRWMKYNDIAVTKSSWEELVRELASISSPEKCNRFT

SEQ ID NO: 895182 - protein, 1087 aa, Homo sapiens
MTVEQNVLQQSAAQKHQQTFLNQLREITGINDTQILQQALKDSNGNLELAVAFLTAKNAKTPQQEETTYYQTALPGNDRYISVGSQADTNVIDLTGDDKDDLQRAIALSLAESNRAFRETGITDEEQAISRVLEASIAENKACLKRTPTEVWRDSRNPYDRKRQDKAPVGLKNVGNTCWFSAVIQSLFNLLEFRRLVLNYKPPSNAQDLPRNQKEHRNLPFMRELRYLFALLVGTKRKYVDPSRAVEILKDAFKSNDSQQQDVSEFTHKLLDWLEDAFQMKAEEETDEEKPKNPMVELFYGRFLAVGVLEGKKFENTEMFGQYPLQVNGFKDLHECLEAAMIEGEIESLHSENSGKSGQEHWFTELPPVLTFELSRFEFNQALGRPEKIHNKLEFPQVLYLDRYMHRNREITRIKREEIKRLKDYLTVLQQRLERYLSYGSGPKRFPLVDVLQYALEFASSKPVCTSPVDDIDASSPPSGSIPSQTLPSTTEQQGALSSELPSTSPSSVAAISSRSVIHKPFTQSRIPPDLPMHPAPRHITEEELSVLESCLHRWRTEIENDTRDLQESISRIHRTIELMYSDKSMIQVPYRLHAVLVHEGQANAGHYWAYIFDHRESRWMKYNDIAVTKSSWEELVRDSFGGYRNASAYCLMYINDKAQFLIQEEFNKETGQPLVGIETLPPDLRDFVEEDNQRFEKELEEWDAQLAQKALQEKLLASQKLRESETSVTTAQAAGDPEYLEQPSRSDFSKHLKEETIQIITKASHEHEDKSPETVLQSIMMTPNMQGIIMAIGKSRSVYDRCGPEAGFFKAIKLEYARLVKLAQEDTPPETDYRLHHVVVYFIQNQAPKKIIEKTLLEQFGDRNLSFDERCHNIMKVAQAKLEMIKPEEVNLEEYEEWHQDYRKFRETTMYLIIGLENFQRESYIDSLLFLICAYQNNKELLSKGLYRGHDEELISHYRRECLLKLNEQAAELFESGEDREVNNGLIIMNEFIVPFLPLLLVDEMEEKDILAVEDMRNRWCSYLGQEMEPHLQEKLTDFLPKLLDCSMEIKSFHEPPKLPSYSTHELCERFARIMLSLSRTPADGR

SEQ ID NO: 895183 - protein, 1055 aa, Homo sapiens; identical to SEQ ID NO: 895177

SEQ ID NO: 895184 - protein, 287 aa, Homo sapiens
QPVACDNHYQKAIKLEYARLVKLAQEDTPPETDYRLHHVVVYFIQNQAPKKIIEKTLLEQFGDRNLSFDERCHNIMKVAQAKLEMIKPEEVNLEEYEEWHQDYRKFRETTMYLIIGLENFQRESYIDSLLFLICAYQNNKELLSKGLYRGHDEELISHYRRECLLKLNEQAAELFESGEDREVNNGLIIMNEFIVPFLPLLLVDEMEEKDILAVEDMRNRWCSYLGQEMEPHLQEKLTDFLPKLLDCSMEIKSFHEPPKLPSYSTHELCERFARIMLSLSRTPADGR

SEQ ID NO: 895185 - protein, 99 aa, Homo sapiens
ALADSGVANMSTAMNFGTKSFQPRPPDKGSFPLDHLGECKSFKEKFMKCLHNNNFENALCRKESKEYLECRMERKLMLQEPLEKLGFGDLTSGKSEAKK

SEQ ID NO: 895186 - protein, 99 aa, Homo sapiens; identical to SEQ ID NO: 895185

SEQ ID NO: 895187 - protein, 321 aa, Homo sapiens
MQCRLPRGLAGALLTLLCMGLLCLRYHLNLSPQRVQGTPELSQPNPGPPKLQLHDVFIAVKTTRAFHRLRLELLLDTWVSRTREQTFVFTDSPDKGLQERLGSHLVVTNCSAEHSHPALSCKMAAEFDTFLASGLRWFCHVDDDNYVNPRALLQLLRAFPLARDVYVGRPSLNRPIHASEPQPHNRTRLVQFWFATGGAGFCINRKLALKMAPWASGSRFMDTSALIRLPDDCTMGYIIECKLGGRLQPSPLFHSHLETLQLLRTAQLPEQVTLSYGVFEGKLNVIKLQGPFSPEEDPSRFRSLHCLLYPDTPWCPQLGAR

SEQ ID NO: 895188 - protein, 199 aa, Homo sapiens
MAAEFDTFLASGLRWFCHVDDDNYVNPRALLQLLRAFPLARDVYVGRPSLNRPIHASEPQPHNRTRLVQFWFATGGAGFCINRKLALKMAPWASGSRFMDTSALIRLPDDCTMGYIIECKLGGRLQPSPLFHSHLETLQLLRTAQLPEQVTLSYGVFEGKLNVIKLQGPFSPEEDPSRFRSLHCLLYPDTPWCPQLGAR

SEQ ID NO: 895189 - protein, 340 aa, Homo sapiens [sequence omitted]

SEQ ID NO: 895190 - protein, 199 aa, Homo sapiens; identical to SEQ ID NO: 895188

SEQ ID NO: 895191 - protein, 199 aa, Homo sapiens; identical to SEQ ID NO: 895188

SEQ ID NO: 895192 - protein, 199 aa, Homo sapiens; identical to SEQ ID NO: 895188

SEQ ID NO: 895193 - protein, 321 aa, Homo sapiens; identical to SEQ ID NO: 895187

SEQ ID NO: 895194 - protein, 304 aa, Homo sapiens
MQCRLPRGLAGALLTLLCMGLLCLRYHLNLSPQRVQGTPELSQPNPGPPKLQLHDVFIAVKTTRAFHRLRLELLLDTWVSRTREQTFVFTDSPDKGLQERLGSHLVVTNCSAEHSHPALSCKMAAEFDTFLASGLRWFCHVDDDNYVNPRALLQLLRAFPLARDVYVGRPSLNRPIHASEPQPHNRTRLVQFWFATGGAGFCINRKLALKMAPWASGSRFMDTSALIRLPDDCTMGYIIECKLGGRLQPSPLFHSHLETLQLLRTAQLPEQVTLSYGVFEGKLNVIKLQGPFSPEEDPSSLSCC

SEQ ID NO: 895195 - protein, 343 aa, Homo sapiens
MQCRLPRGLAGALLTLLCMGLLCLRYHLNLSPQRVQGTPELSQPNPGPPKLQLHDVFIAVKTTRAFHRLRLELLLDTWVSRTREQTFVFTDSPDKGLQERLGSHLVVTNCSAEHSHPALSCKMAAEFDTFLASGLRWFCHVDDDNYVNPRALLQLLRAFPLARDVYVGRPSLNRPIHASEPQPHNRTRLVQFWFATGGAGFCINRKLALKMAPWASGSRFMDTSALIRLPDDCTMGYIIECKLGGRLQPSPLFHSHLETLQLLRTAQLPEQVSWPWGQVANGKGNQRNMGSPQPSLLAFERNLELQIMGLGYSLLMGKLRPRVAKDTLRVHRDSTPSPLTLKD

SEQ ID NO: 895196 - protein, 1070 aa, Homo sapiens
MSPVRRWGSPCLFPLQLFSLCWVLSVAQSKTVRYSTFEEDAPGTVIGTLAEDLHMKVSGDTSFRLMKQFNSSLLRVREGDGQLTVGDAGLDRERLCGQAPQCVLAFDVVSFSQEQFRLVHVEVEVRDVNDHAPRFPRAQIPVEVSEGAAVGTRIPLEVPVDEDVGANGLQTVRLAEPHSPFRVELQTRADGAQCADLVLLQELDRESQAAYSLELVAQDGGRPPRSATAALSVRVLDANDHSPAFPQGAVAEVELAEDAPVGSLLLDLDAADPDEGPNGDVVFAFGARTPPEARRLFRLDPRSGRLTLAGPVDYERQDTYELDVRAQDRGPGPRAATCKVIVRIRDVNDNAPDIAITPLAAPGAPATSPFAAAAAAAALGGADASSPAGAGTPEAGATSLVPEGAARESLVALVSTSDRDSGANGQVRCALYGHEHFRLQPAYAGSYLVVTAASLDRERIAEYNLTLVAEDRGAPPLRTVRPYTVRVGDENDNAPLFTRPVYEVSVRENNPPGAYLATVAARDRDLGRNGQVTYRLLEAEVGRAGGAVSTYVSVDPATGAIYALRSFDYETLRQLDVRIQASDGGSPQLSSSALVQVRVLDQNDHAPVLVHPAPANGSLEVAVPGRTAKDTVVARVQARDADEGANGELAFELQQQEPREAFAIGRRTGEILLTGDLSQEPPGRVFRALLVISDGGRPPLTTTATVSFVVTAGGGRGPAAPASAGSPERSRPPGSRLGVSGSVLQWDTPLIVIIVLAGSCTLLLAAIIAIATTCNRRKKEVRKGGALREERPGAAGGGASAPGSPEEAARGAGPRPNMFDVLTFPGTGKAPFGSPAADAPPPAVAAAEVPGSEGGSATGESACHFEGQQRLRGAHAEPYGASPGFGKEPAPPVAVWKGHSFNTISGREAEKFSGKDSGKGDSDFNDSDSDISGDALKKDLINHMQSGLWACTAECKILGHSDRCWSPSCSGPNAHPSPHPPAQMSTFCKSTSLPRDPLRRDNYYQAQLPKTVGLQSVYEKVLHRDYDRTVTLLSPPRPGRLPDLQEIGVPLYQSPPGRYLSPKKGANENV

SEQ ID NO: 895197 - protein, 973 aa, Homo sapiens
MSPVRRWGSPCLFPLQLFSLCWVLSVAQSKTVRYSTFEEDAPGTVIGTLAEDLHMKVSGDTSFRLMKQFNSSLLRVREGDGQLTVGDAGLDRERLCGQAPQCVLAFDVVSFSQEQFRLVHVEVEVRDVNDHAPRFPRAQIPVEVSEGAAVGTRIPLEVPVDEDVGANGLQTVRLAEPHSPFRVELQTRADGAQCADLVLLQELDRESQAAYSLELVAQDGGRPPRSATAALSVRVLDANDHSPAFPQGAVAEVELAEDAPVGSLLLDLDAADPDEGPNGDVVFAFGARTPPEARRLFRLDPRSGRLTLAGPVDYERQDTYELDVRAQDRGPGPRAATCKVIVRIRDVNDNAPDIAITPLAAPGAPATSPFAAAAAAAALGGADASSPAGAGTPEAGATSLVPEGAARESLVALVSTSDRDSGANGQVRCALYGHEHFRLQPAYAGSYLVVTAASLDRERIAEYNLTLVAEDRGAPPLRTVRPYTVRVGDENDNAPLFTRPVYEVSVRENNPPGAYLATVAARDRDLGRNGQVTYRLLEAEVGRAGGAVSTYVSVDPATGAIYALRSFDYETLRQLDVRIQASDGGSPQLSSSALVQVRVLDQNDHAPVLVHPAPANGSLEVAVPGRTAKDTVVARVQARDADEGANGELAFELQQQEPREAFAIGRRTGEILLTGDLSQEPPGRVFRALLVISDGGRPPLTTTATVSFVVTAGGGRGPAAPASAGSPERSRPPGSRLGVSGSVLQWDTPLIVIIVLAGSCTLLLAAIIAIATTCNRRKKEPYGASPGFGKEPAPPVAVWKGHSFNTISGREAEKFSGKDSGKGDSDFNDSDSDISGDALKKDLINHMQSGLWACTAECKILGHSDRCWSPSCSGPNAHPSPHPPAQMSTFCKSTSLPRDPLRRDNYYQAQLPKTVGLQSVYEKVLHRDYDRTVTLLSPPRPGRLPDLQEIGVPLYQSPPGRYLSPKKGANENV

SEQ ID NO: 895198 - protein, 973 aa, Homo sapiens; identical to SEQ ID NO: 895197

SEQ ID NO: 895199 - protein, 1204 aa, Homo sapiens
MSFFNFRKIFKLGSEKKKKQYEHVKRDLNPEDFWEIIGELGDGAFGKVYKAQNKETSVLAAAKVIDTKSEEELEDYMVEIDILASCDHPNIVKLLDAFYYENNLWILIEFCAGGAVDAVMLELERPLTESQIQVVCKQTLDALNYLHDNKIIHRDLKAGNILFTLDGDIKLADFGVSAKNTRTIQRRDSFIGTPYWMAPEVVMCETSKDRPYDYKADVWSLGITLIEMAEIEPPHHELNPMRVLLKIAKSEPPTLAQPSRWSSNFKDFLKKCLEKNVDARWTTSQLLQHPFVTVDSNKPIRELIAEAKAEVTEEVEDGKEEDEEEETENSLPIPASKRASSDLSIASSEEDKLSQNACILESVSEKTERSNSEDKLNSKILNEKPTTDEPEKAVEDINEHITDAQLEAMTELHDRTAVIKENEREKRPKLENLPDTEDQETVDINSVSEGKENNIMITLETNIEHNLKSEEEKDQEKQQMFENKLIKSEEIKDTILQTVDLVSQETGEKEANIQAVDSEVGLTKEDTQEKLGEDDKTQKDVISNTSDVIGTCEAADVAQKVDEDSAEDTQSNDGKEVVEVGQKLINKPMVGPEAGGTKEVPIKEIVEMNEIEEGKNKEQAINSSENIMDINEEPGTTEGEEITESSSTEEMEVRSVVADTDQKALGSEVQDASKVTTQIDKEKKEIPVSIKKEPEVTVVSQPTEPQPVLIPSININSDSGENKEEIGSLSKTETILPPESENPKENDNDSGTGSTADTSSIDLNLSISSFLSKTKDSGSISLQETRRQKKTLKKTRKFIVDGVEVSVTTSKIVTDSDSKTEELRFLRRQELRELRFLQKEEQRAQQQLNSKLQQQREQIFRRFEQEMMSKKRQYDQEIENLEKQQKQTIERLEQEHTNRLRDEAKRIKGEQEKELSKFQNMLKNRKKEEQEFVQKQQQELDGSLKKIIQQQKAELANIERECLNNKQQLMRAREAAIWELEERHLQEKHQLLKQQLKDQYFMQRHQLLKRHEKETEQMQRYNQRLIEELKNRQTQERARLPKIQRSEAKTRMAMFKKSLRINSTATPDQDRDKIKQFAAQEEKRQKNERMAQHQKHENQMRDLQLQCEANVRELHQLQNEKCHLLVEHETQKLKELDEEHSQELKEWREKLRPRKKTLEEEFARKLQEQEVFFKMTGESECLNPSTQSRISKFYPIPSLHSTGS

SEQ ID NO: 895200 - protein, 1204 aa, Homo sapiens; identical to SEQ ID NO: 895199

SEQ ID NO: 895201 - protein, 827 aa, Homo sapiens
MSFFNFRKIFKLGSEKKKKQYEHVKRDLNPEDFWEIIGELGDGAFGKVYKAQNKETSVLAAAKVIDTKSEEELEDYMVEIDILASCDHPNIVKLLDAFYYENNLWILIEFCAGGAVDAVMLELERPLTESQIQVVCKQTLDALNYLHDNKIIHRDLKAGNILFTLDGDIKLADFGVSAKNTRTIQRRDSFIGTPYWMAPEVVMCETSKDRPYDYKADVWSLGITLIEMAEIEPPHHELNPMRVLLKIAKSEPPTLAQPSRWSSNFKDFLKKCLEKNVDARWTTSQLLQHPFVTVDSNKPIRELIAEAKAEVTEEVEDGKEEDEEEETENSLPIPASKRASSDLSIASSEEDKLSQNACILESVSEKTERSNSEDKLNSKILNEKPTTDEPEKAVEDINEHITDAQLEAMTELHDRTAVIKENEREKRPKLENLPDTEDQETVDINSVSEGKENNIMITLETNIEHNLKSEEEKDQEKQQMFENKLIKSEEIKDTILQTVDLVSQETGEKEANIQAVDSEVGLTKEDTQEKLGEDDKTQKDVISNTSDVIGTCEAADVAQKVDEDSAEDTQSNDGKEVVEVGQKLINKPMVGPEAGGTKEVPIKEIVEMNEIEEGKNKEQAINSSENIMDINEEPGTTEGEEITESSSTEEMEVRSVVADTDQKALGSEVQDASKVTTQIDKEKKEIPVSIKKEPEVTVVSQPTEPQPVLIPSININSDSGENKEEIGSLSKTETILPPESENPKENDNDSGTGSTADTSSIDLNLSISSFLSKTKDSGSISLQETRRQKKTLKKTRKFIVDGVEVSVTTSKIVTDSDSKTEELRFLR

SEQ ID NO: 895202 - protein, 827 aa, Homo sapiens; identical to SEQ ID NO: 895201

SEQ ID NO: 895203 - protein, 1235 aa, Homo sapiens
MSFFNFRKIFKLGSEKKKKQYEHVKRDLNPEDFWEIIGELGDGAFGKVYKAQNKETSVLAAAKVIDTKSEEELEDYMVEIDILASCDHPNIVKLLDAFYYENNLWILIEFCAGGAVDAVMLELERPLTESQIQVVCKQTLDALNYLHDNKIIHRDLKAGNILFTLDGDIKLADFGVSAKNTRTIQRRDSFIGTPYWMAPEVVMCETSKDRPYDYKADVWSLGITLIEMAEIEPPHHELNPMRVLLKIAKSEPPTLAQPSRWSSNFKDFLKKCLEKNVDARWTTSQLLQHPFVTVDSNKPIRELIAEAKAEVTEEVEDGKEEDEEEETENSLPIPASKRASSDLSIASSEEDKLSQNACILESVSEKTERSNSEDKLNSKILNEKPTTDEPEKAVEDINEHITDAQLEAMTELHDRTAVIKENEREKRPKLENLPDTEDQETVDINSVSEGKENNIMITLETNIEHNLKSEEEKDQEKQQMFENKLIKSEEIKDTILQTVDLVSQETGEKEANIQAVDSEVGLTKEDTQEKLGEDDKTQKDVISNTSDVIGTCEAADVAQKVDEDSAEDTQSNDGKEVVEVGQKLINKPMVGPEAGGTKEVPIKEIVEMNEIEEGKNKEQAINSSENIMDINEEPGTTEGEEITESSSTEEMEVRSVVADTDQKALGSEVQDASKVTTQIDKEKKEIPVSIKKEPEVTVVSQPTEPQPVLIPSININSDSGENKEEIGSLSKTETILPPESENPKENDNDSGTGSTADTSSIDLNLSISSFLSKTKDSGSISLQETRRQKKTLKKTRKFIVDGVEVSVTTSKIVTDSDSKTEELRFLRRQELRELRFLQKEEQRAQQQLNSKLQQQREQIFRRFEQEMMSKKRQYDQEIENLEKQQKQTIERLEQEHTNRLRDEAKRIKGEQEKELSKFQNMLKNRKKEVINEVEKAPKELRKELMKRRKEELAQSQHAQEQEFVQKQQQELDGSLKKIIQQQKAELANIERECLNNKQQLMRAREAAIWELEERHLQEKHQLLKQQLKDQYFMQRHQLLKRHEKETEQMQRYNQRLIEELKNRQTQERARLPKIQRSEAKTRMAMFKKSLRINSTATPDQDRDKIKQFAAQEEKRQKNERMAQHQKHENQMRDLQLQCEANVRELHQLQNEKCHLLVEHETQKLKELDEEHSQELKEWREKLRPRKKTLEEEFARKLQEQEVFFKMTGESECLNPSTQSRISKFYPIPSLHSTGS

SEQ ID NO: 895204 - protein, 294 aa, Homo sapiens
VSNADPGESRAAQSQHAQEQEFVQKQQQELDGSLKKIIQQQKAELANIERECLNNKQQLMRAREAAIWELEERHLQEKHQLLKQQLKDQYFMQRHQLLKRHEKETEQMQRYNQRLIEELKNRQTQERARLPKIQRSEAKTRMAMFKKSLRINSTATPDQDRDKIKQFAAQEEKRQKNERMAQHQKHENQMRDLQLQCEANVRELHQLQNEKCHLLVEHETQKLKELDEEHSQELKEWREKLRPRKKTLEEEFARKLQEQEVFFKMTGESECLNPSTQSRISKFYPIPSLHSTGS

SEQ ID NO: 895205 - protein, 1204 aa, Homo sapiens; identical to SEQ ID NO: 895199

SEQ ID NO: 895206 - protein, 1204 aa, Homo sapiens; identical to SEQ ID NO: 895199

SEQ ID NO: 895207 - protein, 1204 aa, Homo sapiens; identical to SEQ ID NO: 895199

SEQ ID NO: 895208 - protein, 827 aa, Homo sapiens; identical to SEQ ID NO: 895201

SEQ ID NO: 895209 - protein, 181 aa, Homo sapiens
EQAINSSENIMDINEEPGTTEGEEITESSSTEEMEVRSVVADTDQKALGSEVQDASKVTTQIDKEKKEIPVSIKKEPEVTVVSQPTEPQPVLIPSININSDSGENKEEIGSLSKTETILPPESENPKENDNDSGTGSTADTSSIDLNLSISSFLSKTKDSGSISLQVSVHESLFGFSFAIF

SEQ ID NO: 895210 - protein, 111 aa, Homo sapiens
MECAHSSLLTKSMLFSACRDKNMVNSRHKAQALSWARNPSLLGWLSPGEGTLATHPGSEPRTPHHCLIEGSLAPGGQRLLPSPSLFSPLPGLVATQPDSISNTPLPPGMAV

SEQ ID NO: 895211 - protein, 58 aa, Homo sapiens
MDTQKDVQPPKQQPMIYICGECHTENEIKSRDPIRCRECGYRIMYKKRTKRLVVFDAR

SEQ ID NO: 895212 - protein, 58 aa, Homo sapiens; identical to SEQ ID NO: 895211

SEQ ID NO: 895213 - protein, 58 aa, Homo sapiens; identical to SEQ ID NO: 895211

SEQ ID NO: 895214 - protein, 58 aa, Homo sapiens; identical to SEQ ID NO: 895211

SEQ ID NO: 895215 - protein, 58 aa, Homo sapiens; identical to SEQ ID NO: 895211

SEQ ID NO: 895216 - protein, 58 aa, Homo sapiens; identical to SEQ ID NO: 895211

SEQ ID NO: 895217 - protein, 81 aa, Homo sapiens
RDAKVVGIRGSSGCLRSVSGASGGGGLGRRDGWCAGTLMLKYYEPSELVERLQSFGCYGPFSWAHTFGVVQNQKQPCFPNT

SEQ ID NO: 895218 - protein, 570 aa, Homo sapiens
MSRLEAKKPSLCKSEPLTTERVRTTLSVLKRIVTSCYGPSGRLKQLHNGFGGYVCTTSQSSALLSHLLVTHPILKILTASIQNHVSSFSDCGLFTAILCCNLIENVQRLGLTPTTVIRLNKHLLSLCISYLKSETCGCRIPVDFSSTQILLCLVRSILTSKPACMLTRKETEHVSALILRAFLLTIPENAEGHIILGKSLIVPLKGQRVIDSTVLPGILIEMSEVQLMRLLPIKKSTALKVALFCTTLSGDTSDTGEGTVVVSYGVSLENAVLDQLLNLGRQLISDHVDLVLCQKVIHPSLKQFLNMHRIIAIDRIGVTLMEPLTKMTGTQPIGSLGSICPNSYGSVKDVCTAKFGSKHFFHLIPNEATICSLLLCNRNDTAWDELKLTCQTALHVLQLTLKEPWALLGGGCTETHLAAYIRHKTHNDPESILKDDECTQTELQLIAEAFCSALESVVGSLEHDGGEILTDMKYGHLWSVQADSPCVANWPDLLSQCGCGLYNSQEELNWSFLRSTRRPFVPQSCLPHEAVGSASNLTLDCLTAKLSGLQVAVETANLILDLSYVIEDKN

SEQ ID NO: 895219 - protein, 570 aa, Homo sapiens; identical to SEQ ID NO: 895218

SEQ ID NO: 895220 - protein, 81 aa, Homo sapiens; identical to SEQ ID NO: 895217

SEQ ID NO: 895221 - protein, 570 aa, Homo sapiens; identical to SEQ ID NO: 895218

SEQ ID NO: 895222 - protein, 570 aa, Homo sapiens; identical to SEQ ID NO: 895218

SEQ ID NO: 895223 - protein, 81 aa, Homo sapiens; identical to SEQ ID NO: 895217

SEQ ID NO: 895224 - protein, 106 aa, Homo sapiens
TDTIEPVPDEESGQFKAADSPCVANWPDLLSQCGCGLYNSQEELNWSFLRSTRRPFVPQSCLPHEAVGSASNLTLDCLTAKLSGLQVAVETANLILDLSYVIEDKN

SEQ ID NO: 895225 - protein, 1412 aa, Homo sapiens
MTTKRSLFVRLVPCRCLRGEEETVTTLDYSHCSLEQVPKEIFTFEKTLEELYLDANQIEELPKQLFNCQSLHKLSLPDNDLTTLPASIANLINLRELDVSKNGIQEFPENIKNCKVLTIVEASVNPISKLPDGFSQLLNLTQLYLNDAFLEFLPANFGRLTKLQILELRENQLKMLPKTMNRLTQLERLDLGSNEFTEVPEVLEQLSGLKEFWMDANRLTFIPGFIGSLKQLTYLDVSKNNIEMVEEGISTCENLQDLLLSSNSLQQLPETIGSLKNITTLKIDENQLMYLPDSIGGLISVEELDCSFNEVEALPSSIGQLTNLRTFAADHNYLQQLPPEIGSWKNITVLFLHSNKLETLPEEMGDMQKLKVINLSDNRLKNLPFSFTKLQQLTAMWLSDNQSKPLIPLQKETDSETQKMVLTNYMFPQQPRTEDVMFISDNESFNPSLWEEQRKQRAQVAFECDEDKDEREAPPREGNLKRYPTPYPDELKNMVKTVQTIVHRLKDEETNEDSGRDLKPHEDQQDINKDVGVKTSESTTTVKSKVDEREKYMIGNSVQKISEPEAEISPGSLPVTANMKASENLKHIVNHDDVFEESEELSSDEEMKMAEMRPPLIETSINQPKVVALSNNKKDDTKETDSLSDEVTHNSNQNNSNCSSPSRMSDSVSLNTDSSQDTSLCSPVKQTHIDINSKIRQEDENFNSLLQNGDILNSSTEEKFKAHDKKDFNLPEYDLNVEERLVLIEKSVDSTATADDTHKLDHINMNLNKLITNDTFQPEIMERSKTQDIVLGTSFLSINSKEETEHLENGNKYPNLESVNKVNGHSEETSQSPNRTEPHDSDCSVDLGISKSTEDLSPQKSGPVGSVVKSHSITNMEIGGLKIYDILSDNGPQQPSTTVKITSAVDGKNIVRSKSATLLYDQPLQVFTGSSSSSDLISGTKAIFKFDSNHNPEEPNIIRGPTSGPQSAPQIYGPPQYNIQYSSSAAVKDTLWHSKQNPQIDHASFPPQLLPRSESTENQSYAKHSANMNFSNHNNVRANTAYHLHQRLGPARHGEMWAISPNDRLIPAVTRSTIQRQSSVSSTASVNLGDPGSTRRAQIPEGDYLSYREFHSAGRTPPMMPGSQRPLSARTYSIDGPNASRPQSARPSINEIPERTMSVSDFNYSRTSPSKRPNARVGSEHSLLDPPGKSKVPRDWREQVLRHIEAKKLEKKHPQTSSSGDPCQDGIFISGQQNYSSATLSHKDVPPDSLMKMPLSNGQMGQPLRPQANYSQIHHPPQASVARHPSREQLIDYLMLKVAHQPPYTQPHCSPRQGHELAKQEIRVRVEKDPELGFSISGGVGGRGNPFRPDDDGIFVTRVQPEGPASKLLQPGDKIIQANGYSFINIEHGQAVSLLKTFQNTVELIIVREVSS

SEQ ID NO: 895226 - protein, 1371 aa, Homo sapiens
MTTKRSLFVRLVPCRCLRGEEETVTTLDYSHCSLEQVPKEIFTFEKTLEELYLDANQIEELPKQLFNCQSLHKLSLPDNDLTTLPASIANLINLRELDVSKNGIQEFPENIKNCKVLTIVEASVNPISKLPDGFSQLLNLTQLYLNDAFLEFLPANFGRLTKLQILELRENQLKMLPKTMNRLTQLERLDLGSNEFTEVPEVLEQLSGLKEFWMDANRLTFIPGFIGSLKQLTYLDVSKNNIEMVEEGISTCENLQDLLLSSNSLQQLPETIGSLKNITTLKIDENQLMYLPDSIGGLISVEELDCSFNEVEALPSSIGQLTNLRTFAADHNYLQQLPPEIGSWKNITVLFLHSNKLETLPEEMGDMQKLKVINLSDNRLKNLPFSFTKLQQLTAMWLSDNQSKPLIPLQKETDSETQKMVLTNYMFPQQPRTEDVMFISDNESFNPSLWEEQRKQRAQVAFECDEDKDEREAPPREGNLKRYPTPYPDELKNMVKTVQTIVHRLKDEETNEDSGRDLKPHEDQQDINKDVGVKTSESTTTVKSKVDEREKYMIGNSVQKISEPEAEISPGSLPVTANMKASENLKHIVNHDDVFEESEELSSDEEMKMAEMRPPLIETSINQPKVVALSNNKKDDTKETDSLSDEVTHNSNQNNSNCSSPSRMSDSVSLNTDSSQDTSLCSPVKQTHIDINSKIRQEDENFNSLLQNGDILNSSTEEKFKAHDKKDFNLPEYDLNVEERLVLIEKSVDSTATADDTHKLDHINMNLNKLITNDTFQPEIMERSKTQDIVLGTSFLSINSKEETEHLENGNKYPNLESVNKVNGHSEETSQSPNRTEPHDSDCSVDLGISKSTEDLSPQKSGPVGSVVKSHSITNMEIGGLKIYDILSDNGPQQPSTTVKITSAVDGKNIVRSKSATLLYDQPLQVFTGSSSSSDLISGTKAIFKFDSNHNPEEPNIIRGPTSGPQSAPQIYGPPQYNIQYSSSAAVKDTLWHSKQNPQIDHASFPPQLLPRSESTENQSYAKHSANMNFSNHNNVRANTAYHLHQRLGPARHGEMWAISPNDRLIPAVTRSTIQRQSSVSSTASVNLGDPGSTRRAQIPEGDYLSYREFHSAGRTPPMMPGSQRPLSARTYSIDGPNASRPQSARPSINEIPERTMSVSDFNYSRTSPSKRPNARVGSEHSLLDPPGKSKVPRDWREQVLRHIEAKKLEKMPLSNGQMGQPLRPQANYSQIHHPPQASVARHPSREQLIDYLMLKVAHQPPYTQPHCSPRQGHELAKQEIRVRVEKDPELGFSISGGVGGRGNPFRPDDDGIFVTRVQPEGPASKLLQPGDKIIQANGYSFINIEHGQAVSLLKTFQNTVELIIVREVSS

SEQ ID NO: 895227 - protein, 1371 aa, Homo sapiens; identical to SEQ ID NO: 895226

SEQ ID NO: 895228 - protein, 1371 aa, Homo sapiens; identical to SEQ ID NO: 895226

SEQ ID NO: 895229 - protein, 1371 aa, Homo sapiens; identical to SEQ ID NO: 895226

SEQ ID NO: 895230 - protein, 1371 aa, Homo sapiens; identical to SEQ ID NO: 895226

SEQ ID NO: 895231 - protein, 1124 aa, Homo sapiens
MSHTDCWWTCFYFKLKNCMLFLPSLGSLKNITTLKIDENQLMYLPDSIGGLISVEELDCSFNEVEALPSSIGQLTNLRTFAADHNYLQQLPPEIGSWKNITVLFLHSNKLETLPEEMGDMQKLKVINLSDNRLKNLPFSFTKLQQLTAMWLSDNQSKPLIPLQKETDSETQKMVLTNYMFPQQPRTEDVMFISDNESFNPSLWEEQRKQRAQVAFECDEDKDEREAPPREGNLKRYPTPYPDELKNMVKTVQTIVHRLKDEETNEDSGRDLKPHEDQQDINKDVGVKTSESTTTVKSKVDEREKYMIGNSVQKISEPEAEISPGSLPVTANMKASENLKHIVNHDDVFEESEELSSDEEMKMAEMRPPLIETSINQPKVVALSNNKKDDTKETDSLSDEVTHNSNQNNSNCSSPSRMSDSVSLNTDSSQDTSLCSPVKQTHIDINSKIRQEDENFNSLLQNGDILNSSTEEKFKAHDKKDFNLPEYDLNVEERLVLIEKSVDSTATADDTHKLDHINMNLNKLITNDTFQPEIMERSKTQDIVLGTSFLSINSKEETEHLENGNKYPNLESVNKVNGHSEETSQSPNRTEPHDSDCSVDLGISKSTEDLSPQKSGPVGSVVKSHSITNMEIGGLKIYDILSDNGPQQPSTTVKITSAVDGKNIVRSKSATLLYDQPLQVFTGSSSSSDLISGTKAIFKFDSNHNPEEPNIIRGPTSGPQSAPQIYGPPQYNIQYSSSAAVKDTLWHSKQNPQIDHASFPPQLLPRSESTENQSYAKHSANMNFSNHNNVRANTAYHLHQRLGPARHGEMWAISPNDRLIPAVTRSTIQRQSSVSSTASVNLGDPGSTRRAQIPEGDYLSYREFHSAGRTPPMMPGSQRPLSARTYSIDGPNASRPQSARPSINEIPERTMSVSDFNYSRTSPSKRPNARVGSEHSLLDPPGKSKVPRDWREQVLRHIEAKKLEKMPLSNGQMGQPLRPQANYSQIHHPPQASVARHPSREQLIDYLMLKVAHQPPYTQPHCSPRQGHELAKQEIRVRVEKDPELGFSISGGVGGRGNPFRPDDDGIFVTRVQPEGPASKLLQPGDKIIQANGYSFINIEHGQAVSLLKTFQNTVELIIVREVSS

SEQ ID NO: 895232 - protein, 1371 aa, Homo sapiens; identical to SEQ ID NO: 895226

SEQ ID NO: 895233 - protein, 1412 aa, Homo sapiens; identical to SEQ ID NO: 895225

SEQ ID NO: 895234 - protein, 1322 aa, Homo sapiens [sequence omitted]

SEQ ID NO: 895235 - protein, 1371 aa, Homo sapiens; identical to SEQ ID NO: 895226

SEQ ID NO: 895236 - protein, 1322 aa, Homo sapiens [sequence omitted]

SEQ ID NO: 895237 - protein, 635 aa, Homo sapiens
MTTKRSLFVRLVPCRCLRGEEETVTTLDYSHCSLEQVPKEIFTFEKTLEELYLDANQIEELPKQLFNCQSLHKLSLPDNDLTTLPASIANLINLRELDVSKNGIQEFPENIKNCKVLTIVEASVNPISKLPDGFSQLLNLTQLYLNDAFLEFLPANFGRLTKLQILELRENQLKMLPKTMNRLTQLERLDLGSNEFTEVPEVLEQLSGLKEFWMDANRLTFIPGFIGSLKQLTYLDVSKNNIEMVEEGISTCENLQDLLLSSNSLQQLPETIGSLKNITTLKIDENQLMYLPDSIGGLISVEELDCSFNEVEALPSSIGQLTNLRTFAADHNYLQQLPPEIGSWKNITVLFLHSNKLETLPEEMGDMQKLKVINLSDNRLKNLPFSFTKLQQLTAMWLSDNQSKPLIPLQKETDSETQKMVLTNYMFPQQPRTEDVMFISDNESFNPSLWEEQRKQRAQVAFECDEDKDEREAPPREGNLKRYPTPYPDELKNMVKTVQTIVHRLKDEETNEDSGRDLKPHEDQQDINKDVGVKTSESTTTVKSKVDEREKYMIGNSVQKISEPEAEISPGSLPVTANMKASENLKHIVNHDDVFEESEELSSDEEMKMAEMRPPLIETSINQPKVVALSNNKKG

SEQ ID NO: 895238 - protein, 367 aa, Homo sapiens
MATPNNLTPTNCSWWPISALESDAAKPAEAPDAPEAASPAHWPRESLVLYHWTQSFSSQKVRLVIAEKGLVCEERDVSLPQSEHKEPWFMRLNLGEEVPVIIHRDNIISDYDQIIDYVERTFTGEHVVALMPEVGSLQHARVLQYRELLDALPMDAYTHGCILHPELTTDSMIPKYATAEIRRHLANATTDLMKLDHEEEPQLSEPYLSKQKKLMAKILEHDDVSYLKKILGELAMVLDQIEAELEKRKLENEGQKCELWLCGCAFTLADVLLGATLHRLKFLGLSKKYWEDGSRPNLQSFFERVQRRFAFRKVLGDIHTTLLSAVIPNAFRLVKRKPPSFFGASFLMGSLGGMGYFAYWYLKKKYI

SEQ ID NO: 895239 - protein, 135 aa, Homo sapiens
ARPCDAGRERAAAPEPPSFLPLIPGCHGDPQQSDPHQLQLVAHLRAGERCGQASGGPRRSRGGQPRPLAQGEPGSVPLDPVLQLAEGAAGDRREGPGVRGAGREPATERAQGALVHAAQPGRGGARHHPPRQHHQ

SEQ ID NO: 895240 - protein, 138 aa, Homo sapiens
  misc_feature (129)..(129): Xaa can be any naturally occurring amino acid
  misc_feature (133)..(133): Xaa can be any naturally occurring amino acid
  misc_feature (138)..(138): Xaa can be any naturally occurring amino acid
MATPNNLTPPDAPEAASPAHWPRESLVLYHWTQSFSSQKVRLVIAEKGLVCEERDVSLPQSEHKEPWFMRLNLGEEVPVIIHRDNIISDYDQIIDYVERTFTGEHVVALMPEVGSLQHARVLQLPRKLXGRQXPIGLX

SEQ ID NO: 895241 - protein, 304 aa, Homo sapiens
MATPNNLTPTNCSWWPISALESDAAKPAEAPDAPEAASPAHWPRESLVLYHWTQSFSSQKVRLVIAEKGLVCEERDVSLPQSEHKEPWFMRLNLGEEVPVIIHRDNIISDYDQIIDYVERTFTGEHVVALMPEVGSLQHARVLQYRELLDALPMDAYTHGCILHPELTTDSMIPKYATAEIRRHLANATTDLMKLDHEEEPQLSEPYLSKQKKLMAKILEHDDVSYLKKILGELAMVLDQIEAELEKRKLENEGGCQPWGRWGLQPTQPTLPLPSLSLFFPQKSQRTSQVVKRMGYGVRLRFKS

SEQ ID NO: 895242 - protein, 343 aa, Homo sapiens
PCREPDTEGWRLFWRGPGGGGERSSRDPLAPSPNCPVRLVIAEKGLVCEERDVSLPQSEHKEPWFMRLNLGEEVPVIIHRDNIISDYDQIIDYVERTFTGEHVVALMPEVGSLQHARVLQYRELLDALPMDAYTHGCILHPELTTDSMIPKYATAEIRRHLANATTDLMKLDHEEEPQLSEPYLSKQKKLMAKILEHDDVSYLKKILGELAMVLDQIEAELEKRKLENEGQKCELWLCGCAFTLADVLLGATLHRLKFLGLSKKYWEDGSRPNLQSFFERVQRRFAFRKVLGDIHTTLLSAVIPNAFRLVKRKPPSFFGASFLMGSLGGMGYFAYWYLKKKYI

SEQ ID NO: 895243 - protein, 449 aa, Homo sapiens
MATPNNLTPTNCSWWPISALESDAAKPAEAPDAPEAASPAHWPRESLVLYHWTQSFSSQKVRLVIAEKGLVCEERDVSLPQSEHKEPWFMRLNLGEEVPVIIHRDNIISDYDQIIDYVERTFTGGPRLAASLELRGANPRGQLGRAQLRRDGRATTRIPCPPAAKPEHGGAQGLWAETSWGSGMPGAGGRGRCPSGFPAQPLAVPTEHVVALMPEVGSLQHARVLQYRELLDALPMDAYTHGCILHPELTTDSMIPKYATAEIRRHLANATTDLMKLDHEEEPQLSEPYLSKQKKLMAKILEHDDVSYLKKILGELAMVLDQIEAELEKRKLENEGQKCELWLCGCAFTLADVLLGATLHRLKFLGLSKKYWEDGSRPNLQSFFERVQRRFAFRKVLGDIHTTLLSAVIPNAFRLVKRKPPSFFGASFLMGSLGGMGYFAYWYLKKKYI

SEQ ID NO: 895244 - protein, 309 aa, Homo sapiens
MATPNNLTPTNCSWWPISALESDAAKPAEAPDAPEAASPAHWPRESLVLYHWTQSFSSQKVRLVIAEKGLVCEERDVSLPQSEHKEPWFMRLNLGEEVPVIIHRDNIISDYDQIIDYVERTFTGGHLANATTDLMKLDHEEEPQLSEPYLSKQKKLMAKILEHDDVSYLKKILGELAMVLDQIEAELEKRKLENEGQKCELWLCGCAFTLADVLLGATLHRLKFLGLSKKYWEDGSRPNLQSFFERVQRRFAFRKVLGDIHTTLLSAVIPNAFRLVKRKPPSFFGASFLMGSLGGMGYFAYWYLKKKYI

SEQ ID NO: 895245 - protein, 1299 aa, Homo sapiens
MEYAERDGSVQLFCRLQFSQGQIERGKFKQGALEVDNQSSILRTDGFREHELYVPWQNAMVNIRNCEIELTEVENENTKNVKFGGYVLDHFYWSSNNDHCLPDYCKILVGSLRIDSWLGLWRLWHAVSRRESVKQFLMKKFKNYTKLEVVHWYSTSRSDTYHYSYHVCFICHFFVCLSILKSHTLCYFTAVNTLGRYHDITPNRGSSSPSASSHSQSLRNFPDYLKNHLLVGLLESTEYKSHDDFVFNNAPQMTLMLATLRTTGNYFANLKVQVRIPQFLARLVDYKCDFEILEEAFGVNDRICIYISKFDKIKFPQERRISAPWALIDWDLCRAWSQFNPTGLYAVVSLMLWLIYTVTHTTLWISWKVLHLVYLDLTYIDHFTIKLNYSENCLLGDCFYLKLKVSQNMYNNFYMNFLNLSLDKVILLNSKEMQFLELMRGEIIDGQLRERIPSSYKWSFIKHSVSMQFNKLHDLLFESMYSDLRTISGLQYYQSGMPLKCSQTSFVRSRKELGKPLKIYIVIYALRKCILFSNEEWFIIYKGFKALKYHQCLLIALSSCLQSDVIGIVKRRPDFELDLDSLFSNSGMLFNLLCAFRFLSTISVPFKPHKMKLRRDNGFGSILRGLYYATPVLLLKFCFVLLFSVQSVQFTQAECFLTYISSYEFVYVRKSFSGRESREEKNDVTNQKRRKREEVRKGVRKEKGVRMGMAKGRVREKMEGVYGKLRSRDGEKWCGNIYFLVVALTLHQFACLGSLGSGKVLTSMEWGSRACCIWFVSTRVVSQSPYSLIISVPIQHFMSFFFSGSQFVSRTCGNTSIFLFNFIVLAIPSVRLQDKLHIPQWRLEVEGTASLGLKGAKECVAAVFADDTDERPGLGITALPWMANYAINYTYLFLSWDTFSGTILSRFKRTKDSRNTLKDIIGCLIFQIFVFNKYLSSSQNLFEMFLERPLICFLKYFFGSLEYRRKVGVQYVRCGASYPFIKCNFKCLKNNNVPYCILIFNKVELNKDLYYNSYSFIHCQSNPFLPIKIWLNCSDVVSYFIKHETRFYKLNYKRQKSKNGTRKFFFKKLMCYSNIQQLKTHEKNRIAIRCNSLKWIANQCQTLIENIYYHLISTNNFRCLMGLGKDRKKYEMKIYLTFNTVNTIWRVPGQTFEISNLRTDMEPLISLYTGSEYLHTYAHYSNLLLKIMKIEFNSVYSIKKLIGWVWWLMHVIPALWEAEAGGSLEPKEFETSLGDKVRPHLYKKIKKLSRCGGVCLLVLATQEVEAGGLLECKSLRLQRAKIAPLHSSLGDRARPCLKK

SEQ ID NO: 895246 - protein, 1300 aa, Homo sapiens
MEYAERDGYVQLFCRLQFSQGQIERGKFKQGALEVDNQSSILRTDGFREHELYVPWQNAMVNIRNCEIELTEVENENTKNVKFGGYVLDHFYWSSNNDHCLPDYCKILVGSLRIDSWLGLWRLWHAVSRRESVKQFLMKKFKNYTKLEVVHWYSTSRSDTYHYSYHVCFICHFFVCLSILKSHTLCYFTAVNTLGRYHDITPNRGSSSPSASSHSQSLRNFPDYLKNHLLVGLLESTEYKSHDDFVFNKSPQMTLMLATLRTTGNYFANLKVQVRIPQFLARLVDYKCDFEILEEAFGVNDRIRIYISKFDKKNFLSERRISAPWALIDWDLCRAWSQFNPTGLYAVVSLMLWLIYTVTHTTLWISWKVLHLVYLDLTYIDHFTIKLNYSENCLLGDCFYLKLKVSQNMYNNFEMNFLNLSLDKVILLNSKEMQFLELMRGEIIDGQLRERIPSSYKWSFIKHSVSMQFNKLHDLLFESMYSDLRTISGLQYYQSGMPLKCSQTSFVRSRKELGKPLKIYIVIYALRKCILFSNEEWFIIYKGFEGPEITLVLTHCSLILLQSDVIGIVKRRPDFELDLDSLFSNSGMLFNLLCAFRFLSTISVPFKPHKMKLRRDNGFGSILRGLYYATPVLLLKFCFVLLFSVQSVQFTQAECFLTYISSDEFVYVRKSFSGRESREEKNDVTNQKKKEKRGSEKRGEERERSKNGDGKGQSKRKDGMSVWKIEKYEMERNGVETFTFSVVALTLHQFACLGSLGSGKVLTSMEWGSRACCIWFVSTRVVSQSPYSLIISVPIQHFMSFFFSGSQFVSRTCGNTSIFLFNFIVLAIPSVRLQDKLHIPQWRLEVEGTASLGLKGAKECVAAVFADDTDERPGLGITALPWMANYAINYTYLFLSWDTFSGTILSRFKRTKDSRNTLKDIIGCLIFQIFVFNKYLSSSQNLFEMFLERPLICFLKEFFWFLRVEKKSRGAMMSGVGPVIHLLNAISSVLKTIIALCILIFNKVELNKDLYYNSYSFIHCQSNPFLPIKIWLNCSDVVSYFIKHETRFYKLNYKRQKSKNGTRKFFFKKLMCYSNIQQLKTHEKNRIAYWMSQFKMDCKSMSDLNRKYLLSPHFYQSFQMFNGTLKREEKIEMKIYLTFNTVNTIWRVPGQTFEISNLRTDMEPLISLYTGSEYLHNIAHYSNLLLKIMKIEFNSVYSIKKLIGWVWWLMHVIPALWEAEAGGSLEPKEFETSLGDKVRPHLYKKIKKLSRCGGVCLLVLATQEVEAGGLLECKSLRLQRAKIAPLHSSLGDRARPCLKK

SEQ ID NO: 895247 - protein, 1297 aa, Homo sapiens
MEYAERDGSVQLFCRLQFSQGQIERGKFKQGALEVDNQSSILRTDGFREHELYVPWQNAMVNIRNCEIELTEVENENTKNVKFGGYVLDHFYWSSNNDHCLPDYCKILVGSLRIDSWLGLWRLWHAVSRRESVKQFLMKKFKNYTKLEVVHWYSTSRSDTYHYSYHVCFICHFFVCLSILKSHTLCYFTAVNTLGRYHDITPNRGSSSPSASSHSQSLRNFPDYLKNHLLVGLLESTEYKSHDDFVFNNAPQMTLMLATLRTTGNYFANLKVQVRIPQFLARLVDYKCDFEILEEAFGVNDRICIYISKFDKIKFPQERRISAPWALIDWDLCRAWSQFNPTGLYAVVSLMLWLIYTVTHTTLWISWKVLHLVYLDLTYIDHFTIKLNYSENCLLGDCFYLKLKVSQNMYNNFYMNFLNLSLDKVILLNSKEMQFLELMRGEIIDGQLRERIPSSYKWSFIKHSVSMQFNKLHDLLFESMYSDLRTISGLQYYQSGMPLKCSQTSFVRSRKELGKPLKIYIVIYALRKCILFSNEEWFIIYKGFKALKYHQCLLIALSSCLQSDVIGIVKRRPDFELDLDSLFSNSGMLFNLLCAFRFLSTISVPFKPHKMKLRRDNGFGSILRGLYYATPVLLLKFCFVLLFSVQSVQFTQAECFLTYISSYEFVYVRKSFSGRESREEKNDVTNQKRRKREEVRKGVRKEKGVRMGMAKGRVREKMEGVYGKLRSRDGEKWCGNIYFLVVALTLHQFACLGSLGSGKVLTSMEWGSRACCIWFVSTRVVSQSPYSLIISVPIQHFMSFFFSGSQFVSRTCGNTSIFLFNFIVLAIPSVRLQDKLHIPQWRLEVEGTASLGLKGAKECVAAVFADDTDERPGLGITALPWMANYAINYTYLFLSWDTFSGTILSRFKRTKDSRNTLKDIIGCLIFQIFVFNKYLSSSQNLFEMFLERPLICFLKYFFGSLEYRRKVGVQYVRCGASYPFIKCNFKCLKNNNVPYCILIFNKVELNKDLYYNSYSFIHCQSNPFLPIKIWLNCSDVVSYFIKHETRFYKLNYKRQKSKNGTRKFFFKKLMCYSNIQQLKTHEKNRIAIRCNSLKWIANQCQTLIENIYYHLISTNNFRCLMGLGKDRKKYEMKIYLTFNTVNTIWRVPGQTFEISNLRTDMEPLISLYTGSEYLHTYAHYSNLLLKIMKIEFNSVYSIKKLIGWVWWLMHVIPALWEAEAGGSLEPKEFETSLGDKVRPHLYKKIKRQEDCLSARVRGCREPRLHHCTPAWVTERDPVSKIKEIGFDYEKQPFSTFL

SEQ ID NO: 895248 - protein, 1032 aa, Homo sapiens
MGRESRHYRKRSASRGRSGSRSRSRSPSDKRSKRGDDRRSRSRDRDRRRERSRSRDKRRSRSRDRKRLRRSRSRERDRSRERRRSRSRDRRRSRSRSRGRRSRSSSPGNKSKKTENRSRSKEKTDGGESSKEKKKDKDDKEDEKEKDAGNFDQNKLEEEMRKRKERVEKWREEQRKKAMENIGELKKEIEEMKQGKKWSLEDDDDDEDDPAEAEKEGNEMEGEELDPLDAYMEEVKEEVKKFNMRSVKGGGGNEKKSGPTVTKVVTVVTTKKAVVDSDKKKGELMENDQDAMEYSSEEEEVDLQTALTGYQTKQRKLLEPVDHGKIEYEPFRKNFYVEVPELAKMSQEEVNVFRLEMEGITVKGKGCPKPIKSWVQCGISMKILNSLKKHGYEKPTPIQTQAIPAIMSGRDLIGIAKTGSGKTIAFLLPMFRHIMDQRSLEEGEGPIAVIMTPTRELALQITKECKKFSKTLGLRVVCVYGGTGISEQIAELKRGAEIIVCTPGRMIDMLAANSGRVTNLRRVTYVVLDEADRMFDMGFEPQVMRIVDNVRPDRQTVMFSATFPRAMEALARRILSKPIEVQVGGRSVVCSDVEQQVIVIEEEKKFLKLLELLGHYQESGSVIIFVDKQEHADGLLKDLMRASYPCMSLHGGIDQYDRDSIINDFKNGTCKLLVATSVAARGLDVKHLILVVNYSCPNHYEDYVHRAGRTGRAGNKGYAYTFITEDQARYAGDIIKALELSGTAVPPDLEKLWSDFKDQQKAEGKIIKKSSGFSGKGFKFDETEQALANERKKLQKAALGLQDSDDEDAAVDIDEQIESMFNSKKRVKDMAAPGTSSVPAPTAGNAEKLEIAKRLALRINAQKNLGIESQVDVMQQATNAILRGGTILAPTVSAKTIAEQLAEKINAKLNYVPLEKQEEERQDGGQNESFKRYEEELEINDFPQTARWKVTSKEALQRISEYSEAAITIRGTYFPPGKEPKEGERKIYLAIESANELAVQKAKAEITRLIKEELIRLQNSYQPTNKGRYKVL

SEQ ID NO: 895249 - protein, 139 aa, Homo sapiens
SPRPAPPRPFRLSTGLVVQFGRRITYMEEVKEEVKKFNMRSVKGGGGNEKKSGPTVTKVVTVVTTKKAVVDSDKKKGELMENDQDAMEYFFMRRKKKVMVEEEDGDEDEEAESATGKRAAEDDEDDDVDTKKQKTDEDD

SEQ ID NO: 895250 - protein, 981 aa, Homo sapiens
GKYKAVELNALYFRKRLRRSRSRERDRSRERRRSRSRDRRRSRSRSRGRRSRSSSPGNKSKKTENRSRSKEKTDGGESSKEKKKDKDDKEDEKEKDAGNFDQNKLEEEMRKRKERVEKWREEQRKKAMENIGELKKEIEEMKQGKKWSLEDDDDDEDDPAEAEKEGNEMEGEELDPLDAYMEEVKEEVKKFNMRSVKGGGGNEKKSGPTVTKVVTVVTTKKAVVDSDKKKGELMENDQDAMEYSSEEEEVDLQTALTGYQTKQRKLLEPVDHGKIEYEPFRKNFYVEVPELAKMSQEEVNVFRLEMEGITVKGKGCPKPIKSWVQCGISMKILNSLKKHGYEKPTPIQTQAIPAIMSGRDLIGIAKTGSGKTIAFLLPMFRHIMDQRSLEEGEGPIAVIMTPTRELALQITKECKKFSKTLGLRVVCVYGGTGISEQIAELKRGAEIIVCTPGRMIDMLAANSGRVTNLRRVTYVVLDEADRMFDMGFEPQVMRIVDNVRPDRQTVMFSATFPRAMEALARRILSKPIEVQVGGRSVVCSDVEQQVIVIEEEKKFLKLLELLGHYQESGSVIIFVDKQEHADGLLKDLMRASYPCMSLHGGIDQYDRDSIINDFKNGTCKLLVATSVAARGLDVKHLILVVNYSCPNHYEDYVHRAGRTGRAGNKGYAYTFITEDQARYAGDIIKALELSGTAVPPDLEKLWSDFKDQQKAEGKIIKKSSGFSGKGFKFDETEQALANERKKLQKAALGLQDSDDEDAAVDIDEQIESMFNSKKRVKDMAAPGTSSVPAPTAGNAEKLEIAKRLALRINAQKNLGIESQVDVMQQATNAILRGGTILAPTVSAKTIAEQLAEKINAKLNYVPLEKQEEERQDGGQNESFKRYEEELEINDFPQTARWKVTSKEALQRISEYSEAAITIRGTYFPPGKEPKEGERKIYLAIESANELAVQKAKAEITRLIKEELIRLQNSYQPTNKGRYKVL

SEQ ID NO: 895251 - protein, 997 aa, Homo sapiens
GKYKAVELNALYFRKRLRRSRSRERDRSRERRRSRSRDRRRSRSRSRGRRSRSSSPGNKSKKTENRSRSKEKTDGGESSKEKKKDKDDKEDEKEKDAGNFDQNKLEEEMRKRKERVEKWREEQRKKAMENIGELKKEIEEMKQGKKWSLEDDDDDEDDPAEAEKEGNEMEGEELDPLDAYMEEVKEEVKKFNMRSVKGGGGNEKKSGPTVTKVVTVVTTKKAVVDSDKKKGELMENDQDAMEYSSEEEEVDLQTALTGYQTKQRKLLEPVDHGKIEYEPFRKNFYVEVPELAKMSQEEVNVFRLEMEGITVKGKGCPKPIKSWVQCGISMKILNSLKKHGYEKPTPIQTQAIPAIMSGRDLIGIAKTGSGKTIAFLLPMFRHIMDQRSLEEGEGPIAVIMTPTRELALQITKECKKFSKTLGLRVVCVYGGTGISEQIAELKRGAEIIVCTPGRMIDMLAANSGPSRFIELGFRDLNIKGRVTNLRRVTYVVLDEADRMFDMGFEPQVMRIVDNVRPDRQTVMFSATFPRAMEALARRILSKPIEVQVGGRSVVCSDVEQQVIVIEEEKKFLKLLELLGHYQESGSVIIFVDKQEHADGLLKDLMRASYPCMSLHGGIDQYDRDSIINDFKNGTCKLLVATSVAARGLDVKHLILVVNYSCPNHYEDYVHRAGRTGRAGNKGYAYTFITEDQARYAGDIIKALELSGTAVPPDLEKLWSDFKDQQKAEGKIIKKSSGFSGKGFKFDETEQALANERKKLQKAALGLQDSDDEDAAVDIDEQIESMFNSKKRVKDMAAPGTSSVPAPTAGNAEKLEIAKRLALRINAQKNLGIESQVDVMQQATNAILRGGTILAPTVSAKTIAEQLAEKINAKLNYVPLEKQEEERQDGGQNESFKRYEEELEINDFPQTARWKVTSKEALQRISEYSEAAITIRGTYFPPGKEPKEGERKIYLAIESANELAVQKAKAEITRLIKEELIRLQNSYQPTNKGRYKVL

SEQ ID NO: 895252 - protein, 873 aa, Homo sapiens
MRKRKERVEKWREEQRKKAMENIGELKKEIEEMKQGKKWSLEDDDDDEDDPAEAEKEGNEMEGEELDPLDAYMEEVKEEVKKFNMRSVKGGGGNEKKSGPTVTKVVTVVTTKKAVVDSDKKKGELMENDQDAMEYSSEEEEVDLQTALTGYQTKQRKLLEPVDHGKIEYEPFRKNFYVEVPELAKMSQEEVNVFRLEMEGITVKGKGCPKPIKSWVQCGISMKILNSLKKHGYEKPTPIQTQAIPAIMSGRDLIGIAKTGSGKTIAFLLPMFRHIMDQRSLEEGEGPIAVIMTPTRELALQITKECKKFSKTLGLRVVCVYGGTGISEQIAELKRGAEIIVCTPGRMIDMLAANSGRVTNLRRVTYVVLDEADRMFDMGFEPQVMRIVDNVRPDRQTVMFSATFPRAMEALARRILSKPIEVQVGGRSVVCSDVEQQVIVIEEEKKFLKLLELLGHYQESGSVIIFVDKQEHADGLLKDLMRASYPCMSLHGGIDQYDRDSIINDFKNGTCKLLVATSVAARGLDVKHLILVVNYSCPNHYEDYVHRAGRTGRAGNKGYAYTFITEDQARYAGDIIKALELSGTAVPPDLEKLWSDFKDQQKAEGKIIKKSSGFSGKGFKFDETEQALANERKKLQKAALGLQDSDDEDAAVDIDEQIESMFNSKKRVKDMAAPGTSSVPAPTAGNAEKLEIAKRLALRINAQKNLGIESQVDVMQQATNAILRGGTILAPTVSAKTIAEQLAEKINAKLNYVPLEKQEEERQDGGQNESFKRYEEELEINDFPQTARWKVTSKEALQRISEYSEAAITIRGTYFPPGKEPKEGERKIYLAIESANELAVQKAKAEITRLIKEELIRLQNSYQPTNKGRYKVL

SEQ ID NO: 895253 - protein, 243 aa, Homo sapiens
GKYKAVELNALYFRKRLRRSRSRERDRSRERRRSRSRDRRRSRSRSRGRRSRSSSPGNKSKKTENRSRSKEKTDGGESSKEKKKDKDDKEDEKEKDAGNFDQNKLEEEMRKRKERVEKWREEQRKKAMENIGELKKEIEEMKQGKKWSLEDDDDDEDDPAEAEKEGNEMEGEELDPLDAYMEEVKEEVKKFNMRSVKGGGGNEKKSGPTVTKVVTVVTTKKAVVDSDKKKGELMENDQDAMER

SEQ ID NO: 895254 - protein, 790 aa, Homo sapiens
EIIQLESGVGVEKKSGPTVTKVVTVVTTKKAVVDSDKKKGELMENDQDAMEYSSEEEEVDLQTALTGYQTKQRKLLEPVDHGKIEYEPFRKNFYVEVPELAKMSQEEVNVFRLEMEGITVKGKGCPKPIKSWVQCGISMKILNSLKKHGYEKPTPIQTQAIPAIMSGRDLIGIAKTGSGKTIAFLLPMFRHIMDQRSLEEGEGPIAVIMTPTRELALQITKECKKFSKTLGLRVVCVYGGTGISEQIAELKRGAEIIVCTPGRMIDMLAANSGRVTNLRRVTYVVLDEADRMFDMGFEPQVMRIVDNVRPDRQTVMFSATFPRAMEALARRILSKPIEVQVGGRSVVCSDVEQQVIVIEEEKKFLKLLELLGHYQESGSVIIFVDKQEHADGLLKDLMRASYPCMSLHGGIDQYDRDSIINDFKNGTCKLLVATSVAARGLDVKHLILVVNYSCPNHYEDYVHRAGRTGRAGNKGYAYTFITEDQARYAGDIIKALELSGTAVPPDLEKLWSDFKDQQKAEGKIIKKSSGFSGKGFKFDETEQALANERKKLQKAALGLQDSDDEDAAVDIDEQIESMFNSKKRVKDMAAPGTSSVPAPTAGNAEKLEIAKRLALRINAQKNLGIESQVDVMQQATNAILRGGTILAPTVSAKTIAEQLAEKINAKLNYVPLEKQEEERQDGGQNESFKRYEEELEINDFPQTARWKVTSKEALQRISEYSEAAITIRGTYFPPGKEPKEGERKIYLAIESANELAVQKAKAEITRLIKEELIRLQNSYQPTNKGRYKVL

SEQ ID NO: 895255 - protein, 758 aa, Homo sapiens
KAEVDNYYYGDKGCRCALEYSSEEEEVDLQTALTGYQTKQRKLLEPVDHGKIEYEPFRKNFYVEVPELAKMSQEEVNVFRLEMEGITVKGKGCPKPIKSWVQCGISMKILNSLKKHGYEKPTPIQTQAIPAIMSGRDLIGIAKTGSGKTIAFLLPMFRHIMDQRSLEEGEGPIAVIMTPTRELALQITKECKKFSKTLGLRVVCVYGGTGISEQIAELKRGAEIIVCTPGRMIDMLAANSGRVTNLRRVTYVVLDEADRMFDMGFEPQVMRIVDNVRPDRQTVMFSATFPRAMEALARRILSKPIEVQVGGRSVVCSDVEQQVIVIEEEKKFLKLLELLGHYQESGSVIIFVDKQEHADGLLKDLMRASYPCMSLHGGIDQYDRDSIINDFKNGTCKLLVATSVAARGLDVKHLILVVNYSCPNHYEDYVHRAGRTGRAGNKGYAYTFITEDQARYAGDIIKALELSGTAVPPDLEKLWSDFKDQQKAEGKIIKKSSGFSGKGFKFDETEQALANERKKLQKAALGLQDSDDEDAAVDIDEQIESMFNSKKRVKDMAAPGTSSVPAPTAGNAEKLEIAKRLALRINAQKNLGIESQVDVMQQATNAILRGGTILAPTVSAKTIAEQLAEKINAKLNYVPLEKQEEERQDGGQNESFKRYEEELEINDFPQTARWKVTSKEALQRISEYSEAAITIRGTYFPPGKEPKEGERKIYLAIESANELAVQKAKAEITRLIKEELIRLQNSYQPTNKGRYKVL

SEQ ID NO: 895256 - protein, 293 aa, Homo sapiens
GKYKAVELNALYFRKRLRRSRSRERDRSRERRRSRSRDRRRSRSRSRGRRSRSSSPGNKSKKTENRSRSKEKTDGGESSKEKKKDKDDKEDEKEKDAGNFDQNKLEEEMRKRKERVEKWREEQRKKAMENIGELKKEIEEMKQGKKWSLEDDDDDEDDPAEAEKEGNEMEGEELDPLDAYMEEVKEEVKKFNMRSVKGGGGNEKKSGPTVTKVVTVVTTKKAVVDSDKKKGELMENDQDAMEYFFMRRKKKVMVEEEDGDEDEEAESATGKRAAEDDEDDDVDTKKQKTDEDD

SEQ ID NO: 895257 - protein, 241 aa, Homo sapiens
MGRESRHYRKRSASRGRSGSRSRSRSPSDKRSKRGDDRRSRSRDRDRRRERSRSRDKRRSRSRDRKRLRRSRSRERDRSRERRRSRSRDRRRSRSRSRGRRSRSSSPGNKSKKTENRSRSKEKTDGGESSKEKKKDKDDKEDEKEKDAGNFDQNKLEEEMRKRKERVEKWREEQRKKAMENIGELKKEIEEMKQGKKWSLEDDDDDEDDPAEAEKEGNEMEGEELDPLDAKRGKRGDDSRS

SEQ ID NO: 895258 - protein, 455 aa, Homo sapiens
IGSQGVEIVEYSGLSAVEAEIVIEEEKKFLKLLELLGHYQESGSVIIFVDKQEHADGLLKDLMRASYPCMSLHGGIDQYDRDSIINDFKNGTCKLLVATSVAARGLDVKHLILVVNYSCPNHYEDYVHRAGRTGRAGNKGYAYTFITEDQARYAGDIIKALELSGTAVPPDLEKLWSDFKDQQKAEGKIIKKSSGFSGKGFKFDETEQALANERKKLQKAALGLQDSDDEDAAVDIDEQIESMFNSKKRVKDMAAPGTSSVPAPTAGNAEKLEIAKRLALRINAQKNLGIESQVDVMQQATNAILRGGTILAPTVSAKTIAEQLAEKINAKLNYVPLEKQEEERQDGGQNESFKRYEEELEINDFPQTARWKVTSKEALQRISEYSEAAITIRGTYFPPGKEPKEGERKIYLAIESANELAVQKAKAEITRLIKEELIRLQNSYQPTNKGRYKVL

SEQ ID NO: 895259 - protein, 407 aa, Homo sapiens
GKYKAVELNALYFRKRLRRSRSRERDRSRERRRSRSRDRRRSRSRSRGRRSRSSSPGNKSKKTENRSRSKEKTDGGESSKEKKKDKDDKEDEKEKDAGNFDQNKLEEEMRKRKERVEKWREEQRKKAMENIGELKKEIEEMKQGKKWSLEDDDDDEDDPAEAEKEGNEMEGEELDPLDAYMEEVKEEVKKFNMRSVKGGGGNEKKSGPTVTKVVTVVTTKKAVVDSDKKKGELMENDQDAMEYSSEEEEVDLQTALTGYQTKQRKLLEPVDHGKIEYEPFRKNFYVEVPELAKMSQEEVNVFRLEMEGITVKGKGCPKPIKSWVQCGISMKILNSLKKHGYEKPTPIQTQAIPAIMSGRDLIGIAKTGSGKTIAFLLPMFRHIMDQRSLEEGEGPIGTILFIKLFFK

SEQ ID NO: 895260 - protein, 813 aa, Homo sapiens
MEGEELDPLDAYMEEVKEEVKKFNMRSVKGGGGNEKKSGPTVTKVVTVVTTKKAVVDSDKKKGELMENDQDAMEYSSEEEEVDLQTALTGYQTKQRKLLEPVDHGKIEYEPFRKNFYVEVPELAKMSQEEVNVFRLEMEGITVKGKGCPKPIKSWVQCGISMKILNSLKKHGYEKPTPIQTQAIPAIMSGRDLIGIAKTGSGKTIAFLLPMFRHIMDQRSLEEGEGPIAVIMTPTRELALQITKECKKFSKTLGLRVVCVYGGTGISEQIAELKRGAEIIVCTPGRMIDMLAANSGRVTNLRRVTYVVLDEADRMFDMGFEPQVMRIVDNVRPDRQTVMFSATFPRAMEALARRILSKPIEVQVGGRSVVCSDVEQQVIVIEEEKKFLKLLELLGHYQESGSVIIFVDKQEHADGLLKDLMRASYPCMSLHGGIDQYDRDSIINDFKNGTCKLLVATSVAARGLDVKHLILVVNYSCPNHYEDYVHRAGRTGRAGNKGYAYTFITEDQARYAGDIIKALELSGTAVPPDLEKLWSDFKDQQKAEGKIIKKSSGFSGKGFKFDETEQALANERKKLQKAALGLQDSDDEDAAVDIDEQIESMFNSKKRVKDMAAPGTSSVPAPTAGNAEKLEIAKRLALRINAQKNLGIESQVDVMQQATNAILRGGTILAPTVSAKTIAEQLAEKINAKLNYVPLEKQEEERQDGGQNESFKRYEEELEINDFPQTARWKVTSKEALQRISEYSEAAITIRGTYFPPGKEPKEGERKIYLAIESANELAVQKAKAEITRLIKEELIRLQNSYQPTNKGRYKVL

SEQ ID NO: 895261 - protein, 686 aa, Homo sapiens
VPCSLVTAVVWYSDKVKGKGCPKPIKSWVQCGISMKILNSLKKHGYEKPTPIQTQAIPAIMSGRDLIGIAKTGSGKTIAFLLPMFRHIMDQRSLEEGEGPIAVIMTPTRELALQITKECKKFSKTLGLRVVCVYGGTGISEQIAELKRGAEIIVCTPGRMIDMLAANSGRVTNLRRVTYVVLDEADRMFDMGFEPQVMRIVDNVRPDRQTVMFSATFPRAMEALARRILSKPIEVQVGGRSVVCSDVEQQVIVIEEEKKFLKLLELLGHYQESGSVIIFVDKQEHADGLLKDLMRASYPCMSLHGGIDQYDRDSIINDFKNGTCKLLVATSVAARGLDVKHLILVVNYSCPNHYEDYVHRAGRTGRAGNKGYAYTFITEDQARYAGDIIKALELSGTAVPPDLEKLWSDFKDQQKAEGKIIKKSSGFSGKGFKFDETEQALANERKKLQKAALGLQDSDDEDAAVDIDEQIESMFNSKKRVKDMAAPGTSSVPAPTAGNAEKLEIAKRLALRINAQKNLGIESQVDVMQQATNAILRGGTILAPTVSAKTIAEQLAEKINAKLNYVPLEKQEEERQDGGQNESFKRYEEELEINDFPQTARWKVTSKEALQRISEYSEAAITIRGTYFPPGKEPKEGERKIYLAIESANELAVQKAKAEITRLIKEELIRLQNSYQPTNKGRYKVL

SEQ ID NO: 895262 - protein, 251 aa, Homo sapiens
MGRESRHYRKRSASRGRSGSRSRSRSPSDKRSKRGDDRRSRSRDRDRRRERSRSRDKRRSRSRDRKRLRRSRSRERDRSRERRRSRSRDRRRSRSRSRGRRSRSSSPGNKSKKTENRSRSKEKTDGGESSKEKKKDKDDKEDEKEKDAGNFDQNKLEEEMRKRKERVEKKKKKLETSSLSARVKLLRGSAKTPPRCAKWPPHLVARLGGTSPPSARTPTILASGDRGEHDGPPGFVAMGHLGLLPGLDCAS

SEQ ID NO: 895263 - protein, 428 aa, Homo sapiens
LVSSASSLLGHYQESGSVIIFVDKQEHADGLLKDLMRASYPCMSLHGGIDQYDRDSIINDFKNGTCKLLVATSVAARGLDVKHLILVVNYSCPNHYEDYVHRAGRTGRAGNKGYAYTFITEDQARYAGDIIKALELSGTAVPPDLEKLWSDFKDQQKAEGKIIKKSSGFSGKGFKFDETEQALANERKKLQKAALGLQDSDDEDAAVDIDEQIESMFNSKKRVKDMAAPGTSSVPAPTAGNAEKLEIAKRLALRINAQKNLGIESQVDVMQQATNAILRGGTILAPTVSAKTIAEQLAEKINAKLNYVPLEKQEEERQDGGQNESFKRYEEELEINDFPQTARWKVTSKEALQRISEYSEAAITIRGTYFPPGKEPKEGERKIYLAIESANELAVQKAKAEITRLIKEELIRLQNSYQPTNKGRYKVL

SEQ ID NO: 895264 - protein, 1384 aa, Homo sapiens
MKDLDGMDADILGLKKSNSAPSKKAAKDPGKGELPNHPKPAGGAIPTKKSLPSPSSSGHQNRRFSSEDLEDPLGGLLSYDEGGITKQPPVTQSKTASDKSPSTVRDQGPSIPLTPGDTPIRKKEELLFDDGDDIMATLGFGDSPKAEKRQIGDQEGPRPARSTLDELLGRGMATKLLARPGTGEHREFKLDKKYQRPQDSEDMWGDEDFTFGAYQPTVVSSEGRQSRRQSVSRFFADSGADPKGEPGSKQSPPMASSPIQPRKGGADWLGLKDEDLDLFPASPTREAHRESSVPVTPSVPPPASQHSTPAGLPPSRAKPPTEGAGSPAKASQASKLRASKEEKEDWLSHALSRKKSQGLAREQHAGTSEGLHLAGTAGHPPSGSLTWAFCHLHLERCLSSANLSPAHKGLSTQLLEGVLEQLHEERPCVRPGVSGSPVTQNHAASALPTGSPKRGTAPGDLSATEPATCFPSTQKPTEPSVPVQPLLPESLARSLLPSTEYQKQLLAAQVQLQCSPAELQAELLHSQARLAELEAQVRKLELERAQHELLLGSLQQQHQADLELIESAHRSRIKVLETSYQQREERLRRENEELSARYLSQCQEAEQARAELTAQHQRRLAAIAQEKDQEMERLRELQRASILDMRRDHEEQLQRLKLLKDREVDAATSATSHTRSLNSIIHQMEKFSSSLHELSSRVEASHLTTSQERELGIRQRDEQLRALQERLGQQQRDMEEERSRQQEVIGKMEARLNEQSRLLEQERWRVTAEQSKAESMQRALEEQRKVTAQQMAMERAELERAKSALLEEQKSVMLKCGEERRRLAAEWAEFSAQQKLSEQAELKIRASELRAEEKQLAAERAALEQERQELRLEKERINATALRVKLRAEEVESMSKVASEKYEEGERALREAQQVQAEQQARLQAVQQQQERLRKQEQHMHQEHLSLAQQRLQLDRARQDLPSSLVGLFPRAQGPAASSQSALMPPAPTTRWCSQPPTGLDPSPLHLHARLALLRHMAEQHLRSAVAPGSWTTARRRVLLALLQTCRNCGPGRLNNLPEMTAVLGRRTPPLGPMPNSDIDLSNLERLEKYRSFDRYRRRAEQEAQAPHWWRTYREYFGEKTDPKEKIDIGLPPPKVSRTQQLLERKQAIQELRANVEEERAARLRTVSLLDAVRAEWERTCGPYHKQRLAEYYGLYRDLFHGATFVPRVPLHVAYAVGEDDLMPVYCGNEVTPTEAAQAPEVTYEAEEGSLWTLLLTSLDGHLLEPDAEYLHWLLTNIPGNRVAEGQVTCPYLPPFPARGSGIHRLAFLLFKQDQPIDFSEDARPSPCYQLAQRTFRTFDFYKKHQETMTPAGLSFFQCRWDDSVTYIFHQLLDMREPVFEFVR

SEQ ID NO: 895265 - protein, 1124 aa, Homo sapiens
MTLPEKPVKLASHTRDTTGVSQMFPSSKARTKSLLGDDVFSTMAGLEEADAEVSVISEADPQALLQAMKDLDGMDADILGLKKSNSAPSKKAAKDPGKGELPNHPKPAGGAIPTKKSLPSPSSSGHQNRRFSSEDLEDPLGGLLSYDEGGITKQPPVTQSKTASDKSPSTVRDQGPSIPLTPGDTPIRKKEELLFDDGDDIMATLGFGDSPKAEKRQIGDQEGPRPARSTLDELLGRGMATKLLARPGTGEHREFKLDKKYQRPQDSEDMWGDEDFTFGAYQPTVVSSEGRQSRRQSVSRFFADSGADPKGEPGSKQSPPMASSPIQPRKGGADWLGLKDEDLDLFPASPTREAHRESSVPVTPSVPPPASQHSTPAGLPPSRAKPPTEGAGSPAKASQASKLRASKEEKEDWLSHALSRKKSQGLAREQHAGTSEGLHLAGTAGHPPSGSQPLTSTQGLEHAAAGGSSGTTARERPCVRPGVSGSPVTQNHAASALPTGSPKRGTAPGDLSATEPATCFPSTQKPTEPSVPVQPLLPESLARSLLPSTEYQKQLLAAQVQLQCSPAELQAELLHSQARLAELEAQVRKLELERAQHELLLGSLQQQHQADLELIESAHRSRIKVLETSYQQREERLRRENEELSARYLSQCQEAEQARAELTAQHQRRLAAIAQEKDQEMERLRELQRASILDMRRDHEEQLQRLKLLKDREVDAATSATSHTRSLNSIIHQMEKFSSSLHELSSRVEASHLTTSQERELGIRQRDEQLRALQERLGQQQRDMEEERSRQQEVIGKMEARLNEQSRLLEQERWRVTAEQSKAESMQRALEEQRKVTAQQMAMERAELERAKSALLEEQKSVMLKCGEERRRLAAEWAEFSAQQKLSKERAEREAERALQVDTQREGTLISLAKEQAELKIRASELRAEEKQLAAERAALEQERQELRLEKERINATALRVKLRAEEVESMSKVASEKYEEGERALREAQQVQAEQQARLQAVQQQQERLRKQEQHMHQEHLSLAQQRLQLDRARQDLPSSLVGLFPRAQGPAASSQSALMPPAPTTRWCSQPPTGLDPSPLHLHARLALLRHMAEQDRDFLENEQFFLETLKKGSYNLTSHSA

SEQ ID NO: 895266 - protein, 1151 aa, Homo sapiens
MAPKTKKGCKVTLPEKPVKLASHTRDTTGVSQMFPSSKARTKSLLGDDVFSTMAGLEEADAEVSVISEADPQALLQAMKDLDGMDADILGLKKSNSAPSKKAAKDPGKGELPNHPKPAGGAIPTKKSLPSPSSSGHQNRRFSSEDLEDPLGGLLSYDEGGITKQPPVTQSKTASDKSPSTVRDQGPSIPLTPGDTPIRKKEELLFDDGDDIMATLGFGDSPKAEKRQIGDQEGPRPARSTLDELLGRGMATKLLARPGTGEHREFKLDKKYQRPQDSEDMWGDEDFTFGAYQPTVVSSEGRQSRRQSVSRFFADSGADPKGEPGSKQSPPMASSPIQPRKGGADWLGLKDEDLDLFPASPTREAHRESSVPVTPSVPPPASQHSTPAGLPPSRAKPPTEGAGSPAKASQASKLRASKEEKEDWLSHALSRKKSQGLAREQHAGTSEGLHLAGTAGHPPSGSLTWAFCHLHLERCLSSANLSPAHKGLSTQLLEGVLEQLHEERPCVRPGVSGSPVTQNHAASALPTGSPKRGTAPGDLSATEPATCFPSTQKPTEPSVPVQPLLPESLARSLLPSTEYQKQLLAAQVQLQCSPAELQAELLHSQARLAELEAQVRKLELERAQHELLLGSLQQQHQADLELIESAHRSRIKVLETSYQQREERLRRENEELSARYLSQCQEAEQARAELTAQHQRRLAAIAQEKDQEMERLRELQRASILDMRRDHEEQLQRLKLLKDREVDAATSATSHTRSLNSIIHQMEKFSSSLHELSSRVEASHLTTSQERELGIRQRDEQLRALQERLGQQQRDMEEERSRQQEVIGKMEARLNEQSRLLEQERWRVTAEQSKAESMQRALEEQRKVTAQQMAMERAELERAKSALLEEQKSVMLKCGEERRRLAAEWAEFSAQQKLSKERAEREAERALQVDTQREGTLISLAKEQAELKIRASELRAEEKQLAAERAALEQERQELRLEKERINATALRVKLRAEEVESMSKVASEKYEEGERALREAQQVQAEQQARLQAVQQQQERLRKQEQHMHQEHLSLAQQRLQLDRARQDLPSSLVGLFPRAQGPAASSQSALMPPAPTTRWCSQPPTGLDPSPLHLHARLALLRHMAEQDRDFLENEQFFLETLKKGSYNLTSHSA

SEQ ID NO: 895267 - protein, 982 aa, Homo sapiens
MAPKTKKGCKVTLPEKPVKLASHTRDTTGVSQMFPSSKARTKSLLGDDVFSTMAGLEEADAEVSVISEADPQALLQAMKDLDGMDADILGLKKSNSAPSKKAAKDPGKGELPNHPKPAGGAIPTKKSLPSPSSSGHQNRRFSSEDLEDPLGGLLSYDEGGITKQPPVTQSKTASDKSPSTVRDQGPSIPLTPGDTPIRKKEELLFDDGDDIMATLGFGDSPKAEKRQIGDQEGPRPARSTLDELLGRGMATKLLARPGTGEHREFKLDKKYQRPQDSEDMWGDEDFTFGAYQPTVVSSEGRQSRRQSVSRFFADSGADPKGEPGSKQSPPMASSPIQPRKGGADWLGLKDEDLDLFPASPTREAHRESSVPVTPSVPPPASQHSTPAGLPPSRAKPPTEGAGSPAKASQASKLRASKEEKEDWLSHALSRKKSQGLAREQHAGTSEGLHLAGTAGHPPSGSLTWAFCHLHLERCLSSANLSPAHKGLSTQLLEGVLEQLHEERPCVRPGVSGSPVTQNHAASALPTGSPKRGTAPGDLSATEPATCFPSTQKPTEPSVPVQPLLPESLARSLLPSTEYQKQLLAAQVQLQCSPAELQAELLHSQARLAELEAQVRKLELERAQHELLLGSLQQQHQADLELIESAHRSRIKVLETSYQQREERLRRENEELSARYLSQCQEAEQARAELTAQHQRRLAAIAQEKDQEMERLRELQRASILDMRRDHEEQLQRLKLLKDREVDAATSATSHTRSLNSIIHQMEKFSSSLHELSSRVEASHLTTSQERELGIRQRDEQLRALQERLGQQQRDMEEERSRQQEVIGKMEARLNEQSRLLEQERWRVTAEQSKAESMQRALEEQRKVTAQQMAMERAELERAKSALLEEQKSVMLKCGEERRRLAAEWAEFSAQQKLSKERAEREAERALQVDTQREGTLISLAKVGPRASGQWRAQGCLRPSIWTHPLPVLGKESVALMSQEHRD

SEQ ID NO: 895268 - protein, 244 aa, Homo sapiens
  misc_feature (4)..(4): Xaa can be any naturally occurring amino acid
FGTXRDEKERAEREAERALQVDTQREGTLISLAKEQAELKIRASELRAEEKQLAAERAALEQERQELRLEKERINATALRVKLRAEEVESMSKVASEKYEEGERALREAQQVQAEQQARLQAVQQQQERLRKQEQHMHQEHLSLAQQRLQLDRARQDLPSSLVGLFPRAQGPAASSQSALMPPAPTTRWCSQPPTGLDPSPLHLHARLALLRHMAEQDRDFLENEQFFLETLKKGSYNLTSHSA

SEQ ID NO: 895269 - protein, 117 aa, Homo sapiens
MTLPEKPVKLASHTRDTTGVSQMFPSSKARTKSLLGDDVFSTMAGLEEADAEVSVISEADPQALLQAMKDLDGMDADILGLKKSNSAPSKKAAKDPGKGELPNHPKPAGGSVASEKG

SEQ ID NO: 895270 - protein, 1134 aa, Homo sapiens
MAPKTKKGCKVTLPEKPVKLASHTRDTTGVSQMFPSSKARTKSLLGDDVFSTMAGLEEADAEVSVISEADPQALLQAMKDLDGMDADILGLKKSNSAPSKKAAKDPGKGELPNHPKPAGGAIPTKKSLPSPSSSGHQNRRFSSEDLEDPLGGLLSYDEGGITKQPPVTQSKTASDKSPSTVRDQGPSIPLTPGDTPIRKKEELLFDDGDDIMATLGFGDSPKAEKRQIGDQEGPRPARSTLDELLGRGMATKLLARPGTGEHREFKLDKKYQRPQDSEDMWGDEDFTFGAYQPTVVSSEGRQSRRQSVSRFFADSGADPKGEPGSKQSPPMASSPIQPRKGGADWLGLKDEDLDLFPASPTREAHRESSVPVTPSVPPPASQHSTPAGLPPSRAKPPTEGAGSPAKASQASKLRASKEEKEDWLSHALSRKKSQGLAREQHAGTSEGLHLAGTAGHPPSGSQPLTSTQGLEHAAAGGSSGTTARERPCVRPGVSGSPVTQNHAASALPTGSPKRGTAPGDLSATEPATCFPSTQKPTEPSVPVQPLLPESLARSLLPSTEYQKQLLAAQVQLQCSPAELQAELLHSQARLAELEAQVRKLELERAQHELLLGSLQQQHQADLELIESAHRSRIKVLETSYQQREERLRRENEELSARYLSQCQEAEQARAELTAQHQRRLAAIAQEKDQEMERLRELQRASILDMRRDHEEQLQRLKLLKDREVDAATSATSHTRSLNSIIHQMEKFSSSLHELSSRVEASHLTTSQERELGIRQRDEQLRALQERLGQQQRDMEEERSRQQEVIGKMEARLNEQSRLLEQERWRVTAEQSKAESMQRALEEQRKVTAQQMAMERAELERAKSALLEEQKSVMLKCGEERRRLAAEWAEFSAQQKLSKERAEREAERALQVDTQREGTLISLAKEQAELKIRASELRAEEKQLAAERAALEQERQELRLEKERINATALRVKLRAEEVESMSKVASEKYEEGERALREAQQVQAEQQARLQAVQQQQERLRKQEQHMHQEHLSLAQQRLQLDRARQDLPSSLVGLFPRAQGPAASSQSALMPPAPTTRWCSQPPTGLDPSPLHLHARLALLRHMAEQDRDFLENEQFFLETLKKGSYNLTSHSA

SEQ ID NO: 895271 - protein, 1134 aa, Homo sapiens; identical to SEQ ID NO: 895270

SEQ ID NO: 895272 - protein, 1146 aa, Homo sapiens
MAPKTKKGCKVTLPEKPVKLASHTRDTTGVSQMFPSSKARTKSLLGDDVFSTMAGLEEADAEVSVISEADPQALLQAMKDLDGMDADILGLKKSNSAPSKKAAKDPGKGELPNHPKPAGGAIPTKKSLPSPSSSGHQNRRFSSEDLEDPLGGLLSYDEGGITKQPPVTQSKTASDKSPSTVRDQGPSIPLTPGDTPIRKKEELLFDDGDDIMATLGFGDSPKAEKRQIGDQEGPRPARSTLDELLGRGMATKLLARPGTGEHREFKLDKKYQRPQDSEDMWGDEDFTFGAYQPTVVSSEGRQSRRQSVSRFFADSGADPKGEPGSKQSPPMASSPIQPRKGGADWLGLKDEDLDLFPASPTREAHRESSVPVTPSVPPPASQHSTPAGLPPSRAKPPTEGAGSPAKASQASKLRASKEEKEDWLSHALSRKKSQGLAREQHAGTSEGLHLAGTAGHPPSGSLTWAFCHLHLERCLSSANLSPAHKGLSTQLLEGVLEQLHEERPCVRPGVSGSPVTQNHAASALPTGSPKRGTAPGDLSATEPATCFPSTQKPTEPSVPVQPLLPESLARSLLPSTEYQKQLLAAQVQLQCSPAELQAELLHSQARLAELEAQVRKLELERAQHELLLGSLQQQHQADLELIESAHRSRIKVLETSYQQREERLRRENEELSARYLSQCQEAEQARAELTAQHQRRLAAIAQEKDQEMERLRELQRASILDMRRDHEEQLQRLKLLKDREVDAATSATSHTRSLNSIIHQMEKFSSSLHELSSRVEASHLTTSQERELGIRQRDEQLRALQERLGQQQRDMEEERSRQQEVIGKMEARLNEQSRLLEQERWRVTAEQSKAESMQRALEEQRKVTAQQMAMERAELERAKSALLEEQKSVMLKCGEERRRLAAEWAEFSAQQKLSKERAEREAERALQVDTQREGTLISLAKEQAELKIRASELRAEEKQLAAERAALEQERQELRLEKERINATALRVKLRAEEVESMSKVASEKYEEGERALREAQQVQAEQQARLQAVQQQQERLRKQEQHMHQARLPECMAPLPPAPPASHLTAESFFLGERGQEHLSLAQQRLQLDRARQDLPSSLVGLFPRAQGPAASSQSGEWLQKEGPAAQDWAGAVLGVGRPSSSRSS

SEQ ID NO: 895273 - protein, 982 aa, Homo sapiens; identical to SEQ ID NO: 895267

SEQ ID NO: 895274 - protein, 103 aa, Homo sapiens
TQFCFLKASLPHLGSESQEVTEMGVVRAETHGMKIQKGLVQLFHSRCYGGPHLPEPGVCEGRDPVPRPTVGVCKPERTGLQIREESASCLAAEYWSQEPAMRF

SEQ ID NO: 895275 - protein, 102 aa, Homo sapiens
MFPGSLSRGRRAAVEMAWLPGSCARVAFAAGAAARYWTAWQGSAGPNPAAVAEAHGSLFCGRATSARAWSLRRPGPGSPAHSGGVQTRENWEVPSEAITDDV

SEQ ID NO: 895276 - protein, 115 aa, Homo sapiens
MAWLPGSCARVAFAAGAAARYWTAWQGSAGPNPAAVAEAHGSLFCGRATSARAWSLRRPGPGSPAHSGGVQTRENWIAYPLQSAEDGVATRLQIREESASCLAAEYWSQEPAMRF

SEQ ID NO: 895277 - protein, 120 aa, Homo sapiens [sequence omitted]

SEQ ID NO: 895278 - protein, 120 aa, Homo sapiens [sequence omitted]

SEQ ID NO: 895279 - protein, 77 aa, Homo sapiens
PPPFVRIGIFRLLKGLAHIRCDLFIPVVMEGHICQSLESAKAGTRFPGPQWGCANPRELGKLGSACSLGYPEGGVRR

SEQ ID NO: 895280 - protein, 102 aa, Homo sapiens; identical to SEQ ID NO: 895275

SEQ ID NO: 895281 - protein, 120 aa, Homo sapiens [sequence omitted]

SEQ ID NO: 895282 - protein, 102 aa, Homo sapiens; identical to SEQ ID NO: 895275

SEQ ID NO: 895283 - protein, 133 aa, Homo sapiens
MAWLPGSCARVAFAAGAAARYWTAWQGSAGPNPAAVAEAHGSLFCGRATSARAWSLRRPGPGSPAHSGGVQTRENWIAYPLQSAEDGVATRLQIREESASCLAAEYWSQEPAMRLYSQRMSVPRTSSCHQFGF

SEQ ID NO: 895284 - protein, 102 aa, Homo sapiens; identical to SEQ ID NO: 895275

SEQ ID NO: 895285 - protein, 102 aa, Homo sapiens; identical to SEQ ID NO: 895275

SEQ ID NO: 895286 - protein, 120 aa, Homo sapiens [sequence omitted]

SEQ ID NO: 895287 - protein, 120 aa, Homo sapiens [sequence omitted]

SEQ ID NO: 895288 - protein, 102 aa, Homo sapiens; identical to SEQ ID NO: 895275

SEQ ID NO: 895289 - protein, 101 aa, Homo sapiens
MPGLSWCARAPVLFPVTFRLAFGGHPGEGREMSGAVRETQPEEAPRERSWDIPELRSWAQRRLASLGRQWSHKKKDGIINNRNVFSHSFGDQKSEIRVLAE

SEQ ID NO: 895290 - protein, 106 aa, Homo sapiens
MDHSFVVGPHLPEPGVCEGRDPVPRPTVGVCKPERTGLQIREESASCLAAEYWSQEPAMSRCSLSVPLPWGFLSGGVVSRSCQAPRRKPHQDSLRKQALKNPVTFI

SEQ ID NO: 895291 - protein, 101 aa, Homo sapiens; identical to SEQ ID NO: 895289

SEQ ID NO: 895292 - protein, 41 aa, Homo sapiens
  misc_feature (14)..(14): Xaa can be any naturally occurring amino acid
  misc_feature (19)..(19): Xaa can be any naturally occurring amino acid
  misc_feature (30)..(30): Xaa can be any naturally occurring amino acid
MSVLLVLGALLVLXALLEXMVALDILVHLXLLGIRGLRVTK

SEQ ID NO: 895293 - protein, 109 aa, Homo sapiens
MFPGSLSRGRRAAVEMAWLPGSCARVAFAAGAAARYWTAWQGSAGPNPAAVAEAHGSLFCGRATSARAWSLRRPGPGSPAHSGGVQTRENWIAYPLQSAEDGVATSANS

SEQ ID NO: 895294 - protein, 458 aa, Homo sapiens
VDTDPLQDTLSSTKESEEGQLKSALEAGQVSSALTCHSFGDGSGAAGLELNCPSMGENTMKTEPTSPLVELQEISTVEVTNTFKKTDDFGSSNAPAVDLDHKFRCKVVDCLKFFRKAKLLHYHMKYFHGMEKSLEPEESPGKRHVQTRGPSASDKPSQETLTRKRVSASSPTTKDKEKNKEKKFKEFVRVKPKKKKKKKKKRETSSLSLRLVAPMWNGRIRGIHRLGAAVAPEGNQKKKRTILQFLTNYFYDVEALRDYLLQREMYKVHEKNRSYTWLEKQHGPYGAGAFFILKQGGAVKFRDKEWIRPDKYGHFSQEFWNFCEVPVEAVDAGDCDINYEGLDNLLRLKELQSLSLQRCCHVDDWCLSRLYPLADSLQELSLAGCPRISERGLACLHHLQNLRRLDISDLPAVSNPGLTQILVEEMLPNCEVVGVDWAEGLKSGPEEQPRDTASPVPA

SEQ ID NO: 895295 - protein, 171 aa, Homo sapiens
DKTGPFRLRNLSKMAAPWASLRLVAPMWNGRIRGIHRLGAAVAPEGNQKKKRTILQFLTNYFYDVEALRDYLLQREMYKVHEKNRFRDKEWIRPDKYGHFSQEFWNFCEVPVEAVDAGDCDINYEGLDNLRTSAGWTSRTSLPCPTLASLRYWWRRCCPIARLWESTGLRA

SEQ ID NO: 895296 - protein, 215 aa, Homo sapiens
SEEKTEVTARYEAGFKIGRGWASLRLVAPMWNGRIRGIHRLGAAVAPEGNQKKKRTILQFLTNYFYDVEALRDYLLQREMYKVHEKNRSYTWLEKQHGPYGAGAFFILKQGGAVKFRDKEWIRPDKYGHFSQEFWNFCEVPVEAVDAGDCDINYEGLDNLLRLKELQSLSLQRCCHVDDWCLSRLYPLADSLQELSLAGCPRISERGLACLHHLQ

SEQ ID NO: 895297 - protein, 142 aa, Homo sapiens
RLCETVLLVQVKGAGHHLMWAKGIQAATCNCGTSCLIYRRLGQTTEVILETRGRHGLNNYGSMNTCSVYTPEYKPNRHYRRKGASFVVLDWLCFCLWTPQCMWLPQHPAPEAPGGQQLPLAPSSPQKLRRRHSASTEAPLWE

SEQ ID NO: 895298 - protein, 185 aa, Homo sapiens
DKTGPFRLRNLSKMAAPWASLRLVAPMWNGRIRGIHRLGAAVAPEGNQKKKRTILQFLTNYFYDVEALRDYLLQREMYKVHEKNRFRDKEWIRPDKYGHFSQEFWNFCEVPVEAVDAGDCDINYEGLDNLLRLKELQSLSLQRCCHVDDWCLSRLYPLADSLQELSLAGCPRISERGLACLHHLQ

SEQ ID NO: 895299 - protein, 270 aa, Homo sapiens
RLVRPECMDNLSKMAAPWASLRLVAPMWNGRIRGIHRLGAAVAPEGNQKKKRTILQFLTNYFYDVEALRDYLLQREMYKVHEKNRSYTWLEKQHGPYGAGAFFILKQGGAVKFRDKEWIRPDKYGHFSQEFWNFCEVPVEAVDAGDCDINYEGLDNLLRLKELQSLSLQRCCHVDDWCLSRLYPLADSLQELSLAGCPRISERGLACLHHLQNLRRLDISDLPAVSNPGLTQILVEEMLPNCEVVGVDWAEGLKSGPEEQPRDTASPVPA

SEQ ID NO: 895300 - protein, 270 aa, Homo sapiens; identical to SEQ ID NO: 895299

SEQ ID NO: 895301 - protein, 270 aa, Homo sapiens; identical to SEQ ID NO: 895299

SEQ ID NO: 895302 - protein, 263 aa, Homo sapiens
MWDLVLEDRRMNSLRLVAPMWNGRIRGIHRLGAAVAPEGNQKKKRTILQFLTNYFYDVEALRDYLLQREMYKVHEKNRSYTWLEKQHGPYGAGAFFILKQGGAVKFRDKEWIRPDKYGHFSQEFWNFCEVPVEAVDAGDCDINYEGLDNLLRLKELQSLSLQRCCHVDDWCLSRLYPLADSLQELSLAGCPRISERGLACLHHLQNLRRLDISDLPAVSNPGLTQILVEEMLPNCEVVGVDWAEGLKSGPEEQPRDTASPVPA

SEQ ID NO: 895303 - protein, 264 aa, Homo sapiens
QNVLRLRYEAGGLSLRLVAPMWNGRIRGIHRLGAAVAPEGNQKKKRTILQFLTNYFYDVEALRDYLLQREMYKVHEKNRSYTWLEKQHGPYGAGAFFILKQGGAVKFRDKEWIRPDKYGHFSQEFWNFCEVPVEAVDAGDCDINYEGLDNLLRLKELQSLSLQRCCHVDDWCLSRLYPLADSLQELSLAGCPRISERGLACLHHLQNLRRLDISDLPAVSNPGLTQILVEEMLPNCEVVGVDWAEGLKSGPEEQPRDTASPVPA

SEQ ID NO: 895304 - protein, 244 aa, Homo sapiens
SEEKTEVTARYEAGLAAPWASLRLVAPMWNGRIRGIHRLGAAVAPEGNQKKKRTILQFLTNYFYDVEALRDYLLQREMYKVHEKNRFRDKEWIRPDKYGHFSQEFWNFCEVPVEAVDAGDCDINYEGLDNLLRLKELQSLSLQRCCHVDDWCLSRLYPLADSLQELSLAGCPRISERGLACLHHLQNLRRLDISDLPAVSNPGLTQILVEEMLPNCEVVGVDWAEGLKSGPEEQPRDTASPVPA

SEQ ID NO: 895305 - protein, 198 aa, Homo sapiens
DKTGPFRLRNLSKMAAPWASLRLVAPMWNGRIRGIHRLGAAVAPEGNQKKKRTILQFLTNYFYDVEALRDYLLQREMYKVHEKNRSYTWLEKQHGPYGAGAFFILKQGGAVKFRDKEWIRPDKYGHFSQEFWNFCEVPVEAVDAGDCDINYEGLDNLRTSAGWTSRTSLPCPTLASLRYWWRRCCPIARLWESTGLRA

SEQ ID NO: 895306 - protein, 195 aa, Homo sapiens
MSRVTYTYYIGLGKVLKRLEAWGRFRCPADTPFPVSRFRDKEWIRPDKYGHFSQEFWNFCEVPVEAVDAGDCDINYEGLDNLLRLKELQSLSLQRCCHVDDWCLSRLYPLADSLQELSLAGCPRISERGLACLHHLQNLRRLDISDLPAVSNPGLTQILVEEMLPNCEVVGVDWAEGLKSGPEEQPRDTASPVPA

SEQ ID NO: 895307 - protein, 144 aa, Homo sapiens
THTHAVLYLPTHTHTHAVLTLAYLPIHTHTHTRTHCPVPPYTHTRCPYTGLPAYTHTHTHTLSCTSLHTHTCCPYTGFLSFSPLFRNLRRLDISDLPAVSNPGLTQILVEEMLPNCEVVGVDWAEGLKSGPEEQPRDTASPVPA

SEQ ID NO: 895308 - protein, 270 aa, Homo sapiens; identical to SEQ ID NO: 895299

SEQ ID NO: 895309 - protein, 270 aa, Homo sapiens; identical to SEQ ID NO: 895299

SEQ ID NO: 895310 - protein, 270 aa, Homo sapiens; identical to SEQ ID NO: 895299

SEQ ID NO: 895311 - protein, 78 aa, Homo sapiens
ARCSRGSPGSLTSGSLNLREPYTSGALTSGTLSMPLFRPGEVKAQAVSSRREPHSPCQETLLKLSLCECTAISCRDPD

SEQ ID NO: 895312 - protein, 270 aa, Homo sapiens; identical to SEQ ID NO: 895299

SEQ ID NO: 895313 - protein, 270 aa, Homo sapiens; identical to SEQ ID NO: 895299

SEQ ID NO: 895314 - protein, 270 aa, Homo sapiens; identical to SEQ ID NO: 895299

SEQ ID NO: 895315 - protein, 212 aa, Homo sapiens
RLVRPECMDNLSKMAAPWASLRLVAPMWNGRIRGIHRLGAAVAPEGNQKKKRTILQFLTNYFYDVEALRDYLLQREMYKVHEKNRSYTWLEKQHGPYGAGAFFILKQGGAVKFRDKEWIRPDKYGHFSQEFWNFCEVPVEAVDAGDCDINYEGLDNLLRLKELQSLSLQRCCHVDDWCLSRLYPLADSLQELSLAGCPRISERGLACLHHLQ

SEQ ID NO: 895316 - protein, 206 aa, Homo sapiens
RTYYGLGTRLGVLSLRLVAPMWNGRIRGIHRLGAAVAPEGNQKKKRTILQFLTNYFYDVEALRDYLLQREMYKVHEKNRSYTWLEKQHGPYGAGAFFILKQGGAVKFRDKEWIRPDKYGHFSQEFWNFCEVPVEAVDAGDCDINYEGLDNLLRLKELQSLSLQRCCHVDDWCLSRLYPLADSLQELSLAGCPRISERGLACLHHLQ

SEQ ID NO: 895317 - protein, 215 aa, Homo sapiens; identical to SEQ ID NO: 895296

SEQ ID NO: 895318 - protein, 387 aa, Homo sapiens
MAAIPALDPEAEPSMDVILVGSSELSSSVSPGTGRDLIAYEVKANQRNIEDICICCGSLQVHTQHPLFEGGICAPCKDKFLDALFLYDDDGYQSYCSICCSGETLLICGNPDCTRCYCFECVDSLVGPGTSGKVHAMSNWVCYLCLPSSRSGLLQRRRKWRSQLKAFYDRESENPLEMFETVPVWRRQPVRVLSLFEDIKKELTSLGFLESGSDPGQLKHVVDVTDTVRKDVEEWGPFDLVYGATPPLGHTCDRPPSWYLFQFHRLLQYARPKPGSPRPFFWMFVDNLVLNKEDLDVASRFLEMEPVTIPDVHGGSLQNAVRVWSNIPAIRSSRHWALVSEEELSLLAQNKQSSKLAAKWPTKLVKNCFLPLREYFKYFSTELTSSL

SEQ ID NO: 895319 - protein, 244 aa, Homo sapiens
MAAIPALDPEAEPSMDVILVGSSELSSSVSPGTGRDLIAYEVKANQRNIEDICICCGSLQVHTQHPLFEGGICAPCKDKFLDALFLYDDDGYQSYCSICCSGETLLICGNPDCTRCYCFECVDSLVGPGTSGKVHAMSNWVCYLCLPSSRSGLLQRRRKWRSQLKAFYDRESENPLEMFETVPVWRRQPVRVLSLFEDIKKALAKLGFAKGPGRATSWGWCPPSGCGGGPLLGGPSGAWPPGLR

SEQ ID NO: 895320 - protein, 194 aa, Homo sapiens
MAAIPALDPEAEPSMDVILVGSSELSSSVSPGTGRDLIAYEVKANQRNIEDICICCGSLQVHTQHPLFEGGICAPCKDKFLDALFLYDDDGYQSYCSICCSGETLLICGNPDCTRCYCFECVDSLVGPGTSGKVHAMSNWVCYLCLPSSRSGLLQRRRKWRSQLKAFYDRESESLEISNRAVLGEQHPVAAFEL

SEQ ID NO: 895321 - protein, 372 aa, Homo sapiens
MAAIPALDPEAEPSMDVILVGSSELSSSVSPGTGRDICICCGSLQVHTQHPLFEGGICAPCKDKFLDALFLYDDDGYQSYCSICCSGETLLICGNPDCTRCYCFECVDSLVGPGTSGKVHAMSNWVCYLCLPSSRSGLLQRRRKWRSQLKAFYDRESENPLEMFETVPVWRRQPVRVLSLFEDIKKELTSLGFLESGSDPGQLKHVVDVTDTVRKDVEEWGPFDLVYGATPPLGHTCDRPPSWYLFQFHRLLQYARPKPGSPRPFFWMFVDNLVLNKEDLDVASRFLEMEPVTIPDVHGGSLQNAVRVWSNIPAIRSSRHWALVSEEELSLLAQNKQSSKLAAKWPTKLVKNCFLPLREYFKYFSTELTSSL

SEQ ID NO: 895322 - protein, 145 aa, Homo sapiens
MHLCGPSTGQGFIAGWYLFQFHRLLQYARPKPGSPRPFFWMFVDNLVLNKEDLDVASRFLEMEPVTIPDVHGGSLQNAVRVWSNIPAIRSSRHWALVSEEELSLLAQNKQSSKLAAKWPTKLVKNCFLPLREYFKYFSTELTSSL

SEQ ID NO: 895323 - protein, 2302 aa, Homo sapiens
MTSEEMTASVLIPVTQRKVVSAQSAADESSEKVSDINISKAHTVRRSGETSHTISQLNKLKEEPSGSNLPKILSIAREKIVSDENSNEKCWEKIMPDSAKNLNINCNNILRNHQHGLPQRQFYEMYNSVAEEDLCLETGIPSPLERKVFPGIQLELDRPSMGISPLGNQSVIIETGRAHPDSRRAVFHFHYEVDRRMSDTFCTLSENLILDDCGNCVPLPGGEEKQKKNYVAYTCKLMELAKNCDNKNEQLQCDHCDTLNDKYFCFEGSCEKVDMVYSGDSFCRKDFTDSQAAKTFLSHFEDFPDNCDDVEEDAFKSKKERSTLLVRRFCKNDREVKKSVYTGTRAIVRTLPSGHIGLTAWSYIDQKRNGPLLPCGRVMEPPSTVEIRQDGSQRLSEAQWYPIYNAVRREETENTVGSLLHFLTKLPASETAHGRISVGPCLKQCVRDTVCEYRATLQRTSISQYITGSLLEATTSLGARSGLLSTFGGSTGRMMLKERQPGPSVANSNALPSSSAGISKELIDLQPLIQFPEEVASILMEQEQTIYRRVLPVDYLCFLTRDLGTPECQSSLPCLKASISASILTTQNGEHNALEDLVMRFNEVSSWVTWLILTAGSMEEKREVFSYLVHVAKCCWNMGNYNAVMEFLAGLRSRKVLKMWQFMDQSDIETMRSLKDAMAQHESSCEYRKVVTRALHIPGCKVVPFCGVFLKELCEVLDGASGLMKLCPRYNSQEETLEFVADYSGQDNFLQRVGQNGLKNSEKESTVNSIFQVIRSCNRSLETDEEDSPSEGNSSRKSSLKDKSRWQFIIGDLLDSDNDIFEQSKEYDSHGSEDSQKAFDHGTELIPWYVLSIQADVHQFLLQGATVIHYDQDTHLSARCFLQLQPDNSTLTWVKPTTASPASSKAKLGVLNNTAEPGKFPLLGNAGLSSLTEGVLDLFAVKAVYMGHPGIDIHTVCVQNKLGSMFLSETGVTLLYGLQTTDNRLLHFVAPKHTAKMLFSGLLELTRAVRKMRKFPDQRQQWLRKQYVSLYQEDGRYEGPTLAHAVELFGGRRWSARNPSPGTSAKNAEKPNMQRNNTLGISTTKKKKKILMRGESGEVTDDEMATRKAKMHKECRSRSGSDPQDINEQEESEVNAIANPPNPLPSRRAHSLTTAGSPNLAAGTSSPIRPVSSPVLSSSNKSPSSAWSSSSWHGRIKGGMKGFQSFMVSDSNMSFVEFVELFKSFSVRSRKDLKDLFDVYAVPCNRSGSESAPLYTNLTIDENTSDLQPDLDLLTRNVSDLGLFIKSKQQLSDNQRQISDAIAAASIVTNGTGIESTSLGIFGVGILQLNDFLVNCQGEHCTYDEILSIIQKFEPSISMCHQGLMSFEGFARFLMDKENFASKNDESQENIKELQLPLSYYYIESSHNTYLTGHQLKGESSVELYSQVLLQGCRSVELDCWDGDDGMPIIYHGHTLTTKIPFKEVVEAIDRSAFINSDLPIIISIENHCSLPQQRKMAEIFKTVFGEKLVTKFLFETDFSDDPMLPSPDQLRKKVLLKNKKLKAHQTPVDILKQKAHQLASMQVQAYNGGNANPRPANNEEEEDEEDEYDYDYESLSDDNILEDRPENKSCNDKLQFEYNEEIPKRIKKADNSACNKGKVYDMELGEEFYLDQNKKESRQIAPELSDLVIYCQAVKFPGLSTLNASGSSRGKERKSRKSIFGNNPGRMSPGETASFNKTSGKSSCEGIRQTWEESSSPLNPTTSLSAIIRTPKCYHISSLNENAAKRLCRRYSQKLTQHTACQLLRTYPAATRIDSSNPNPLMFWLHGIQLVALNYQTDDLPLHLNAAMFEANGGCGYVLKPPVLWDKNCPMYQKFSPLERDLDSMDPAVYSLTIVSGQNVCPSNSMGSPCIEVDVLGMPLDSCHFRTKPIHRNTLNPMWNEQFLFHVHFEDLVFLRFAVVENNSSAVTAQRIIPLKALKRGYRHLQLRNLHNEVLEISSLFINSRRMEENSSGNTMSASSMFNTEERKCLQTHRVTVHGVPGPEPFTVFTINGGTKAKQLLQQILTNEQDIKPVTTDYFLMEEKYFISKEKNECRKQPFQRAIGPEEEIMQILSSWFPEEGYMGRIVLKTQQENLEEKNIVQDDKEVILSSEEESFFVQVHDVSPEQPRTVIKAPRVSTAQDVIQQTLCKAKYSYSILSNPNPSDYVLLEEVVKDTTNKKTTTPKSSQRVLLDQECVFQAQSKWKGAGKFILKLKEQVQASREDKKKGISFASELKKLTKSTKQPRGLTSPSQLLTSESIQTKEEKPVGGLSSSDTMDYRQ

SEQ ID NO: 895324 - protein, 104 aa, Homo sapiens
MKPRGLPFYKCQQLEKSSRIDLEQGSASLSVKGQTVNILGLGAIKYVATTQFCHCSAKAAIDNTYMNERGCIPIKLYLWTLKQKKKMGLVDLREEALPADYLLR

SEQ ID NO: 895325 - protein, 1994 aa, Homo sapiens
MVSEGSAAGRDFAGMEEVRQLHVRFCKGIKIWHQAWFLCSLLGREPQEREAGCQLWLCTLSAVLKVGWLFPLSEVPNFTLLKDGCGCWRLKEDQIYNAVRREETENTVGSLLHFLTKLPASETAHGRISVGPCLKQCVRDTVCEYRATLQRTSISQYITGSLLEATTSLGARSGLLSTFGGSTGRMMLKERQPGPSVANSNALPSSSAGISKELIDLQPLIQFPEEVASILMEQEQTIYRRVLPVDYLCFLTRDLGTPECQSSLPCLKASISASILTTQNGEHNALEDLVMRFNEVSSWVTWLILTAGSMEEKREVFSYLVHVAKCCWNMGNYNAVMEFLAGLRSRKVLKMWQFMDQSDIETMRSLKDAMAQHESSCEYRKVVTRALHIPGCKVVPFCGVFLKELCEVLDGASGLMKLCPRYNSQEETLEFVADYSGQDNFLQRVGQNGLKNSEKESTVNSIFQVIRSCNRSLETDEEDSPSEGNSSRKSSLKDKSRWQFIIGDLLDSDNDIFEQSKEYDSHGSEDSQKAFDHGTELIPWYVLSIQADVHQFLLQGATVIHYDQDTHLSARCFLQLQPDNSTLTWVKPTTASPASSKAKLGVLNNTAEPGKFPLLGNAGLSSLTEGVLDLFAVKAVYMGHPGIDIHTVCVQNKLGSMFLSETGVTLLYGLQTTDNRLLHFVAPKHTAKMLFSGLLELTRAVRKMRKFPDQRQQWLRKQYVSLYQEDGRYEGPTLAHAVELFGGRRWSARNPSPGTSAKNAEKPNMQRNNTLGISTTKKKKKILMRGESGEVTDDEMATRKAKMHKECRSRSGSDPQDINEQEESEVNAIANPPNPLPSRRAHSLTTAGSPNLAAGTSSPIRPVSSPVLSSSNKSPSSAWSSSSWHGRIKGGMKGFQSFMVSDSNMSFVEFVELFKSFSVRSRKDLKDLFDVYAVPCNRSGSESAPLYTNLTIDENTSDLQPDLDLLTRNVSDLGLFIKSKQQLSDNQRQISDAIAAASIVTNGTGIESTSLGIFGVGILQLNDFLVNCQGEHCTYDEILSIIQKFEPSISMCHQGLMSFEGFARFLMDKENFASKNDESQENIKELQLPLSYYYIESSHNTYLTGHQLKGESSVELYSQVLLQGCRSVELDCWDGDDGMPIIYHGHTLTTKIPFKEVVEAIDRSAFINSDLPIIISIENHCSLPQQRKMAEIFKTVFGEKLVTKFLFETDFSDDPMLPSPDQLRKKVLLKNKKLKAHQTPVDILKQKAHQLASMQVQAYNGGNANPRPANNEEEEDEEDEYDYDYESLSDDNILEDRPENKSCNDKLQFEYNEEIPKRIKKADNSACNKGKVYDMELGEEFYLDQNKKESRQIAPELSDLVIYCQAVKFPGLSTLNASGSSRGKERKSRKSIFGNNPGRMSPGETASFNKTSGKSSCEGIRQTWEESSSPLNPTTSLSAIIRTPKCYHISSLNENAAKRLCRRYSQKLTQHTACQLLRTYPAATRIDSSNPNPLMFWLHGIQLVALNYQTDDLPLHLNAAMFEANGGCGYVLKPPVLWDKNCPMYQKFSPLERDLDSMDPAVYSLTIVSGQNVCPSNSMGSPCIEVDVLGMPLDSCHFRTKPIHRNTLNPMWNEQFLFHVHFEDLVFLRFAVVENNSSAVTAQRIIPLKALKRGYRHLQLRNLHNEVLEISSLFINSRRMEENSSGNTMSASSMFNTEERKCLQTHRVTVHGVPGPEPFTVFTINGGTKAKQLLQQILTNEQDIKPVTTDYFLMEEKYFISKEKNECRKQPFQRAIGPEEEIMQILSSWFPEEGYMGRIVLKTQQENLEEKNIVQDDKEVILSSEEESFFVQVHDVSPEQPRTVIKAPRVSTAQDVIQQTLCKAKYSYSILSNPNPSDYVLLEEVVKDTTNKKTTTPKSSQRVLLDQECVFQAQSKWKGAGKFILKLKEQVQASREDKKKGISFASELKKLTKSTKQPRGLTSPSQLLTSESIQTKEEKPVGGLSSSDTMDYRQ

SEQ ID NO: 895326 - protein, 1994 aa, Homo sapiens; identical to SEQ ID NO: 895325

SEQ ID NO: 895327 - protein, 1103 aa, Homo sapiens [sequence omitted]

SEQ ID NO: 895328 - protein, 318 aa, Homo sapiens
TTHHKLTTTLTYTSRFSMFNTEERKCLQTHRVTVHGVPGPEPFTVFTINGGTKAKQLLQQILTNEQDIKPVTTDYFLMEEKYFISKEKNECRKQPFQRAIGPEEEIMQILSSWFPEEGYMGRIVLKTQQENLEEKNIVQDDKEVILSSEEESFFVQVHDVSPEQPRTVIKAPRVSTAQDVIQQTLCKAKYSYSILSNPNPSDYVLLEEVVKDTTNKKTTTPKSSQRVLLDQECVFQAQSKWKGAGKFILKLKEQVQASREDKKKGISFASELKKLTKSTKQPRGLTSPSQLLTSESIQTKEEKPVGGLSSSDTMDYRQ

SEQ ID NO: 895329 - protein, 320 aa, Homo sapiens
MCEIDLISIRDNNPARGSTMFNTEERKCLQTHRVTVHGVPGPEPFTVFTINGGTKAKQLLQQILTNEQDIKPVTTDYFLMEEKYFISKEKNECRKQPFQRAIGPEEEIMQILSSWFPEEGYMGRIVLKTQQENLEEKNIVQDDKEVILSSEEESFFVQVHDVSPEQPRTVIKAPRVSTAQDVIQQTLCKAKYSYSILSNPNPSDYVLLEEVVKDTTNKKTTTPKSSQRVLLDQECVFQAQSKWKGAGKFILKLKEQVQASREDKKKGISFASELKKLTKSTKQPRGLTSPSQLLTSESIQTKEEKPVGGLSSSDTMDYRQ

SEQ ID NO: 895330 - protein, 319 aa, Homo sapiens
NHDPIVFYTVTSHPTSYTMFNTEERKCLQTHRVTVHGVPGPEPFTVFTINGGTKAKQLLQQILTNEQDIKPVTTDYFLMEEKYFISKEKNECRKQPFQRAIGPEEEIMQILSSWFPEEGYMGRIVLKTQQENLEEKNIVQDDKEVILSSEEESFFVQVHDVSPEQPRTVIKAPRVSTAQDVIQQTLCKAKYSYSILSNPNPSDYVLLEEVVKDTTNKKTTTPKSSQRVLLDQECVFQAQSKWKGAGKFILKLKEQVQASREDKKKGISFASELKKLTKSTKQPRGLTSPSQLLTSESIQTKEEKPVGGLSSSDTMDYRQ

SEQ ID NO: 895331 - protein, 319 aa, Homo sapiens
PAHKNVREQNIKNACSYTMFNTEERKCLQTHRVTVHGVPGPEPFTVFTINGGTKAKQLLQQILTNEQDIKPVTTDYFLMEEKYFISKEKNECRKQPFQRAIGPEEEIMQILSSWFPEEGYMGRIVLKTQQENLEEKNIVQDDKEVILSSEEESFFVQVHDVSPEQPRTVIKAPRVSTAQDVIQQTLCKAKYSYSILSNPNPSDYVLLEEVVKDTTNKKTTTPKSSQRVLLDQECVFQAQSKWKGAGKFILKLKEQVQASREDKKKGISFASELKKLTKSTKQPRGLTSPSQLLTSESIQTKEEKPVGGLSSSDTMDYRQ

SEQ ID NO: 895332 - protein, 807 aa, Homo sapiens [sequence omitted]

SEQ ID NO: 895333 - protein, 679 aa, Homo sapiens
QPALARWHGRVGGRGGGGGGGGGGGGGEKMATSNNPRKFSEKIALHNQKQAEETAAFEEVMKDLSLTRAARLQLQKSQYLQLGPSRGQYYGGSLPNVNQIGSGTMDLPFQPSGFLGEALAAAPVSLTPFQSSGLDTSRTTRHHGLVDRVYRERGRLGSPHRRPLSVDKHGRQADSCPYGTMYLSPPADTSWRRTNSDSALHQSTMTPTQPESFSSGSQDVHQKRVLLLTVPGMEETTSEADKNLSKQAWDTKKTGSRPKSCEVPGINIFPSADQENTTALIPATHNTGGSLPDLTNIHFPSPLPTPLDPEEPTFPALSSSSSTGNLAANLTHLGIGGAGQGMSTPGSSPQHRPAGVSPLSLSTEARRQQASPTLSPLSPITQAVAMDALSLEQQLPYAFFTQAGSQQPPPQPQPPPPPPPASQQPPPPPPPQAPVRLPPGGPLLPSASLTRGPQPPPLAVTVPSSLPQSPPENPGQPSMGIDIASAPALQQYRTSAGSPANQSPTSPVSNQGFSPGSSPQHTSTLGSVFGDAYYEQQMAARQANALSHQLEQFNMMENAISSSSLYSPGSTLNYSQAAMMGLTGSHGSLPDSQQLGYASHSGIPNIILTVTGESPPSLSKELTSSLAGVGDVSFDSDSQFPLDELKIDPLTLDGLHMLNDPDMVLADPATEDTFRMDRL

SEQ ID NO: 895334 - protein, 589 aa, Homo sapiens
QPALARWHGRVGGRGGGGGGGGGGGGGEKMATSNNPRKFSEKIALHNQKQAEETAAFEEVMKDLSLTRAARLQLQKSQYLQLGPSRGQYYGGSLPNVNQIGSGTMDLPFQTPFQSSGLDTSRTTRHHGLVDRVYRERGRLGSPHRRPLSVDKHGRQADSCPYGTMYLSPPADTSWRRTNSDSALHQSTMTPTQPESFSSGSQDVHQKRVLLLTVPGMEETTSEADKNLSKQAWDTKKTGSRPKSCEVPGINIFPSADQENTTALIPATHNTGGSLPDLTNIHFPSPLPTPLDPEEPTFPALSSSSSTGNLAANLTHLGIGGAGQGMSTPGSSPQHRPAGVSPLSLSTEARRQQASPTLSPLSPITQAVAMDALSLEQQLPYAFFTQAGSQQPPPQPQPPPPPPPASQQPPPPPPPQAPVRLPPGGPLLPSASLTRGPQPPPLAVTVPSSLPQSPPENPGQPSMGIDIASAPALQQYRTSAGSPANQSPTSPVSNQGFSPGSSPQLEQFNMMENAISSSSLYSPGSTLNYSQAAMMGLTGSHGSLPDSQQLGYASHSGIPNIILTVTGESPPSLSKELTTTEDTFRMDRL

SEQ ID NO: 895335 - protein, 435 aa, Homo sapiens
MNNRLRLQKTGSRPKSCEVPGINIFPSADQENTTALIPATHNTGGSLPDLTNIHFPSPLPTPLDPEEPTFPALSSSSSTGNLAANLTHLGIGGAGQGMSTPGSSPQHRPAGVSPLSLSTEARRQQASPTLSPLSPITQAVAMDALSLEQQLPYAFFTQAGSQQPPPQPQPPPPPPPASQQPPPPPPPQAPVRLPPGGPLLPSASLTRGPQPPPLAVTVPSSLPQSPPENPGQPSMGIDIASAPALQQYRTSAGSPANQSPTSPVSNQGFSPGSSPQHTSTLGSVFGDAYYEQQMAARQANALSHQLEQFNMMENAISSSSLYSPGSTLNYSQAAMMGLTGSHGSLPDSQQLGYASHSGIPNIILTVTGESPPSLSKELTSSLAGVGDVSFDSDSQFPLDELKIDPLTLDGLHMLNDPDMVLADPATEDTFRMDRL

SEQ ID NO: 895336 - protein, 454 aa, Homo sapiens
QPALARWHGRVGGRGGGGGGGGGGGGGEKMATSNNPRKFSEKIALHNQKQAEETAAFEEVMKDLSLTRAARLQLQKSQYLQLGPSRGQYYGGSLPNVNQIGSGTMDLPFQTPFQSSGLDTSRTTRHHGLVDRVYRERGRLGSPHRRPLSVDKHGRQADSCPYGTMYLSPPADTSWRRTNSDSALHQSTMTPTQPESFSSGSQDVHQKRVLLLTVPGMEETTSEADKNLSKQAWDTKKTGSRPKSCEVPGINIFPSADQENTTALIPATHNTGGSLPDLTNIHFPSPLPTPLDPEEPTFPALSSSSSTGNLAANLTHLGIGGAARLEQFNMMENAISSSSLYSPGSTLNYSQAAMMGLTGSHGSLPDSQQLGYASHSGIPNIILTVTGESPPSLSKELTSSLAGVGDVSFDSDSQFPLDELKIDPLTLDGLHMLNDPDMVLADPATEDTFRMDRL

SEQ ID NO: 895337 - protein, 122 aa, Homo sapiens
LAPPPVMTAGMSPDIASIPGDRVARRACLVRHMDASDGARAKQCLLSPPHPPVTGESPPSLSKELTSSLAGVGDVSFDSDSQFPLDELKIDPLTLDGLHMLNDPDMVLADPATEDTFRMDRL

SEQ ID NO: 895338 - protein, 109 aa, Homo sapiens
RKGRQETPPALLVPAVCRPQADPSQPAGASCPGLRVCCWRRGLSQWHCPLNSPHADSCPYGTMYLSPPADTSWRRSVAGHPPPAPFLLETKPNSHHGYMWKSRTQSLKQ

SEQ ID NO: 895339 - protein, 113 aa, Homo sapiens
MDGRVQLIKALLALPIRPATRRWRNPIPFPETFDGDTDRLPEFIVQTGSYMFVDENTFSSDALKVTFLITRLTGPALQWVIPYIKKESPLLNDYRGFLAEMKRVFGWEEDEDF

SEQ ID NO: 895340 - protein, 113 aa, Homo sapiens; identical to SEQ ID NO: 895339

SEQ ID NO: 895341 - protein, 113 aa, Homo sapiens; identical to SEQ ID NO: 895339

SEQ ID NO: 895342 - protein, 114 aa, Homo sapiens
MYIWTLSCAPAASWAPVTHWTDHPLPPLPSPLLPTRLPDDYIILPTDLRCHSHRHPSHPTDRLLLLVIWTHLGGIWAGHSPWTVIQTAGRPPRDLSPSARPISSPPPETSCVLA

SEQ ID NO: 895343 - protein, 113 aa, Homo sapiens; identical to SEQ ID NO: 895339

SEQ ID NO: 895344 - protein, 113 aa, Homo sapiens; identical to SEQ ID NO: 895339

SEQ ID NO: 895345 - protein, 113 aa, Homo sapiens; identical to SEQ ID NO: 895339

SEQ ID NO: 895346 - protein, 181 aa, Homo sapiens
SGLERKRTPARISGGGSAMVGGGGVGGGLLENANPLIYQRSGERPVTAGEEDEQVPDSIDAREIFDLIRSINDPEHPLTLEELNVVEQVRVQVSDPESTVAVAFTPTIPHCSMATLIGLSIKVKLLRSLPQRFKMDVHITPGTHASEHAVNKQLADKERVAAALENTHLLEVVNQCLSARS

SEQ ID NO: 895347 - protein, 289 aa, Homo sapiens
SGLERKRTPARISGGGSAMVGGGGVGGGLLENANPLIYQRSGERPVTAGEEDEQVPDSIDAREIFDLIRSINDPEHPLTLEELNVVEQVRVQVSDPESTVAVAFTPTIPHCSMATLIGLSIKVKLLRSLPQRFKTVPDAMTLNGGGSGAGGSRGGGQERERRRGSTPWGPAPPLHRRSMPVDERDLQAALTPGALTAAAAGTGTQGPRLDWPEDSEDSLSSGGSDSDESVYKVLLLGAPGVGKSALARIFGGVEDGPEAEAAGHTYDRSIVVDGEEASLMVYDIWEQVG

SEQ ID NO: 895348 - protein, 168 aa, Homo sapiens
AAARPSRPAGAARRAPRPPPPPSLYQRSGERPVTAGEEDEQVPDSIDAREIFDLIRSINDPEHPLTLEELNVVEQVRVQVSDPESTVAVAFTPTIPHCSMATLIGLSIKVKLLRSLPQRFKMDVHITPGTHASEHAVNKQLADKERVAAALENTHLLEVVNQCLSARS

SEQ ID NO: 895349 - protein, 181 aa, Homo sapiens; identical to SEQ ID NO: 895346

SEQ ID NO: 895350 - protein, 181 aa, Homo sapiens
SGLERKRTPARISGGGSAMVGGGGVGGGLLENANPLIYQRSGERPVTAGEEDEQVPDSIDAREIFDLIRSINDPEHPLTLEELNVVEQVRVQVSDPESTVAVAFTPTIPHCSMATLIGLSIKVKLLRSLPQRFKMDVHITPGTHASEHAGPECVRLQQRRRQPGGGILRRQIRWAQVVEVA

SEQ ID NO: 895351 - protein, 202 aa, Homo sapiens
THASEHAVNKQLADKERVAAALENTHLLEVVNQCLSALLLSLALTPQPAYWYPGPSSCQGCDRGTIVSRSNAEELDILVICKYPLIYNGSEERRPVTAGEEDEQVPDSIDAREIFDLIRSINDPEHPLTLEELNVVEQVRVQVSDPESTVAVAFTPTIPHCSMATLIGLSIKVKLLRSLPQRFKMDVHITPGTHASEHAARS

SEQ ID NO: 895352 - protein, 68 aa, Homo sapiens
SAMVGGGGVGGGLLENANPLIYQRSGERPVTAGEEDEQVPDSIDAREIFDIRRCWARAGSGGLRWGEQ

SEQ ID NO: 895353 - protein, 181 aa, Homo sapiens; identical to SEQ ID NO: 895346

SEQ ID NO: 895354 - protein, 179 aa, Homo sapiens
SGLERKRTPARISGGGSAMVGGGGVGGGLLENANPLIYQRSGERPVTAGEEDEQVPDSIDAREIFDLIRSINDPEHPLTLEELNVVEQVRVQVSDPESTVAVAFTPTIPHCSMATLIGLSIKVKLLRSLPQRFKMDVHITPGTHASEHAGPECVRLQQRRRQPGGGILRRQISEQATCR

SEQ ID NO: 895355 - protein, 84 aa, Homo sapiens
MLTTSPTGRTRDFDLIRSINDPEHPLTLEELNVVEQVRVQVSDPESTVAVAFTPTIPHCSMATLIGLSGYSGTVGLVGDCRASR

SEQ ID NO: 895356 - protein, 84 aa, Homo sapiens
SGLERKRTPARISGGGSAMVGGGGVGGGLLENANPLIYQRSGERPVTAGEEDEQVPDSIDAREIFDIRRCWARAGSGGLRWGEQ

SEQ ID NO: 895357 - protein, 121 aa, Homo sapiens
IGNAAVVSREEGFLDNAKCPSSSKRSVYRPVTARGGRHNDTFPMAIDALRDLLISRSVLSGSDWAGFRCGRLCCVWCGSDVISELAYEIEQDCNPHHGRYHGKKGSKWARAQSPFSFTSHI

SEQ ID NO: 895358 - protein, 152 aa, Homo sapiens
SGLERKRTPARISGGGSAMVGGGGVGGGLLENANPLIYQRSGERPVTAGEEDEQVPDSIDAREIFDLIRSINDPEHPLTLEELNVVEQVRVQVSDPESTVAVAFTPTIPHCSMATLIGLSIKVKLLRSLPQRFKMDVHITPGTHASEHAARS

SEQ ID NO: 895359 - protein, 84 aa, Homo sapiens; identical to SEQ ID NO: 895356

SEQ ID NO: 895360 - protein, 1509 aa, Homo sapiens
RGPRRARVAVGSSSSNTSSSSSPGGGADPERPGAPRLPGARRGGSSPGAAARALGSAPRLGDPDSRPSERVPRRRPRARGGSGRRQPGRGAATARAGHPQEPQSAEGAAPPSGAGPRGLPGPSPPPGPEGRVIGRAAGRKGGREPPPPAPPPPLAPTPGRRARAARPEAPAMASPPRHGPPGPASGDGPNLNNNNNNNNHSVRKCGYLRKQKHGHKRFFVLRGPGAGGDEATAGGGSAPQPPRLEYYESEKKWRSKAGAPKRVIALDCCLNINKRADAKHKYLIALYTKDEYFAVAAENEQEQEGWYRALTDLVSEGRAAAGDAPPAAAPAASCSASLPGALGGSAGAAGAEDSYGLVAPATAAYREVWQVNLKPKGLGQSKNLTGVYRLCLSARTIGFVKLNCEQPSVTLQLMNIRRCGHSDSFFFIEVGRSAVTGPGELWMQADDSVVAQNIHETILEAMKALKELFEFRPRSKSQSSGSSATHPISVPGARRHHHLVNLPPSQTGLVRRSRTDSLAATPPAAKCSSCRVRTASEGDGGAAAGAAAAGARPVSVAGSPLSPGPVRAPLSRSHTLSGGCGGRGSKVALLPAGGALQHSRSMSMPVAHSPPAATSPGSLSSSSGHGSGSYPPPPGPHPPLPHPLHHGPGQRPSSGSASASGSPSDPGFMSLDEYGSSPGDLRAFCSHRSNTPESIAETPPARDGGGGGEFYGYMTMDRPLSHCGRSYRRVSGDAAQDLDRGLRKRTYSLTTPARQRPVPQPSSASLDEYTLMRATFSGSAGRLCPSCPASSPKVAYHPYPEDYGDIEIGSHRSSSSNLGADDGYMPMTPGAALAGSGSGSCRSDDYMPMSPASVSAPKQILQPRAAAAAAAAVPSAGPAGPAPTSAAGRTFPASGGGYKASSPAESSPEDSGYMRMWCGSKLSMEHADGKLLPNGDYLNVSPSDAVTTGTPPDFFSAALHPGGEPLRGVPGCCYSSLPRSYKAPYTCGGDSDQYVLMSSPVGRILEEERLEPQATPGPSQAASAFGAGPTQPPHPVVPSPVRPSGGRPEGFLGQRGRAVRPTRLSLEGLPSLPSMHEYPLPPEPKSPGEYINIDFGEPGARLSPPAPPLLASAASSSSLLSASSPASSLGSGTPGTSSDSRQRSPLSDYMNLDFSSPKSPKPGAPSGHPVGSLDGLLSPEASSPYPPLPPRPSASPSSSLQPPPPPPAPGELYRLPPASAVATAQGPGAASSLSSDTGDNGDYTEMAFGVAATPPQPIAAPPKPEAARVASPTSGVKRLSLMEQVSGVEAFLQASQPPDPHRGAKVIRADPQGGRRRHSSETFSSTTTVTPVSPSFAHNPKRHNSASVENVSLRKSSEGGVGVGPGGGDEPPTSPRQLQPAPPLAPQGRPWTPGQPGGLVGCPGSGGSPMRRETSAGFQNGLNYIAIDVREEPGLPPQPQPPPPPLPQPGDKSSWGRTRSLGGLISAVGVGSTGGGCGGPGPGALPPANTYASIDFLSHHLKEATIVKE

SEQ ID NO: 895361 - protein, 1509 aa, Homo sapiens; identical to SEQ ID NO: 895360

SEQ ID NO: 895362 - protein, 1509 aa, Homo sapiens; identical to SEQ ID NO: 895360

SEQ ID NO: 895363 - protein, 1509 aa, Homo sapiens; identical to SEQ ID NO: 895360

SEQ ID NO: 895364 - protein, 1509 aa, Homo sapiens; identical to SEQ ID NO: 895360

SEQ ID NO: 895365 - protein, 240 aa, Homo sapiens
AGVWGFRGARLCSLPSGAGCRPAGWPAPPPGKMALHFQSLAELEVLCTHLYIGTDLTQRIEAEKALLELIDSPECLSKCQLLLEQGTTSYAQLLAATCLSKLVSRVSPLPVEQRMDIRNYILNYVASQPKLAPFVIQALIQVIAKITKLGWFEVQKDQFVFREIIADVKKFLQGTVEHCIIGVIILSELTQEMNLVDYSRPSAKHRKIATSFRDTSLKDVLVLACSLLKEVSYLIIQLPS

SEQ ID NO: 895366 - protein, 1120 aa, Homo sapiens
AGVWGFRGARLCSLPSGAGCRPAGWPAPPPGKMALHFQSLAELEVLCTHLYIGTDLTQRIEAEKALLELIDSPECLSKCQLLLEQGTTSYAQLLAATCLSKLVSRVSPLPVEQRMDIRNYILNYVASQPKLAPFVIQALIQVIAKITKLGWFEVQKDQFVFREIIADVKKFLQGTVEHCIIGVIILSELTQEMNLVDYSRPSAKHRKIATSFRDTSLKDVLVLACSLLKEVFAKPLNLQDQCQQNLVMQVLKLVLNCLNFDFIGSSADESADDLCTVQIPTTWRTIFLEPETLDLFFNLYHSLPPLLSQLALSCLVQFASTRRSLFNSPERAKYLGNLIKGVKRILENPQGLSDPGNYHEFCRFLARLKTNYQLGELVMVKEYPEVIRLIANFTITSLQHWEFAPNSVHYLLTLWQRMVASVPFVKSTEPHLLDTYAPEITKAFITSRLDSVAIVVRDHLDDPLDDTATVFQQLEQLCTVSRCEYEKTCALLVQLFDQNAQNYQKLLHPYSGVTVDITIQEGRLAWLVYLVGTVVGGRLTYTSTDEHDAMDGELSCRVFQLISLMDTGLPRCCNEKIELAILWFLDQFRKTYVGDQLQRTSKVYARMSEVLGITDDNHVLETFMTKIVTNLKYWGRYEPVISRTLQFLNDLSVGYILLKKLVKIDAVKFMLKNHTSEHFPFLGISDNHSLSDFRCRTTFYTALTRLLMVDLGEDEDEFENFMLPLTVAFETVLQIFNNNFKQEDVKRMLIGLARDLRGIAFALNTKTSYTMLFDWMYPTYLPLLQNAVERWYGEPTCTTPILKLMAELMQNRSQRLNFDVSSPNGILLFREASKMVCTYGNQILSLGSLSKDQIYPMKLKGISICYSALKSALCGNYVSFGVFKLYGDNHFDNVLQAFVKMLLSVSHSDLLQYRKLSQSYYPLLECLTQDHMSFIINLEPPVLMYVLTSISEGLTTLDTVVSSSCCTSLDYIVTYLFKHIAKEGKKPLRCREATQAGQRLLHFMQQNPDVLQQMMSVLMNTIVFEDCRNQWSVSRPLLGLILLNEKYFSELRASLINSQPLPKQEVLAQCFRNLMEGVEQNLSVKNRDRFTQNLSVFRRDVAEALRSDGNTEPCSLDMMS

SEQ ID NO: 895367 - protein, 608 aa, Homo sapiens
AGVWGFRGARLCSLPSGAGCRPAGWPAPPPGKMALHFQSLAELEVLCTHLYIGTDLTQRIEAEKALLELIDSPECLSKCQLLLEQGTTSYAQLLAATCLSKLVSRVSPLPVEQRMDIRNYILNYVASQPKLAPFVIQALIQVIAKITKLGWFEVQKDQFVFREIIADVKKFLQGTVEHCIIGVIILSELTQEMNLVDYSRPSAKHRKIATSFRDTSLKDVLVLACSLLKEVFAKPLNLQDQCQQNLVMQVLKLVLNCLNFDFIGSSADESADDLCTVQIPTTWRTIFLEPETLDLFFNLYHSLPPLLSQLALSCLVQFASTRRSLFNSPERAKYLGNLIKGVKRILENPQGLSDPGNYHEFCRFLARLKTNYQLGELVMVKEYPEVIRLIANFTITSLQHWEFAPNSVHYLLTLWQRMVASVPFVKSTEPHLLDTYAPEITKAFITSRLDSVAIVVRDHLDDPLDDTATVFQQLEQLCTVSRCEYEKTCALLVQLFDQNAQNYQKLLHPYSGVTVDITIQEGRLAWLVYLVGTVVGGRLTYTSTDEHDAMDGELSCRVFQLISLMDTGLPRCCNEKIELAILWFLDQFRKTYVGDQLQRTSKKTDIFL

SEQ ID NO: 895368 - protein, 537 aa, Homo sapiens
AGVWGFRGARLCSLPSGAGCRPAGWPAPPPGKMALHFQSLAELEVLCTHLYIGTDLTQRIEAEKALLELIDSPECLSKCQLLLEQGTTSYAQLLAATCLSKLVSRVSPLPVEQRMDIRNYILNYVASQPKLAPFVIQALIQVIAKITKLGWFEVQKDQFVFREIIADVKKFLQGTVEHCIIGVIILSELTQEMNLVDYSRPSAKHRKIATSFRDTSLKDVLVLACSLLKEVFAKPLNLQDQCQQNLVMQVLKLVLNCLNFDFIGSSADESADDLCTVQIPTTWRTIFLEPETLDLFFNLYHSLPPLLSQLALSCLVQFASTRRSLFNSPERAKYLGNLIKGVKRILENPQGLSDPGNYHEFCRFLARLKTNYQLGELVMVKEYPEVIRLIANFTITSLQHWEFAPNSVHYLLTLWQRMVASVPFVKSTEPHLLDTYAPEITKAFITSRLDSVAIVVRDHLDDPLDDTATVFQQLEQLCTVSRCEYEKTCALLVQLFDQNAQNYQKLLHPYSGVTVDITIQEVFLYKIDRIYFSLESI

SEQ ID NO: 895369 - protein, 1095 aa, Homo sapiens
CCRLEERGTRHFQSLAELEVLCTHLYIGTDLTQRIEAEKALLELIDSPECLSKCQLLLEQGTTSYAQLLAATCLSKLVSRVSPLPVEQRMDIRNYILNYVASQPKLAPFVIQALIQVIAKITKLGWFEVQKDQFVFREIIADVKKFLQGTVEHCIIGVIILSELTQEMNLVDYSRPSAKHRKIATSFRDTSLKDVLVLACSLLKEVFAKPLNLQDQCQQNLVMQVLKLVLNCLNFDFIGSSADESADDLCTVQIPTTWRTIFLEPETLDLFFNLYHSLPPLLSQLALSCLVQFASTRRSLFNSPERAKYLGNLIKGVKRILENPQGLSDPGNYHEFCRFLARLKTNYQLGELVMVKEYPEVIRLIANFTITSLQHWEFAPNSVHYLLTLWQRMVASVPFVKSTEPHLLDTYAPEITKAFITSRLDSVAIVVRDHLDDPLDDTATVFQQLEQLCTVSRCEYEKTCALLVQLFDQNAQNYQKLLHPYSGVTVDITIQEGRLAWLVYLVGTVVGGRLTYTSTDEHDAMDGELSCRVFQLISLMDTGLPRCCNEKIELAILWFLDQFRKTYVGDQLQRTSKVYARMSEVLGITDDNHVLETFMTKIVTNLKYWGRYEPVISRTLQFLNDLSVGYILLKKLVKIDAVKFMLKNHTSEHFPFLGISDNHSLSDFRCRTTFYTALTRLLMVDLGEDEDEFENFMLPLTVAFETVLQIFNNNFKQEDVKRMLIGLARDLRGIAFALNTKTSYTMLFDWMYPTYLPLLQNAVERWYGEPTCTTPILKLMAELMQNRSQRLNFDVSSPNGILLFREASKMVCTYGNQILSLGSLSKDQIYPMKLKGISICYSALKSALCGNYVSFGVFKLYGDNHFDNVLQAFVKMLLSVSHSDLLQYRKLSQSYYPLLECLTQDHMSFIINLEPPVLMYVLTSISEGLTTLDTVVSSSCCTSLDYIVTYLFKHIAKEGKKPLRCREATQAGQRLLHFMQQNPDVLQQMMSVLMNTIVFEDCRNQWSVSRPLLGLILLNEKYFSELRASLINSQPLPKQEVLAQCFRNLMEGVEQNLSVKNRDRFTQNLSVFRRDVAEALRSDGNTEPCSLDMMS

SEQ ID NO: 895370 - protein, 180 aa, Homo sapiens
CCRLEERGTRHFQSLAELEVLCTHLYIGTDLTQRIEAEKALLELIDSPECLSKCQLLLEQGTTSYAQLLAATCLSKLVSRVSPLPVEQRMDIRNYILNYVASQPKLAPFVIQALIQVIAKITKLGWFEVQKDQFVFREIIADVKKFLQGTVEHCIIGVIILSELTQEMNLVSEPFHLTGA

SEQ ID NO: 895371 - protein, 297 aa, Homo sapiens
AGVWGFRGARLCSLPSGAGCRPAGWPAPPPGKMALHFQSLAELEVLCTHLYIGTDLTQRIEAEKALLELIDSPECLSKCQLLLEQGTTSYAQLLAATCLSKLVSRVSPLPVEQRMDIRNYILNYVASQPKLAPFVIQALIQVIAKITKLGWFEVQKDQFVFREIIADVKKFLQGTVEHCIIGVIILSELTQEMNLVDYSRPSAKHRKIATSFRDTSLKDVLVLACSLLKEVFAKPLNLQDQCQQNLVMQVLKLVLNCLNFDFIGSSADESADDLCTVQIPTTWRTSKKKLWYEGSST

SEQ ID NO: 895372 - protein, 779 aa, Homo sapiens
MEGSRPRSSLSLASSASTISSLSSLSPKKPTRAVNKIHAFGKRGNALRRDPNLPVHIRGWLHKQDSSGLRLWKRRWFVLSGHCLFYYKDSREESVLGSVLLPSYNIRPDGPGAPRGRRFTFTAEHPGMRTYVLAADTLEDLRGWLRALGRASRAEGDDYGQPRSPARPQPGEGPGGPGGPPEVSRGEEGRISESPEVTRLSRGRGRPRLLTPSPTTDLHSGLQMRRARSPDLFTPLSRPPSPLSLPRPRSAPARRPPAPSGDTAPPARPHTPLSRIDVRPPLDWGPQRQTLSRPPTPRRGPPSEAGGGKPPRSPQHWSQEPRTQAHSGSPTYLQLPPRPPGTRASMVLLPGPPLESTFHQSLETDTLLTKLCGQDRLLRRLQEEIDQKQEEKEQLEAALELTRQQLGQATREAGAPGRAWGRQRLLQDRLVSVRATLCHLTQERERVWDTYSGLEQELGTLRETLEYLLHLGSPQDRVSAQQQLWMVEDTLAGLGGPQKPPPHTEPDSPSPVLQGEESSERESLPESLELSSPRSPETDWGRPPGGDKDLASPHLGLGSPRVSRASSPEGRHLPSPQLGTKAPVARPRMSAQEQLERMRRNQECGRPFPRPTSPRLLTLGRTLSPARRQPDVEQRPVVGHSGAQKWLRSSGSWSSPRNTTPYLPTSEGHRERVLSLSQALATEASQWHRMMTGGNLDSQGDPLPGVPLPPSDPTRQETPPPRSPPVANSGSTGFSRRGSGRGGGPTPWGPAWDAGIAPPVLPQDEGAWPLRVTLLQSSF

SEQ ID NO: 895373 - protein, 122 aa, Homo sapiens
MMTGGNLDSQGDPLPGVPLPPSDPTRQETPPPRSPPVANSGSTGFSRRGSGRGGGPTPWGPAWDAGIAPPVLPQDEGAWALAGHLFPAFNAPREPIRALGPVLKVPPEILDHLRLGACSGPP

SEQ ID NO: 895374 - protein, 608 aa, Homo sapiens
MEGSRPRSSLSLASSASTISSLSSLSPKKPTRAVNKIHAFGKRGNALRRDPNLPVHIRGWLHKQDSSGLRLWKRRWFVLSGHCLFYYKDSREESVLGSVLLPSYNIRPDGPGAPRGRRFTFTAEHPGMRTYVLAADTLEDLRGWLRALGRASRAEGDDYGQPRSPARPQPGEGPGGPGGPPEVSRGEEGRISESPEVTRLSRGRGRPRLLTPSPTTDLHSGLQMRRARSPDLFTPLSRPPSPLSLPRPRSAPARRPPAPSGDTAPPARPHTPLSRIDVRPPLDWGPQRQTLSRPPTPRRGPPSEAGGGKPPRSPQHWSQEPRTQAHSGSPTYLQLPPRPPGTRASMVLLPGPPLESTFHQSLETDTLLTKLCGQDRLLRRLQEEIDQKQEEKEQLEAALELTRQQLGQATREAGAPGRAWGRQRLLQDRLVSVRATLCHLTQERERVWDTYSGLEQELGTLRETLEYLLHLGSPQDRVSAQQQLWMVEDTLAGLGGPQKPPPHTEPDSPSPVLQGEESSERESLPESLELSSPRSPETDWGRPPGGDKDLASPHLGLGSPRVSRASSPEGRHLPSPQLGTKSKEHHPLLADFRRSPGAGSQPLPSPGY

SEQ ID NO: 895375 - protein, 535 aa, Homo sapiens
MRTYVLAADTLEDLRGWLRALGRASRAEGDDYGQPRSPARPQPGEGPGGPGGPPEVSRGEEGRISESPEVTRLSRGRGRPRLLTPSPTTDLHSGLQMRRARSPDLFTPLSRPPSPLSLPRPRSAPARRPPAPSGDTAPPARPHTPLSRIDVRPPLDWGPQRQTLSRPPTPRRGPPSEAGGGKPPRSPQHWSQEPRTQAHSGSPTYLQLPPRPPGTRASMVLLPGPPLESTFHQSLETDTLLTKLCGQDRLLRRLQEEIDQKQEEKEQLEAALELTRQQLGQATREAGAPGRAWGRQRLLQDRLVSVRATLCHLTQERERVWDTYSGLEQELGTLRETLEYLLHLGSPQDRVSAQQQLWMVEDTLAGLGGPQKPPPHTEPDSPSPVLQGEESSERESLPESLELSSPRSPETDWGRPPGGDKDLASPHLGLGSPRVSRASSPEGRHLPSPQLGTKAPVARPRMSAQEQLERMRRNQECGRPFPRPTSPRLLTLGRTLSPARRQPDVEQRSKEHHPLLADFRRSPGAGSQPLPSPGY

SEQ ID NO: 895376 - protein, 604 aa, Homo sapiens
MEGSRPRSSLSLASSASTISSLSSLSPKKPTRAVNKIHAFGKRGNALRRDPNLPVHIRGWLHKQAEHPGMRTYVLAADTLEDLRGWLRALGRASRAEGDDYGQPRSPARPQPGEGPGGPGGPPEVSRGEEGRISESPEVTRLSRGRGRPRLLTPSPTTDLHSGLQMRRARSPDLFTPLSRPPSPLSLPRPRSAPARRPPAPSGDTAPPARPHTPLSRIDVRPPLDWGPQRQTLSRPPTPRRGPPSEAGGGKPPRSPQHWSQEPRTQAHSGSPTYLQLPPRPPGTRASMVLLPGPPLESTFHQSLETDTLLTKLCGQDRLLRRLQEEIDQKQEEKEQLEAALELTRQQLGQATREAGAPGRAWGRQRLLQDRLVSVRATLCHLTQERERVWDTYSGLEQELGTLRETLEYLLHLGSPQDRVSAQQQLWMVEDTLAGLGGPQKPPPHTEPDSPSPVLQGEESSERESLPESLELSSPRSPETDWGRPPGGDKDLASPHLGLGSPRVSRASSPEGRHLPSPQLGTKAPVARPRMSAQEQLERMRRNQECGRPFPRPTSPRLLTLGRTLSPARRQPDVEQRSKEHHPLLADFRRSPGAGSQPLPSPGY

SEQ ID NO: 895377 - protein, 303 aa, Homo sapiens
QSLETDTLLTKLCGQDRLLRRLQEEIDQKQEEKEQLEAALELTRQQLGQATREAGAPGRAWGRQRLLQDRLVSVRATLCHLTQERERVWDTYSGLEQELGTLRETLEYLLHLGSPQDRVSAQQQLWMVEDTLAGLGGPQKPPPHTEPDSPSPVLQGEESSERESLPESLELSSPRSPETDWGRPPGGDKDLASPHLGLGSPRVSRASSPEGRHLPSPQLGTKAPVARPRMSAQEQLERMRRNQECGRPFPRPTSPRLLTLGRTLSPARRQPDVEQRSKEHHPLLADFRRSPGAGSQPLPSPGY

SEQ ID NO: 895378 - protein, 292 aa, Homo sapiens
GRERPAERKEKLGEGGREKVRREIGKRKGRKRQSQSLPESLELSSPRSPETDWGRPPGGDKDLASPHLGLGSPRVSRASSPEGRHLPSPQLGTKAPVARPRMSAQEQLERMRRNQECGRPFPRPTSPRLLTLGRTLSPARRQPDVEQRPVVGHSGAQKWLRSSGSWSSPRNTTPYLPTSEGHRERVLSLSQALATEASQWHRMMTGGNLDSQGDPLPGVPLPPSDPTRQETPPPRSPPVANSGSTGFSRRGSGRGGGPTPWGPAWDAGIAPPVLPQDEGAWPLRVTLLQSSF

SEQ ID NO: 895379 - protein, 591 aa, Homo sapiens
MEGSRPRSSLSLASSASTISSLSSLSPKKPTRAVNKIHAFGKRGNALRRDPNLPVHIRGWLHKQDSSGLRLWKRRWFVLSGHCLFYYKDSREESVLGSVLLPSYNIRPDGPGAPRGRRFTFTAEHPGMRTYVLAADTLEDLRGWLRALGRASRAEGDDYGQPRSPARPQPGEGPGGPGGPPEVSRGEEGRISESPEVTRLSRGRGRPRLLTPSPTTDLHSGLQMRRARSPDLFTPLSRPPSPLSLPRPRSAPARRPPAPSGDTAPPARPHTPLSRIDVRPPLDWGPQRQTLSRPPTPRRGPPSEAGGGKPPRSPQHWSQEPRTQAHSGSPTYLQLPPRPPGTRASMVLLPGPPLESTFHQSLETDTLLTKLCGQDRLLRRLQEEIDQKQEEKEQLEAALELTRQQLGQATREAGAPGRAWGRQRLLQDRLVSVRATLCHLTQERERVWDTYSGLEQELGTLRETLEYLLHLGSPQDRVSAQQQLWMVEDTLAGLGGPQKPPPHTEPDSPSPVLQGEESSERESLPESLELSSPRSPETDWGRPPGGDKDLASPHLGEHPGWVGLYGNSRPHQVPFCLSRSWVSEGLPGFQP

SEQ ID NO: 895380 - protein, 588 aa, Homo sapiens
MEGSRPRSSLSLASSASTISSLSSLSPKKPTRAVNKIHAFGKRGNALRRDPNLPVHIRGWLHKQDSSGLRLWKRRWFVLSGHCLFYYKDSREESVLGSVLLPSYNIRPDGPGAPRGRRFTFTAEHPGMRTYVLAADTLEDLRGWLRALGRASRAEGDDYGQPRSPARPQPGEGPGGPGGPPEVSRGEEGRISESPEVTRLSRGRGRPRLLTPSPTTDLHSGLQMRRARSPDLFTPLSRPPSPLSLPRPRSAPARRPPAPSGDTAPPARPHTPLSRIDVRPPLDWGPQRQTLSRPPTPRRGPPSEAGGGKPPRSPQHWSQEPRTQAHSGSPTYLQLPPRPPGTRASMVLLPGPPLESTFHQSLETDTLLTKLCGQDRLLRRLQEEIDQKQEEKEQLEAALELTRQQLGQATREAGAPGRAWGRQRLLQDRLVSVRATLCHLTQERERVWDTYSGLEQELGTLRETLEYLLHLGSPQDRVSAQQQLWMVEDTLAGLGGPQKPPPHTEPDSPSPVLQGEESSERESLPESLELSSPRSPETDWGRPPGGDKDLASPHLGLGSPRVSRASSPEGRHLPSPQLGTKVSCRSIL

SEQ ID NO: 895381 - protein, 306 aa, Homo sapiens
MEGSRPRSSLSLASSASTISSLSSLSPKKPTRAVNKIHAFGKRGNALRRDPNLPVHIRGWLHKQDSSGLRLWKRRWFVLSGHCLFYYKDSREESVLGSVLLPSYNIRPDGPGAPRGRRFTFTAEHPGMRTYVLAADTLEDLRGWLRALGRASRAEGDDYGQPRSPARPQPGEGPGGPGGPPEVSRGEEGRISESPEVTRLSRGRGRPRLLTPSPTTDLHSGLQMRRARSPDLFTPLSRPPSPLSLPRPRSAPARRPPAPSGDTAPPARPHTPLSRIDVRPPLDWVPIAGPGGEWFLWPKFGFLNTV

SEQ ID NO: 895382 - protein, 206 aa, Homo sapiens
MEGSRPRSSLSLASSASTISSLSSLSPKDSSGLRLWKRRWFVLSGHCLFYYKDSREESVLGSVLLPSYNIRPDGPGAPRGRRFTFTAEHPGMRTYVLAADTLEDLRGWLRALGRASRAEGDDYGQPRSPARPQPGEGPGGPGGPPEVSRGEEGRISESPEVTRLSRGRGRPRLLTPSPTTDLHSGLQMRRARSPDLFTHVSRPPRS

SEQ ID NO: 895383 - protein, 140 aa, Homo sapiens
MRTYVLAADTLEDLRGWLRALGRASRAEGDDYGQPRSPARPQPGEGPGGPGGPPEVSRGEEGRISESPEVTRLSRGRGRPRLLTPSPTTDLHSGLQMRRARSPDLFTPLSRPPSPLSLRRPGLAWEADPEDRERKESDTR

SEQ ID NO: 895384 - protein, 662 aa, Homo sapiens [sequence omitted]

SEQ ID NO: 895385 - protein, 317 aa, Homo sapiens [sequence omitted]

SEQ ID NO: 895386 - protein, 731 aa, Homo sapiens
MEGSRPRSSLSLASSASTISSLSSLSPKKPTRAVNKIHAFGKRGNALRRDPNLPVHIRGWLHKQDSSGLRLWKRRWFVLSGHCLFYYKDSREESVLGSVLLPSYNIRPDGPGAPRGRRFTFTAEHPGMRTYVLAADTLEDLRGWLRALGRASRAEGDDYGQPRSPARPQPGEGPGGPGGPPEVSRGEEGRISESPEVTRLSRGRGRPRLLTPSPTTDLHSGLQMRRARSPDLFTPLSRPPSPLSLPRPRSAPARRPPAPSGDTAPPARPHTPLSRIDVRPPLDWGPQRQTLSRPPTPRRGPPSEAGGGKPPRSPQHWSQEPRTQAHSGSPTYLQLPPRPPGTRASMVLLPGPPLESTFHQSLETDTLLTKLCGQDRLLRRLQEEIDQKQEEKEQLEAALELTRQQLGQATREAGAPGRAWGRQRLLQDRLVSVRATLCHLTQERERVWDTYSGLEQELGTLRETLEYLLHLGSPQDRVSAQQQLWMVEDTLAGLGGPQKPPPHTEPDSPSPVLQGEESSERESLPESLELSSPRSPETDWGRPPGGDKDLASPHLGLGSPRVSRASSPEGRHLPSPQLGTKAPVARPRMSAQEQLERMRRNQECGRPFPRPTSPRLLTLGRTLSPARRQPDVEQRPVVGHSGAQKWLRSSGSWSSPRNTTPYLPTSEGHRERVLSLSQALATEASQWHRMMTGGNLDSQGDPLPGVPLPPPVLPQDEGAWPLRVTLLQSSF

SEQ ID NO: 895387 - protein, 662 aa, Homo sapiens [sequence omitted]

SEQ ID NO: 895388 - protein, 382 aa, Homo sapiens
MEGSRPRSSLSLASSASTISSLSSLSPKKPTRAVNKIHAFGKRGNALRRDPNLPVHIRGWLHKQDSSGLRLWKRRWFVLSGHCLFYYKDSREESVLGSVLLPSYNIRPDGPGAPRGRRFTFTAEHPGMRTYVLAADTLEDLRGWLRALGRASRAEGDDYGQPRSPARPQPGEGPGGPGGPPEVSRGEEGRISESPEVTRLSRGRGRPRLLTPSPTTDLHSGLQMRRARSPDLFTPLSRPPSPLSLPRPRSAPARRPPAPSGDTAPPARPHTPLSRIDVRPPLDWGPQRQTLSLTPYSPRGMPGSPLRSCHKTRGHGLCESLCYNPASNPPKSGSQSEREDVVWRYRRRSGTTQGIRGRGLVPIAGPGGEWFLWPKFGFLNTV

SEQ ID NO: 895389 - protein, 140 aa, Homo sapiens; identical to SEQ ID NO: 895383

SEQ ID NO: 895390 - protein, 1220 aa, Homo sapiens
MGDMANNSVAYSGVKNSLKEANHDGDFGITLAELRALMELRSTDALRKIQESYGDVYGICTKLKTSPNEGLSGNPADLERREAVFGKNFIPPKKPKTFLQLVWEALQDVTLIILEIAAIVSLGLSFYQPPEGDNALCGEVSVGEEEGEGETGWIEGAAILLSVVCVVLVTAFNDWSKEKQFRGLQSRIEQEQKFTVIRGGQVIQIPVADITVGDIAQVKYGDLLPADGILIQGNDLKIDESSLTGESDHVKKSLDKDPLLLSGTHVMEGSGRMVVTAVGVNSQTGIIFTLLGAGGEEEEKKDEKKKEKKNKKQDGAIENRNKAKAQDGAAMEMQPLKSEEGGDGDEKDKKKANLPKKEKSVLQGKLTKLAVQIGKAGLLMSAITVIILVLYFVIDTFWVQKRPWLAECTPIYIQYFVKFFIIGVTVLVVAVPEGLPLAVTISLAYSVKKMMKDNNLVRHLDACETMGNATAICSDKTGTLTMNRMTVVQAYINEKHYKKVPEPEAIPPNILSYLVTGISVNCAYTSKILPPEKEGGLPRHVGNKTECALLGLLLDLKRDYQDVRNEIPEEALYKVYTFNSVRKSMSTVLKNSDGSYRIFSKGASEIILKKCFKILSANGEAKVFRPRDRDDIVKTVIEPMASEGLRTICLAFRDFPAGEPEPEWDNENDIVTGLTCIAVVGIEDPVRPEVPDAIKKCQRAGITVRMVTGDNINTARAIATKCGILHPGEDFLCLEGKDFNRRIRNEKGEIEQERIDKIWPKLRVLARSSPTDKHTLVKGIIDSTVSDQRQVVAVTGDGTNDGPALKKADVGFAMGIAGTDVAKEASDIILTDDNFTSIVKAVMWGRNVYDSISKFLQFQLTVNVVAVIVAFTGACITQDSPLKAVQMLWVNLIMDTLASLALATEPPTESLLLRKPYGRNKPLISRTMMKNILGHAFYQLVVVFTLLFAGEKFFDIDSGRNAPLHAPPSEHYTIVFNTFVLMQLFNEINARKIHGERNVFEGIFNNAIFCTIVLGTFVVQIIIVQFGGKPFSCSELSIEQWLWSIFLGMGTLLWGQLISTIPTSRLKFLKEAGHGTQKEEIPEEELAEDVEEIDHAERELRRGQILWFRGLNRIQTQIRVVNAFRSSLYEGLEKPESRSSIHNFMTHPEFRIEDSEPHIPLIDDTDAEDDAPTKRNSSPPPSPNKNNNAVDSGIHLTIEMNKSATSSSPGSPLHSLETSL

SEQ ID NO: 895391 - protein, 1220 aa, Homo sapiens; identical to SEQ ID NO: 895390

SEQ ID NO: 895392 - protein, 1220 aa, Homo sapiens; identical to SEQ ID NO: 895390

SEQ ID NO: 895393 - protein, 1220 aa, Homo sapiens; identical to SEQ ID NO: 895390

SEQ ID NO: 895394 - protein, 1220 aa, Homo sapiens; identical to SEQ ID NO: 895390

SEQ ID NO: 895395 - protein, 962 aa, Homo sapiens [sequence omitted]

SEQ ID NO: 895396 - protein, 1184 aa, Homo sapiens
MGDMANNSVAYSGVKNSLKEANHDGDFGITLAELRALMELRSTDALRKIQESYGDVYGICTKLKTSPNEGLSGNPADLERREAVFGKNFIPPKKPKTFLQLVWEALQDVTLIILEIAAIVSLGLSFYQPPEGDNALCGEVSVGEEEGEGETGWIEGAAILLSVVCVVLVTAFNDWSKEKQFRGLQSRIEQEQKFTVIRGGQVIQIPVADITVGDIAQVKYGDLLPADGILIQGNDLKIDESSLTGESDHVKKSLDKDPLLLSGTHVMEGSGRMVVTAVGVNSQTGIIFTLLGAGGEEEEKKDEKKKEKKNKKQDGAIENRNKAKAQDGAAMEMQPLKSEEGGDGDEKDKKKANLPKKEKSVLQGKLTKLAVQIGKAGLLMSAITVIILVLYFVIDTFWVQKRPWLAECTPIYIQYFVKFFIIGVTVLVVAVPEGLPLAVTISLAYSVKKMMKDNNLVRHLDACETMGNATAICSDKTGTLTMNRMTVVQAYINEKHYKKVPEPEAIPPNILSYLVTGISVNCAYTSKILPPEKEGGLPRHVGNKTECALLGLLLDLKRDYQDVRNEIPEEALYKVYTFNSVRKSMSTVLKNSDGSYRIFSKGASEIILKKCFKILSANGEAKVFRPRDRDDIVKTVIEPMASEGLRTICLAFRDFPAGEPEPEWDNENDIVTGLTCIAVVGIEDPVRPEVPDAIKKCQRAGITVRMVTGDNINTARAIATKCGILHPGEDFLCLEGKDFNRRIRNEKGEIEQERIDKIWPKLRVLARSSPTDKHTLVKGIIDSTVSDQRQVVAVTGDGTNDGPALKKADVGFAMGIAGTDVAKEASDIILTDDNFTSIVKAVMWGRNVYDSISKFLQFQLTVNVVAVIVAFTGACITQDSPLKAVQMLWVNLIMDTLASLALATEPPTESLLLRKPYGRNKPLISRTMMKNILGHAFYQLVVVFTLLFAGEKFFDIDSGRNAPLHAPPSEHYTIVFNTFVLMQLFNEINARKIHGERNVFEGIFNNAIFCTIVLGTFVVQLISTIPTSRLKFLKEAGHGTQKEEIPEEELAEDVEEIDHAERELRRGQILWFRGLNRIQTQIRVVNAFRSSLYEGLEKPESRSSIHNFMTHPEFRIEDSEPHIPLIDDTDAEDDAPTKRNSSPPPSPNKNNNAVDSGIHLTIEMNKSATSSSPGSPLHSLETSL

SEQ ID NO: 895397 - protein, 1006 aa, Homo sapiens
MGDMANNSVAYSGVKNSLKEANHDGDFGITLAELRALMELRSTDALRKIQESYGDVYGICTKLKTSPNEGLSGNPADLERREAVFGKNFIPPKKPKTFLQLVWEALQDVTLIILEIAAIVSLGLSFYQPPEGDNALCGEVSVGEEEGEGETGWIEGAAILLSVVCVVLVTAFNDWSKEKQFRGLQSRIEQEQKFTVIRGGQVIQIPVADITVGDIAQVKYGDLLPADGILIQGNDLKIDESSLTGESDHVKKSLDKDPLLLSGTHVMEGSGRMVVTAVGVNSQTGIIFTLLGAGGEEEEKKDEKKKEKKNKKQDGAIENRNKAKAQDGAAMEMQPLKSEEGGDGDEKDKKKANLPKKEKSVLQGKLTKLAVQIGKAGLLMSAITVIILVLYFVIDTFWVQKRPWLAECTPIYIQYFVKFFIIGVTVLVVAVPEGLPLAVTISLAYSVKKMMKDNNLVRHLDACETMGNATAICSDKTGTLTMNRMTVVQAYINEKHYKKVPEPEAIPPNILSYLVTGISVNCAYTSKILPPEKEGGLPRHVGNKTECALLGLLLDLKRDYQDVRNEIPEEALYKVYTFNSVRKSMSTVLKNSDGSYRIFSKGASEIILKKCFKILSANGEAKVFRPRDRDDIVKTVIEPMASEGLRTICLAFRDFPAGEPEPEWDNENDIVTGLTCIAVVGIEDPVRPEVPDAIKKCQRAGITVRMVTGDNINTARAIATKCGILHPGEDFLCLEGKDFNRRIRNEKGEIEQERIDKIWPKLRVLARSSPTDKHTLVKGIIDSTVSDQRQVVAVTGDGTNDGPALKKADVGFAMGIAGTDVAKEASDIILTDDNFTSIVKAVMWGRNVYDSISKFLQFQLTVNVVAVIVAFTGACITQDSPLKAVQMLWVNLIMDTLASLALATEPPTESLLLRKPYGRNKPLISRTMMKNILGHAFYQLVVVFTLLFAGKNSVSNKASVNCFFSKLIIQDVIMLQIFKSLNSTPDFPFIFNFFLISECLVNLGGQ

SEQ ID NO: 895398 - protein, 193 aa, Homo sapiens
MGIAGTDVAKEASDIILTDDNFTSIVKAVMWGRNVYDSISKFLQFQLTVNVVAVIVAFTGACITQDSPLKAVQMLWVNLIMDTLASLALATEPPTESLLLRKPYGRNKPLISRTMMKNILGHAFYQLVVVFTLLFAGKNSVSNKASVNCFFSKLIIQDVIMLQIFKSLNSTPDFPFIFNFFLISECLVNLGGQ

SEQ ID NO: 895399 - protein, 1006 aa, Homo sapiens; identical to SEQ ID NO: 895397

SEQ ID NO: 895400 - protein, 144 aa, Homo sapiens
VQQGGWTRSYVFVWSIIYRHQCHQSGGYRGSESSILNSGCVIALSFLNSSSLYEGLEKPESRSSIHNFMTHPEFRIEDSEPHIPLIDDTDAEDDAPTKRNSSPPPSPNKNNNAVDSGIHLTIEMNKSATSSSPGSPLHSLETSL

SEQ ID NO: 895401 - protein, 1006 aa, Homo sapiens; identical to SEQ ID NO: 895397

SEQ ID NO: 895402 - protein, 1220 aa, Homo sapiens; identical to SEQ ID NO: 895390

SEQ ID NO: 895403 - protein, 762 aa, Homo sapiens
MGDMANNSVAYSGVKNSLKEANHDGDFGITLAELRALMELRSTDALRKIQESYGDVYGICTKLKTSPNEGLSGNPADLERREAVFGKNFIPPKKPKTFLQLVWEALQDVTLIILEIAAIVSLGLSFYQPPEGDNALCGEVSVGEEEGEGETGWIEGAAILLSVVCVVLVTAFNDWSKEKQFRGLQSRIEQEQKFTVIRGGQVIQIPVADITVGDIAQVKYGDLLPADGILIQGNDLKIDESSLTGESDHVKKSLDKDPLLLSGTHVMEGSGRMVVTAVGVNSQTGIIFTLLGAGGEEEEKKDEKKKEKKNKKQDGAIENRNKAKAQDGAAMEMQPLKSEEGGDGDEKDKKKANLPKKEKSVLQGKLTKLAVQIGKAGLLMSAITVIILVLYFVIDTFWVQKRPWLAECTPIYIQYFVKFFIIGVTVLVVAVPEGLPLAVTISLAYSVKKMMKDNNLVRHLDACETMGNATAICSDKTGTLTMNRMTVVQAYINEKHYKKVPEPEAIPPNILSYLVTGISVNCAYTSKILPPEKEGGLPRHVGNKTECALLGLLLDLKRDYQDVRNEIPEEALYKVYTFNSVRKSMSTVLKNSDGSYRIFSKGASEIILKKCFKILSANGEAKVFRPRDRDDIVKTVIEPMASEGLRTICLAFRDFPAGEPEPEWDNENDIVTGLTCIAVVGIEDPVRPEVPDAIKKCQRAGITVRMVTGDNINTARAIATKCGILHPGEDFLCLEGKDFNRRIRNEKGEIEHREDTTKIWRQ

SEQ ID NO: 895404 - protein, 1007 aa, Homo sapiens
MGDMANNSVAYSGVKNSLKEANHDGDFGITLAELRALMELRSTDALRKIQESYGDVYGICTKLKTSPNEGLSGNPADLERREAVFGKNFIPPKKPKTFLQLVWEALQDVTLIILEIAAIVSLGLSFYQPPEGDNALCGEVSVGEEEGEGETGWIEGAAILLSVVCVVLVTAFNDWSKEKQFRGLQSRIEQEQKFTVIRGGQVIQIPVADITVGDIAQVKYGDLLPADGILIQGNDLKIDESSLTGESDHVKKSLDKDPLLLSGTHVMEGSGRMVVTAVGVNSQTGIIFTLLGAGGEEEEKKDEKKKEKKNKKQDGAIENRNKAKAQDGAAMEMQPLKSEEGGDGDEKDKKKANLPKKEKSVLQGKLTKLAVQIGKAGLLMSAITVIILVLYFVIDTFWVQKRPWLAECTPIYIQYFVKFFIIGVTVLVVAVPEGLPLAVTISLAYSVKKMMKDNNLVRHLDACETMGNATAICSDKTGTLTMNRMTVVQAYINEKHYKKVPEPEAIPPNILSYLVTGISVNCAYTSKILPPEKEGGLPRHVGNKTECALLGLLLDLKRDYQDVRNEIPEEALYKVYTFNSVRKSMSTVLKNSDGSYRIFSKGASEIILKKCFKILSANGEAKVFRPRDRDDIVKTVIEPMASEGLRTICLAFRDFPAGEPEPEWDNENDIVTGLTCIAVVGIEDPVRPEVPDAIKKCQRAGITVRMVTGDNINTARAIATKCGILHPGEDFLCLEGKDFNRRIRNEKGEIEQERIDKIWPKLRVLARSSPTDKHTLVKGIIDSTVSDQRQVVAVTGDGTNDGPALKKADVGFAMGIAGTDVAKEASDIILTDDNFTSIVKAVMWGRNVYDSISKFLQFQLTVNVVAVIVAFTGACITQDSPLKAVQMLWVNLIMDTLASLALATEPPTESLLLRKPYGRNKPLISRTMMKNILGHAFYQLVVVFTLLFAGKNSVSNKASVNCFFSKLIIQDVIMLQIFKSDSVGGSVARAREASVSIMRFTHSISQP

SEQ ID NO: 895405 - protein, 759 aa, Homo sapiens
MGDMANNSVAYSGVKNSLKEANHDGDFGITLAELRALMELRSTDALRKIQESYGDVYGICTKLKTSPNEGLSGNPADLERREAVFGKNFIPPKKPKTFLQLVWEALQDVTLIILEIAAIVSLGLSFYQPPEGDNALCGEVSVGEEEGEGETGWIEGAAILLSVVCVVLVTAFNDWSKEKQFRGLQSRIEQEQKFTVIRGGQVIQIPVADITVGDIAQVKYGDLLPADGILIQGNDLKIDESSLTGESDHVKKSLDKDPLLLSGTHVMEGSGRMVVTAVGVNSQTGIIFTLLGAGGEEEEKKDEKKKEKKNKKQDGAIENRNKAKAQDGAAMEMQPLKSEEGGDGDEKDKKKANLPKKEKSVLQGKLTKLAVQIGKAGLLMSAITVIILVLYFVIDTFWVQKRPWLAECTPIYIQYFVKFFIIGVTVLVVAVPEGLPLAVTISLAYSVKKMMKDNNLVRHLDACETMGNATAICSDKTGTLTMNRMTVVQAYINEKHYKKVPEPEAIPPNILSYLVTGISVNCAYTSKILPPEKEGGLPRHVGNKTECALLGLLLDLKRDYQDVRNEIPEEALYKVYTFNSVRKSMSTVLKNSDGSYRIFSKGASEIILKKCFKILSANGEAKVFRPRDRDDIVKTVIEPMASEGLRTICLAFRDFPAGEPEPEWDNENDIVTGLTCIAVVGIEDPVRPEVPDAIKKCQRAGITVRMVTGDNINTARAIATKCGILHPGEDFLCLEGKDFNRRIRNEKGEVKIYYYFVFG

SEQ ID NO: 895406 - protein, 291 aa, Homo sapiens
LAGSRTASVRRTEERWKSPEVRWAPGVAMEESGYESVLCVKPDVHVYRIPPRATNRGYRAAEWQLDQPSWSGRLRITAKGQMAYIKLEDRTSGELFAQAPVDQFPGTAVESVTDSSRYFVIRIEDGNGRRAFIGIGFGDRGDAFDFNVALQDHFKWVKQQCEFAKQAQNPDQGPKLDLGFKEGQTIKLNIANMKKKEGAAGNPRVRPASTGGLSLLPPPPGGKTSTLIPPPGEQLAVGGSLVQPAVAPSSGGAPVPWPQPNPATADIWGDFTKSTGSTSSQTQPGTGWVQF

SEQ ID NO: 895407 - protein, 263 aa, Homo sapiens
MEESGYESVLCVKPDVHVYRIPPRATNRGYRAAEWQLDQPSWSGRLRITAKGQMAYIKLEDRTSGELFAQAPVDQFPGTAVESVTDSSRYFVIRIEDGNGRRAFIGIGFGDRGDAFDFNVALQDHFKWVKQQCEFAKQAQNPDQGPKLDLGFKEGQTIKLNIANMKKKEGAAGNPRVRPASTGGLSLLPPPPGGKTSTLIPPPGEQLAVGGSLVQPAVAPSSGGAPVPWPQPNPATADIWGDFTKSTGSTSSQTQPGTGWVQF

SEQ ID NO: 895408 - protein, 291 aa, Homo sapiens; identical to SEQ ID NO: 895406

SEQ ID NO: 895409 - protein, 172 aa, Homo sapiens
MEESGYESVLCVKPDVHVYRIPPRATNRGYRAAEWQLDQPSWSGRLRITAKGQMAYIKLEDRTSGELFAQAPVDQFPGTAVESVTDSSRYFVIRIEDGNGRRAFIGIGFGDRGDAFDFNVALQDHFKWVKQQCEFAKQAQNPDQGPKLDLGFKEGQTIKLNIAVSSTLAWLW

SEQ ID NO: 895410 - protein, 237 aa, Homo sapiens
MEESGAAEWQLDQPSWSGRLRITAKGQMAYIKLEDRTSGELFAQAPVDQFPGTAVESVTDSSRYFVIRIEDGNGRRAFIGIGFGDRGDAFDFNVALQDHFKWVKQQCEFAKQAQNPDQGPKLDLGFKEGQTIKLNIANMKKKEGAAGNPRVRPASTGGLSLLPPPPGGKTSTLIPPPGEQLAVGGSLVQPAVAPSSGGAPVPWPQPNPATADIWGDFTKSTGSTSSQTQPGTGWVQF

SEQ ID NO: 895411 - protein, 301 aa, Homo sapiens
LAGSRTASVRRTEERWKSPEVRWAPGVAMEESGYESVLCVKPDVHVYRIPPRATNRGYRAAEWQLDQPSWSGRLRITAKGQMAYIKLEDRTSGELFAQAPVDQFPGTAVESVTDSSRYFVIRIEDGNGRRAFIGIGFGDRGDAFDFNVALQDHFKWVKQQCEFAKQAQNPDQGPKLDLGFKEGQTIKLNIANMKKKEGAAGNPRVRPASTGGLSLLPPPPGGKTSTLIPPPGEQLAVGGSLVQPAVAPSSDQLPARPSQAQAGSSSDLSTVFPHVTSGKALPHLGQRKEDEALLSWPVFGA

SEQ ID NO: 895412 - protein, 291 aa, Homo sapiens; identical to SEQ ID NO: 895406

SEQ ID NO: 895413 - protein, 291 aa, Homo sapiens; identical to SEQ ID NO: 895406

SEQ ID NO: 895414 - protein, 190 aa, Homo sapiens
PLPTSHPSFQHLIPGCVLNKEDLGEFWQEGVEVGAGSPGQLVLMVLSWLLCLRSELLCLWLPSRQLLFIGTGWAGLGWAGLPKVGLYLAARVERGDEVRVMIAGTQGPSGLVFVFARNTVLRWICFFKKLCNSKIMLFLFTYSFSSFLLRAGDDLGSLKLASWPLREKCKSNPVDWLGCDSFSRLEETNI

SEQ ID NO: 895415 - protein, 314 aa, Homo sapiens
LAGSRTASVRRTEERWKSPEVRWAPGVAMEESGYESVLCVKPDVHVYRIPPRATNRGYRAAEWQLDQPSWSGRLRITAKGQMAYIKLEDRTSGELFAQAPVDQFPGTAVESVTDSSRYFVIRIEDGNGRRAFIGIGFGDRGDAFDFNVALQDHFKWVKQQCEFAKQAQNPDQGPKLDLGFKEGQTIKLNIANMKKKEGAAGNPRVRPASTGGLSLLPPPPGGKTSTLIPPPGEQLAVGGSLVQPAVAPSSVQSEGLDWQAICTGALGVPITLFGNSESGIDGGVLDREAHRKGGHHEGENTVRERESRIDTKTS

SEQ ID NO: 895416 - protein, 171 aa, Homo sapiens
  misc_feature (6)..(6): Xaa can be any naturally occurring amino acid
KAGWYXPGCKGGSRRKFGGLQASRWRRAGTSRCSVSSLTSTSTASLRGLPTVATGDYPPPDQASSNLTLSPPPGHTHCGNRGQPWPVLGRGGANAAASSSSRPEQGGGSRVSPVSVRRTGLLAAGRALKPYLALRDPGGLPGTLNLVGGGDVTDASLSALTGGLEGILEKP

SEQ ID NO: 895417 - protein, 282 aa, Homo sapiens
MAAAAPDSRVSEEENLKKTPKKKMKMVTGAVASVLEDEATDTSDSEGSCGSEKDHFYSDDDAIEADSEGDAEPCDKENENDGESSVGTNMGWADAMAKVLNKKTPESKPTILVKNKKLEKEKEKLKQERLEKIKQRDKRLEWEMMCRVKPDVVQDKETERNLQRIATRGVVQLFNAVQKHQKNVDEKVKEAGSSMRKRAKLISTVSKKDFISVLRGMDGSTNETASSRKKPKAKQTEVKSEEGPGWTILRDDFMMGASMKDWDKESDGPDDSRPESASDSDT

SEQ ID NO: 895418 - protein, 144 aa, Homo sapiens
MAAAAPDSRVSEEENLKKTPKKKMKMVTGAVASVLEDEATDTSDSEGSCGSEKDHFYSDDDAIEADSEGDAEPCDKENENDGESSVGTNMGWADAMAKVLNKKTPESKPTILVKNKKLEKEKEKLKQERLEKIKQVCSTSSLVD

SEQ ID NO: 895419 - protein, 244 aa, Homo sapiens
LLRCSCVVIRVERLKDHFYSDDDAIEADSEGDAEPCDKENENDGESSVGTNMGWADAMAKVLNKKTPESKPTILVKNKKLEKEKEKLKQERLEKIKQRDKRLEWEMMCRVKPDVVQDKETERNLQRIATRGVVQLFNAVQKHQKNVDEKVKEAGSSMRKRAKLISTVSKKDFISVLRGMDGSTNETASSRKKPKAKQTEVKSEEGPGWTILRDDFMMGASMKDWDKESDGPDDSRPESASDSDT

SEQ ID NO: 895420 - protein, 282 aa, Homo sapiens; identical to SEQ ID NO: 895417

SEQ ID NO: 895421 - protein, 139 aa, Homo sapiens [sequence omitted]

SEQ ID NO: 895422 - protein, 1430 aa, Homo sapiens
HLTLPDVLLVISTLEVLYMLTEMGDVACTKIAKVEKSIDMLVCLVSMDIQMFGPDALAAVKLIEHPSSSHQMLSEIRPQAIEQVQTQTHVASAPASRAVVAQHVAPPPGIVEIDSEKFACQWLNAHFEVNPDCSVSRAEMYSEYLSTCSKLARGGILTSTGFYKCLRTVFPNHTVKRVEDSSSNGQAHIHVVGVKRRAIPLPIQMYYQQQPVSTSVVRVDSVPDVSPAPSPAGIPHGSQTIGNHFQRTPVANQSSNLTATQMSFPVQGVHTVAQTVSRIPQNPSPHTHQQQNAPVTVIQSKAPIPCEVVKATVIQNSIPQTGVPVSIAVGGGPPQSSVVQNHSTGPQPVTVVNSQTLLHHPSVIPQQSPLHTVVPGQIPSGTPVTVIQQAVPQSHMFGRVQNIPACTSTVSQGQQLITTSPQPVQTSSQQTSAGSQSQDTVIIAPPQYVTTSASNIVSATSVQNFQVATGQMVTIAGVPSPQASRVGFQNIAPKPLPSQQVSSTVVQQPIQQPQQPTQQSVVIVSQPAQQGQTYAPAIHQIVLANPAALPAGQTVQLTGQPNITPSSSPSPVPATNNQVPTAMSSSSTPQSQGPPPTVSQMLSVKRQQQQQHSPAPPPQQVQVQVQQPQQVQMQVQPQQSNAGVGQPASGESSLIKQLLLPKRGPSTPGGKLILPAPQIPPPNNARAPSPQVVYQVASNQAAGFGVQGQTPAQQLLVGQQNVQLVPSAMPPSGGVQTVPISNLQILPGPLISNSPATIFQGTSGNQVTITVVPNTSFAPATVSQGNATQLIAPAGITMSGTQTGVGLPVQTLPATQASPAGQSSCTTATPPFKGDKIICQKEEEAKEATGLHVHERKIEVMENPSCRRGATNTSNGDTKENEMHVGSLLNGRKYSDSSLPPSNSGKIQSETNQCSLISNGPSLELGENGASGKQNSEQIDMQDIKSDLRKPLVNGICDFDKGDGSHLSKNIPNHKTSNHVGNGEISPMEPQGTLDITQQDTAKGDQLERISNGPVLTLGGSSVSSIQEASNAATQQFSGTDLLNGPLASSLNSDVPQQRPSVVVSPHSTTSVIQGHQIIAVPDSGSKVSHSPALSSDVRSTNGTAECKTVKRPAEDTDRETVAGIPNKVGVRIVTISDPNNAGCSATMVAVPAGADPSTVAKVAIESAVQQKQQHPPTYVQNVVPQNTPMPPSPAVQVQGQPNSSQPSPFSGSSQPGDPMRKPGQNFMCLWQSCKKWFQTPSQVFYHAATEHGGKDVYPGQCLWEGCEPFQRQRFSFITHLQDKHCSKDALLAGLKQDEPGQAGSQKSSTKQPTVGGTSSTPRAQKAIVNHPSAALMALRRGSRNLVFRDFTDEKEGPITKHIRLTAALILKNIGKYSECGRRLLKRHENNLSVLAISNMEASSTLAKCLYELNFTVQSKEQEKDSEMLQ

SEQ ID NO: 895423 - protein, 1430 aa, Homo sapiens; identical to SEQ ID NO: 895422

SEQ ID NO: 895424 - protein, 1430 aa, Homo sapiens; identical to SEQ ID NO: 895422

SEQ ID NO: 895425 - protein, 1430 aa, Homo sapiens; identical to SEQ ID NO: 895422

SEQ ID NO: 895426 - protein, 1388 aa, Homo sapiens
HLTLPDVLLVISTLEVLYMLTEMGDVACTKIAKVEKSIDMLVCLVSMDIQMFGPDALAAVKLIEHPSSSHQMLSEIRPQAIEQVQTQTHVASAPASRAVVAQHVAPPPGIVEIDSEKFACQWLNAHFEVNPDCSVSRAEMYSEYLSTCSKLARGGILTSTGFYKCLRTVFPNHTVKRVEDSSSNGQAHIHVVGVKRRAIPLPIQMYYQQQPVSTSVVRVDSVPDVSPAPSPAGIPHGSQTIGNHFQRTPVANQSSNLTATQMSFPVQGVHTVAQTVSRIPQNPSPHTHQQQNAPVTVIQSKAPIPCEVVKATVIQNSIPQTGVPVSIAVGGGPPQSSVVQNHSTGPQPVTVVNSQTLLHHPSVIPQQSPLHTVVPGQIPSGTPVTVIQQAVPQSHMFGRVQNIPACTSTVSQGQQLITTSPQPVQTSSQQTSAGSQSQDTVIIAPPQYVTTSASNIVSATSVQNFQVATGQMVTIAGVPSPQASRVGFQNIAPKPLPSQQVSSTVVQQPIQQPQQPTQQSVVIVSQPAQQGQTYAPAIHQIVLANPAALPAGQTVQLTGQPNITPSSSPSPVPATNNQVPTAMSSSSTPQSQGPPPTVSQMLSVKRQQQQQHSPAPPPQQVQVQVQQPQQVQMQVQPQQSNAGVGQPASGESSLIKQLLLPKRGPSTPGGKLILPAPQIPPPNNARAPSPQVVYQVASNQAAGFGVQGQTPAQQLLVGQQNVQLVPSAMPPSGGVQTVPISNLQILPGPLISNSPATIFQGTSGNQVTITVVPNTSFAPATVSQGNATQLIAPAGITMSGTQTGVGLPVQTLPATQASPAGQSSCTTATPPFKGDKIICQKEEEAKEATGLHVHERKIEVMENPSCRRGATNTSNGDTKENEMHVGSLLNGRKYSDSSLPPSNSGKIQSETNQCSLISNGPSLELGENGASGKQNSEQIDMQDIKSDLRKPLVNGICDFDKGDGSHLSKNIPNHKTSNHVGNGEISPMEPQGTLDITQQDTAKGDQLERISNGPVLTLGGSSVSSIQEASNAATQQFSGTDLLNGPLASSLNSDVPQQRPSVVVSPHSTTSVIQGHQIIAVPDSGSKVSHSPALSSDVRSTNGTAECKTVKRPAEDTDRETVAGIPNKVGVRIVTISDPNNAGCSATMVAVPAGADPSTVAKVAIESAVQQKQQHPPTYVQNVVPQNTPMPPSPAVQVQGQPNSSQPSPFSGSSQPGDPMRKPGQNFMCLWQSCKKWFQTPSQVFYHAATEHGGKDVYPGQCLWEGCEPFQRQRFSFITHLQDKHCSKDALLAGLKQDEPGQAGSQKSSTKQPTVGGTSSTPRAQKAIVNHPSAALMALRRGSRNLVFRDFTDEKEGPITKHIRLTAALILKNIGKYSECGRRNMNED

SEQ ID NO: 895427 - protein, 1383 aa, Homo sapiens
HLTLPDVLLVISTLEVLYMLTEMGDVACTKIAKVEKSIDMLVCLVSMDIQMFGPDALAAVKLIEHPSSSHQMLSEIRPQAIEQVQTQTHVASAPASRAVVAQHVAPPPGIVEIDSEKFACQWLNAHFEVNPDCSVSRAEMYSEYLSTCSKLARGGILTSTGFYKCLRTVFPNHTVKRVEDSSSNGQAHIHVVGVKRRAIPLPIQMYYQQQPVSTSVVRVDSVPDVSPAPSPAGIPHGSQTIGNHFQRTPVANQSSNLTATQMSFPVQGVHTVAQTVSRIPQNPSPHTHQQQNAPVTVIQSKAPIPCEVVKATVIQNSIPQTGVPVSIAVGGGPPQSSVVQNHSTGPQPVTVVNSQTLLHHPSVIPQQSPLHTVVPGQIPSGTPVTVIQQAVPQSHMFGRVQNIPACTSTVSQGQQLITTSPQPVQTSSQQTSAGSQSQDTVIIAPPQYVTTSASNIVSATSVQNFQVATGQMVTIAGVPSPQASRVGFQNIAPKPLPSQQVSSTVVQQPIQQPQQPTQQSVVIVSQPAQQGQTYAPAIHQIVLANPAALPAGQTVQLTGQPNITPSSSPSPVPATNNQVPTAMSSSSTPQSQGPPPTVSQMLSVKRQQQQQHSPAPPPQQVQVQVQQPQQVQMQVQPQQSNAGVGQPASGESSLIKQLLLPKRGPSTPGGKLILPAPQIPPPNNARAPSPQVVYQVASNQAAGFGVQGQTPAQQLLVGQQNVQLVPSAMPPSGGVQTVPISNLQILPGPLISNSPATIFQGTSGNQVTITVVPNTSFAPATVSQGNATQLIAPAGITMSGTQTGVGLPVQTLPATQASPAGQSSCTTATPPFKGDKIICQKEEEAKEATGLHVHERKIEVMENPSCRRGATNTSNGDTKENEMHVGSLLNGRKYSDSSLPPSNSGKIQSETNQCSLISNGPSLELGENGASGKQNSEQIDMQDIKSDLRKPLVNGICDFDKGDGSHLSKNIPNHKTSNHVGNGEISPMEPQGTLDITQQDTAKGDQLERISNGPVLTLGGSSVSSIQEASNAATQQFSGTDLLNGPLASSLNSDVPQQRPSVVVSPHSTTSVIQGHQIIAVPDSGSKVSHSPALSSDVRSTNGTAECKTVKRPAEDTDRETVAGIPNKVGVRIVTISDPNNAGCSATMVAVPAGADPSTVAKVAIESAVQQKQQHPPTYVQNVVPQNTPMPPSPAVQVQGQPNSSQPSPFSGSSQPGDPMRKPGQNFMCLWQSCKKWFQTPSQVFYHAATEHGGKDVYPGQCLWEGCEPFQRQRFSFITHLQDKHCSKDALLAGLKQDEPGQAGSQKSSTKQPTVGGTSSTPRAQKAIVNHPSAALMALRRGSRNLVFRDFTDEKEGPITKHIRLTAALILKNIGKYSECGRR

SEQ ID NO: 895428 - protein, 1236 aa, Homo sapiens
HLTLPDVLLVISTLEVLYMLTEMGDVACTKIAKVEKSIDMLVCLVSMDIQMFGPDALAAVKLIEHPSSSHQMLSEIRPQAIEQVQTQTHVASAPASRAVVAQHVAPPPGIVEIDSEKFACQWLNAHFEVNPDCSVSRAEMYSEYLSTCSKLARGGILTSTGFYKCLRTVFPNHTVKRVEDSSSNGQAHIHVVGVKRRAIPLPIQMYYQQQPVSTSVVRVDSVPDVSPAPSPAGIPHGSQTIGNHFQRTPVANQSSNLTATQMSFPVQGVHTVAQTVSRIPQNPSPHTHQQQNAPVTVIQSKAPIPCEVVKATVIQNSIPQTGVPVSIAVGGGPPQSSVVQNHSTGPQPVTVVNSQTLLHHPSVIPQQSPLHTVVPGQIPSGTPVTVIQQAVPQSHMFGRVQNIPACTSTVSQGQQLITTSPQPVQTSSQQTSAGSQSQDTVIIAPPQYVTTSASNIVSATSVQNFQVATGQMVTIAGVPSPQASRVGFQNIAPKPLPSQQVSSTVVQQPIQQPQQPTQQSVVIVSQPAQQGQTYAPAIHQIVLANPAALPAGQTVQLTGQPNITPSSSPSPVPATNNQVPTAMSSSSTPQSQGPPPTVSQMLSVKRQQQQQHSPAPPPQQVQVQVQQPQQVQMQVQPQQSNAGVGQPASGESSLIKQLLLPKRGPSTPGGKLILPAPQIPPPNNARAPSPQVVYQVASNQAAGFGVQGQTPAQQLLVGQQNVQLVPSAMPPSGGVQTVPISNLQILPGPLISNSPATIFQGTSGNQVTITVVPNTSFAPATVSQGNATQLIAPAGITMSGTQTGVGLPVQTLPATQASPAGQSSCTTATPPFKGDKIICQKEEEAKEATGLHVHERKIEVMENPSCRRGATNTSNGDTKENEMHVGSLLNGRKYSDSSLPPSNSGKIQSETNQCSLISNGPSLELGENGASGKQNSEQIDMQDIKSDLRKPLVNGICDFDKGDGSHLSKNIPNHKTSNHVGNGEISPMEPQGTLDITQQDTAKGDQLERISNGPVLTLGGSSVSSIQEASNAATQQFSGTDLLNGPLASSLNSDVPQQRPSVVVSPHSTTSVIQGHQIIAVPDSGSKVSHSPALSSDVRSTNGTAECKTVKRPAEDTDRETVAGIPNKVGVRIVTISDPNNAGCSATMVAVPAGADPSTVAKVAIESAVQQKQQHPPTYVQNVVPQNTPMPPSPAVQVQGQPNSSQPSPFSGSSQPGDPMRKPGQNFMCLWQSCKK

SEQ ID NO: 895429 - protein, 592 aa, Homo sapiens
HLTLPDVLLVISTLEVLYMLTEMGDVACTKIAKVEKSIDMLVCLVSMDIQMFGPDALAAVKLIEHPSSSHQMLSEIRPQAIEQVQTQTHVASAPASRAVVAQHVAPPPGIVEIDSEKFACQWLNAHFEVNPDCSVSRAEMYSEYLSTCSKLARGGILTSTGFYKCLRTVFPNHTVKRVEDSSSNGQAHIHVVGVKRRAIPLPIQMYYQQQPVSTSVVRVDSVPDVSPAPSPAGIPHGSQTIGNHFQRTPVANQSSNLTATQMSFPVQGVHTVAQTVSRIPQNPSPHTHQQQNAPVTVIQSKAPIPCEVVKATVIQNSIPQTGVPVSIAVGGGPPQSSVVQNHSTGPQPVTVVNSQTLLHHPSVIPQQSPLHTVVPGQIPSGTPVTVIQQAVPQSHMFGRVQNIPACTSTVSQGQQLITTSPQPVQTSSQQTSAGSQSQDTVIIAPPQYVTTSASNIVSATSVQNFQVATGQMVTIAGVPSPQASRVGFQNIAPKPLPSQQVSSTVVQQPIQQPQQPTQQSVVIVSQPAQQGQTYAPAIHQIVLANPAALPAGQTVQLTGQPNITPSSSPSPVPVRSTLVDLTQVDPTRSVKT

SEQ ID NO: 895430 - protein, 521 aa, Homo sapiens
MADNEKLDNQRLKNFKNKGRDLETMRRQRNEVVVELRKNKRDEHLLKRRNVPHEDICEDSDIDGDYRVQNTSLEAIVQNASSDNQGIQLSAVQAARKLLSSDRNPPIDDLIKSGILPILVHCLERDDNPSLQFEAAWALTNIASGTSEQTQAVVQSNAVPLFLRLLHSPHQNVCEQAVWALGNIIGDGPQCRDYVISLGVVKPLLSFISPSIPITFLRNVTWVMVNLCRHKDPPPPMETIQEILPALCVLIHHTDVNILVDTVWALSYLTDAGNEQIQMVIDSGIVPHLVPLLSHQEVKVQTAALRAVGNIVTGTDEQTQVVLNCDALSHFPALLTHPKEKINKEAVWFLSNITAGNQQQVQAVIDANLVPMIIHLLDKGDFGTQKEAAWAISNLTISGRKDQVAYLIQQNVIPPFCNLLTVKDAQVVQVVLDGLSNILKMAEDEAETIGNLIEECGGLEKIEQLQNHENEDIYKLAYEIIDQFFSSDDIDEDPSLVPEAIQGGTFGFNSSANVPTEGFQF

SEQ ID NO: 895431 - protein, 108 aa, Homo sapiens
THASPTRRVKDAQVVQVVLDGLSNILKMAEDEAETIGNLIEECGGLEKIEQLQNHENEDIYKLAYEIIDQFFSSDDIDEDPSLVPEAIQGGTFGFNSSANVPTEGFQF

SEQ ID NO: 895432 - protein, 132 aa, Homo sapiens
LFRRSPLGPLSIQVHCLERDDNPSLQFEAAWALTNIASGTSEQTQAVVQSNAVPLFLRLLHSPHQNVCEQAVWALGNIIGDGPQCRDYVISLGVVKPLLSFISPSIPITFLRNVTWVMVNLCRHKDPPPLMT

SEQ ID NO: 895433 - protein, 119 aa, Homo sapiens
HSVALPPPGPTVVFAGAAVALGLGRGGGRGEEKAAAEAGERRKEAAARRAQQLRRRPGSWECRCGALVGADPAGPGRGKESPARPWRTTRNWTTNGSRISRTKAATWRTTSPLKKTPPA

SEQ ID NO: 895434 - protein, 521 aa, Homo sapiens; identical to SEQ ID NO: 895430

SEQ ID NO: 895435 - protein, 415 aa, Homo sapiens
LFRRSPLGPLSIQVHCLERDDNPSLQFEAAWALTNIASGTSEQTQAVVQSNAVPLFLRLLHSPHQNVCEQAVWALGNIIGDGPQCRDYVISLGVVKPLLSFISPSIPITFLRNVTWVMVNLCRHKDPPPPMETIQEILPALCVLIHHTDVNILVDTVWALSYLTDAGNEQIQMVIDSGIVPHLVPLLSHQEVKVQTAALRAVGNIVTGTDEQTQVVLNCDALSHFPALLTHPKEKINKEAVWFLSNITAGNQQQVQAVIDANLVPMIIHLLDKGDFGTQKEAAWAISNLTISGRKDQVAYLIQQNVIPPFCNLLTVKDAQVVQVVLDGLSNILKMAEDEAETIGNLIEECGGLEKIEQLQNHENEDIYKLAYEIIDQFFSSDDIDEDPSLVPEAIQGGTFGFNSSANVPTEGFQF

SEQ ID NO: 895436 - protein, 396 aa, Homo sapiens
MADNEKLDNQRLKNFKNKGRDLETMRRQRNEVVVELRKNKRDEHLLKRRNVPHEDICEDSDIDGDYRVQNTSLEAIVQNASSDNQGIQLSAVQAARKLLSSDRNPPIDDLIKSGILPILVHCLERDDNPSLQFEAAWALTNIASGTSEQTQAVVQSNAVPLFLRLLHSPHQNVCEQAVWALGNIIGDGPQCRDYVISLGVVKPLLSFISPSIPITFLRNVTWVMVNLCRHKDPPPPMETIQEILPALCVLIHHTDVNILVDTVWALSYLTDAGNEQIQMVIDSGIVPHLVPLLSHQEVKVQTAALRAVGNIVTGTDEQTQVVLNCDALSHFPALLTHPKEKINKEAVWFLSNITAGNQQQVQAVIDANLVPMIIHLLDKGILAQAASFSVPSRRGR

SEQ ID NO: 895437 - protein, 497 aa, Homo sapiens
MADNEKLDNQRLKNFKNKGRDLETMRRQRNEVVVELRKNKRDEHLLKRRNVPHEDICEDSDIDGDYRVQNTSLEAIVQNASSDNQGIQLSAVQAARKLLSSDRNPPIDDLIKSGILPILVHCLERDDNPSLQFEAAWALTNIASGTSEQTQAVVQSNAVPLFLRLLHSPHQNVCEQAVWALGNIIGDGPQCRDYVISLGVVKPLLSFISPSIPITFLRNVTWVMVNLCRHKDPPPPMETIQEILPALCVLIHHTDVNILVDTVWALSYLTDAGNEQIQMVIDSGIVPHLVPLLSHQEVKVQTAALRAVGNIVTGTDEQTQVVLNCDALSHFPALLTHPKEKINKEAVWFLSNITAGNQQQVQAVIDANLVPMIIHLLDKVAYLIQQNVIPPFCNLLTVKDAQVVQVVLDGLSNILKMAEDEAETIGNLIEECGGLEKIEQLQNHENEDIYKLAYEIIDQFFSSDDIDEDPSLVPEAIQGGTFGFNSSANVPTEGFQF

SEQ ID NO: 895438 - protein, 150 aa, Homo sapiens
MIIHLLDKGDFGTQKEAAWAISNLTISGRKDQVAYLIQQNVIPPFCNLLTVKDAQVVQVVLDGLSNILKMAEDEAETIGNLIEECGGLEKIEQLQNHENEDIYKLAYEIIDQFFSSDDIDEDPSLVPEAIQGGTFGFNSSANVPTEGFQF

SEQ ID NO: 895439 - protein, 93 aa, Homo sapiens
MAAGGTGGLREEQRYGLSCGRLGQDNITVLHVKLTETAIRALETYQSHKNLIPFRPSIQFQGLHGVSTLIDLTNKSNVLARYSTFKIRFQLTL

SEQ ID NO: 895440 - protein, 640 aa, Homo sapiens
MAAGGTGGLREEQRYGLSCGRLGQDNITVLHVKLTETAIRALETYQSHKNLIPFRPSIQFQGLHGLVKIPKNDPLNEVHNFNFYLSNVGKDNPQGSFDCIQQTFSSSGASQLNCLGFIQDKITVCATNDSYQMTRERMTQAEEESRNRSTKVIKPGGPYVGKRVQIRKAPQAVSDTVPERKRSTPMNPANTIRKTHSSSTISQRPYRDRVIHLLALKAYKKPELLARLQKDGVNQKDKNSLGAILQQVANLNSKDLSYTLKDYVFKELQRDWPGYSEIDRRSLESVLSRKLNPSQNATGTSRSESPVCSSRDAVSSPQKRLLDSEFIDPLMNKKARISHLTNRVPPTLNGHLNPTSEKSAAGLPLPPAAAAIPTPPPLPSTYLPISHPPQIVNSNSNSPSTPEGRGTQDLPVDSFSQNDSIYEDQQDKYTSRTSLETLPPGSVLLKCPKPMEENHSMSHKKSKKKSKKHKEKDQIKKHDIETIEEKEEDLKREEEIAKLNNSSPNSSGGVKEDCTASMEPSAIELPDYLIKYIAIVSYEQRQNYKDDFNAEYDEYRALHARMETVARRFIKLDAQRKRLSPGSKEYQNVHEEVLQEYQKIKQSSPNYHEEKYRCEYLHNKLAHIKRLIGEFDQQQAESWS

SEQ ID NO: 895441 - protein, 640 aa, Homo sapiens; identical to SEQ ID NO: 895440

SEQ ID NO: 895442 - protein, 508 aa, Homo sapiens [sequence omitted]

SEQ ID NO: 895443 - protein, 455 aa, Homo sapiens [sequence omitted]

SEQ ID NO: 895444 - protein, 455 aa, Homo sapiens [sequence omitted]

SEQ ID NO: 895445 - protein, 640 aa, Homo sapiens; identical to SEQ ID NO: 895440

SEQ ID NO: 895446 - protein, 310 aa, Homo sapiens
MNKKARISHLTNRVPPTLNGHLNPTSEKSAAGLPLPPAAAAIPTPPPLPSTYLPISHPPQIVNSNSNSPSTPEGRGTQDLPVDSFSQNDSIYEDQQDKYTSRTSLETLPPGSVLLKCPKPMEENHSMSHKKSKKKSKKHKEKDQIKKHDIETIEEKEEDLKREEEIAKLNNSSPNSSGGVKEDCTASMEPSAIELPDYLIKYIAIVSYEQRQNYKDDFNAEYDEYRALHARMETVARRFIKLDAQRKRLSPGSKEYQNVHEEVLQEYQKIKQSSPNYHEEKYRCEYLHNKLAHIKRLIGEFDQQQAESWS

SEQ ID NO: 895447 - protein, 310 aa, Homo sapiens; identical to SEQ ID NO: 895446

SEQ ID NO: 895448 - protein, 640 aa, Homo sapiens; identical to SEQ ID NO: 895440

SEQ ID NO: 895449 - protein, 277 aa, Homo sapiens
MAAGGTGGLREEQRYGLSCGRLGQDNITVLHVKLTETAIRALETYQSHKNLIPFRPSIQFQGLHGLVKIPKNDPLNEVHNFNFYLSNVGKDNPQGSFDCIQQTFSSSGASQLNCLGFIQDKITVCATNDSYQMTRERMTQAEEESRNRSTKVIKPGGPYVGKRVQIRKAPQAVSDTVPERKRSTPMNPANTIRKTHSSSTISQRPYRDRVIHLLALKAYKKPELLARLQKDGVNQKDKNSLGAILQQVRTAGERSFLLTFLLKCSFKKACCHYYHYY

SEQ ID NO: 895450 - protein, 318 aa, Homo sapiens
MAAGGTGGLREEQRYGLSCGRLGQDNITVLHVKLTETAIRALETYQSHKNLIPFRPSIQFQGLHGLVKIPKNDPLNEVHNFNFYLSNVGKDNPQGSFDCIQQTFSSSGASQLNCLGFIQDKITVCATNDSYQMTRERMTQAEEESRNRSTKVIKPGGPYVGKRVQIRKAPQAVSDTVPERKRSTPMNPANTIRKTHSSSTISQRPYRDRVIHLLALKAYKKPELLARLQKDGVNQKDKNSLGAILQQVANLNSKDLSYTLKDYVFKELQRDWPGYSEIDRRSLESVLSRKLNPSQNATGTSRSESPVCSSIKILNLTP

SEQ ID NO: 895451 - protein, 139 aa, Homo sapiens
WRLEPERRRRRHPGEFKMAAGGTGGLREEQRYGLSCGRLGQDNITVLHVKLTETAIRALETYQSHKVSGPAGRLGSERQSAPLTAWPRPGAGPAEPWLAAATVSARSGQAGQGRAGWLTPRSRASLGVGEAGSRAAPGG

SEQ ID NO: 895452 - protein, 4368 aa, Homo sapiens
MGALWSWWILWAGATLLWGLTQEASVDLKNTGREEFLTAFLQNYQLAYSKAYPRLLISSLSESPASVSILSQADNTSKKVTVRPGESVMVNISAKAEMIGSKIFQHAVVIHSDYAISVQALNAKPDTAELTLLRPIQALGTEYFVLTPPGTSARNVKEFAVVAGAAGASVSVTLKGSVTFNGKFYPAGDVLRVTLQPYNVAQLQSSVDLSGSKVTASSPVAVLSGHSCAQKHTTCNHVVEQLLPTSAWGTHYVVPTLASQSRYDLAFVVASQATKLTYNHGGITGSRGLQAGDVVEFEVRPSWPLYLSANVGIQVLLFGTGAIRNEVTYDPYLVLIPDVAAYCPAYVVKSVPGCEGVALVVAQTKAISGLTIDGHAVGAKLTWEAVPGSEFSYAEVELGTADMIHTAEATTNLGLLTFGLAKAIGYATAADCGRTVLSPVEPSCEGMQCAAGQRCQVVGGKAGCVAESTAVCRAQGDPHYTTFDGRRYDMMGTCSYTMVELCSEDDTLPAFSVEAKNEHRGSRRVSYVGLVTVRAYSHSVSLTRGEVGFVLVDNQRSRLPVSLSEGRLRVYQSGPRAVVELVFGLVVTYDWDCQLALSLPARFQDQVCGLCGNYNGDPADDFLTPDGALAPDAVEFASSWKLDDGDYLCEDGCQNNCPACTPGQAQHYEGDRLCGMLTKLDGPFAVCHDTLDPRPFLEQCVYDLCVVGGERLSLCRGLSAYAQACLELGISVGDWRSPANCPLSCPANSRYELCGPACPTSCNGAAAPSNCSGRPCVEGCVCLPGFVASGGACVPASSCGCTFQGLQLAPGQEVWADELCQRRCTCNGATHQVTCRDKQSCPAGERCSVQNGLLGCYPDRFGTCQGSGDPHYVSFDGRRFDFMGTCTYLLVGSCGQNAALPAFRVLVENEHRGSQTVSYTRAVRVEARGVKVAVRREYPGQVLVDDVLQYLPFQAADGQVQVFRQGRDAVVRTDFGLTVTYDWNARVTAKVPSSYAEALCGLCGNFNGDPADDLALRGGGQAANALAFGNSWQEETRPGCGATEPGDCPKLDSLVAQQLQSKNECGILADPKGPFRECHSKLDPQGAVRDCVYDRCLLPGQSGPLCDALATYAAACQAAGATVHPWRSEELCPLSCPPHSHYEACSYGCPLSCGDLPVPGGCGSECHEGCVCDEGFALSGESCLPLASCGCVHQGTYHPPGQTFYPGPGCDSLCHCQEGGLVSCESSSCGPHEACQPSGGSLGCVAVGSSTCQASGDPHYTTFDGRRFDFMGTCVYVLAQTCGTRPGLHRFAVLQENVAWGNGRVSVTRVITVQVANFTLRLEQRQWKVTVNGVDMKLPVVLANGQIRASQHGSDVVIETDFGLRVAYDLVYYVRVTVPGNYYQQMCGLCGNYNGDPKDDFQKPNGSQAGNANEFGNSWEEVVPDSPCLPPTPCPPGSEDCIPSHKCPPELEKKYQKEEFCGLLSSPTGPLSSCHKLVDPQGPLKDCIFDLCLGGGNLSILCSNIHAYVSACQAAGGHVEPWRTETFCPMECPPNSHYELCADTCSLGCSALSAPPQCQDGCAEGCQCDSGFLYNGQACVPIQQCGCYHNGVYYEPEQTVLIDNCRQQCTCHAGKGMVCQEHSCKPGQVCQPSGGILSCVTKDPCHGVTCRPQETCKEQGGQGVCLPNYEATCWLWGDPHYHSFDGRKFDFQGTCNYVLATTGCPGVSTQGLTPFTVTTKNQNRGNPAVSYVRVVTVAALGTNISIHKDEIGKVRVNGVLTALPVSVADGRISVTQGASKALLVADFGLQVSYDWNWRVDVTLPSSYHGAVCGLCGNMDRNPNNDQVFPNGTLAPSIPIWGGSWRAPGWDPLCWDECRGSCPTCPEDRLEQYEGPGFCGPLAPGTGGPFTTCHAHVPPESFFKGCVLDVCMGGGDRDILCKALASYVAACQAAGVVIEDWRAQVGCEITCPENSHYEVCGPPCPASCPSPAPLTTPAVCEGPCVEGCQCDAGFVLSADRCVPLNNGCGCWANGTYHEAGSEFWADGTCSQWCRCGPGGGSLVCTPASCGLGEVCGLLPSGQHGCQPVSTAECQAWGDPHYVTLDGHRFNFQGTCEYLLSAPCHGPPLGAENFTVTVANEHRGSQAVSYTRSVTLQIYNHSLTLSARWPRKLQVDGVFVTLPFQLDSLLHAHLSGADVVVTTTSGLSLAFDGDSFVRLRVPAAYAGSLCGLCGNYNQDPADDLKAVGGKPAGWQVGGAQGCGECVSKPCPSPCTPEQQESFGGPDACGVISATDGPLAPCHGLVPPAQYFQGCLLDACQVQGHPGGLCPAVATYVAACQAAGAQLREWRRPDFCPFQCPAHSHYELCGDSCPGSCPSLSAPEGCESACREGCVCDAGFVLSGDTCVPVGQCGCLHDDRYYPLGQTFYPGPGCDSLCRCREGGEVSCEPSSCGPHETCRPSGGSLGCVAVGSTTCQASGDPHYTTFDGRRFDFMGTCVYVLAQTCGTRPGLHRFAVLQENVAWGNGRVSVTRVITVQVANFTLRLEQRQWKVTVNGVDMKLPVVLANGQIRASQHGSDVVIETDFGLRVAYDLVYYVRVTVPGNYYQLMCGLCGNYNGDPKDDFQKPNGSQAGNANEFGNSWEEVVPDSPCLPPPTCPPGSEGCIPSEECPPELEKKYQKEEFCGLLSSPTGPLSSCHKLVDPQGPLKDCIFDLCLGGGNLSILCSNIHAYVSACQAAGGQVEPWRNETFCPMECPQNSHYELCADTCSLGCSALSAPLQCPDGCAEGCQCDSGFLYNGQACVPIQQCGCYHNGAYYEPEQTVLIDNCRQQCTCHAGKVVVCQEHSCKPGQVCQPSGGILSCVTKDPCHGVTCRPQETCKEQGGQGVCLPNYEATCWLWGDPHYHSFDGRKFDFQGTCNYVLATTGCPGVSTQGLTPFTVTTKNQNRGNPAVSYVRVVTVAALGTNISIHKDEIGKVRVNGVLTALPVSVADGRISVAQGASKALLVADFGLQVSYDWNWRVDVTLPSSYHGAVCGLCGNMDRNPNNDQVFPNGTLAPSIPIWGGSWRAPGWDPLCWDECRGSCPTCPEDRLEQYEGPGFCGPLAPGTGGPFTTCHAHVPPESFFKGCVLDVCMGGGDHDILCKALASYVAACQAAGVVIEDWRAQVGCEITCPENSHYEVCGPPCPASCPSPAPLTTPAVCEGPCVEGCQCDAGFVLSADRCVPLNNGCGCWANGTYHEAGSEFWADGTCSQWCRCGPGGGSLVCTPASCGLGEVCGLLPSGQHGCQPVSTAECQAWGDPHYVTLDGHRFDFQGTCEYLLSAPCHGPPLGAENFTVTVANEHRGSQAVSYTRSVTLQIYNHSLTLSARWPRKLQVDGVFVTLPFQLDSLLHAHLSGADVVVTTTSGLSLAFDGDSFVRLRVPAAYAGSLCGLCGNYNQDPADDLKAVGGKPAGWQVGGAQGCGECVSKPCPSPCTPEQQESFGGPDACGVISATDGPLAPCHGLVPPAQYFQGCLLDACQVQGHPGGLCPAVATYVAACQAAGAQLREWRRPDFCPFQCPAHSHYELCGDSCPGSCPSLSAPEGCESACREGCVCDAGFVLSGDTCVPVGQCGCLHDDRYYPLGQTFYPGPGCDSLCRCREGGEVSCEPSSCGPHETCRPSGGSLGCVAVGSTTCQASGDPHYTTFDGRRFDFMGTCVYVLAQTCGTRPGLHRFAVLQENVAWGNGRVSVTRVITVQVANFTLRLEQRQWKVTVNGVDMKLPVVLANGQIRASQHGSDVVIETDFGLRVAYDLVYYVRVTVPGNYYQLMCGLCGNYNGDPKDDFQKPNGSQAGNANEFGNSWEEVVPDSPCLPPPTCPPGSEGCIPSEECPPELEKKYQKEEFCGLLSSPTGPLSSCHKLVDPQGPLKDCIFDLCLGGGNLSILCSNIHAYVSACQAAGGHVEPWRNETFCPMECPQNSHYELCADTCSLGCSALSAPLQCPDGCAEGCQCDSGFLYNGQACVPIQQCGCYHNGVYYEPEQTVLIDNCRQQCTCHVGKVVVCQEHSCKPGQVCQPSGGILSCVNKDPCHGVTCRPQETCKEQGGQGVCLPNYEATCWLWGDPHYHSFDGRKFDFQGTCNYVLATTGCPGVSTQGLTPFTVTTKNQNRGNPAVSYVRVVTVAALGTNISIHKDEIGKVRVNGVLTALPVSVADGRISVAQGASKALLVADFGLQVSYDWNWRVDVTLPSSYHGAVCGLCGNMDRNPNNDQVFPNGTLAPSIPIWGGSWRAPGWDPLCWDECRGSCPTCPEDRLEQYEGPGFCGPLASGTGGPFTTCHAHVPPESFFKGCVLDVCMGGGDHDILCKALASYVAACQAAGVVIEDWRAQVGCEITCPENSHYEVCGPPCPAS

SEQ ID NO: 895453 - protein, 3582 aa, Homo sapiens
RQERGPISSGLVWFHSGPSGSLCFLFSLFVSLFLGARLWASLCLSLSFCFSFSSSLSFCLGLLVSRFLPFLSLCPLSVSCFLSPPFSVCSLVSLSVSSHPVLGPHPYTPFFLFLSFLLLHLPTEITCPENSHYEVCGPPCPASCPSPAPLTTPAVCEGPCVEGCQCDAGFVLSADRCVPLNNGCGCWANGTYHEAGSEFWADGTCSQWCRCGPGGGSLVCTPASCGLGEVCGLLPSGQHGCQPVSTAECQAWGDPHYVTLDGHRFNFQGTCEYLLSAPCHGPPLGAENFTVTVANEHRGSQAVSYTRSVTLQIYNHSLTLSARWPRKLQVDGVFVTLPFQLDSLLHAHLSGADVVVTTTSGLSLAFDGDSFVRLRVPAAYAGSLCGLCGNYNQDPADDLKAVGGKPAGWQVGGAQGCGECVSKPCPSPCTPEQQESFGGPDACGVISATDGPLAPCHGLVPPAQYFQGCLLDACQVQGHPGGLCPAVATYVAACQAAGAQLREWRRPDFCPFQCPAHSHYELCGDSCPGSCPSLSAPEGCESACREGCVCDAGFVLSGDTCVPVGQCGCLHDDRYYPLGQTFYPGPGCDSLCRCREGGEVSCEPSSCGPHETCRPSGGSLGCVAVGSTTCQASGDPHYTTFDGRRFDFMGTCVYVLAQTCGTRPGLHRFAVLQENVAWGNGRVSVTRVITVQVANFTLRLEQRQWKVTVNGVDMKLPVVLANGQIRASQHGSDVVIETDFGLRVAYDLVYYVRVTVPGNYYQLMCGLCGNYNGDPKDDFQKPNGSQAGNANEFGNSWEEVVPDSPCLPPPTCPPGSEGCIPSEECPPELEKKYQKEEFCGLLSSPTGPLSSCHKLVDPQGPLKDCIFDLCLGGGNLSILCSNIHAYVSACQAAGGQVEPWRNETFCPMECPQNSHYELCADTCSLGCSALSAPLQCPDGCAEGCQCDSGFLYNGQACVPIQQCGCYHNGAYYEPEQTVLIDNCRQQCTCHAGKVVVCQEHSCKPGQVCQPSGGILSCVTKDPCHGVTCRPQETCKEQGGQGVCLPNYEATCWLWGDPHYHSFDGRKFDFQGTCNYVLATTGCPGVSTQGLTPFTVTTKNQNRGNPAVSYVRVVTVAALGTNISIHKDEIGKVRVNGVLTALPVSVADGRISVAQGASKALLVADFGLQVSYDWNWRVDVTLPSSYHGAVCGLCGNMDRNPNNDQVFPNGTLAPSIPIWGGSWRAPGWDPLCWDECRGSCPTCPEDRLEQYEGPGFCGPLAPGTGGPFTTCHAHVPPESFFKGCVLDVCMGGGDHDILCKALASYVAACQAAGVVIEDWRAQVGCEITCPENSHYEVCGPPCPASCPSPAPLTTPAVCEGPCVEGCQCDAGFVLSADRCVPLNNGCGCWANGTYHEAGSEFWADGTCSQWCRCGPGGGSLVCTPASCGLGEVCGLLPSGQHGCQPVSTAECQAWGDPHYVTLDGHRFDFQGTCEYLLSAPCHGPPLGAENFTVTVANEHRGSQAVSYTRSVTLQIYNHSLTLSARWPRKLQVDGVFVTLPFQLDSLLHAHLSGADVVVTTTSGLSLAFDGDSFVRLRVPAAYAGSLCGLCGNYNQDPADDLKAVGGKPAGWQVGGAQGCGECVSKPCPSPCTPEQQESFGGPDACGVISATDGPLAPCHGLVPPAQYFQGCLLDACQVQGHPGGLCPAVATYVAACQAAGAQLREWRRPDFCPFQCPAHSHYELCGDSCPGSCPSLSAPEGCESACREGCVCDAGFVLSGDTCVPVGQCGCLHDDRYYPLGQTFYPGPGCDSLCRCREGGEVSCEPSSCGPHETCRPSGGSLGCVAVGSTTCQASGDPHYTTFDGRRFDFMGTCVYVLAQTCGTRPGLHRFAVLQENVAWGNGRVSVTRVITVQVANFTLRLEQRQWKVTVNGVDMKLPVVLANGQIRASQHGSDVVIETDFGLRVAYDLVYYVRVTVPGNYYQLMCGLCGNYNGDPKDDFQKPNGSQAGNANEFGNSWEEVVPDSPCLPPPTCPPGSEGCIPSEECPPELEKKYQKEEFCGLLSSPTGPLSSCHKLVDPQGPLKDCIFDLCLGGGNLSILCSNIHAYVSACQAAGGHVEPWRNETFCPMECPQNSHYELCADTCSLGCSALSAPLQCPDGCAEGCQCDSGFLYNGQACVPIQQCGCYHNGVYYEPEQTVLIDNCRQQCTCHVGKVVVCQEHSCKPGQVCQPSGGILSCVNKDPCHGVTCRPQETCKEQGGQGVCLPNYEATCWLWGDPHYHSFDGRKFDFQGTCNYVLATTGCPGVSTQGLTPFTVTTKNQNRGNPAVSYVRVVTVAALGTNISIHKDEIGKVRVNGVLTALPVSVADGRISVAQGASKALLVADFGLQVSYDWNWRVDVTLPSSYHGAVCGLCGNMDRNPNNDQVFPNGTLAPSIPIWGGSWRAPGWDPLCWDECRGSCPTCPEDRLEQYEGPGFCGPLASGTGGPFTTCHAHVPPESFFKGCVLDVCMGGGDHDILCKALASYVAACQAAGVVIEDWRAQVGCEITCPENSHYEVCGPPCPASCPSPAPLTTPAVCEGPCVEGCQCDAGFVLSADRCVPLNNGCGCWANGTYHEAGSEFWADGTCSQWCRCGPGGGSLVCTPASCGLGEVCGLLPSGQHGCQPVSTAECQAWGDPHYVTLDGHRFDFQGTCEYLLSAPCHGPPLGAENFTVTVANEHRGSQAVSYTRSVTLQIYNHSLTLSARWPRKLQVDGVFVALPFQLDSLLHAHLSGADVVVTTTSGLSLAFDGDSFVRLRVPAAYAASLCGLCGNYNQDPADDLKAVGGKPAGWQVGGAQGCGECVSKPCPSPCTPEQQESFGGPDACGVISATDGPLAPCHGLVPPAQYFQGCLLDACQVQGHPGGLCPAVATYVAACQAAGAQLGEWRRPDFCPLQCPAHSHYELCGDSCPVSCPSLSAPEGCESACREGCVCDAGFVLSGDTCVPVGQCGCLHDGRYYPLGEVFYPGPECERRCECGPGGHVTCQEGAACGPHEECRLEDGVQACHATGCGRCLANGGIHYITLDGRVYDLHGSCSYVLAQVCHPKPGDEDFSIVLEKNAAGDLQRLLVTVAGQVVSLAQGQQVTVDGEAVALPVAVGRVRVTAEGRNMVLQTTKGLRLLFDGDAHLLMSIPSPFRGRLCGLCGNFNGNWSDDFVLPNGSAASSVETFGAAWRVPGSSKGCGEGCGPQGCPVCLAEETAPYESNEACGQLRNPQGPFATCQAVLSPSEYFRQCVYDLCAQKGDKAFLCRSLAAYTAACQAAGVAVKPWRTDSFCPLHCPAHSHYSICTRTCQGSCAALSGLTGCTTRCFEGCECDDRFLLSQGVCIPVQDCGCTHNGRYLPVNSSLLTSDCSERCSCSSSSGLTCQAAGCPPGRVCEVKAEARNCWATRGLCVLSVGANLTTFDGARGATTSPGVYELSSRCPGLQNTIPWYRVVAEVQICHGKTEAVGQVHIFFQDGMVTLTPNKGVWVNGLRVDLPAEKLASVSVSRTPDGSLLVRQKAGVQVWLGANGKVAVIVSNDHAGKLCGACGNFDGDQTNDWHDSQEKPAMEKWRAQDFSPCYG

SEQ ID NO: 895454 - protein, 3162 aa, Homo sapiens
MGALWSWWILWAGATLLWGLTQEASVDLKNTGREEFLTAFLQNYQLAYSKAYPRLLISSLSESPASVSILSQADNTSKKVTVRPGESVMVNISAKAEMIGSKIFQHAVVIHSDYAISVQALNAKPDTAELTLLRPIQALGTEYFVLTPPGTSARNVKEFAVVAGAAGASVSVTLKGSVTFNGKFYPAGDVLRVTLQPYNVAQLQSSVDLSGSKVTASSPVAVLSGHSCAQKHTTCNHVVEQLLPTSAWGTHYVVPTLASQSRYDLAFVVASQATKLTYNHGGITGSRGLQAGDVVEFEVRPSWPLYLSANVGIQVLLFGTGAIRNEVTYDPYLVLIPDVAAYCPAYVVKSVPGCEGVALVVAQTKAISGLTIDGHAVGAKLTWEAVPGSEFSYAEVELGTADMIHTAEATTNLGLLTFGLAKAIGYATAADCGRTVLSPVEPSCEGMQCAAGQRCQVVGGKAGCVAESTAVCRAQGDPHYTTFDGRRYDMMGTCSYTMVELCSEDDTLPAFSVEAKNEHRGSRRVSYVGLVTVRAYSHSVSLTRGEVGFVLVDNQRSRLPVSLSEGRLRVYQSGPRAVVELVFGLVVTYDWDCQLALSLPARFQDQVCGLCGNYNGDPADDFLTPDGALAPDAVEFASSWKLDDGDYLCEDGCQNNCPACTPGQAQHYEGDRLCGMLTKLDGPFAVCHDTLDPRPFLEQCVYDLCVVGGERLSLCRGLSAYAQACLELGISVGDWRSPANCPLSCPANSRYELCGPACPTSCNGAAAPSNCSGRPCVEGCVCLPGFVASGGACVPASSCGCTFQGLQLAPGQEVWADELCQRRCTCNGATHQVTCRDKQSCPAGERCSVQNGLLGCYPDRFGTCQGSGDPHYVSFDGRRFDFMGTCTYLLVGSCGQNAALPAFRVLVENEHRGSQTVSYTRAVRVEARGVKVAVRREYPGQVLVDDVLQYLPFQAADGQVQVFRQGRDAVVRTDFGLTVTYDWNARVTAKVPSSYAEALCGLCGNFNGDPADDLALRGGGQAANALAFGNSWQEETRPGCGATEPGDCPKLDSLVAQQLQSKNECGILADPKGPFRECHSKLDPQGAVRDCVYDRCLLPGQSGPLCDALATYAAACQAAGATVHPWRSEELCPLSCPPHSHYEACSYGCPLSCGDLPVPGGCGSECHEGCVCDEGFALSGESCLPLASCGCVHQGTYHPPGQTFYPGPGCDSLCHCQEGGLVSCESSSCGPHEACQPSGGSLGCVAVGSSTCQASGDPHYTTFDGRRFDFMGTCVYVLAQTCGTRPGLHRFAVLQENVAWGNGRVSVTRVITVQVANFTLRLEQRQWKVTVNGVDMKLPVVLANGQIRASQHGSDVVIETDFGLRVAYDLVYYVRVTVPGNYYQQMCGLCGNYNGDPKDDFQKPNGSQAGNANEFGNSWEEVVPDSPCLPPTPCPPGSEDCIPSHKCPPELEKKYQKEEFCGLLSSPTGPLSSCHKLVDPQGPLKDCIFDLCLGGGNLSILCSNIHAYVSACQAAGGHVEPWRTETFCPMECPPNSHYELCADTCSLGCSALSAPPQCQDGCAEGCQCDSGFLYNGQACVPIQQCGCYHNGVYYEPEQTVLIDNCRQQCTCHAGKGMVCQEHSCKPGQVCQPSGGILSCVTKDPCHGVTCRPQETCKEQGGQGVCLPNYEATCWLWGDPHYHSFDGRKFDFQGTCNYVLATTGCPGVSTQGLTPFTVTTKNQNRGNPAVSYVRVVTVAALGTNISIHKDEIGKVRVNGVLTALPVSVADGRISVTQGASKALLVADFGLQVSYDWNWRVDVTLPSSYHGAVCGLCGNMDRNPNNDQVFPNGTLAPSIPIWGGSWRAPGWDPLCWDECRGSCPTCPEDRLEQYEGPGFCGPLAPGTGGPFTTCHAHVPPESFFKGCVLDVCMGGGDRDILCKALASYVAACQAAGVVIEEALLVADFGLQVSYDWNWRVDVTLPSSYHGAVCGLCGNMDRNPNNDQVFPNGTLAPSIPIWGGSWRAPGWDPLCWDECRGSCPTCPEDRLEQYEGPGFCGPLASGTGGPFTTCHAHVPPESFFKGCVLDVCMGGGDHDILCKALASYVAACQAAGVVIEDWRAQVGCEITCPENSHYEVCGPPCPASCPSPAPLTTPAVCEGPCVEGCQCDAGFVLSADRCVPLNNGCGCWANGTYHEAGSEFWADGTCSQWCRCGPGGGSLVCTPASCGLGEVCGLLPSGQHGCQPVSTAECQAWGDPHYVTLDGHRFDFQGTCEYLLSAPCHGPPLGAENFTVTVANEHRGSQAVSYTRSVTLQIYNHSLTLSARWPRKLQVDGVFVALPFQLDSLLHAHLSGADVVVTTTSGLSLAFDGDSFVRLRVPAAYAASLCGLCGNYNQDPADDLKAVGGKPAGWQVGGAQGCGECVSKPCPSPCTPEQQESFGGPDACGVISATDGPLAPCHGLVPPAQYFQGCLLDACQVQGHPGGLCPAVATYVAACQAAGAQLGEWRRPDFCPLQCPAHSHYELCGDSCPVSCPSLSAPEGCESACREGCVCDAGFVLSGDTCVPVGQCGCLHDGRYYPLGEVFYPGPECERRCECGPGGHVTCQEGAACGPHEECRLEDGVQACHATGCGRCLANGGIHYITLDGRVYDLHGSCSYVLAQVCHPKPGDEDFSIVLEKNAAGDLQRLLVTVAGQVVSLAQGQQVTVDGEAVALPVAVGRVRVTAEGRNMVLQTTKGLRLLFDGDAHLLMSIPSPFRGRLCGLCGNFNGNWSDDFVLPNGSAASSVETFGAAWRVPGSSKGCGEGCGPQGCPVCLAEETAPYESNEACGQLRNPQGPFATCQAVLSPSEYFRQCVYDLCAQKGDKAFLCRSLAAYTAACQAAGVAVKPWRTDSFCPLHCPAHSHYSICTRTCQGSCAALSGLTGCTTRCFEGCECDDRFLLSQGVCIPVQDCGCTHNGRYLPVNSSLLTSDCSERCSCSSSSGLTCQAAGCPPGRVCEVKAEARNCWATRGLCVLSVGANLTTFDGARGATTSPGVYELSSRCPGLQNTIPWYRVVAEVQICHGKTEAVGQVHIFFQDGMVTLTPNKGVWVNGLRVDLPAEKLASVSVSRTPDGSLLVRQKAGVQVWLGANGKVAVIVSNDHAGKLCGACGNFDGDQTNDWHDSQEKPAMEKWRAQDFSPCYG

SEQ ID NO: 895455 - protein, 440 aa, Homo sapiens
ARSCAQKGDKAFLCRSLAAYTAACAGSWSDDFVLPNGSAASSVETFGAAWRVPGSSKGCGEGCGPQGCPVCLAEETAPYESNEACGQLRNPQGPFATCQAVLSPSEYFRQCVYDLCAQKGDKAFLCRSLAAYTAACQAAGVAVKPWRTDSFCPLHCPAHSHYSICTRTCQGSCAALSGLTGCTTRCFEGCECDDRFLLSQGVCIPVQDCGCTHNGRYLPVNSSLLTSDCSERCSCSSSSGLTCQAAGCPPGRVCEVKAEARNCWATRGLCVLSVGANLTTFDGARGATTSPGVYELSSRCPGLQNTIPWYRVVAEVQICHGKTEAVGQVHIFFQDGMVTLTPNKGVWVNGLRVDLPAEKLASVSVSRTPDGSLLVRQKAGVQVWLGANGKVAVIVSNDHAGKLCGACGNFDGDQTNDWHDSQEKPAMEKWRAQDFSPCYG

SEQ ID NO: 895456 - protein, 260 aa, Homo sapiens
MLIRGSRFGASCDDRFLLSQGVCIPVQDCGCTHNGRYLPVNSSLLTSDCSERCSCSSSSGLTCQAAGCPPGRVCEVKAEARNCWATRGLCVLSVGANLTTFDGARGATTSPGVYELSSRCPGLQNTIPWYRVVAEVQICHGKTEAVGQVHIFFQDGMVTLTPNKGVWVNGLRVDLPAEKLASVSVSRTPDGSLLVRQKAGVQVWLGANGKVAVIVSNDHAGKLCGACGNFDGDQTNDWHDSQEKPAMEKWRAQDFSPCYG

SEQ ID NO: 895457 - protein, 242 aa, Homo sapiens
TTVCKTGDQTNDRHDSQEKPAMEKWRAQDFCPLQCPAHSHYELCGDSCPVSCPSLSAPEGCESACREGCVCDAGFVLSGDTTFDGARGATTSPGVYELSSRCPGLQNTIPWYRVVAEVQICHGKTEAVGQVHIFFQDGMVTLTPNKGVWVNGLRVDLPAEKLASVSVSRTPDGSLLVRQKAGVQVWLGANGKVAVIVSNDHAGKLCGACGNFDGDQTNDWHDSQEKPAMEKWRAQDFSPCYG

SEQ ID NO: 895458 - protein, 4368 aa, Homo sapiens; identical to SEQ ID NO: 895452

SEQ ID NO: 895459 - protein, 4368 aa, Homo sapiens; identical to SEQ ID NO: 895452

SEQ ID NO: 895460 - protein, 4368 aa, Homo sapiens; identical to SEQ ID NO: 895452

SEQ ID NO: 895461 - protein, 115 aa, Homo sapiens
EDVSTMRMQHQDGMVTLTPNKGVWVNGLRVDLPAEKLASVSVSRTPDGSLLVRQKAGVQVWLGANGKVAVIVSNDHAGKLCGACGNFDGDQTNDWHDSQEKPAMEKWRAQDFSPW

SEQ ID NO: 895462 - protein, 4368 aa, Homo sapiens; identical to SEQ ID NO: 895452

SEQ ID NO: 895463 - protein, 1395 aa, Homo sapiens
MGALWSWWILWAGATLLWGLTQEASVDLKNTGREEFLTAFLQNYQLAYSKAYPRLLISSLSESPASVSILSQADNTSKKVTVRPGESVMVNISAKAEMIGSKIFQHAVVIHSDYAISVQALNAKPDTAELTLLRPIQALGTEYFVLTPPGTSARNVKEFAVVAGAAGASVSVTLKGSVTFNGKFYPAGDVLRVTLQPYNVAQLQSSVDLSGSKVTASSPVAVLSGHSCAQKHTTCNHVVEQLLPTSAWGTHYVVPTLASQSRYDLAFVVASQATKLTYNHGGITGSRGLQAGDVVEFEVRPSWPLYLSANVGIQVLLFGTGAIRNEVTYDPYLVLIPDVAAYCPAYVVKSVPGCEGVALVVAQTKAISGLTIDGHAVGAKLTWEAVPGSEFSYAEVELGTADMIHTAEATTNLGLLTFGLAKAIGYATAADCGRTVLSPVEPSCEGMQCAAGQRCQVVGGKAGCVAESTAVCRAQGDPHYTTFDGRRYDMMGTCSYTMVELCSEDDTLPAFSVEAKNEHRGSRRVSYVGLVTVRAYSHSVSLTRGEVGFVLVDNQRSRLPVSLSEGRLRVYQSGPRAVVELVFGLVVTYDWDCQLALSLPARFQDQVCGLCGNYNGDPADDFLTPDGALAPDAVEFASSWKLDDGDYLCEDGCQNNCPACTPGQAQHYEGDRLCGMLTKLDGPFAVCHDTLDPRPFLEQCVYDLCVVGGERLSLCRGLSAYAQACLELGISVGDWRSPANCPLSCPANSRYELCGPACPTSCNGAAAPSNCSGRPCVEGCVCLPGFVASGGACVPASSCGCTFQGLQLAPGQEVWADELCQRRCTCNGATHQVTCRDKQSCPAGERCSVQNGLLGCYPDRFGTCQGSGDPHYVSFDGRRFDFMGTCTYLLVGSCGQNAALPAFRVLVENEHRGSQTVSYTRAVRVEARGVKVAVRREYPGQVLVDDVLQYLPFQAADGQVQVFRQGRDAVVRTDFGLTVTYDWNARVTAKVPSSYAEALCGLCGNFNGDPADDLALRGGGQAANALAFGNSWQEETRPGCGATEPGDCPKLDSLVAQQLQSKNECGILADPKGPFRECHSKLDPQGAVRDCVYDRCLLPGQSGPLCDALATYAAACQAAGATVHPWRSEELCPLSCPPHSHYEACSYGCPLSCGDLPVPGGCGSECHEGCVCDEGFALSGESCLPLASCGCVHQGTYHPPGQTFYPGPGCDSLCHCQEGGLVSCESSSCGPHEACQPSGGSLGCVAVGSSTCQASGDPHYTTFDGRRFDFMGTCVYVLAQTCGTRPGLHRFAVLQENVAWGNGRVSVTRVITVQVANFTLRLEQRQWKVTVNGVDMKLPVVLANGQIRASQHGSEYSHPDLEEASACVLAEPVCCKQHDNFSALGAIPTCEPSRT

SEQ ID NO: 895464 - protein, 137 aa, Homo sapiens
MLSGRLVLGLVSMAGRVCLCQGSAGSGAIGPVEAAIRTKLEEALSPEVLELRNESGGHAVPPGSETHFRVAVVSSRFEGLSPLQRHRLVHAALAEELGGPVHALAIQARTPAQWRENSQLDTSPPCLGGNKKTLGTP

SEQ ID NO: 895465 - protein, 137 aa, Homo sapiens; identical to SEQ ID NO: 895464

SEQ ID NO: 895466 - protein, 113 aa, Homo sapiens
MLSGRLVLGLVSMAGRVCLCQGSAGSGAIGPVEAAIRTKLEEALSPEVLDSRFEGLSPLQRHRLVHAALAEELGGPVHALAIQARTPAQWRENSQLDTSPPCLGGNKKTLGTP

SEQ ID NO: 895467 - protein, 137 aa, Homo sapiens; identical to SEQ ID NO: 895464

SEQ ID NO: 895468 - protein, 137 aa, Homo sapiens; identical to SEQ ID NO: 895464

SEQ ID NO: 895469 - protein, 36 aa, Homo sapiens
MTDFVSIYQSLRATLKPLICMPGSLKRAGFQTKYWF

SEQ ID NO: 895470 - protein, 131 aa, Homo sapiens
IAVEGKDGPVQSSLGPGGKTPRLCSLPAPLRLRLWSGRDGQGASRMEAAETPVFQLGQGELICGLWAVPLGVATSAHGPWHLGNMGAAALGPCVGAEQDGCCVEGNFVPWRVIGDPLPCCCCLQAPGLYYL

SEQ ID NO: 895471 - protein, 131 aa, Homo sapiens; identical to SEQ ID NO: 895470

SEQ ID NO: 895472 - protein, 378 aa, Homo sapiens
MDLAGLLKSQFLCHLVFCYVFIASGLIINTIQLFTLLLWPINKQLFRKINCRLSYCISSQLVMLLEWWSGTECTIFTDPRAYLKYGKENAIVVLNHKFEIDFLCGWSLSERFGLLGGSKVLAKKELAYVPIIGWMWYFTEMVFCSRKWEQDRKTVATSLQHLRDYPEKYFFLIHCEGTRFTEKKHEISMQVARAKGLPRLKHHLLPRTKGFAITVRSLRNVVSAVYDCTLNFRNNENPTLLGVLNGKKYHADLYVRRIPLEDIPEDDDECSAWLHKLYQEKDAFQEEYYRTGTFPETPMVPPRRPWTLVNWLFWASLVLYPFFQFLVSMIRSGSSLTLASFILVFFVASVGVRWMIGVTEIDKGSAYGNSDSKQKLND

SEQ ID NO: 895473 - protein, 159 aa, Homo sapiens
MDLAGLLKSQFLCHLVFCYVFIASGLIINTIQLFTLLLWPINKQLFRKINCRLSYCISSQLVMLLEWWSGTECTIFTDPRAYLKYGKENAIVVLNHKFEIDFLCGWSLSERFGLLGVSQKCIPPCLTHFSGSAPPLVFLLLVIQNLQKNQQSFYLMKWS

SEQ ID NO: 895474 - protein, 133 aa, Homo sapiens
MDLAGLLKSQFLCHLVFCYVFIASGLIINTIQLFTLLLWPINKQLFRKINCRLSYCISSQLVMLLEWWSGTECTIFTDPRAYLKYGKENAIVVLNHKFEIDFLCGWSLSERFGLLGFDLLHVACMPLELGLFS

SEQ ID NO: 895475 - protein, 133 aa, Homo sapiens; identical to SEQ ID NO: 895474

SEQ ID NO: 895476 - protein, 326 aa, Homo sapiens
MDLAGLLKSQFLCHLVFCYVFIASGLIINTIQLFTLLLWPINKQLFRKINCRLSYCISSQLVMLLEWWSGTECTIFTDPRAYLKYGKENAIVVLNHKFEIDFLCGWSLSERFGLLGGSKVLAKKELAYVPIIGWMWYFTEMVFCSRKWEQDRKTVATSLQHLRDYPEKYFFLIHCEGTRFTEKKHEISMQVARAKGLPRLKHHLLPRTKGFAITVRSLRNVVSAVYDCTLNFRNNENPTLLGVLNGKKYHADLYVRRIPLEDIPEDDDECSAWLHKLYQEKGWGDTEFSKQYVSVSRPGRLALCPSEKIAEQQVEVVHGFSKQSGE

SEQ ID NO: 895477 - protein, 186 aa, Homo sapiens
MDLAGLLKSQFLCHLVFCYVFIASGLIINTIQLFTLLLWPINKQLFRKINCRLSYCISSQLVMLLEWWSGTECTIFTDPRAYLKYGKENAIVVLNHKFEIDFLCGWSLSERFGLLGGSKVLAKKELAYVPIIGWMWYFTEMVFCSRKWEQDRKTVATSLQHLRDYPEKYFVCRHQSSCVPRAPAGL

SEQ ID NO: 895478 - protein, 115 aa, Homo sapiens [sequence omitted]

SEQ ID NO: 895479 - protein, 112 aa, Homo sapiens
MDLAGLLKSQFLCHLVFCYVFIASGLIINTIQLFTLLLWPINKQLFRKINCRLSYCISSRGSHWKTSLKTMTSARPGCTSSTRRRMPFRRSTTGRAPSQRRPWCPPGGPGPS

SEQ ID NO: 895480 - protein, 159 aa, Homo sapiens; identical to SEQ ID NO: 895473

SEQ ID NO: 895481 - protein, 1039 aa, Homo sapiens
KRDSPSRSGWGRESEGCGERRWDRCGQRGGERRPRQRAAERRRHRVQSIVDQGAMDRRSMGETESGDAFLDLKKPPASKCPHRYTKEELLDIKELPHSKQRPSCLSEKYDSDGVWDPEKWHASLYPASGRSSPVESLKKELDTDRPSLVRRIVDPRERVKEDDLDVVLSPQRRSFGGGCHVTAAVSSRRSGSPLEKDSDGLRLLGGRRIGSGRIISARTFEKDHRLSDKDLRDLRDRDRERDFKDKRFRREFGDSKRVFGERRRNDSYTEEEPEWFSAGPTSQSETIELTGFDDKILEEDHKGRKRTRRRTASVKEGIVECNGGVAEEDEVEVILAQEPAADQEVPRDAVLPEQSPGDFDFNEFFNLDKVPCLASMIEDVLGEGSVSASRFSRWFSNPSRSGSRSSSLGSTPHEELERLAGLEQAILSPGQNSGNYFAPIPLEDHAENKVDILEMLQKAKVDLKPLLSSLSANKEKLKESSHSGVVLSVEEVEAGLKGLKVDQQVKNSTPFMAEHLEETLSAVTNNRQLKKDGDMTAFNKLVSTMKASGTLPSQPKVSRNLESHLMSPAEIPGQPVPKNILQELLGQPVQRPASSNLLSGLMGSLEPTTSLLGQRAPSPPLSQVFQTRAASADYLRPRIPSPIGFTPGPQQLLGDPFQGMRKPMSPITAQMSQLELQQAALEGLALPHDLAVQAANFYQPGFGKPQVDRTRDGFRNRQQRVTKSPAPVHRGNSSSPAPAASITSMLSPSFTPTSVIRKMYESKEKSKEEPASGKAALGDSKEDTQKASEENLLSSSSVPSADRDSSPTTNSKLSALQRSSCSTPLSQANRYTKEQDYRPKATGRKTPTLASPVPTTPFLRPVHQVPLVPHVPMVRPAHQLHPGLVQRMLAQGVHPQHLPSLLQTGVLPPGMDLSHLQGISGPILGQPFYPLPAASHPLLNPRPGTPLHLAMVQQQLQRSVLHPPGSGSHAAAVSVQTTPQNVPSRSGLPHMHSQLEHRPSQRSSSPVGLAKWFGSDVLQQPLPSMPAKVISVDELEYRQ

SEQ ID NO: 895482 - protein, 413 aa, Homo sapiens
KRDSPSRSGWGRESEGCGERRWDRCGQRGGERRPRQRAAERRRHRVQSIVDQGAMDRRSMGETESGDAFLDLKKPPASKCPHRYTKEELLDIKELPHSKQRPSCLSEKYDSDGVWDPEKWHASLYPASGRSSPVESLKKELDTDRPSLVRRIVDPRERVKEDDLDVVLSPQRRSFGGGCHVTAAVSSRRSGSPLEKDSDGLRLLGGRRIGSGRIISARTFEKDHRLSDKDLRDLRDRDRERDFKDKRFRREFGDSKRVFGERRRNDSYTEEEPEWFSAGPTSQSETIELTGFDDKILEEDHKGRKRTRRRTASVKEGIVECNGGVAEEDEVEVILAQEPAADQEVPRDAVLPEQSPGDFDFNEFFNLDKVPCLASMIEDVLGEGSVSASRFSRWFSNPSRSGSQIQQSWVNTT

SEQ ID NO: 895483 - protein, 107 aa, Homo sapiens
MLQKAKVDLKPLLSSLSANKEKLKESSHSGVVLSVEEVEAGLKGLKVDQQVKNSTPFMAEHLEETLSAVTNNRQLKKDGDMTAFNKLVSTMKASGTLPSQPKVSVSI

SEQ ID NO: 895484 - protein, 911 aa, Homo sapiens
MDILSKKEENTLVGLFNFVFPTSFQDPRERVKEDDLDVVLSPQRRSFGGGCHVTAAVSSRRSGSPLEKDSDGLRLLGGRRIGSGRIISARTFEKDHRLSDKDLRDLRDRDRERDFKDKRFRREFGDSKRVFGERRRNDSYTEEEPEWFSAGPTSQSETIELTGFDDKILEEDHKGRKRTRRRTASVKEGIVECNGGVAEEDEVEVILAQEPAADQEVPRDAVLPEQSPGDFDFNEFFNLDKVPCLASMIEDVLGEGSVSASRFSRWFSNPSRSGSRSSSLGSTPHEELERLAGLEQAILSPGQNSGNYFAPIPLEDHAENKVDILEMLQKAKVDLKPLLSSLSANKEKLKESSHSGVVLSVEEVEAGLKGLKVDQQVKNSTPFMAEHLEETLSAVTNNRQLKKDGDMTAFNKLVSTMKASGTLPSQPKVSRNLESHLMSPAEIPGQPVPKNILQELLGQPVQRPASSNLLSGLMGSLEPTTSLLGQRAPSPPLSQVFQTRAASADYLRPRIPSPIGFTPGPQQLLGDPFQGMRKPMSPITAQMSQLELQQAALEGLALPHDLAVQAANFYQPGFGKPQVDRTRDGFRNRQQRVTKSPAPVHRGNSSSPAPAASITSMLSPSFTPTSVIRKMYESKEKSKEEPASGKAALGDSKEDTQKASEENLLSSSSVPSADRDSSPTTNSKLSALQRSSCSTPLSQANRYTKEQDYRPKATGRKTPTLASPVPTTPFLRPVHQVPLVPHVPMVRPAHQLHPGLVQRMLAQGVHPQHLPSLLQTGVLPPGMDLSHLQGISGPILGQPFYPLPAASHPLLNPRPGTPLHLAMVQQQLQRSVLHPPGSGSHAAAVSVQTTPQNVPSRSGLPHMHSQLEHRPSQRSSSPVGLAKWFGSDVLQQPLPSMPAKVISVDELEYRQ

SEQ ID NO: 895485 - protein, 876 aa, Homo sapiens
KRDSPSRSGWGRESEGCGERRWDRCGQRGGERRPRQRAAERRRHRVQSIVDQGAMDRRSMGETESGDAFLDLKKPPASKCPHRYTKEELLDIKELPHSKQRPSCLSEKYDSDGVWDPEKWHASLYPASGRSSPVESLKKELDTDRPSLVRRIVGIVECNGGVAEEDEVEVILAQEPAADQEVPRDAVLPEQSPGDFDFNEFFNLDKVPCLASMIEDVLGEGSVSASRFSRWFSNPSRSGSRSSSLGSTPHEELERLAGLEQAILSPGQNSGNYFAPIPLEDHAENKVDILEMLQKAKVDLKPLLSSLSANKEKLKESSHSGVVLSVEEVEAGLKGLKVDQQVKNSTPFMAEHLEETLSAVTNNRQLKKDGDMTAFNKLVSTMKASGTLPSQPKVSRNLESHLMSPAEIPGQPVPKNILQELLGQPVQRPASSNLLSGLMGSLEPTTSLLGQRAPSPPLSQVFQTRAASADYLRPRIPSPIGFTPGPQQLLGDPFQGMRKPMSPITAQMSQLELQQAALEGLALPHDLAVQAANFYQPGFGKPQVDRTRDGFRNRQQRVTKSPAPVHRGNSSSPAPAASITSMLSPSFTPTSVIRKMYESKEKSKEEPASGKAALGDSKEDTQKASEENLLSSSSVPSADRDSSPTTNSKLSALQRSSCSTPLSQANRYTKEQDYRPKATGRKTPTLASPVPTTPFLRPVHQVPLVPHVPMVRPAHQLHPGLVQRMLAQGVHPQHLPSLLQTGVLPPGMDLSHLQGISGPILGQPFYPLPAASHPLLNPRPGTPLHLAMVQQQLQRSVLHPPGSGSHAAAVSVQTTPQNVPSRSGLPHMHSQLEHRPSQRSSSPVGLAKWFGSDVLQQPLPSMPAKVISVDELEYRQ

SEQ ID NO: 895486 - protein, 528 aa, Homo sapiens
MAEHLEETLSAVTNNRQLKKDGDMTAFNKLVSTMKASGTLPSQPKVSRNLESHLMSPAEIPGQPVPKNILQELLGQPVQRPASSNLLSGLMGSLEPTTSLLGQRAPSPPLSQVFQTRAASADYLRPRIPSPIGFTPGPQQLLGDPFQGMRKPMSPITAQMSQLELQQAALEGLALPHDLAVQAANFYQPGFGKPQVDRTRDGFRNRQQRVTKSPAPVHRGNSSSPAPAASITSMLSPSFTPTSVIRKMYESKEKSKEEPASGKAALGDSKEDTQKASEENLLSSSSVPSADRDSSPTTNSKLSALQRSSCSTPLSQANRYTKEQDYRPKATGRKTPTLASPVPTTPFLRPVHQVPLVPHVPMVRPAHQLHPGLVQRMLAQGVHPQHLPSLLQTGVLPPGMDLSHLQGISGPILGQPFYPLPAASHPLLNPRPGTPLHLAMVQQQLQRSVLHPPGSGSHAAAVSVQTTPQNVPSRSGLPHMHSQLEHRPSQRSSSPVGLAKWFGSDVLQQPLPSMPAKVISVDELEYRQ

SEQ ID NO: 895487 - protein, 1063 aa, Homo sapiens
KRDSPSRSGWGRESEGCGERRWDRCGQRGGERRPRQRAAERRRHRVQSIVDQGAMDRRSMGETESGDAFLDLKKPPASKCPHRYTKEELLDIKELPHSKQRPSCLSEKYDSDGVWDPEKWHASLYPASGRSSPVESLKKELDTDRPSLVRRIVDPRERVKEDDLDVVLSPQRRSFGGGCHVTAAVSSRRSGSPLEKDSDGLRLLGGRRIGSGRIISARTFEKDHRLSDKDLRDLRDRDRERDFKDKRFRREFGDSKRVFGERRRNDSYTEEEPEWFSAGPTSQSETIELTGFDDKILEEDHKGRKRTRRRTASVKEGIVECNGGVAEEDEVEVILAQEPAADQEVPRDAVLPEQSPGDFDFNEFFNLDKVPCLASMIEDVLGEGSVSASRFSRWFSNPSRSGSRSSSLGSTPHEELERLAGLEQAILSPGQNSGNYFAPIPLEDHAENKVDILEMLQKAKVDLKPLLSSLSANKEKLKESSHSGVVLSVEEVEAGLKGLKVDQQVKNSTPFMAEHLEETLSAVTNNRQLKKDGDMTAFNKLVSTMKASGTLPSQPKVSRNLESHLMSPAEIPGQPVPKNILQELLGQPVQRPASSNLLSGLMGSLEPTTSLLGQRAPSPPLSQVFQTRAASADYLRPRIPSPIGFTPGPQQLLGDPFQGMRKPMSPITAQMSQLELQQAALEGLALPHDLAVQAANFYQPGFGKPQVDRTRDGFRNRFNVLIKLPVMQVCYISSFLARADRQQRVTKSPAPVHRGNSSSPAPAASITSMLSPSFTPTSVIRKMYESKEKSKEEPASGKAALGDSKEDTQKASEENLLSSSSVPSADRDSSPTTNSKLSALQRSSCSTPLSQANRYTKEQDYRPKATGRKTPTLASPVPTTPFLRPVHQVPLVPHVPMVRPAHQLHPGLVQRMLAQGVHPQHLPSLLQTGVLPPGMDLSHLQGISGPILGQPFYPLPAASHPLLNPRPGTPLHLAMVQQQLQRSVLHPPGSGSHAAAVSVQTTPQNVPSRSGLPHMHSQLEHRPSQRSSSPVGLAKWFGSDVLQQPLPSMPAKVISVDELEYRQ

SEQ ID NO: 895488 - protein, 474 aa, Homo sapiens [sequence omitted]

SEQ ID NO: 895489 - protein, 380 aa, Homo sapiens [sequence omitted]

SEQ ID NO: 895490 - protein, 1039 aa, Homo sapiens; identical to SEQ ID NO: 895481

SEQ ID NO: 895491 - protein, 1039 aa, Homo sapiens; identical to SEQ ID NO: 895481

SEQ ID NO: 895492 - protein, 1039 aa, Homo sapiens; identical to SEQ ID NO: 895481

SEQ ID NO: 895493 - protein, 561 aa, Homo sapiens
KRDSPSRSGWGRESEGCGERRWDRCGQRGGERRPRQRAAERRRHRVQSIVDQGAMDRRSMGETESGDAFLDLKKPPASKCPHRYTKEELLDIKELPHSKQRPSCLSEKYDSDGVWDPEKWHASLYPASGRSSPVESLKKELDTDRPSLVRRIVDPRERVKEDDLDVVLSPQRRSFGGGCHVTAAVSSRRSGSPLEKDSDGLRLLGGRRIGSGRIISARTFEKDHRLSDKDLRDLRDRDRERDFKDKRFRREFGDSKRVFGERRRNDSYTEEEPEWFSAGPTSQSETIELTGFDDKILEEDHKGRKRTRRRTASVKEGIVECNGGVAEEDEVEVILAQEPAADQEVPRDAVLPEQSPGDFDFNEFFNLDKVPCLASMIEDVLGEGSVSASRFSRWFSNPSRSGSRSSSLGSTPHEELERLAGLEQAILSPGQNSGNYFAPIPLEDHAENKVDILEMLQKAKVDLKPLLSSLSANKEKLKESSHSGVVLSVEEVEAGLKGLKVDQQVKNSTPFMAEHLEETLSAVTNNRQLKKDGDMTAFNKLVSTMKASGTLPSQPKVSVSI

SEQ ID NO: 895494 - protein, 985 aa, Homo sapiens
MDRRSMGETESGDAFLDLKKPPASKCPHRYTKEELLDIKELPHSKQRPSCLSEKYDSDGVWDPEKWHASLYPASGRSSPVESLKKELDTDRPSLVRRIVDPRERVKEDDLDVVLSPQRRSFGGGCHVTAAVSSRRSGSPLEKDSDGLRLLGGRRIGSGRIISARTFEKDHRLSDKDLRDLRDRDRERDFKDKRFRREFGDSKRVFGERRRNDSYTEEEPEWFSAGPTSQSETIELTGFDDKILEEDHKGRKRTRRRTASVKEGIVECNGGVAEEDEVEVILAQEPAADQEVPRDAVLPEQSPGDFDFNEFFNLDKVPCLASMIEDVLGEGSVSASRFSRWFSNPSRSGSRSSSLGSTPHEELERLAGLEQAILSPGQNSGNYFAPIPLEDHAENKVDILEMLQKAKVDLKPLLSSLSANKEKLKESSHSGVVLSVEEVEAGLKGLKVDQQVKNSTPFMAEHLEETLSAVTNNRQLKKDGDMTAFNKLVSTMKASGTLPSQPKVSRNLESHLMSPAEIPGQPVPKNILQELLGQPVQRPASSNLLSGLMGSLEPTTSLLGQRAPSPPLSQVFQTRAASADYLRPRIPSPIGFTPGPQQLLGDPFQGMRKPMSPITAQMSQLELQQAALEGLALPHDLAVQAANFYQPGFGKPQVDRTRDGFRNRQQRVTKSPAPVHRGNSSSPAPAASITSMLSPSFTPTSVIRKMYESKEKSKEEPASGKAALGDSKEDTQKASEENLLSSSSVPSADRDSSPTTNSKLSALQRSSCSTPLSQANRYTKEQDYRPKATGRKTPTLASPVPTTPFLRPVHQVPLVPHVPMVRPAHQLHPGLVQRMLAQGVHPQHLPSLLQTGVLPPGMDLSHLQGISGPILGQPFYPLPAASHPLLNPRPGTPLHLAMVQQQLQRSVLHPPGSGSHAAAVSVQTTPQNVPSRSGLPHMHSQLEHRPSQRSSSPVGLAKWFGSDVLQQPLPSMPAKVISVDELEYRQ

SEQ ID NO: 895495 - protein, 664 aa, Homo sapiens
MIEDVLGEGSVSASRFSRWFSNPSRSGSRSSSLGSTPHEELERLAGLEQAILSPGQNSGNYFAPIPLEDHAENKVDILEMLQKAKVDLKPLLSSLSANKEKLKESSHSGVVLSVEEVEAGLKGLKVDQQVKNSTPFMAEHLEETLSAVTNNRQLKKDGDMTAFNKLVSTMKASGTLPSQPKVSRNLESHLMSPAEIPGQPVPKNILQELLGQPVQRPASSNLLSGLMGSLEPTTSLLGQRAPSPPLSQVFQTRAASADYLRPRIPSPIGFTPGPQQLLGDPFQGMRKPMSPITAQMSQLELQQAALEGLALPHDLAVQAANFYQPGFGKPQVDRTRDGFRNRQQRVTKSPAPVHRGNSSSPAPAASITSMLSPSFTPTSVIRKMYESKEKSKEEPASGKAALGDSKEDTQKASEENLLSSSSVPSADRDSSPTTNSKLSALQRSSCSTPLSQANRYTKEQDYRPKATGRKTPTLASPVPTTPFLRPVHQVPLVPHVPMVRPAHQLHPGLVQRMLAQGVHPQHLPSLLQTGVLPPGMDLSHLQGISGPILGQPFYPLPAASHPLLNPRPGTPLHLAMVQQQLQRSVLHPPGSGSHAAAVSVQTTPQNVPSRSGLPHMHSQLEHRPSQRSSSPVGLAKWFGSDVLQQPLPSMPAKVISVDELEYRQ

SEQ ID NO: 895496 - protein, 585 aa, Homo sapiens
MLQKAKVDLKPLLSSLSANKEKLKESSHSGVVLSVEEVEAGLKGLKVDQQVKNSTPFMAEHLEETLSAVTNNRQLKKDGDMTAFNKLVSTMKASGTLPSQPKVSRNLESHLMSPAEIPGQPVPKNILQELLGQPVQRPASSNLLSGLMGSLEPTTSLLGQRAPSPPLSQVFQTRAASADYLRPRIPSPIGFTPGPQQLLGDPFQGMRKPMSPITAQMSQLELQQAALEGLALPHDLAVQAANFYQPGFGKPQVDRTRDGFRNRQQRVTKSPAPVHRGNSSSPAPAASITSMLSPSFTPTSVIRKMYESKEKSKEEPASGKAALGDSKEDTQKASEENLLSSSSVPSADRDSSPTTNSKLSALQRSSCSTPLSQANRYTKEQDYRPKATGRKTPTLASPVPTTPFLRPVHQVPLVPHVPMVRPAHQLHPGLVQRMLAQGVHPQHLPSLLQTGVLPPGMDLSHLQGISGPILGQPFYPLPAASHPLLNPRPGTPLHLAMVQQQLQRSVLHPPGSGSHAAAVSVQTTPQNVPSRSGLPHMHSQLEHRPSQRSSSPVGLAKWFGSDVLQQPLPSMPAKVISVDELEYRQ

SEQ ID NO: 895497 - protein, 523 aa, Homo sapiens
VNSANRIVDVLVTALKVSSRCSAMKGVEFFTCWSTFKPFRPGRNLESHLMSPAEIPGQPVPKNILQELLGQPVQRPASSNLLSGLMGSLEPTTSLLGQRAPSPPLSQVFQTRAASADYLRPRIPSPIGFTPGPQQLLGDPFQGMRKPMSPITAQMSQLELQQAALEGLALPHDLAVQAANFYQPGFGKPQVDRTRDGFRNRQQRVTKSPAPVHRGNSSSPAPAASITSMLSPSFTPTSVIRKMYESKEKSKEEPASGKAALGDSKEDTQKASEENLLSSSSVPSADRDSSPTTNSKLSALQRSSCSTPLSQANRYTKEQDYRPKATGRKTPTLASPVPTTPFLRPVHQVPLVPHVPMVRPAHQLHPGLVQRMLAQGVHPQHLPSLLQTGVLPPGMDLSHLQGISGPILGQPFYPLPAASHPLLNPRPGTPLHLAMVQQQLQRSVLHPPGSGSHAAAVSVQTTPQNVPSRSGLPHMHSQLEHRPSQRSSSPVGLAKWFGSDVLQQPLPSMPAKVISVDELEYRQ

SEQ ID NO: 895498 - protein, 491 aa, Homo sapiens
VNSANRIVDVLVTALKVSSRCSAMKGVEFFTCWSTFKPFRPGRPASSNLLSGLMGSLEPTTSLLGQRAPSPPLSQVFQTRAASADYLRPRIPSPIGFTPGPQQLLGDPFQGMRKPMSPITAQMSQLELQQAALEGLALPHDLAVQAANFYQPGFGKPQVDRTRDGFRNRQQRVTKSPAPVHRGNSSSPAPAASITSMLSPSFTPTSVIRKMYESKEKSKEEPASGKAALGDSKEDTQKASEENLLSSSSVPSADRDSSPTTNSKLSALQRSSCSTPLSQANRYTKEQDYRPKATGRKTPTLASPVPTTPFLRPVHQVPLVPHVPMVRPAHQLHPGLVQRMLAQGVHPQHLPSLLQTGVLPPGMDLSHLQGISGPILGQPFYPLPAASHPLLNPRPGTPLHLAMVQQQLQRSVLHPPGSGSHAAAVSVQTTPQNVPSRSGLPHMHSQLEHRPSQRSSSPVGLAKWFGSDVLQQPLPSMPAKVISVDELEYRQ

SEQ ID NO: 895499 - protein, 1021 aa, Homo sapiens
KRDSPSRSGWGRESEGCGERRWDRCGQRGGERRPRQRAAERRRHRVQSIVDQGAMDRRSMGETESGDAFLDLKKPPASKCPHRYTKEELLDIKELPHSKQRPSCLSEKYDSDGVWDPEKWHASLYPASGRSSPVESLKKELDTDRPSLVRRIVDPRERVKEDDLDVVLSPQRRSFGGGCHVTAAVSSRRSGSPLEKDSDGLRLLGGRRIGSGRIISARTFEKDHRLSDKDLRDLRDRDRERDFKDKRFRREFGDSKRVFGERRRNDSYTEEEPEWFSAGPTSQSETIELTGFDDKILEEDHKGRKRTRRRTASVKEGIVECNGGVAEEDEVEVILAQEPAADQEVPRDAVLPEQSPGDFDFNEFFNLDKVPCLASMIEDVLGEGSVSASRFSRWFSNPSRSGSRSSSLGSTPHEELERLAGLEQAILSPGQNSGNYFAPIPLEDHAENKVDILEMLQKAKVDLKPLLSSLSANKEKLKESSHSGVVLSVEEVEAGLKGLKVDQQVKNSTPFMAEHLEETLSAVTNNRQLKKDGDMTAFNKLVSTMKASGTLPSQPKVSRNLESHLMSPAEIPGQPVPKNILQELLGQPVQRPASSNLLSGLMGSLEPTTSLLGQRAPSPPLSQVFQTRAASADYLRPRIPSPIGFTPGPQQLLGDPFQGMRKPMSPITAQMSQLELQQAALEGLALPHDLAVQAANFYQPGFGKPQVDRTRDGFRNRQQRVTKSPAPVHRGNSSSPAPAASITSMLSPSFTPTSVIRKMYESKEKSKEEPASGKAALGDSKEDTQKASEENLLSSSSVPSADRDSSPTTNSKLSALQRSSCSTPLSQANRYTKEQDYRPKATGRHQVPLVPHVPMVRPAHQLHPGLVQRMLAQGVHPQHLPSLLQTGVLPPGMDLSHLQGISGPILGQPFYPLPAASHPLLNPRPGTPLHLAMVQQQLQRSVLHPPGSGSHAAAVSVQTTPQNVPSRSGLPHMHSQLEHRPSQRSSSPVGLAKWFGSDVLQQPLPSMPAKVISVDELEYRQ

SEQ ID NO: 895500 - protein, 1039 aa, Homo sapiens; identical to SEQ ID NO: 895481

SEQ ID NO: 895501 - protein, 717 aa, Homo sapiens
KRDSPSRSGWGRESEGCGERRWDRCGQRGGERRPRQRAAERRRHRVQSIVDQGAMDRRSMGETESGDAFLDLKKPPASKCPHRYTKEELLDIKELPHSKQRPSCLSEKYDSDGVWDPEKWHASLYPASGRSSPVESLKKELDTDRPSLVRRIVDPRERVKEDDLDVVLSPQRRSFGGGCHVTAAVSSRRSGSPLEKDSDGLRLLGGRRIGSGRIISARTFEKDHRLSDKDLRDLRDRDRERDFKDKRFRREFGDSKRVFGERRRNDSYTEEEPEWFSAGPTSQSETIELTGFDDKILEEDHKGRKRTRRRTASVKEGIVECNGGVAEEDEVEVILAQEPAADQEVPRDAVLPEQSPGDFDFNEFFNLDKVPCLASMIEDVLGEGSVSASRFSRWFSNPSRSGSRSSSLGSTPHEELERLAGLEQAILSPGQNSGNYFAPIPLEDHAENKVDILEMLQKAKVDLKPLLSSLSANKEKLKESSHSGVVLSVEEVEAGLKGLKVDQQVKNSTPFMAEHLEETLSAVTNNRQLKKDGDMTAFNKLVSTMKASGTLPSQPKVSRNLESHLMSPAEIPGQPVPKNILQELLGQPVQRPASSNLLSGLMGSLEPTTSLLGQRAPSPPLSQVFQTRAASADYLRPRIPSPIGFTPGPQQLLGDPFQGMRKPMSPITAQMSQLELQQAALEGLALPHDLAVQAANFYQPGFGKPQVDRTRDGFRNR

SEQ ID NO: 895502 - protein, 170 aa, Homo sapiens
AEARARSGPDPGGLGGRTMDSGTEEYELNGGLPPGTPGSPDASPARWGWRHGPINVNHYASKKSAAESMLDIALLMANASQLKAVVEQGPSFAFYVPLVVLISISLVLQIGVGVLLIFLVKYDLNNPDKHAKLDFLNNLATGLVFIIVVVNIFITAFGVQKPLMDMAPQQ

SEQ ID NO: 895503 - protein, 180 aa, Homo sapiens
AEARARSGPDPGGLGGRTMDSGTEEYELNGGLPPGTPGSPDASPARWGWRHGPINVNHYASKKSAAESMLDIALLMANASQLKAVVEQGPSFAFYVPLVVLISISLVLQIGVGVLLIFLGRSPGGGSQATCSPCWHLLASPGTGAHHLAHLALKELPSSWPSSPRHAVQEVAPPLPPPCT

SEQ ID NO: 895504 - protein, 170 aa, Homo sapiens; identical to SEQ ID NO: 895502

SEQ ID NO: 895505 - protein, 111 aa, Homo sapiens
MFQQNRCIFLWATKLILNATESPVMSQDSLTAGVGPLPLSQAGALLSGLPLAPSTPLSPTVKYDLNNPDKHAKLDFLNNLATGLVFIIVVVNIFITAFGVQKPLMDMAPQQ

SEQ ID NO: 895506 - protein, 124 aa, Homo sapiens
  misc_feature (4)..(4): Xaa can be any naturally occurring amino acid
RVLXLSVGRAVTAISTQLPDPRSRHTCEVSTSLHMALPRLPEPRLASSAPCPRTSPCSDCGQAPRRRPLLSLSSCSQEAAPSWHMGAGHNSPEGQNWTAAETCAQRRVSTHSRTHSRSVDGLDE

SEQ ID NO: 895507 - protein, 121 aa, Homo sapiens
AEARARSGPDPGGLGGRTMDSGTEEYELNGGLPPGTPGSPDASPARWGWRHGPINVNHYASKKSAAESMLDIALLMANASQLKAVVEQGPSFAFYVPLVVLISISLVLQIGVGVLLIFLAW

SEQ ID NO: 895508 - protein, 104 aa, Homo sapiens
MTLGTRLRVRHSLHMALPRLPEPRLASSAPCPRTSPCSDCGQAPRRRPLLSLSSCSQEAAPSWHMGAGHNSPEGQNWTAAETCAQRRVSTHSRTHSRSVDGLDE

SEQ ID NO: 895509 - protein, 170 aa, Homo sapiens; identical to SEQ ID NO: 895502

SEQ ID NO: 895510 - protein, 70 aa, Homo sapiens
PGVLLSWCAAVLVVLLIFLVKYDLNNPDKHAKLDFLNNLATGLVFIIVVVNIFITAFGVQKPLMDMAPQQ

SEQ ID NO: 895511 - protein, 93 aa, Homo sapiens
VLVLGRSQSKGWSGDMVQMRPAWALAVWVVPCAGRRPLLSLSSCSQEAAPSWHMGAGHNSPEGQNWTAAETCAQRRVSTHSRTHSRSVDGLDE

SEQ ID NO: 895512 - protein, 146 aa, Homo sapiens
VDHSVYILEDSIVDPQNQTMTTFTWNINHARLMVVKERCVYCVNSDNSGWTEIRREAWVSSSLFGVSRAVQEFGLARFKSNVTKTMKGFEYILAKLQGEAPSKTLVETAKEAKEKAKETALAATEKAKDLASKAATKKQQQQQQFV

SEQ ID NO: 895513 - protein, 146 aa, Homo sapiens; identical to SEQ ID NO: 895512

SEQ ID NO: 895514 - protein, 116 aa, Homo sapiens
SFSLAGVESGLVIALPELGLLVCTGGGRRVNTTFLVEPGPEEIGVMGEEIRLVFQASSKGSHLPFATGEAPSKTLVETAKEAKEKAKETALAATEKAKDLASKAATKKQQQQQQFV

SEQ ID NO: 895515 - protein, 146 aa, Homo sapiens; identical to SEQ ID NO: 895512

SEQ ID NO: 895516 - protein, 146 aa, Homo sapiens; identical to SEQ ID NO: 895512

SEQ ID NO: 895517 - protein, 135 aa, Homo sapiens
VDHSVYILEDSIVDPQNQTMTTFTWNINHARLMVVKERCVYCVNSDNSGWTEIRREAWVSSSLFGVSRAVQEFGLARFKSNVTKTMKGFEYILAKLQGEAPSKTLVETAKEAKEKAKDLASKAATKKQQQQQQFV

SEQ ID NO: 895518 - protein, 146 aa, Homo sapiens; identical to SEQ ID NO: 895512

SEQ ID NO: 895519 - protein, 77 aa, Homo sapiens
REESVCFSFAFRQDCRFPEASPAFQNCASGYEVQRLCFGFAFDAILDVLSSAIVLWRYSNAAAVHSAHREYIAFSLH

SEQ ID NO: 895520 - protein, 76 aa, Homo sapiens
VKKVSVSPLPSARIVGFLRPPQPFRTVSVMRYSASAFGFAFDAILDVLSSAIVLWRYSNAAAVHSAHREYIAFSLH

SEQ ID NO: 895521 - protein, 102 aa, Homo sapiens
MLPVSRTCLLESSTRLKPHEAQNYRKKALWVSWFSIIVTLALAVAAFTVSVMRYSASAFGFAFDAILDVLSSAIVLWRYSNAAAVHSAHREYMTISCSVSPF

SEQ ID NO: 895522 - protein, 289 aa, Homo sapiens
MEPAAGIQRRSSQGPTVPPPPRGHAPPAAAPGPAPLSSPVREPPQLEEERQVRISESGQFSDGLEDRGLLESSTRLKPHEAQNYRKKALWVSWFSIIVTLALAVAAFTVSVMRYSASAFGFAFDAILDVLSSAIVLWRYSNAAAVHSAHREYIACVILGVIFLLSSICIVVKAIHDLSTRLLPEVDDFLFSVSILSGILCSILAVLKFMLGKVLTSRALITDGFNSLVGGVMGFSILLSAEVFKHDSAVWYLDGSIGVLIGLTIFAYGVKLLIDMVPRVRQTRHYEMFE

SEQ ID NO: 895523 - protein, 326 aa, Homo sapiens
MEPAAGIQRRSSQGPTVPPPPRGHAPPAAAPGPAPLSSPVREPPQLEEERQVRISESGQFSDGLEDRGLLESSTRLKPHEAQNYRKKALWVSWFSIIVTLALAVAAFTVSVMRYSASAFGFAFDAILDVLSSAIVLWRYSNAAAVHSAHREYIACVILGVIFLLSSICIVVKAIHDLSTRLLPEVDDFLFSVSILSGILCSILAVLKFMLGKVLTSRALITDGFNSLVGGVMGFSILLSAEVFKHDSAVWYLDGSIGVLIGLTIFAYGVKSFHIGKGCQYLTEHLVSFWKFSFTWFVITRQGLPSQVDLPCPHHLPPPSNMLGQCP

SEQ ID NO: 895524 - protein, 73 aa, Homo sapiens
VKKVSVSPLPSARIVGFLRPPQPFRTVSVMRYSASAFGFAFDAILDVLSSAIVLWRYSNAAAVHSAHREYIGT

SEQ ID NO: 895525 - protein, 212 aa, Homo sapiens
MEDTPLVISKQKTEVVCGVPTQVVCTAFSSHILVVVTQFGKMGTLVSLEPSSVASDVSKPVLTTKVLLGQDEPLIHVFAKNLVALCLKKLETEQSSSPAVKDKSMEGLKALSGGDPGCLPGVGGPREAARPRGCFRPGPPLNTPEHPTSGKFKVFTLPSPRVEGTGTFGHLGPWEATDKQTPVSPGRTSYSWLLDAIWALTGGLDPVRGVWN

SEQ ID NO: 895526 - protein, 76 aa, Homo sapiens; identical to SEQ ID NO: 895520

SEQ ID NO: 895527 - protein, 108 aa, Homo sapiens
MEPAAGIQRRSSQGPTVPPPPRGHAPPAAAPGPAPLSSPVREPPQLEEERQVRISESGQFSDGLEDRGLLESSTRLKPHEAQNYRKKALWVSWFSIIVTLALAVAAFI

SEQ ID NO: 895528 - protein, 1217 aa, Homo sapiens
MARVLGELSARLLSIHSDQDRIVVTFKTFEEIWKFSTYHALGFTHHCLANLLMDQAFWLLLPSEEEETAIQVHVDENALRLTHESLLIQEGPFFVLCPDHHVRVMTGPRDAGNGPQALRQASGAPQGEAAPETDSSPPSPSVSSEEVAVAAAPEPLIPFHQWALRIPQDPIDDAMGGPVMPGNPLMAVGLASALADFQGSGPEEMTFRGGDLIEILGAQVPSLPWCVGRHAASGRVGFVRSSLISMQGPVSELESAIFLNEEEKSFFSEGCFSEEDARQLLRRMSGTDVCSVYSLDSVEEAETEQPQEKEIPPPCLSPEPQETLQKVKNVLEQCKTCPGCPQEPASWGLCAASSDVSLQDPEEPSFCLEAEDDWEDPEALSSLLLFLNAPGYKASFRGLYDVALPWLSSVFRSFSDEEELTGRLAQARGAAKKAGLLMALARLCFLLGRLCSRRLKLSQARVYFEEALGALEGSFGDLFLVVAVYANLASIYRKQKNREKCAQVVPKAMALLLGTPDHICSTEAEGELLQLALRRAVGGQSLQAEARACFLLARHHVHLKQPEEALPFLERLLLLHRDSGAPEAAWLSDCYLLLADIYSRKCLPHLVLSCVKVASLRTRGSLAGSLRSVNLVLQNAPQPHSLPAQTSHYLRQALASLTPGTGQALCGPLYTSLAQLYSHHGCHGPAITFMTQAVEASAIAGVRAIVDHLVALAWLHVLHGQSPVALDILQSVRDAVVASEDQEGVIANMVAVALKRTGRTRQAAESYYRALRVARDLGQQRNQAVGLANFGALCLHAGASRLAQHYLLEAVRLFSRLPLGECGRDFTHVLLQLGHLCTRQGPAQQGKGYYEWALLVAVEMGHVESQLRAVQRLCHFYSAVMPSEAQCVIYHELQLSLACKVADKVLEGQLLETISQLYLSLGTERAYKSALDYTKRSLGIFIDLQKKEKEAHAWLQAGKIYYILRQSELVDLYIQVAQNVALYTGDPNLGLELFEAAGDIFFDGAWEREKAVSFYRDRALPLAVTTGNRKAELRLCNKLVALLATLEEPQEGLEFAHMALALSITLGDRLNERVAYHRLAALQHRLGHGELAEHFYLKALSLCNSPLEFDEETLYYVKVYLVLGDIIFYDLKDPFDAAGYYQLALAAAVDLGNKKAQLKIYTRLATIYHNFLLDREKSLFFYQKARTFATELNVRRVNLPPLPLCGWAPWLAPSHPR

SEQ ID NO: 895529 - protein, 327 aa, Homo sapiens
GDSPVGPASAGPGAATWFLRATALWAWELPLRNTPQEDMAAHVGASRTPQEVMEHYVSMYIHGNLGKACIPDTIPNRVTDHTCPSGGPLSPSLTTPLPPLDISVAEQQQLGYMPLRDDYEIEYDQDAETLISGLSVNYDDDDVEIELKRAHVDMYVRKLKERQRRKNIARDYNLVPAFLGKDKKEKEKALKRKITKEEKELRLKLRPLYQFMSCKEFDDLFENMHKEKMLRAKIRELQRYRRNGITKMEESAEYEAARHKREKVLCSSLNLSPARYVTVKTIIIKDHLQKRQGIPSKSRLPSYLDKVLKKRILNFLTESGWISRDAS

SEQ ID NO: 895530 - protein, 420 aa, Homo sapiens
MAELGKKYCVYCLAEVSPLRFRCTECQDIELCPECFSAGAEIGHHRRYHGYQLVDGGRFTLWGPEAEGGWTSREEQLLLDAIEQFGFGNWEDMAAHVGASRTPQEVMEHYVSMYIHGNLGKACIPDTIPNRVTDHTCPSGGPLSPSLTTPLPPLDISVAEQQQLGYMPLRDDYEIEYDQDAETLISGLSVNYDDDDVEIELKRAHVDMYVRKLKERQRRKNIARDYNLVPAFLGKDKKEKEKALKRKITKEEKELRLKLRPLYQFMSCKEFDDLFENMHKEKMLRAKIRELQRYRRNGITKMEESAEYEAARHKREKRKENKNLAGSKRGKEDGKDSEFAAIENLPGFELLSDREKVLCSSLNLSPARYVTVKTIIIKDHLQKRQGIPSKSRLPSYLDKVLKKRILNFLTESGWISRDAS

SEQ ID NO: 895531 - protein, 1323 aa, Homo sapiens
MARVLGELSARLLSIHSDQDRIVVTFKTFEEIWKFSTYHALGFTHHCLANLLMDQAFWLLLPSEEEETAIQVHVDENALRLTHESLLIQEGPFFVLCPDHHVRVMTGPRDAGNGPQALRQASGAPQGEAAPETDSSPPSPSVSSEEVAVAAAPEPLIPFHQWALRIPQDPIDDAMGGPVMPGNPLMAVGLASALADFQGSGPEEMTFRGGDLIEILGAQVPSLPWCVGRHAASGRVGFVRSSLISMQGPVSELESAIFLNEEEKSFFSEGCFSEEDARQLLRRMSGTDVCSVYSLDSVEEAETEQPQEKEIPPPCLSPEPQETLQKVKNVLEQCKTCPGCPQEPASWGLCAASSDVSLQDPEEPSFCLEAEDDWEDPEALSSLLLFLNAPGYKASFRGLYDVALPWLSSVFRSFSDEEELTGRLAQARGAAKKAGLLMALARLCFLLGRLCSRRLKLSQARVYFEEALGALEGSFGDLFLVVAVYANLASIYRKQKNREKCAQVVPKAMALLLGTPDTSAAPRRRGPHSLPAQTSHYLRQALASLTPGTGQALCGPLYTSLAQLYSHHGCHGPAITFMTQAVEASAIAGVRAIVDHLVALAWLHVLHGQSPVALDILQSVRDAVVASEDQEGVIANMVAVALKRTGRTRQAAESYYRALRVARDLGQQRNQAVGLANFGALCLHAGASRLAQHYLLEAVRLFSRLPLGECGRDFTHVLLQLGHLCTRQGPAQQGKGYYEWALLVAVEMGHVESQLRAVQRLCHFYSAVMPSEAQCVIYHELQLSLACKVADKVLEGQLLETISQLYLSLGTERAQDIAALTPLRLTKRAGKEPDSTGTREIGSSLGLRFTAGKWASVLEPCSQSVVPGPAEQHPCHLGACGKWEFWARPRPVEPEALGAGQQAIWTGLWMTVMPAHLENHRPGEHLNTDGSWLRLEKTQAMSGTRGRWTSTLPQPQGSMMPSSLRRMSFIFSLPCVFNPTLSAAREGQTLHTQEGRSQSHSRFICHQTHGRRQTGSRRMTALVLTPVSDTRAYKSALDYTKRSLGIFIDLQKKEKEAHAWLQAGKIYYILRQSELVDLYIQVAQNVALYTGDPNLGLELFEAAGDIFFDGAWEREKAVSFYRDRALPLAVTTGNRKAELRLCNKLVALLATLEEPQEGLEFAHMALALSITLGDRLNERVAYHRLAALQHRLGHGELAEHFYLKALSLCNSPLEFDEETLYYVKVYLVLGDIIFYDLKDPFDAAGYYQLALAAAVDLGNKKAQLKIYTRLATIYHNFLLDREKSLFFYQKARTFATELNVRRVNLPPLPLCGWAPWLAPSHPR

SEQ ID NO: 895532 - protein, 1383 aa, Homo sapiens
MDQAFWLLLPSEEEETAIQVHVDENALRLTHESLLIQEGPFFVLCPDHHVRVMTGPRDAGNGPQALRQASGAPQGEAAPETDSSPPSPSVSSEEVAVAAAPEPLIPFHQWALRIPQDPIDDAMGGPVMPGNPLMAVGLASALADFQGSGPEEMTFRGGDLIEILGAQVPSLPWCVGRHAASGRVGFVRSSLISMQGPVSELESAIFLNEEEKSFFSEGCFSEEDARQLLRRMSGTDVCSVYSLDSVEEAETEQPQEKEIPPPCLSPEPQETLQKVKNVLEQCKTCPGCPQEPASWGLCAASSDVSLQDPEEPSFCLEAEDDWEDPEALSSLLLFLNAPGYKASFRGLYDVALPWLSSVFRSFSDEEELTGRLAQARGAAKKAGLLMALARLCFLLGRLCSRRLKLSQARVYFEEALGALEGSFGDLFLVVAVYANLASIYRKQKNREKCAQVVPKAMALLLGTPDHICSTEAEGELLQLALRRAVGGQSLQAEARACFLLARHHVHLKQPEEALPFLERLLLLHRDSGAPEAAWLSDCYLLLADIYSRKCLPHLVLSCVKVASLRTRGSLAGSLRSVNLVLQNAPQPHSLPAQTSHYLRQALASLTPGTGQALCGPLYTSLAQLYSHHGCHGPAITFMTQAVEASAIAGVRAIVDHLVALAWLHVLHGQSPVALDILQSVRDAVVASEDQEGVIANMVAVALKRTGRTRQAAESYYRALRVARDLGQQRNQAVGLANFGALCLHAGASRLAQHYLLEAVRLFSRLPLGECGRDFTHVLLQLGHLCTRQGPAQQGKGYYEWALLVAVEMGHVESQLRAVQRLCHFYSAVMPSEAQCVIYHELQLSLACKVADKVLEGQLLETISQLYLSLGTERAQCIAALTPLRLTKRAGKEPDSTGTREIGSSLGLRFTAGKWASVLEPCSQSVVPGPAEQHPCHLGACGKWEFWARPRPVEPEALGAGQQAIWTGLWMTVMPAHLENHRPGEHLNTDGSWLRLEKTQAMSGTRGRWTSTLPQPQGSMMPSSLRRMSFIFSLPCVFNPTLSAAREGQTLHTQEGRSQSHSRFICHQTHGRRQTGSRRMTALVLTPVSDTRAYKSALDYTKRSLGIFIDLQKKEKEAHAWLQAGKIYYILRQSELVDLYIQVAQNVALYTGDPNLGLELFEAAGDIFFDGAWEREKAVSFYRDRALPLAVTTGNRKAELRLCNKLVALLATLEEPQEGLEFAHMALALSITLGDRLNERVAYHRLAALQHRLGHGELAEHFYLKALSLCNSPLEFDEETLYYVKVYLVLGDIIFYDLKDPFDAAGYYQLALAAAVDLGNKKAQLKIYTRLATIYHNFLLDREKSLFFYQKARTFATELNVRRVNLPPLPLCGWAPWLAPSHPR

SEQ ID NO: 895533 - protein, 1459 aa, Homo sapiens
MENLPAVTTEEPTPMGRGPVGPSGGGSTRDQVRTVVMRPSVSWEKAGPEEAKAPVRGDLTLQLLAVRRKSRLRDPGLQQTLRGQLRLLENDSREMARVLGELSARLLSIHSDQDRIVVTFKTFEEIWKFSTYHALGFTHHCLANLLMDQAFWLLLPSEEEETAIQVHVDENALRLTHESLLIQEGGLLGSPRTPSTDAMGGPVMPGNPLMAVGLASALADFQGSGPEEMTFRGGDLIEILGAQVPSLPWCVGRHAASGRVGFVRSSLISMQGPVSELESAIFLNEEEKSFFSEGCFSEEDARQLLRRMSGTDVCSVYSLDSVEEAETEQPQEKEIPPPCLSPEPQETLQKVKNVLEQCKTCPGCPQEPASWGLCAASSDVSLQDPEEPSFCLEAEDDWEDPEALSSLLLFLNAPGYKASFRGLYDVALPWLSSVFRSFSDEEELTGRLAQARGAAKKAGLLMALARLCFLLGRLCSRRLKLSQARVYFEEALGALEGSFGDLFLVVAVYANLASIYRKQKNREKCAQVVPKAMALLLGTPDHICSTEAEGELLQLALRRAVGGQSLQAEARACFLLARHHVHLKQPEEALPFLERLLLLHRDSGAPEAAWLSDCYLLLADIYSRKCLPHLVLSCVKVASLRTRGSLAGSLRSVNLVLQNAPQPHSLPAQTSHYLRQALASLTPGTGQALCGPLYTSLAQLYSHHGCHGPAITFMTQAVEASAIAGVRAIVDHLVALAWLHVLHGQSPVALDILQSVRDAVVASEDQEGVIANMVAVALKRTGRTRQAAESYYRALRVARDLGQQRNQAVGLANFGALCLHAGASRLAQHYLLEAVRLFSRLPLGECGRDFTHVLLQLGHLCTRQGPAQQGKGYYEWALLVAVEMGHVESQLRAVQRLCHFYSAVMPSEAQCVIYHELQLSLACKVADKVLEGQLLETISQLYLSLGTERAQDIAALTPLRLTKRAGKEPDSTGTREIGSSLGLRFTAGKWASVLEPCSQSVVPGPAEQHPCHLGACGKWEFWARPRPVEPEALGAGQQAIWTGLWMTVMPAHLENHRPGEHLNTDGSWLRLEKTQAMSGTRGRWTSTLPQPQGSMMPSSLRRMSFIFSLPCVFNPTLSAAREGQTLHTQEGRSQSHSRFICHQTHGRRQTGSRRMTALVLTPVSDTRAYKSALDYTKRSLGIFIDLQKKEKEAHAWLQAGKIYYILRQSELVDLYIQVAQNVALYTGDPNLGLELFEAAGDIFFDGAWEREKAVSFYRDRALPLAVTTGNRKAELRLCNKLVALLATLEEPQEGLEFAHMALALSITLGDRLNERVAYHRLAALQHRLGHGELAEHFYLKALSLCNSPLEFDEETLYYVKVYLVLGDIIFYDLKDPFDAAGYYQLALAAAVDLGNKKAQLKIYTRLATIYHNFLLDREKSLFFYQKARTFATELNVRRVNLPPLPLCGWAPWLAPSHPR

SEQ ID NO: 895534 - protein, 1031 aa, Homo sapiens
QAVRPRCKDETEQPQEKEIPPPCLSPEPQETLQKVKNVLEQCKTCPGCPQEPASWGLCAASSDVSLQDPEEPSFCLEAEDDWEDPEALSSLLLFLNAPGYKASFRGLYDVALPWLSSVFRSFSDEEELTGRLAQARGAAKKAGLLMALARLCFLLGRLCSRRLKLSQARVYFEEALGALEGSFGDLFLVVAVYANLASIYRKQKNREKCAQVVPKAMALLLGTPDHICSTEAEGAPQPPCPTSHYLRQALASLTPGTGQALCGPLYTSLAQLYSHHGCHGPAITFMTQAVEASAIAGVRAIVDHLVALAWLHVLHGQSPVALDILQSVRDAVVASEDQEGVIANMVAVALKRTGRTRQAAESYYRALRVARDLGQQRNQAVGLANFGALCLHAGASRLAQHYLLEAVRLFSRLPLGECGRDFTHVLLQLGHLCTRQGPAQQGKGYYEWALLVAVEMGHVESQLRAVQRLCHFYSAVMPSEAQCVIYHELQLSLACKVADKVLEGQLLETISQLYLSLGTERAQDIAALTPLRLTKRAGKEPDSTGTREIGSSLGLRFTAGKWASVLEPCSQSVVPGPAEQHPCHLGACGKWEFWARPRPVEPEALGAGQQAIWTGLWMTVMPAHLENHRPGEHLNTDGSWLRLEKTQAMSGTRGRWTSTLPQPQGSMMPSSLRRMSFIFSLPCVFNPTLSAAREGQTLHTQEGRSQSHSRFICHQTHGRRQTGSRRMTALVLTPVSDTRAYKSALDYTKRSLGIFIDLQKKEKEAHAWLQAGKIYYILRQSELVDLYIQVAQNVALYTGDPNLGLELFEAAGDIFFDGAWEREKAVSFYRDRALPLAVTTGNRKAELRLCNKLVALLATLEEPQEGLEFAHMALALSITLGDRLNERVAYHRLAALQHRLGHGELAEHFYLKALSLCNSPLEFDEETLYYVKVYLVLGDIIFYDLKDPFDAAGYYQLALAAAVDLGNKKAQLKIYTRLATIYHNFLLDREKSLFFYQKARTFATELNVRRVNLPPLPLCGWAPWLAPSHPR

SEQ ID NO: 895535 - protein, 215 aa, Homo sapiens
VGAAGSLTHLPVWQDRALPLAVTTGNRKAELRLCNKLVALLATLEEPQEGLEFAHMALALSITLGDRLNERVAYHRLAALQHRLGHGELAEHFYLKALSLCNSPLEFDEETLYYVKVYLVLGDIIFYDLKDPFDAAGYYQLALAAAVDLGNKKAQLKIYTRLATIYHNFLLDREKSLFFYQKARTFATELNVRRVNLPPLPLCGWAPWLAPSHPR

SEQ ID NO: 895536 - protein, 997 aa, Homo sapiens
MARVLGELSARLLSIHSDQDRIVVTFKTFEEIWKFSTYHALGFTHHCLANLLMDQAFWLLLPSEEEETAIQVHVDENALRLTHESLLIQEGPFFVLCPDHHVRVMTGPRDAGNGPQALRQASGAPQGEAAPETDSSPPSPSVSSEEVAVAAAPEPLIPFHQWALRIPQDPIDDAMGGPVMPGNPLMAVGLASALADFQGSGPEEMTFRGGDLIEILGAQVPSLPWCVGRHAASGRVGFVRSSLISMQGPVSELESAIFLNEEEKSFFSEGCFSEEDARQLLRRMSGTDVCSVYSLDSVEEAETEQPQEKEIPPPCLSPEPQETLQKVKNVLEQCKTCPGCPQEPASWGLCAASSDVSLQDPEEPSFCLEAEDDWEDPEALSSLLLFLNAPGYKASFRGLYDVALPWLSSVFRSFSDEEELTGRLAQARGAAKKAGLLMALARLCFLLGRLCSRRLKLSQARVYFEEALGALEGSFGDLFLVVAVYANLASIYRKQKNREKCAQVVPKAMALLLGTPDHICSTEAEGELLQLALRRAVGGQSLQAEARACFLLARHHVHLKQPEEALPFLERLLLLHRDSGAPEAAWLSDCYLLLADIYSRKCLPHLVLSCVKVASLRTRGSLAGSLRSVNLVLQNAPQPHSLPAQTSHYLRQALASLTPGTGQALCGPLYTSLAQLYSHHGCHGPAITFMTQAVEASAIAGVRAIVDHLVALAWLHVLHGQSPVALDILQSVRDAVVASEDQEGVIANMVAVALKRTGRTRQAAESYYRALRVARDLGQQRNQAVGLANFGALCLHAGASRLAQHYLLEAVRLFSRLPLGECGRDFTHVLLQLGHLCTRQGPAQQGKGYYEWALLVAVEMGHVESQLRAVQRLCHFYSAVMPSEAQCVIYHELQLSLACKVADKVLEGQLLETISQLYLSLGTERAQDIAALTPLRLTKRAGKEPDSTGTREIGSSLGLRFTAGKWASVLEPCSQSVVPGPAEQHPCHLGACGKWEF

SEQ ID NO: 895537 - protein, 262 aa, Homo sapiens
LWVAWSPGAQERVGCMPFGLSWLKTVSKGRWLYVGTELGHPSPTLPKPHGRWGQALLVLFVDGKVSLGAGKGLARTAQVTAVPGGEPGAAGVCMPAPGSHVLTPAPLACTPGDRLNERVAYHRLAALQHRLGHGELAEHFYLKALSLCNSPLEFDEETLYYVKVYLVLGDIIFYDLKDPFDAAGYYQLALAAAVDLGNKKAQLKIYTRLATIYHNFLLDREKSLFFYQKARTFATELNVRRVNLPPLPLCGWAPWLAPSHPR

SEQ ID NO: 895538 - protein, 381 aa, Homo sapiens
MAELGKKYCVYCLAEVSPLRFRCTECQDIELCPECFSAGAEIGHHRRYHGYQLVDGGRFTLWGPEAEGGWTSREEQLLLDAIEQFGFGNWEDMAAHVGASRTPQEVMEHYVSMYIHGNLGKACIPDTIPNRVTDHTCPSGGPLSPSLTTPLPPLDISVAEQQQLGYMPLRDDYEIEYDQDAETLISGLSVNYDDDDVEIELKRAHVDMYVRKLKERQRRKNIARDYNLVPAFLGKDKKEKEKALKRKITKEEKELRLKLRPLYQFMSCKEFDDLFENMHKEKMLRAKIRELQRYRRNGITKMEESAEYEAARHKREKVLCSSLNLSPARYVTVKTIIIKDHLQKRQGIPSKSRLPSYLDKVLKKRILNFLTESGWISRDAS

SEQ ID NO: 895539 - protein, 1435 aa, Homo sapiens
MARVLGELSARLLSIHSDQDRIVVTFKTFEEIWKFSTYHALGFTHHCLANLLMDQAFWLLLPSEEEETAIQVHVDENALRLTHESLLIQEGPFFVLCPDHHVRVMTGPRDAGNGPQALRQASGAPQGEAAPETDSSPPSPSVSSEEVAVAAAPEPLIPFHQWALRIPQDPIDDAMGGPVMPGNPLMAVGLASALADFQGSGPEEMTFRGGDLIEILGAQVPSLPWCVGRHAASGRVGFVRSSLISMQGPVSELESAIFLNEEEKSFFSEGCFSEEDARQLLRRMSGTDVCSVYSLDSVEEAETEQPQEKEIPPPCLSPEPQETLQKVKNVLEQCKTCPGCPQEPASWGLCAASSDVSLQDPEEPSFCLEAEDDWEDPEALSSLLLFLNAPGYKASFRGLYDVALPWLSSVFRSFSDEEELTGRLAQARGAAKKAGLLMALARLCFLLGRLCSRRLKLSQARVYFEEALGALEGSFGDLFLVVAVYANLASIYRKQKNREKCAQVVPKAMALLLGTPDHICSTEAEGELLQLALRRAVGGQSLQAEARACFLLARHHVHLKQPEEALPFLERLLLLHRDSGAPEAAWLSDCYLLLADIYSRKCLPHLVLSCVKVASLRTRGSLAGSLRSVNLVLQNAPQPHSLPAQTSHYLRQALASLTPGTGQALCGPLYTSLAQLYSHHGCHGPAITFMTQAVEASAIAGVRAIVDHLVALAWLHVLHGQSPVALDILQSVRDAVVASEDQEGVIANMVAVALKRTGRTRQAAESYYRALRVARDLGQQRNQAVGLANFGALCLHAGASRLAQHYLLEAVRLFSRLPLGECGRDFTHVLLQLGHLCTRQGPAQQGKGYYEWALLVAVEMGHVESQLRAVQRLCHFYSAVMPSEAQCVIYHELQLSLACKVADKVLEGQLLETISQLYLSLGTERAQDIAALTPLRLTKRAGKEPDSTGTREIGSSLGLRFTAGKWASVLEPCSQSVVPGPAEQHPCHLGACGKWEFWARPRPVEPEALGAGQQAIWTGLWMTVMPAHLENHRPGEHLNTDGSWLRLEKTQAMSGTRGRWTSTLPQPQGSMMPSSLRRMSFIFSLPCVFNPTLSAARKGRTLHTQEGRSQSHSRFICHQTHGRRQTGSRRMTALVLTPVSDTRAYKSALDYTKRSLGIFIDLQKKEKEAHAWLQAGKIYYILRQSELVDLYIQVAQNVALYTGDPNLGLELFEAAGDIFFDGAWEREKAVSFYRDRALPLAVTTGNRKAELRLCNKLVALLATLEEPQEGLEFAHMALALSITLGDRLNERVAYHRLAALQHRLGHGELAEHFYLKALSLCNSPLEFDEETLYYVKVYLVLGDIIFYDLKDPFDAAGYYQLALAAAVDLGNKKAQLKIYTRLATIYHNFLLDREKSLFFYQKARTFATELNVRRVNLPPLPLCGWAPWLAPSHPR

SEQ ID NO: 895540 - protein, 1336 aa, Homo sapiens
MARVLGELSARLLSIHSDQDRIVVTFKTFEEIWKFSTYHALGFTHHCLANLLMDQAFWLLLPSEEEETAIQVHVDENALRLTHESLLIQEGPFFVLCPDHHVRVMTGPRDAGNGPQALRQASGAPQGEAAPETDSSPPSPSVSSEEVAVAAAPEPLIPFHQWALRIPQDPIDDAMGGPVMPGNPLMAVGLASALADFQGSGPEEMTFRGGDLIEILGAQVPSLPWCVGRHAASGRVGFVRSSLISMQGPVSELESAIFLNEEEKSFFSEGCFSEEDARQLLRRMSGTDVCSVYSLDSVEEAETEQPQEKEIPPPCLSPEPQETLQKVKNVLEQCKTCPGCPQEPASWGLCAASSDVSLQDPEEPSFCLEAEDDWEDPEALSSLLLFLNAPGYKASFRGLYDVALPWLSSVFRSFSDEEELTGRLAQARGAAKKAGLLMALARLCFLLGRLCSRRLKLSQARVYFEEALGALEGSFGDLFLVVAVYANLASIYRKQKNREKCAQVVPKAMALLLGTPDHICSTEAEGELLQLALRRAVGGQSLQAEARACFLLARHHVHLKQPEEALPFLERLLLLHRDSGAPEAAWLSDCYLLLADIYSRKCLPHLVLSCVKVASLRTRGSLAGSLRSVNLVLQNAPQPHSLPAQTSHYLRQALASLTPGTGQALCGPLYTSLAQLYSHHGCHGPAITFMTQAVEASAIAGVRAIVDHLVALAWLHVLHGQSPVALDILQSVRDAVVASEDQEGVIANMVAVALKRTGRTRQAAESYYRALRVARDLGQQRNQAVGLANFGALCLHAGASRLAQHYLLEAVRLFSRLPLGECGRDFTHVLLQLGHLCTRQGPAQQGKGYYEWALLVAVEMGHVESQLRAVQRLCHFYSAVMPSEAQCVIYHELQLSLACKVADKVLEGQLLETISQLYLSLGTERAQDIAALTPLRLTKRAGKEPDSTGTREIGSSLGLRFTAGKWASVLEPCSQSVVPGPAEQHPCHLGACGKWEFWARPRPVEPEALGAGQQAIWTGLWMTVMPAHLENHRPGEHLNTDGSWAYKSALDYTKRSLGIFIDLQKKEKEAHAWLQAGKIYYILRQSELVDLYIQVAQNVALYTGDPNLGLELFEAAGDIFFDGAWEREKAVSFYRDRALPLAVTTGNRKAELRLCNKLVALLATLEEPQEGLEFAHMALALSITLGDRLNERVAYHRLAALQHRLGHGELAEHFYLKALSLCNSPLEFDEETLYYVKVYLVLGDIIFYDLKDPFDAAGYYQLALAAAVDLGNKKAQLKIYTRLATIYHNFLLDREKSLFFYQKARTFATELNVRRVNLPPLPLCGWAPWLAPSHPR

SEQ ID NO: 895541 - protein, 997 aa, Homo sapiens; identical to SEQ ID NO: 895536

SEQ ID NO: 895542 - protein, 122 aa, Homo sapiens
MTFHFTGGSSFSVQFPNPKADPAPHLNTARACWFTLGRAVPLGQAPIVTTSPRMGKHVSGRDVGHVWTARPSQSIFRGCSVLLLRRECISLGRTHCTKFKAKSSEFWRQLPQDFLQLQVPFH

SEQ ID NO: 895543 - protein, 305 aa, Homo sapiens
MTALVLTPVSDTRAYKSALDYTKRSLGIFIDLQKKEKEAHAWLQAGKIYYILRQSELVDLYIQVAQNVALYTGDPNLGLELFEAAGDIFFDGAWEREKAVSFYRDRALPLAVTTGNRKAELRLCNKLVALLATLEEPQEGLEFAHMALALSITLGDRLNERVAYHRLAALQHRLGHGELAEHFYLKALSLCNSPLEFDEETLYYVKVYLVLGDIIFYDLKDPFDAAGYYQLALAAAVDLGNKKAQLKIYTRLATIYHNFLLDREKSLFFYQKARTFATELNVRRVNLPPLPLCGWAPWLAPSHPR

SEQ ID NO: 895544 - protein, 997 aa, Homo sapiens; identical to SEQ ID NO: 895536

SEQ ID NO: 895545 - protein, 104 aa, Homo sapiens
MCRVIFSLLALGFRGASVQQHWVLLRGHAQLVVEGVVPDLLHVVPVGDDAISLGSSFKDVHGTFLLKLEEVFCLPAAQGSLVQDPALKRVFGVLRLQRSVLQGG

SEQ ID NO: 895546 - protein, 88 aa, Homo sapiens
NRKAELRLCNKLVALLATLEEPQEGLEFAHMALALSITLGKPPEPLPCQDPHFARAQPPGLQGRSRNSCRIFLVSCPGRHICPAGSPV

SEQ ID NO: 895547 - protein, 116 aa, Homo sapiens
MGPKDHMVTSSFCCQSDGCNSAFLSVPLTNLTENGLMCPACTASFRDKCMGPMTHCTGKENHCVSLSGHVQAGIFKPRFAMRGCATESMCFTKPGAEVPTGTNVLFLHHIECTHSP

SEQ ID NO: 895548 - protein, 191 aa, Homo sapiens
RSPVIAATREVEVAVSQDRAIALQPGQLRLKKIRKERKKRKRPSQEVVGLGRPRVRQDLEAGVEAREWSASTVPACPHPTEGKELVHTYKGCIRSQDCYSGVISTTMGPKDHMVTSSFCCQSDGCNSAFLSVPLTNLTENGLMCPACTASFRDKCMGPMTHCTGKENHCVSLSGHVQAGEWCLNLWKRKQN

SEQ ID NO: 895549 - protein, 118 aa, Homo sapiens
VAIGGLKYSKELVHTYKGCIRSQDCYSGVISTTMGPKDHMVTSSFCCQSDGCNSAFLSVPLTNLTENGLMCPACTASFRDKCMGPMTHCTGKENHCVSLSGHVQAGEWCLNLWKRKQN

SEQ ID NO: 895550 - protein, 222 aa, Homo sapiens
RSPVIAATREVEVAVSQDRAIALQPGQLRLKKIRKERKKRKRPSQEVVGLGRPRVRQDLEAGVEAREWSASTVPACPHPTEGKELVHTYKGCIRSQDCYSGVISTTMGPKDHMVTSSFCCQSDGCNSAFLSVPLTNLTENGLMCPACTASFRDKCMGPMTHCTGKENHCVSLSGHVQAGIFKPRFAMRGCATESMCFTKPGAEVPTGTNVLFLHHIECTHSP

SEQ ID NO: 895551 - protein, 222 aa, Homo sapiens; identical to SEQ ID NO: 895550

SEQ ID NO: 895552 - protein, 189 aa, Homo sapiens
RSPVIAATREVEVAVSQDRAIALQPGQLRLKKIRKERKKRKRPSQEVVGLGRPRVRQDLEAGVEAREWSASTVPACPHPTEGKELVHTYKGCIRSQDCYSGVISTTMGPKDHMVTSSFCCQSDGCNSAFLSVPLTNLTENGLMCPACTASFRDKCMGPMTHCTGKENHCVSLSGHVQAESYSVSQAGVQ

SEQ ID NO: 895553 - protein, 440 aa, Homo sapiens [sequence omitted]

SEQ ID NO: 895554 - protein, 440 aa, Homo sapiens [sequence omitted]

SEQ ID NO: 895555 - protein, 141 aa, Homo sapiens
VQFRRALTAAASSTSSEDVIVNDSLPASFTKNYKPVVQTTGNARIVQELPQLLDARSAPLIADQAVLQLLPKTYILTCEHDVLRDDGIMYAKRLESAGVEVTLDHFEDGFHGCMIFTSWPTNFSVGIRTRNSYIKWLDQNL

SEQ ID NO: 895556 - protein, 115 aa, Homo sapiens
MSSCRGQKVAGGLRVVSPFPLCQPAGEPSRGKMRSSCVLLTALVALAAYYVYIPLPGSVSDPWKLMLLDATFRGAQQVVRCSPALLLSSSSYAIFEGDTKFLRRVPRKRRFFLMH

SEQ ID NO: 895557 - protein, 78 aa, Homo sapiens
AHYGVVTFRSQEKKKAGLLTPTTYVLDEDEPRFLEEVDYSAESNDELDIELAENVGDYEPSAQEEVLSDSELSRTYLP

SEQ ID NO: 895558 - protein, 1186 aa, Homo sapiens
MSKLKVIPEKSLTNNSRIVGLLAQLEKINAEPSESDTARYVTSKILHLAQSQEKTRREMTAKGSTGMEILLSTLENTKDLQTTLNILSILVELVSAGGGRRVSFLVTKGGSQILLQLLMNASKESPPHEDLMVQIHSILAKIGPKDKKFGVKARINGALNITLNLVKQNLQNHRLVLPCLQLLRVYSANSVNSVSLGKNGVVELMFKIIGPFSKKNSSLIKVALDTLAALLKSKTNARRAVDRGYVQVLLTIYVDWHRHDNRHRNMLIRKGILQSLKSVTNIKLGRKAFIDANGMKILYNTSQLPVIPVTGPVAQLYSLPPEVDDVVDESDDNDDIDVEAENETENEDDLDQNFKNDDIETDINKLKPQQEPGRTIEDLKMYEHLFPELVDDFQDYDLISKEPKPFVFEGKVRGPIVVPTAGEETSGNSGNLRKVVMKENISSKGDEGEKKSTFMDLAKEDIKDNDRTLQQQPGDQNRTISSVHGLNNDIVKALDRITLQNIPSQTAPGFTAEMKKDCSLPLTVLTCAKACPHMATCGNVLFEGRTVQLGKLCCTGVETEDDEDTESNSSVEQASVEVPDGPTLHDPDLYIEIVKNTKSVPEYSEVAYPDYFGHIPPPFKEPILERPYGVQRTKIAQDIERLIHQSDIIDRVVYDLDNPNYTIPEEGDILKFNSKFESGNLRKVIQIRKNEYDLILNSDINSNHYHQWFYFEVSGMRPGVAYRFNIINCEKSNSQFNYGMQPLMYSVQEALNARPWWIRMGTDICYYKNHFSRSSVAAGGQKGKSYYTITFTVNFPHKDDVCYFAYHYPYTYSTLQMHLQKLESAHNPQQIYFRKDVLCETLSGNSCPLVTITAMPESNYYEHICHFRNRPYVFLSARVHPGETNASWVMKGTLEYLMSNNPTAQSLRESYIFKIVPMLNPDGVINGNHRCSLSGEDLNRQWQSPSPDLHPTIYHAKGLLQYLAAVKRLPLVYCDYHGHSRKKNVFMYGCSIKETVWHTNDNATSCDVVEDTGYRTLPKILSHIAPAFCMSSCSFVVEKSKESTARVVVWREIGVQRSYTMESTLCGCDQGKYKGLQIGTRELEEMGAKFCVGLLRLKRLTSPLEYNLPSSLLDFENDLIESSCKVTSPTTYVLDEDEPRFLEEVDYSAESNDELDIELAENVGDYEPSAQEEVLSDSELSRTYLP

SEQ ID NO: 895559 - protein, 1213 aa, Homo sapiens
MSKLKVIPEKSLTNNSRIVGLLAQLEKINAEPSESDTARYVTSKILHLAQSQEKTRREMTAKGSTGMEILLSTLENTKDLQTTLNILSILVELVSAGGGRRVSFLVTKGGSQILLQLLMNASKESPPHEDLMVQIHSILAKIGPKDKKFGVKARINGALNITLNLVKQNLQNHRLVLPCLQLLRVYSANSVNSVSLGKNGVVELMFKIIGPFSKKNSSLIKNKCQESCRQRICPSAFNNLCRLAPHDNRHRNMLIRKGILQSLKSVTNIKLGRKAFIDANGMKILYNTSQECLAVRTLDPLVNTSSLIMRKCFPKNRLPLPTIKSSFHFQLPVIPVTGPVAQLYSLPPEVDDVVDESDDNDDIDVEAENETENEDDLDQNFKNDDIETDINKLKPQQEPGRTIEDLKMYEHLFPELVDDFQDYDLISKEPKPFVFEGKVRGPIVVPTAGEETSGNSGNLRKVVMKENISSKGDEGEKKSTFMDLAKEDIKDNDRTLQQQPGDQNRTISSVHGLNNDIVKALDRITLQNIPSQTAPGFTAEMKKDCSLPLTVLTCAKACPHMATCGNVLFEGRTVQLGKLCCTGVETEDDEDTESNSSVEQASVEVPDGPTLHDPDLYIEIVKNTKSVPEYSEVAYPDYFGHIPPPFKEPILERPYGVQRTKIAQDIERLIHQSDIIDRVVYDLDNPNYTIPEEGDILKFNSKFESGNLRKVIQIRKNEYDLILNSDINSNHYHQWFYFEVSGMRPGVAYRFNIINCEKSNSQFNYGMQPLMYSVQEALNARPWWIRMGTDICYYKNHFSRSSVAAGGQKGKSYYTITFTVNFPHKDDVCYFAYHYPYTYSTLQMHLQKLESAHNPQQIYFRKDVLCETLSGNSCPLVTITAMPESNYYEHICHFRNRPYVFLSARVHPGETNASWVMKGTLEYLMSNNPTAQSLRESYIFKIVPMLNPDGVINGNHRCSLSGEDLNRQWQSPSPDLHPTIYHAKGLLQYLAAVKRLPLVYCDYHGHSRKKNVFMYGCSIKETVWHTNDNATSCDVVEDTGYRTLPKILSHIAPAFCMSSCSFVVEKSKESTARVVVWREIGVQRSYTMESTLCGCDQGKYKGLQIGTRELEEMGAKFCVGLLRLKRLTSPLEYNLPSSLLDFENDLIESSCKVTSPTTYVLDEDEPRFLEEVDYSAESNDELDIELAENVGDYEPSAQEEVLSDSELSRTYLP

SEQ ID NO: 895560 - protein, 1185 aa, Homo sapiens
MFEKKIVCYFSEKTRREMTAKGSTGMEILLSTLENTKDLQTTLNILSILVELVSAGGGRRVSFLVTKGGSQILLQLLMNASKESPPHEDLMVQIHSILAKIGPKDKKFGVKARINGALNITLNLVKQNLQNHRLVLPCLQLLRVYSANSVNSVSLGKNGVVELMFKIIGPFSKKNSSLIKVALDTLAALLKSKTNARRAVDRGYVQVLLTIYVDWHRHDNRHRNMLIRKGILQSLKSVTNIKLGRKAFIDANGMKILYNTSQECLAVRTLDPLVNTSSLIMRKCFPKNRLPLPTIKSSFHFQLPVIPVTGPVAQLYSLPPEVDDVVDESDDNDDIDVEAENETENEDDLDQNFKNDDIETDINKLKPQQEPGRTIEDLKMYEHLFPELVDDFQDYDLISKEPKPFVFEGKVRGPIVVPTAGEETSGNSGNLRKVVMKENISSKGDEGEKKSTFMDLAKEDIKDNDRTLQQQPGDQNRTISSVHGLNNDIVKALDRITLQNIPSQTAPGFTAEMKKDCSLPLTVLTCAKACPHMATCGNVLFEGRTVQLGKLCCTGVETEDDEDTESNSSVEQASVEVPDGPTLHDPDLYIEIVKNTKSVPEYSEVAYPDYFGHIPPPFKEPILERPYGVQRTKIAQDIERLIHQSDIIDRVVYDLDNPNYTIPEEGDILKFNSKFESGNLRKVIQIRKNEYDLILNSDINSNHYHQWFYFEVSGMRPGVAYRFNIINCEKSNSQFNYGMQPLMYSVQEALNARPWWIRMGTDICYYKNHFSRSSVAAGGQKGKSYYTITFTVNFPHKDDVCYFAYHYPYTYSTLQMHLQKLESAHNPQQIYFRKDVLCETLSGNSCPLVTITAMPESNYYEHICHFRNRPYVFLSARVHPGETNASWVMKGTLEYLMSNNPTAQSLRESYIFKIVPMLNPDGVINGNHRCSLSGEDLNRQWQSPSPDLHPTIYHAKGLLQYLAAVKRLPLVYCDYHGHSRKKNVFMYGCSIKETVWHTNDNATSCDVVEDTGYRTLPKILSHIAPAFCMSSCSFVVEKSKESTARVVVWREIGVQRSYTMESTLCGCDQGKYKGLQIGTRELEEMGAKFCVGLLRLKRLTSPLEYNLPSSLLDFENDLIESSCKVTSPTTYVLDEDEPRFLEEVDYSAESNDELDIELAENVGDYEPSAQEEVLSDSELSRTYLP

SEQ ID NO: 895561 - protein, 1108 aa, Homo sapiens
MNASKESPPHEDLMVQIHSILAKIGPKDKKFGVKARINGALNITLNLVKQNLQNHRLVLPCLQLLRVYSANSVNSVSLGKNGVVELMFKIIGPFSKKNSSLIKVALDTLAALLKSKTNARRAVDRGYVQVLLTIYVDWHRHDNRHRNMLIRKGILQSLKSVTNIKLGRKAFIDANGMKILYNTSQECLAVRTLDPLVNTSSLIMRKCFPKNRLPLPTIKSSFHFQLPVIPVTGPVAQLYSLPPEVDDVVDESDDNDDIDVEAENETENEDDLDQNFKNDDIETDINKLKPQQEPGRTIEDLKMYEHLFPELVDDFQDYDLISKEPKPFVFEGKVRGPIVVPTAGEETSGNSGNLRKVVMKENISSKGDEGEKKSTFMDLAKEDIKDNDRTLQQQPGDQNRTISSVHGLNNDIVKALDRITLQNIPSQTAPGFTAEMKKDCSLPLTVLTCAKACPHMATCGNVLFEGRTVQLGKLCCTGVETEDDEDTESNSSVEQASVEVPDGPTLHDPDLYIEIVKNTKSVPEYSEVAYPDYFGHIPPPFKEPILERPYGVQRTKIAQDIERLIHQSDIIDRVVYDLDNPNYTIPEEGDILKFNSKFESGNLRKVIQIRKNEYDLILNSDINSNHYHQWFYFEVSGMRPGVAYRFNIINCEKSNSQFNYGMQPLMYSVQEALNARPWWIRMGTDICYYKNHFSRSSVAAGGQKGKSYYTITFTVNFPHKDDVCYFAYHYPYTYSTLQMHLQKLESAHNPQQIYFRKDVLCETLSGNSCPLVTITAMPESNYYEHICHFRNRPYVFLSARVHPGETNASWVMKGTLEYLMSNNPTAQSLRESYIFKIVPMLNPDGVINGNHRCSLSGEDLNRQWQSPSPDLHPTIYHAKGLLQYLAAVKRLPLVYCDYHGHSRKKNVFMYGCSIKETVWHTNDNATSCDVVEDTGYRTLPKILSHIAPAFCMSSCSFVVEKSKESTARVVVWREIGVQRSYTMESTLCGCDQGKYKGLQIGTRELEEMGAKFCVGLLRLKRLTSPLEYNLPSSLLDFENDLIESSCKVTSPTTYVLDEDEPRFLEEVDYSAESNDELDIELAENVGDYEPSAQEEVLSDSELSRTYLP

SEQ ID NO: 895562 - protein, 1064 aa, Homo sapiens
MNASKESPPHEDLMVQIHSILAKIGPKDKKFGVKARINGALNITLNLVKQNLQNHRLVLPCLQLLRVYSANSVNSVSLGKNGVVELMFKIIGPFSKKNSSLIKVALDTLAALLKSKTNARRAVDRGYVQVLLTIYVDWHRHDNRHRNMLIRKGILQSLKSVTNIKLGRKAFIDANGMKILYNTSQECLAVRTLDPLVNTSSLIMRKCFPKNRLPLPTIKSSFHFQLPVIPVTGPVAQLYSLPPEVDDVVDESDDNDDIDVEAENETENEDDLDQNFKNDDIETDINKLKPQQEPGRTIEDLKMYEHLFPELVDDFQDYDLISKEPKPFVFEGKVRGPIVVPTAGEETSGNSGNLRKVVMKENISSKGDEGEKKSTFMDLAKEDIKDNDRTLQQQPGDQNRTISSVHGLNNDIVKALDRITLQNIPSQTAPGFTAEMKKDCSLPLTVLTCAKACPHMATCGNVLFEGRTVQLGKLCCTGVETEDDEDTESNSSVEQASVEVPDGPTLHDPDLYIEIVKNTKSVPEYSEVAYPDYFGHIPPPFKEPILERPYGVQRTKIAQDIERLIHQSDIIDRVVYDLDNPNYTIPEEGDILKFNSKFESGNLRKVIQIRKNEYDLILNSDINSNHYHQWFYFEVSGMRPGVAYRFNIINCEKSNSQFNYGMQPLMYSVQEALNARPWWIRMGTDICYYKNHFSRSSVAAGGQKGKSYYTITFTVNFPHKDDVCYFAYHYPYTYSTLQMHLQKLESAHNPQQIYFRKDVLCETLSGNSCPLVTITAMPESNYYEHICHFRNRPYVFLSARVHPGETNASWVMKGTLEYLMSNNPTAQSLRESYIFKIVPMLNPDGVINGNHRCSLSGEDLNRQWQSPSPDLHPTIYHAKGLLQYLAAVKRLPLVYCDYHGHSRKKNVFMYGCSIKETVWHTNDNATSCDVVEDTGYRTLPKILSHIAPAFCMSSCSFVVEKSKESTARVVVWREIGVQRSYTMESTLCGCDQGKYKGLQIGTRELEEMGAKFCVGLLRLKRLTSPLEYNLPSSLLDFENDLIESSCKVTRNLGSSELQFLPPIL

SEQ ID NO: 895563 - protein, 1108 aa, Homo sapiens; identical to SEQ ID NO: 895561

SEQ ID NO: 895564 - protein, 1144 aa, Homo sapiens
MSKLKVIPEKSLTNNSRIVGLLAQLEKINAEPSESDTARYVTSKILHLAQSQEKTRREMTAKGSTGMEILLSTLENTKDLQTTLNILSILVELVSAGGGRRVSFLVTKGGSQILLQLLMNASKESPPHEDLMVQIHSILAKIGPKDKKFGVKARINGALNITLNLVKQNLQNHRLVLPCLQLLRVYSANSVNSVSLGKNGVVELMFKIIGPFSKKNSSLIKNVWQSGLWILFVNTSSLIMRKCFPKNRLPLPTIKSSFHFQLPVIPVTGPVAQLYSLPPEVDDVVDESDDNDDIDVEAENETENEDDLDQNFKNDDIETDINKLKPQQEPGRTIEDLKMYEHLFPELVDDFQDYDLISKEPKPFVFEGKVRGPIVVPTAGEETSGNSGNLRKVVMKENISSKGDEGEKKSTFMDLAKEDIKDNDRTLQQQPGDQNRTISSVHGLNNDIVKALDRITLQNIPSQTAPGFTAEMKKDCSLPLTVLTCAKACPHMATCGNVLFEGRTVQLGKLCCTGVETEDDEDTESNSSVEQASVEVPDGPTLHDPDLYIEIVKNTKSVPEYSEVAYPDYFGHIPPPFKEPILERPYGVQRTKIAQDIERLIHQSDIIDRVVYDLDNPNYTIPEEGDILKFNSKFESGNLRKVIQIRKNEYDLILNSDINSNHYHQWFYFEVSGMRPGVAYRFNIINCEKSNSQFNYGMQPLMYSVQEALNARPWWIRMGTDICYYKNHFSRSSVAAGGQKGKSYYTITFTVNFPHKDDVCYFAYHYPYTYSTLQMHLQKLESAHNPQQIYFRKDVLCETLSGNSCPLVTITAMPESNYYEHICHFRNRPYVFLSARVHPGETNASWVMKGTLEYLMSNNPTAQSLRESYIFKIVPMLNPDGVINGNHRCSLSGEDLNRQWQSPSPDLHPTIYHAKGLLQYLAAVKRLPLVYCDYHGHSRKKNVFMYGCSIKETVWHTNDNATSCDVVEDTGYRTLPKILSHIAPAFCMSSCSFVVEKSKESTARVVVWREIGVQRSYTMESTLCGCDQGKYKGLQIGTRELEEMGAKFCVGLLRLKRLTSPLEYNLPSSLLDFENDLIESSCKVTSPTTYVLDEDEPRFLEEVDYSAESNDELDIELAENVGDYEPSAQEEVLSDSELSRTYLP

SEQ ID NO: 895565 - protein, 1108 aa, Homo sapiens; identical to SEQ ID NO: 895561

SEQ ID NO: 895566 - protein, 78 aa, Homo sapiens
  misc_feature (10)..(10): Xaa can be any naturally occurring amino acid
VTRSAYWEAXGSAGAHFDQHPTTYVLDEDEPRFLEEVDYSAESNDELDIELAENVGDYEPSAQEEVLSDSELSRTYLP

SEQ ID NO: 895567 - protein, 273 aa, Homo sapiens
GVAFRGREESRSRRRPAGRALAPRSRGWAGAGRGLGAGPGPGTAGEGQLPEPGSQAAQGRGQLAPVLRSPGPRCEAAAPPARERTMGAPLAVALGALHYLALFLQLGGATRPAGHAPWDNHVSGHALFTETPHDMTARTGEDVEMACSFRGSGSPSYSLEIQWWYVRSHRDWTDKQAWASNQLKASQQEDAGKEATKISVVKVVGSNISHKLRLSRVKPTDEGTYECRVIDFSDGKARHHKVKAYLRVQPGGELRPASARSPSRRARPAAPQA

SEQ ID NO: 895568 - protein, 256 aa, Homo sapiens
GVAFRGREESRSRRRPAGRALAPRSRGWAGAGRGLGAGPGPGTAGEGQLPEPGSQAAQGRGQLAPVLRSPGPRCEAAAPPARERTMGAPLAVALGALHYLALFLQLGGATRPAGHAPWDNHVSGHALFTETPHDMTARTGEDVEMACSFRGSGSPSYSLEIQWWYVRSHRDWTDKQAWASNQVVKVVGSNISHKLRLSRVKPTDEGTYECRVIDFSDGKARHHKVKAYLRVQPGGELRPASARSPSRRARPAAPQA

SEQ ID NO: 895569 - protein, 295 aa, Homo sapiens
GVAFRGREESRSRRRPAGRALAPRSRGWAGAGRGLGAGPGPGTAGEGQLPEPGSQAAQGRGQLAPVHCCDLLCVPEIVMAGCACRPVSPAVCWALMCGGPCVRLIAACGCPSHFTLCSVFLANFWRAAHAGPAWPTAALWTTLSPGHALFTETPHDMTARTGEDVEMACSFRGSGSPSYSLEIQWWYVRSHRDWTDKQAWASNQLKASQQEDAGKEATKISVVKVVGSNISHKLRLSRVKPTDEGTYECRVIDFSDGKARHHKVKAYLRVQPGGELRPASARSPSRRARPAAPQA

SEQ ID NO: 895570 - protein, 239 aa, Homo sapiens
AGQRAGAVRRSQAECCGAILASLSVGPGGKKMVLDLDLFRVDKGGDPALIRETQEKRFKDPGLVDQLVKADSEWRRCRFRADNLNKLKNLCSKTIGEKMKKKEPVGDDESVPENVLSFDDLTADALANLKVSQIKKVRLLIDEAILKCDAERIKLEAERFENLREIGNLLHPSVPISNDEDVDNKVERIWGDCTVRKKYSHVDLVVMVDGFEGEKGAVVAGSRGYFLKGKSWEPVRIGL

SEQ ID NO: 895571 - protein, 240 aa, Homo sapiens
VISVTGRRFVLHNWSVGDNRKKMVLDLDLFRVDKGGDPALIRETQEKRFKDPGLVDQLVKADSEWRRCRFRADNLNKLKNLCSKTIGEKMKKKEPVGDDESVPENVLSFDDLTADALANLKVSQIKKVRLLIDEAILKCDAERIKLEAERFENLREIGNLLHPSVPISNDEDVDNKVERIWGDCTVRKKYSHVDLVVMVDGFEGEKGAVVAGSRGYFLKLAGRPAVLARSPHILRLGVRA

SEQ ID NO: 895572 - protein, 620 aa, Homo sapiens
WRIRHEGEKRFKDPGLVDQLVKADSEWRRCRFRADNLNKLKNLCSKTIGEKMKKKEPVGDDESVPENVLSFDDLTADASSMMESDIFDECCGAILASLSVGPGGKKMVLDLDLFRVDKGGDPALIRETQEKRFKDPGLVDQLVKADSEWRRCRFRADNLNKLKNLCSKTIGEKMKKKEPVGDDESVPENVLSFDDLTADALANLKVSQIKKVRLLIDEAILKCDAERIKLEAERFENLREIGNLLHPSVPISNDEDVDNKVERIWGDCTVRKKYSHVDLVVMVDGFEGEKGAVVAGSRGYFLKGVLVFLEQALIQYALRTLGSRGYIPIYTPFFMRKEVMQEVAQLSQFDEELYKVIGKGSEKSDDNSYDEKYLIATSEQPIAALHRDEWLRPEDLPIKYAGLSTCFRQEVGSHGRDTRGIFRVHQFEKIEQFVYSSPHDNKSWEMFEEMITTAEEFYQSLGIPYHIVNIVSGSLNHAASKKLDLEAWFPGSGAFRELVSCSNCTDYQARRLRIRYGQTKKMMDKVEFVHMLNATMCATTRTICAILENYQTEKGITVPEKLKEFMPPGLQELIPFVKPAPIEQEPSKKQKKQHEGSKKKAAARDVTLENRLQNMEVTDA

SEQ ID NO: 895573 - protein, 620 aa, Homo sapiens; identical to SEQ ID NO: 895572

SEQ ID NO: 895574 - protein, 628 aa, Homo sapiens
WRIRHEGEKRFKDPGLVDQLVKADSEWRRCRFRADNLNKLKNLCSKTIGEKMKKKEPVGDDESVPENVLSFDDLTADASSMMESDIFDECCGAILASLSVGPGGKKMVLDLDLFRVDKGGDPALIRETQEKRFKDPGLVDQLVKADSEWRRCRFRADNLNKLKNLCSKTIGEKMKKKEPVGDDESVPENVLSFDDLTADALANLKVSQIKKVRLLIDEAILKCDAERIKLEAERFENLREIGNLLHPSVPISNDEDVDNKVERIWGDCTVRKKYSHVDLVVMVDGFEGEKGAVVAGSRGYFLKGVLVFLEQALIQYALRTLGSRGYIPIYTPFFMRKEVMQEVAQLSQFDEELYKVIGKGSEKSDDNSYDEKYLIATSEQPIAALHRDEWLRPEDLPIKYAGLSTCFRQEVGSHGRDTRGIFRVHQFEKIEQFVYSSPHDNKSWEMFEEMITTAEEFYQSLGELFAFLNPTIGGNYFGLKRSLNHAASKKLDLEAWFPGSGAFRELVSCSNCTDYQARRLRIRYGQTKKMMDKVEFVHMLNATMCATTRTICAILENYQTEKGITVPEKLKEFMPPGLQELIPFVKPAPIEQEPSKKQKKQHEGSKKKAAARDVTLENRLQNMEVTDA

SEQ ID NO: 895575 - protein, 585 aa, Homo sapiens
WRIRHEGEKRFKDPGLVDQLVKADSEWRRCRFRADNLNKLKNLCSKTIGEKMKKKEPVGDDESVPENVLSFDDLTADASSMMESDIFDECCGAILASLSVGPGGKKMVLDLDLFRVDKGGDPALIRETQEKRFKDPGLVDQLVKADSEWRRCRFRADNLNKLKNLCSKTIGEKMKKKEPVGDDESVPENVLSFDDLTADALANLKVSQIKKVRLLIDEAILKCDAERIKLEAERFENLREIGNLLHPSVPISNDEDVDNKVERIWGDCTVRKKYSHVDLVVMVDGFEGEKGAVVAGSRGYFLKGVLVFLEQALIQYALRTLGSRGYIPIYTPFFMRKEVMQEVAQLSQFDEELYKVIGKGSEKSDDNSYDEKYLIATSEQPIAALHRDEWLRPEDLPIKYAGLSTCFRQEVGSHGRDTRGIFRVHQFEKIEQFVYSSPHDNKSWEMFEEMITTAEEFYQSLGIPYHIVNIVSGSLNHAASKKLDLEAWFPGSGAFRELVSCSNCTDYQARRLRIRYGQTKKMMDKGRWPPGRWEAESSVHGPSELFLSLWGALVPSIMGKSELLNLDQKGNLKMPSTESGLSSFS

SEQ ID NO: 895576 - protein, 514 aa, Homo sapiens
MVLDLDLFRVDKGGDPALIRETQEKRFKDPGLVDQLVKADSEWRRCRFRADNLNKLKNLCSKTIGEKMKKKEPVGDDESVPENVLSFDDLTADALANLKVSQIKKVRLLIDEAILKCDAERIKLEAERFENLREIGNLLHPSVPISNDEDVDNKVERIWGDCTVRKKYSHVDLVVMVDGFEGEKGAVVAGSRGYFLKGVLVFLEQALIQYALRTLGSRGYIPIYTPFFMRKEVMQEVAQLSQFDEELYKVIGKGSEKSDDNSYDEKYLIATSEQPIAALHRDEWLRPEDLPIKYAGLSTCFRQEVGSHGRDTRGIFRVHQFEKIEQFVYSSPHDNKSWEMFEEMITTAEEFYQSLGIPYHIVNIVSGSLNHAASKKLDLEAWFPGSGAFRELVSCSNCTDYQARRLRIRYGQTKKMMDKVEFVHMLNATMCATTRTICAILENYQTEKGITVPEKLKEFMPPGLQELIPFVKPAPIEQEPSKKQKKQHEGSKKKAAARDVTLENRLQNMEVTDA

SEQ ID NO: 895577 - protein, 642 aa, Homo sapiens
WRIRHEGEKRFKDPGLVDQLVKADSEWRRCRFRADNLNKLKNLCSKTIGEKMKKKEPVGDDESVPENVLSFDDLTADASSMMESDIFDECCGAILASLSVGPGGKKMVLDLDLFRVDKGGDPALIRETQEKRFKDPGLVDQLVKADSEWRRCRFRADNLNKLKNLCSKTIGEKMKKKEPVGDDESVPENVLSFDDLTADALANLKVSQIKKVRLLIDEAILKCDAERIKLEAERFENLREIGNLLHPSVPISNDEDVDNKVERIWGDCTVRKKYSHVDLVVMVDGFEGEKGAVVAGSRGYFLKGVLVFLEQALIQYALRTLGSRGYIPIYTPFFMRKEVMQEVAQLSQFDEELYKVIGKGSEKSDDNSYDEKYLIATSEQPIAALHRDEWLRPEDLPIKYAGLSTCFRQEVGSHGRDTRGIFRVHQFEKIEQFVYSSPHDNKSWEMFEEMITTAEEFYQSLGIPYHIVNIVSGSLNHAASKKLDLEAWFPGSGAFRELVSCSNCTDYQARRLRIRYGQTKKMMDKRKNNLHLSTQNKLEASLFSPKKVEFVHMLNATMCATTRTICAILENYQTEKGITVPEKLKEFMPPGLQELIPFVKPAPIEQEPSKKQKKQHEGSKKKAAARDVTLENRLQNMEVTDA

SEQ ID NO: 895578 - protein, 620 aa, Homo sapiens; identical to SEQ ID NO: 895572

SEQ ID NO: 895579 - protein, 620 aa, Homo sapiens; identical to SEQ ID NO: 895572

SEQ ID NO: 895580 - protein, 603 aa, Homo sapiens
WRIRHEGEKRFKDPGLVDQLVKADSEWRRCRFRADNLNKLKNLCSKTIGEKMKKKEPVGDDESVPENVLSFDDLTADASSMMESDIFDECCGAILASLSVGPGGKKMVLDLDLFRVDKGGDPALIRETQEKRFKDPGLVDQLVKADSEWRRCRFRADNLNKLKNLCSKTIGEKMKKKEPVGDDESVPENVLSFDDLTADALANLKVSQIKKVRLLIDEAILKCDAERIKLEAERFENLREIGNLLHPSVPISNDEDVDNKVERIWGDCTVRKKYSHVDLVVMVDGFEGEKGAVVAGSRGYFLKGVLVFLEQALIQYALRTLGSRGYIPIYTPFFMRKEVMQEVAQLSQFDEELYKVISLESEQPIAALHRDEWLRPEDLPIKYAGLSTCFRQEVGSHGRDTRGIFRVHQFEKIEQFVYSSPHDNKSWEMFEEMITTAEEFYQSLGIPYHIVNIVSGSLNHAASKKLDLEAWFPGSGAFRELVSCSNCTDYQARRLRIRYGQTKKMMDKVEFVHMLNATMCATTRTICAILENYQTEKGITVPEKLKEFMPPGLQELIPFVKPAPIEQEPSKKQKKQHEGSKKKAAARDVTLENRLQNMEVTDA

SEQ ID NO: 895581 - protein, 616 aa, Homo sapiens
WRIRHEGEKRFKDPGLVDQLVKADSEWRRCRFRADNLNKLKNLCSKTIGEKMKKKEPVGDDESVPENVLSFDDLTADASSMMESDIFDECCGAILASLSVGPGGKKMVLDLDLFRVDKGGDPALIRETQEKRFKDPGLVDQLVKADSEWRRCRFRADNLNKLKNLCSKTIGEKMKKKEPVGDDESVPENVLSFDDLTADALANLKVSQIKKVRLLIDEAILKCDAERIKLEAERFENLREIGNLLHPSVPISNDEDVDNKVERIWGDCTVRKKYSHVDLVVMVDGFEGEKGAVVAGSRGYFLKGVLVFLEQALIQYALRTLGSRGYIPIYTPFFMRKEVMQEVAQLSQFDEELYKVIGKGSEKSDDNSYDEKYLIATSEQPIAALHRDEWLRPEDLPIKYAGLSTCFRQEVGSHGRDTRGIFRVHQFEKIEQFVYSSPHDNKSWEMFEEMITTAEEFYQSLGIPYHIVNIVSGSLNHAASKKLDLEAWFPGSGAFRELVSCSNCTDYQARRLRIRYGQTKKMMDKVEFVHMLNATMCATTRTICAILENYQTEKGITVPEKLKEFMPPGLPRTWIPLCEGLGAHWGRGTIQGGGGGTHWGPAKGSAATGTRHPENT

SEQ ID NO: 895582 - protein, 586 aa, Homo sapiens
WRIRHEGEKRFKDPGLVDQLVKADSEWRRCRFRADNLNKLKNLCSKTIGEKMKKKEPVGDDESVPENVLSFDDLTADASSMMESDIFDECCGAILASLSVGPGGKKMVLDLDLFRVDKGGDPALIRETQEKRFKDPGLVDQLVKADSEWRRCRFRADNLNKLKNLCSKTIGEKMKKKEPVGDDESVPENVLSFDDLTADALANLKVSQIKKVRLLIDEAILKCDAERIKLEAERFENLREIGNLLHPSVPISNDEDVDNKVERIWGDCTVRKKYSHVDLVVMVDGFEGEKGAVVAGSRGYFLKGVLVFLEQALIQYALRTLGSRGYIPIYTPFFMRKEVMQEVAQLSQFDEELYKVIGKGSEKSDDNSYDEKYLIATSEQPIAALHRDEWLRPEDLPIKYAGLSTCFRQEVGSHGRDTRGIFRVHQFEKIEQFVYSSPHDNKSWEMFEEMITTAEEFYQSLGIPYHIVNIVSGSLNHAASKKLDLEAWFPGSGAFRELVSCSNCTDYQARRLRIRYGQTKKMMDKVEFVHMLNATMCATTRTICAILENYQTEKGITVPEKLKEFMPPGLQELIPGGPVIGRCLKR

SEQ ID NO: 895583 - protein, 627 aa, Homo sapiens
WRIRHEGEKRFKDPGLVDQLVKADSEWRRCRFRADNLNKLKNLCSKTIGEKMKKKEPVGDDESVPENVLSFDDLTADASSMMESDIFDECCGAILASLSVGPGGKKMVLDLDLFRVDKGGDPALIRETQEKRFKDPGLVDQLVKADSEWRRFLDSLFLGRFRADNLNKLKNLCSKTIGEKMKKKEPVGDDESVPENVLSFDDLTADALANLKVSQIKKVRLLIDEAILKCDAERIKLEAERFENLREIGNLLHPSVPISNDEDVDNKVERIWGDCTVRKKYSHVDLVVMVDGFEGEKGAVVAGSRGYFLKGVLVFLEQALIQYALRTLGSRGYIPIYTPFFMRKEVMQEVAQLSQFDEELYKVIGKGSEKSDDNSYDEKYLIATSEQPIAALHRDEWLRPEDLPIKYAGLSTCFRQEVGSHGRDTRGIFRVHQFEKIEQFVYSSPHDNKSWEMFEEMITTAEEFYQSLGIPYHIVNIVSGSLNHAASKKLDLEAWFPGSGAFRELVSCSNCTDYQARRLRIRYGQTKKMMDKVEFVHMLNATMCATTRTICAILENYQTEKGITVPEKLKEFMPPGLQELIPFVKPAPIEQEPSKKQKKQHEGSKKKAAARDVTLENRLQNMEVTDA

SEQ ID NO: 895584 - protein, 659 aa, Homo sapiens
WRIRHEGEKRFKDPGLVDQLVKADSEWRRCRFRADNLNKLKNLCSKTIGEKMKKKEPVGDDESVPENVLSFDDLTADASSMMESDIFDECCGAILASLSVGPGGKKMVLDLDLFRVDKGGDPALIRETQEKRFKDPGLVDQLVKADSEWRRSVSFCYQAGMQWRDLSSLQPPPPRFKRFSCLSLLSSWDYSRFRADNLNKLKNLCSKTIGEKMKKKEPVGDDESVPENVLSFDDLTADALANLKVSQIKKVRLLIDEAILKCDAERIKLEAERFENLREIGNLLHPSVPISNDEDVDNKVERIWGDCTVRKKYSHVDLVVMVDGFEGEKGAVVAGSRGYFLKGVLVFLEQALIQYALRTLGSRGYIPIYTPFFMRKEVMQEVAQLSQFDEELYKVIGKGSEKSDDNSYDEKYLIATSEQPIAALHRDEWLRPEDLPIKYAGLSTCFRQEVGSHGRDTRGIFRVHQFEKIEQFVYSSPHDNKSWEMFEEMITTAEEFYQSLGIPYHIVNIVSGSLNHAASKKLDLEAWFPGSGAFRELVSCSNCTDYQARRLRIRYGQTKKMMDKVEFVHMLNATMCATTRTICAILENYQTEKGITVPEKLKEFMPPGLQELIPFVKPAPIEQEPSKKQKKQHEGSKKKAAARDVTLENRLQNMEVTDA

SEQ ID NO: 895585 - protein, 479 aa, Homo sapiens
WRIRHEGEKRFKDPGLVDQLVKADSEWRRCRFRADNLNKLKNLCSKTIGEKMKKKEPVGDDESVPENVLSFDDLTADASSMMESDIFDECCGAILASLSVGPGGKKMVLDLDLFRVDKGGDPALIRETQEKRFKDPGLVDQLVKADSEWRRCRFRADNLNKLKNLCSKTIGEKMKKKEPVGDDESVPENVLSFDDLTADALANLKVSQIKKVRLLIDEAILKCDAERIKLEAERFENLREIGNLLHPSVPISNDEDVDNKVERIWGDCTVRKKYSHVDLVVMVDGFEGEKGAVVAGSRGYFLKGVLVFLEQALIQYALRTLGSRGYIPIYTPFFMRKEVMQEVAQLSQFDEELYKVIGKGSEKSDDNSYDEKYLIATSEQPIAALHRDEWLRPEDLPIKYAGLSTCFRQEVGSHGRDTRGIFRVHQFEKIEQFVYSSPHDNKSWEMFEEMITTAEEFYQSLGIPYHIVNIVSVFESCCQ

SEQ ID NO: 895586 - protein, 627 aa, Homo sapiens
WRIRHEGEKRFKDPGLVDQLVKADSEWRRCRFRADNLNKLKNLCSKTIGEKMKKKEPVGDDESVPENVLSFDDLTADASSMMESDIFDECCGAILASLSVGPGGKKMVLDLDLFRVDKGGDPALIRETQEKRFKDPGLVDQLVKADSEWRRCRFRADNLNKLKNLCSKTIGEKMKKKEPVGDDESVPENVLSFDDLTADALAAWPVHLQNLKVSQIKKVRLLIDEAILKCDAERIKLEAERFENLREIGNLLHPSVPISNDEDVDNKVERIWGDCTVRKKYSHVDLVVMVDGFEGEKGAVVAGSRGYFLKGVLVFLEQALIQYALRTLGSRGYIPIYTPFFMRKEVMQEVAQLSQFDEELYKVIGKGSEKSDDNSYDEKYLIATSEQPIAALHRDEWLRPEDLPIKYAGLSTCFRQEVGSHGRDTRGIFRVHQFEKIEQFVYSSPHDNKSWEMFEEMITTAEEFYQSLGIPYHIVNIVSGSLNHAASKKLDLEAWFPGSGAFRELVSCSNCTDYQARRLRIRYGQTKKMMDKVEFVHMLNATMCATTRTICAILENYQTEKGITVPEKLKEFMPPGLQELIPFVKPAPIEQEPSKKQKKQHEGSKKKAAARDVTLENRLQNMEVTDA

SEQ ID NO: 895587 - protein, 491 aa, Homo sapiens
WRIRHEGEKRFKDPGLVDQLVKADSEWRRCRFRADNLNKLKNLCSKTIGEKMKKKEPVGDDESVPENVLSFDDLTADASSMMESDIFDECCGAILASLSVGPGGKKMVLDLDLFRVDKGGDPALIRETQEKRFKDPGLVDQLVKADSEWRRCRFRADNLNKLKNLCSKTIGEKMKKKEPVGDDESVPENVLSFDDLTADALANLKVSQIKKVRLLIDEAILKCDAERIKLEAERFENLREIGNLLHPSVPISNDEDVDNKVERIWGDCTVRKKYSHVDLVVMVDGFEGEKGAVVAGSRGYFLKGVLVFLEQALIQYALRTLGSRGYIPIYTPFFMRKEVMQEVAQLSQFDEELYKVIGKGSEKSDDNSYDEKYLIATSEQPIAALHRDEWLRPEDLPIKYAGLSTCFRQEVGSHGRDTRGIFRVHQFEKIEQFVYSSPHDNKSWEMFEEMITTAEEFYQSLGIPYHIVNIVSGMGPSLFSASLSCNPRRHP

SEQ ID NO: 895588 - protein, 459 aa, Homo sapiens
WRIRHEGEKRFKDPGLVDQLVKADSEWRRCRFRADNLNKLKNLCSKTIGEKMKKKEPVGDDESVPENVLSFDDLTADASSMMESDIFDECCGAILASLSVGPGGKKMVLDLDLFRVDKGGDPALIRETQEKRFKDPGLVDQLVKADSEWRRCRFRADNLNKLKNLCSKTIGEKMKKKEPVGDDESVPENVLSFDDLTADALANLKVSQIKKVRLLIDEAILKCDAERIKLEAERFENLREIGNLLHPSVPISNDEDVDNKVERIWGDCTVRKKYSHVDLVVMVDGFEGEKGAVVAGSRGYFLKGVLVFLEQALIQYALRTLGSRGYIPIYTPFFMRKEVMQEVAQLSQFDEELYKVIGKGSEKSDDNSYDEKYLIATSEQPIAALHRDEWLRPEDLPIKYAGLSTCFRQEVGSHGRDTRGIFRVHQFEKIEQFVYSSPHDNKSWEMFEEMITTAEETVA

SEQ ID NO: 895589 - protein, 600 aa, Homo sapiens
WRIRHEGEKRFKDPGLVDQLVKADSEWRRCRFRADNLNKLKNLCSKTIGEKMKKKEPVGDDESVPENVLSFDDLTADASSMMESDIFDECCGAILASLSVGPGGKKMVLDLDLFRVDKGGDPALIRETQEKRFKDPGLVDQLVKADSEWRRCRFRADNLNKLKNLCSKTIGEKMKKKEPVGDDESVPENVLSFDDLTADALAVSYEFFQLEAERFENLREIGNLLHPSVPISNDEDVDNKVERIWGDCTVRKKYSHVDLVVMVDGFEGEKGAVVAGSRGYFLKGVLVFLEQALIQYALRTLGSRGYIPIYTPFFMRKEVMQEVAQLSQFDEELYKVIGKGSEKSDDNSYDEKYLIATSEQPIAALHRDEWLRPEDLPIKYAGLSTCFRQEVGSHGRDTRGIFRVHQFEKIEQFVYSSPHDNKSWEMFEEMITTAEEFYQSLGIPYHIVNIVSGSLNHAASKKLDLEAWFPGSGAFRELVSCSNCTDYQARRLRIRYGQTKKMMDKVEFVHMLNATMCATTRTICAILENYQTEKGITVPEKLKEFMPPGLQELIPFVKPAPIEQEPSKKQKKQHEGSKKKAAARDVTLENRLQNMEVTDA

SEQ ID NO: 895590 - protein, 379 aa, Homo sapiens
MVARCQSSPISNDEDVDNKVERIWGDCTVRKKYSHVDLVVMVDGFEGEKGAVVAGSRGYFLKGVLVFLEQALIQYALRTLGSRGYIPIYTPFFMRKEVMQEVAQLSQFDEELYKVIGKGSEKSDDNSYDEKYLIATSEQPIAALHRDEWLRPEDLPIKYAGLSTCFRQEVGSHGRDTRGIFRVHQFEKIEQFVYSSPHDNKSWEMFEEMITTAEEFYQSLGIPYHIVNIVSGSLNHAASKKLDLEAWFPGSGAFRELVSCSNCTDYQARRLRIRYGQTKKMMDKVEFVHMLNATMCATTRTICAILENYQTEKGITVPEKLKEFMPPGLQELIPFVKPAPIEQEPSKKQKKQHEGSKKKAAARDVTLENRLQNMEVTDA

SEQ ID NO: 895591 - protein, 411 aa, Homo sapiens
SYQQKVCGFISGRYATSSRGASERQIPILCLSDGSKTPSSPISNDEDVDNKVERIWGDCTVRKKYSHVDLVVMVDGFEGEKGAVVAGSRGYFLKGVLVFLEQALIQYALRTLGSRGYIPIYTPFFMRKEVMQEVAQLSQFDEELYKVIGKGSEKSDDNSYDEKYLIATSEQPIAALHRDEWLRPEDLPIKYAGLSTCFRQEVGSHGRDTRGIFRVHQFEKIEQFVYSSPHDNKSWEMFEEMITTAEEFYQSLGIPYHIVNIVSGSLNHAASKKLDLEAWFPGSGAFRELVSCSNCTDYQARRLRIRYGQTKKMMDKVEFVHMLNATMCATTRTICAILENYQTEKGITVPEKLKEFMPPGLQELIPFVKPAPIEQEPSKKQKKQHEGSKKKAAARDVTLENRLQNMEVTDA

SEQ ID NO: 895592 - protein, 572 aa, Homo sapiens
WRIRHEGEKRFKDPGLVDQLVKADSEWRRCRFRADNLNKLKNLCSKTIGEKMKKKEPVGDDESVPENVLSFDDLTADASSMMESDIFDECCGAILASLSVGPGGKKMVLDLDLFRVDKGGDPALIRETQEKRFKDPGLVDQLVKADSEWRRCRFRADNLNKLKNLCSKTIGEKMKKKEPVGDDESVPENVLSFDDLTADALANLKVSQIKKVRLLIDEAILKCDAERIKLEAERFENLREIGNLLHPSVPISNDEGVLVFLEQALIQYALRTLGSRGYIPIYTPFFMRKEVMQEVAQLSQFDEELYKVIGKGSEKSDDNSYDEKYLIATSEQPIAALHRDEWLRPEDLPIKYAGLSTCFRQEVGSHGRDTRGIFRVHQFEKIEQFVYSSPHDNKSWEMFEEMITTAEEFYQSLGIPYHIVNIVSGSLNHAASKKLDLEAWFPGSGAFRELVSCSNCTDYQARRLRIRYGQTKKMMDKVEFVHMLNATMCATTRTICAILENYQTEKGITVPEKLKEFMPPGLQELIPFVKPAPIEQEPSKKQKKQHEGSKKKAAARDVTLENRLQNMEVTDA

SEQ ID NO: 895593 - protein, 520 aa, Homo sapiens
WRIRHEGEKRFKDPGLVDQLVKADSEWRRCRFRADNLNKLKNLCSKTIGEKMKKKEPVGDDESVPENVLSFDDLTADASSMMESDIFDECCGAILASLSVGPGGKKMVLDLDLFRVDKGGDPALIRETQEKRFKDPGLVDQLVKADSEWRRCRFRADNLNKLKNLCSKTIGEKMKKKEPVGDDESVPENVLSFDDLTADALANLKVSQIKKVRLLIDEAILKCDAERIKLEAERFENLREIGNLLHPSVPISNDEVIGKGSEKSDDNSYDEKYLIATSEQPIAALHRDEWLRPEDLPIKYAGLSTCFRQEVGSHGRDTRGIFRVHQFEKIEQFVYSSPHDNKSWEMFEEMITTAEEFYQSLGIPYHIVNIVSGSLNHAASKKLDLEAWFPGSGAFRELVSCSNCTDYQARRLRIRYGQTKKMMDKVEFVHMLNATMCATTRTICAILENYQTEKGITVPEKLKEFMPPGLQELIPFVKPAPIEQEPSKKQKKQHEGSKKKAAARDVTLENRLQNMEVTDA

SEQ ID NO: 895594 - protein, 377 aa, Homo sapiens
WRIRHEGEKRFKDPGLVDQLVKADSEWRRCRFRADNLNKLKNLCSKTIGEKMKKKEPVGDDESVPENVLSFDDLTADASSMMESDIFDECCGAILASLSVGPGGKKMVLDLDLFRVDKGGDPALIRETQEKRFKDPGLVDQLVKADSEWRRCRFRADNLNKLKNLCSKTIGEKMKKKEPVGDDESVPENVLSFDDLTADALANLKVSQIKKVRLLIDEAILKCDAERIKLEAERFENLREIGNLLHPSVPISNDEDVDNKVERIWGDCTVRKKYSHVDLVVMVDGFEGEKGAVGALCRRPDGVLSCTGRSWLFLDQALHAQYCPLSASPLRHTVRGLPFPMLIPPLSLHWTRPRDGVPSPSARRWRPPAFRPLDADL

SEQ ID NO: 895595 - protein, 315 aa, Homo sapiens
WRIRHEGEKRFKDPGLVDQLVKADSEWRRCRFRADNLNKLKNLCSKTIGEKMKKKEPVGDDESVPENVLSFDDLTADASSMMESDIFDECCGAILASLSVGPGGKKMVLDLDLFRVDKGGDPALIRETQEKRFKDPGLVDQLVKADSEWRRCRFRADNLNKLKNLCSKTIGEKMKKKEPVGDDESVPENVLSFDDLTADALANLKVSQIKKVRLLIDEAILKCDAERIKLEAERFENLREIGNLLHPSVPISNDEKLKEFMPPGLQELIPFVKPAPIEQEPSKKQKKQHEGSKKKAAARDVTLENRLQNMEVTDA

SEQ ID NO: 895596 - protein, 184 aa, Homo sapiens
WRIRHEGEKRFKDPGLVDQLVKADSEWRRCRFRADNLNKLKNLCSKTIGEKMKKKEPVGDDESVPENVLSFDDLTADASSMMESDIFDECCGAILASLSVGPGGKKMVLDLDLFRVDKGGDPALIRETQEKRFKDPGLVDQLVKADSEWRRCRFRADNLNKLKNLCSKTIGEKMKVRELNNKQP

SEQ ID NO: 895597 - protein, 63 aa, Homo sapiens
MVITIYYDVKVRFIVRGCGQYISYRCQEKRNTYFAEYWYQAQCCQYELFNVMDTPCRESYEYH

SEQ ID NO: 895598 - protein, 146 aa, Homo sapiens
MVITIYYDVKVRFIVRGCGQYISYRCQEKRNTYFAEYWYQAQCCQYDYCNSWSSPQLQSSLPEPHDRPLALPLSDSQIQWFYQALNLSLPLPNFHAGTEPDGLDPMVTLSLNLGLSFAELRRMYLFLNSSGLLVLPQAGLLTPHPS

SEQ ID NO: 895599 - protein, 146 aa, Homo sapiens; identical to SEQ ID NO: 895598

SEQ ID NO: 895600 - protein, 146 aa, Homo sapiens; identical to SEQ ID NO: 895598

SEQ ID NO: 895601 - protein, 273 aa, Homo sapiens
MSRVVSLLLGAALLCGHGAFCRRVVSGQKVCFADFKHPCYKMAYFHELSSRVSFQEARLACESEGGVLLSLENEAEQKLIESMLQNLTKPGTGISDGDFWIGLWRNGDGQTSGACPDLYQWSDGSNSQYRNWYTDEPSCGSEKCVVMYHQPTANPGLGGPYLYQWNDDRCNMKHNYICKYEPEINPTAPVEKPYLTNQPGDTHQNVVVTEAGIIPNLIYVVIPTIPLLLLILVAFGTCCFQMLHKSKGRTKTSPNQSTLWISKSTRKESGMEV

SEQ ID NO: 895602 - protein, 273 aa, Homo sapiens; identical to SEQ ID NO: 895601

SEQ ID NO: 895603 - protein, 232 aa, Homo sapiens
MAYFHELSSRVSFQEARLACESEGGVLLSLENEAEQKLIESMLQNLTKPGTGISDGDFWIGLWRNGDGQTSGACPDLYQWSDGSNSQYRNWYTDEPSCGSEKCVVMYHQPTANPGLGGPYLYQWNDDRCNMKHNYICKYEPEINPTAPVEKPYLTNQPGDTHQNVVVTEAGIIPNLIYVVIPTIPLLLLILVAFGTCCFQMLHKSKGRTKTSPNQSTLWISKSTRKESGMEV

SEQ ID NO: 895604 - protein, 590 aa, Homo sapiens
PCPAPPPSSGGAAVGALHRVLGKGLSLAPSPAAPLPAPRRRSASRPAPPRVTSAPPPRAPAPPPLRVPLSLPESCFLLPRGRDPEPPEAGAAAPCAPGAPDMSFRKVVRQSKFRHVFGQPVKNDQCYEDIRVSRVTWDSTFCAVNPKFLAVIVEASGGGAFLVLPLSKTGRIDKAYPTVCGHTGPVLDIDWCPHNDEVIASGSEDCTVMVWQIPENGLTSPLTEPVVVLEGHTKRVGIIAWHPTARNVLLSAGCDNVVLIWNVGTAEELYRLDSLHPDLIYNVSWNHNGSLFCSACKDKSVRIIDPRRGTLVAEREKAHEGARPMRAIFLADGKVFTTGFSRMSERQLALWDPENLEEPMALQELDSSNGALLPFYDPDTSVVYVCGKGDSSIRYFEITEEPPYIHFLNTFTSKEPQRGMGSMPKRGLEVSKCEIARFYKLHERKCEPIVMTVPRKSDLFQDDLYPDTAGPEAALEAEEWVSGRDADPILISLREAYVPSKQRDLKISRRNVLSDSRPAMAPGSSHLGAPASTTTAADATPSGSLARAGEAGKLEEVMQELRALRALVKEQGDRICRLEEQLGRMENGDA

SEQ ID NO: 895605 - protein, 551 aa, Homo sapiens
MGPLGGVRSVGGREGGASPNPGDSCGCHYEEQEREGASGPLGRDPEPPEAGAAAPCAPGAPDMSFRKVVRQSKFRHVFGQPVKNDQCYEDIRVSRVTWDSTFCAVNPKFLAVIVEASGGGAFLVLPLSKTGRIDKAYPTVCGHTGPVLDIDWCPHNDEVIASGSEDCTVMVWQIPENGLTSPLTEPVVVLEGHTKRVGIIAWHPTARNVLLSAGCDNVVLIWNVGTAEELYRLDSLHPDLIYNVSWNHNGSLFCSACKDKSVRIIDPRRGTLVAEREKAHEGARPMRAIFLADGKVFTTGFSRMSERQLALWDPENLEEPMALQELDSSNGALLPFYDPDTSVVYVCGKGDSSIRYFEITEEPPYIHFLNTFTSKEPQRGMGSMPKRGLEVSKCEIARFYKLHERKCEPIVMTVPRKSDLFQDDLYPDTAGPEAALEAEEWVSGRDADPILISLREAYVPSKQRDLKISRRNVLSDSRPAMAPGSSHLGAPASTTTAADATPSGSLARAGEAGKLEEVMQELRALRALVKEQGDRICRLEEQLGRMENGDA

SEQ ID NO: 895606 - protein, 590 aa, Homo sapiens; identical to SEQ ID NO: 895604

SEQ ID NO: 895607 - protein, 590 aa, Homo sapiens; identical to SEQ ID NO: 895604

SEQ ID NO: 895608 - protein, 607 aa, Homo sapiens
PCPAPPPSSGGAAVGALHRVLGKGLSLAPSPAAPLPAPRRRSASRPAPPRVTSAPPPRAPAPPPLRVPLSLPESCFLLPRGRDPEPPEAGAAAPCAPGAPDMSFRKVVRQSKFRHVFGQPVKNDQCYEDIRVSRVTWDSTFCAVNPKFLAVIVEASGGGAFLVLPLSKTGRIDKAYPTVCGHTGPVLDIDWCPHNDEVIASGSEDCTVMVWQIPENGLTSPLTEPVVVLEGHTKRVGIIAWHPTARNVLLSAGCDNVVLIWNVGTAEELYRLDSLHPDLIYNVSWNHNGSLFCSACKDKSVRIIDPRRGTLVAEREKAHEGARPMRAIFLADGKVFTTGFSRMSERQLALWDPENLEEPMALQELDSSNGALLPFYDPDTSVVYVCGKGDSSIRYFEITEEPPYIHFLNTFTSKEPQRGMGSMPKRGLEVSKCEIARFYKLHERKCEPIVMTVPRKSDLFQDDLYPDTAGPEAALEAEEWVSGRDADPILISLREAYVPSKQRDLKISRRNVLSDSRPAMAPGSSHLGAPASTTTAADATPSGSLARAGEAGKLEEVMQELRALRALVKEQGDRICRLEPRPRPKPAPSFPHCSCGGCLRPGELLDL

SEQ ID NO: 895609 - protein, 71 aa, Homo sapiens
LPRPAPFFRRSCGGGAPPGPRKGALSGPVPGGPAPGPPAPLSLPPSPSARDLGPAPASPCPAPAPGPSVTS

SEQ ID NO: 895610 - protein, 71 aa, Homo sapiens; identical to SEQ ID NO: 895609

SEQ ID NO: 895611 - protein, 71 aa, Homo sapiens; identical to SEQ ID NO: 895609

SEQ ID NO: 895612 - protein, 534 aa, Homo sapiens
  misc_feature (23)..(23): Xaa can be any naturally occurring amino acid
MQSGDPEAALIAYVDVSHTRPHXVHLTYAIYAINMRLAHYTSSTRDMIASRANPSSNKLTKMLMDDYYSGCPVFILGTSYTVMRRVCRSRRFLAVIVEASGGGAFLVLPLSKTGRIDKAYPTVCGHTGPVLDIDWCPHNDEVIASGSEDCTVMVWQIPENGLTSPLTEPVVVLEGHTKRVGIIAWHPTARNVLLSAGCDNVVLIWNVGTAEELYRLDSLHPDLIYNVSWNHNGSLFCSACKDKSVRIIDPRRGTLVAEREKAHEGARPMRAIFLADGKVFTTGFSRMSERQLALWDPENLEEPMALQELDSSNGALLPFYDPDTSVVYVCGKGDSSIRYFEITEEPPYIHFLNTFTSKEPQRGMGSMPKRGLEVSKCEIARFYKLHERKCEPIVMTVPRKSDLFQDDLYPDTAGPEAALEAEEWVSGRDADPILISLREAYVPSKQRDLKISRRNVLSDSRPAMAPGSSHLGAPASTTTAADATPSGSLARAGEAGKLEEVMQELRALRALVKEQGDRICRLEEQLGRMENGDA

SEQ ID NO: 895613 - protein, 605 aa, Homo sapiens
PCPAPPPSSGGAAVGALHRVLGKGLSLAPSPAAPLPAPRRRSASRPAPPRVTSAPPPRAPAPPPLRVPLSLPESCFLLPRGRDPEPPEAGAAAPCAPGAPDMSFRKVVRQSKFRHVFGQPVKNDQCYEDIRVSRVTWDSTFCAVNPKFLAVIVEASGGGAFLVLPLSKTGRIDKAYPTVCGHTGPVLDIDWCPHNDEVIASGSEDCTVMVWQIPENGLTSPLTEPVVVLEGHTKRVGIIAWHPTARNVLLSAGCDNVVLIWNVGTAEELYRLDSLHPDLIYNVSWNHNGSLFCSACKDKSVRIIDPRRGTLVAEREKAHEGARPMRAIFLADGKVFTTGFSRMSERQLALWDPGVRRFCLAWLPAMCQENLEEPMALQELDSSNGALLPFYDPDTSVVYVCGKGDSSIRYFEITEEPPYIHFLNTFTSKEPQRGMGSMPKRGLEVSKCEIARFYKLHERKCEPIVMTVPRKSDLFQDDLYPDTAGPEAALEAEEWVSGRDADPILISLREAYVPSKQRDLKISRRNVLSDSRPAMAPGSSHLGAPASTTTAADATPSGSLARAGEAGKLEEVMQELRALRALVKEQGDRICRLEEQLGRMENGDA

SEQ ID NO: 895614 - protein, 240 aa, Homo sapiens
MCQENLEEPMALQELDSSNGALLPFYDPDTSVVYVCGKGDSSIRYFEITEEPPYIHFLNTFTSKEPQRGMGSMPKRGLEVSKCEIARFYKLHERKCEPIVMTVPRKSDLFQDDLYPDTAGPEAALEAEEWVSGRDADPILISLREAYVPSKQRDLKISRRNVLSDSRPAMAPGSSHLGAPASTTTAADATPSGSLARAGEAGKLEEVMQELRALRALVKEQGDRICRLEEQLGRMENGDA

SEQ ID NO: 895615 - protein, 140 aa, Homo sapiens [sequence omitted]

SEQ ID NO: 895616 - protein, 268 aa, Homo sapiens
PCPAPPPSSGGAAVGALHRVLGKGLSLAPSPAAPLPAPRRRSASRPAPPRVTSAPPPRAPAPPPLRVPLSLPESCFLLPRGRDPEPPEAGAAAPCAPGAPDMSFRKVVRQSKFRHVFGQPVKNDQCYEDIRVSRVTWDSTFCAVNPKFLAVIVEASGGGAFLVLPLSKTGRIDKAYPTVCGHTGPVLDIDWCPHNDEVIASGSEDCTVMVWQIPENGLTSPLTEPVVVLEGHTKRVGIIAWHPTARNVLLSAGCDNVVLIWNVGTAEE

SEQ ID NO: 895617 - protein, 81 aa, Homo sapiens
LIYNVSWNHNGSLFCSACKDKSVRIIDPRRGTLVAVRGSGGQGWLWMAQDLEQGAALTSLSPRQEREKAHEGARPMRAIFL

SEQ ID NO: 895618 - protein, 202 aa, Homo sapiens
MAKVSVLNVAVLENPSPFHSPFRFEISFECSEALADDLEWKIIYVGSAESEEFDQILDSVLVGPVPAGRHMFVFQADAPNPSLIPETDAVGVTVVLITCTYHGQEFIRVGYYVNNEYLNPELRENPPMKPDFSQLQRNILASNPRVTRFHINWDNNMDRLEAIETQDPSLGCGLPLNCTPIKGLGLPGCIPGLLPENSMDCI

SEQ ID NO: 895619 - protein, 195 aa, Homo sapiens
TQILPAQRNIWLNPRVTRFHINWDNNMDRLEAIETQDPSLGCGLPLNCTPIKGLGLPGCIPGLLPENSMDCIYLQEPRVSQHAGRGNQASQRVLPPAGRHMFVFQADAPNPSLIPETDAVGVTVVLITCTYHGQEFIRVGYYVNNEYLNPELRENPPMKPDFSQVGPVSTSCFPQGRSLYLGGVQPFKLRVKVTS

SEQ ID NO: 895620 - protein, 202 aa, Homo sapiens; identical to SEQ ID NO: 895618

SEQ ID NO: 895621 - protein, 202 aa, Homo sapiens; identical to SEQ ID NO: 895618

SEQ ID NO: 895622 - protein, 232 aa, Homo sapiens
TQILPAQRNIWLNPRVTRFHINWDNNMDRLEAIETQDPSLGCGLPLNCTPIKGLGLPGCIPGLLPENSMDCIYLQEPRVSQHAGRGNQASQRVLPPAGRHMFVFQADAPNPSLIPETDAVGVTVVLITCTYHGQEFIRVGYYVNNEYLNPELRENPPMKPDFSQLQRNILASNPRVTRFHINWDNNMDRLEAIETQDPSLGCGLPLNCTPIKGLGLPGCIPGLLPENSMDCI

SEQ ID NO: 895623 - protein, 143 aa, Homo sapiens
MAKVSVLNVAVLENPSPFHSPFRFEISFECSEALADDLEWKIIYVGSAESEEFDQILDSVLVGPVPAGRHMFVFQLQRNILASNPRVTRFHINWDNNMDRLEAIETQDPSLGCGLPLNCTPIKGLGLPGCIPGLLPENSMDCI

SEQ ID NO: 895624 - protein, 146 aa, Homo sapiens
MAVIGQRAEAGYLKAARGLGAHFSSRREEAGVDLVSPTPLTPPDPGAASATATAPAPAAARRGEAMAKVSVLNVAVLENPSPFHSPFRFEISFECSEALADDLEWKIIYVGSAESEEFDQILDSVLVGPVPAGRHMFVFQRLMPWV

SEQ ID NO: 895625 - protein, 175 aa, Homo sapiens
MAKVSVLNVAVLENPSPFHSPFRFEISFECSEALADDLEWKIIYVGSAESEEFDQILDSVLVGPVPAGRHMFVFQADAPNPSLIPETDAVGVTVVLITCTYHGQEFIRVGYYVNNEYLNPELRENPPMKPDFSQSQLHRRLRQENRLNPEGRGCSETRSQHCTPAWATKAKLRLK

SEQ ID NO: 895626 - protein, 431 aa, Homo sapiens
GRPPTAPHTGRPPTANRGDPRLDLKRGCARLLTSIESRGRPAASAGLRRDRCALRRWPLRRAPLARATRRRAGSPRRCAPRPAPAPRMVRARHQPGGLCLLLLLLCQFMEDRSAQAGNCWLRQAKNGRCQVLYKTELSKEECCSTGRLSTSWTEEDVNDNTLFKWMIFNGGAPNCIPCKETCENVDCGPGKKCRMNKKNKPRCVCAPDCSNITWKGPVCGLDGKTYRNECALLKARCKEQPELEVQYQGRCKKTCRDVFCPGSSTCVVDQTNNAYCVTCNRICPEPASSEQYLCGNDGVTYSSACHLRKATCLLGRSIGLAYEGKCIKAKSCEDIQCTGGKKCLWDFKVGRGRCSLCDELCPDSKSDEPVCASDNATYASECAMKEAACSSGVLLEVKHSGSCNSISEDTEEEEEDEDQDYSFPISSILEW

SEQ ID NO: 895627 - protein, 431 aa, Homo sapiens; identical to SEQ ID NO: 895626

SEQ ID NO: 895628 - protein, 431 aa, Homo sapiens; identical to SEQ ID NO: 895626

SEQ ID NO: 895629 - protein, 431 aa, Homo sapiens; identical to SEQ ID NO: 895626

SEQ ID NO: 895630 - protein, 317 aa, Homo sapiens
MVRARHQPGGLCLLLLLLCQFMEDRSAQAGNCWLRQAKNGRCQVLYKTELSKEECCSTGRLSTSWTEEDVNDNTLFKWMIFNGGAPNCIPCKETCENVDCGPGKKCRMNKKNKPRCVCAPDCSNITWKGPVCGLDGKTYRNECALLKARCKEQPELEVQYQGRCKKTCRDVFCPGSSTCVVDQTNNAYCVTCNRICPEPASSEQYLCGNDGVTYSSACHLRKATCLLGRSIGLAYEGKCIKAKSCEDIQCTGGKKCLWDFKVGRGRCSLCDELCPDSKSDEPVCASDNATYASECAMKEAACSSGVLLEVKHSGSCN

SEQ ID NO: 895631 - protein, 332 aa, Homo sapiens
GRPPTAPHTGRPPTANRGDPRLDLKRGCARLLTSIESRGRPAASAGLRRDRCALRRWPLRRAPLARATRRRAGSPRRCAPRPAPAPRMVRARHQPGGLCLLLLLLCQFMEDRSAQAGNCWLRQAKNGRCQVLYKTELSKEECCSTGRLSTSWTEEDVNDNTLFKWMIFNGGAPNCIPCKETCENVDCGPGKKCRMNKKNKPRCVCAPDCSNITWKGPVCGLDGKTYRNECALLKARCKEQPELEVQYQGRCKKTCRDVFCPGSSTCVVDQTNNAYCVTCNRICPEPASSEQYLCGNDGVTYSSACHLRKATCLLGRSIGLAYEGKCIRKVYQ

SEQ ID NO: 895632 - protein, 122 aa, Homo sapiens
MGKCISRYSGLRKEKEKTEAKSCEDIQCTGGKKCLWDFKVGRGRCSLCDELCPDSKSDEPVCASDNATYASECAMKEAACSSGVLLEVKHSGSCNSISEDTEEEEEDEDQDYSFPISSILEW

SEQ ID NO: 895633 - protein, 343 aa, Homo sapiens
GRPPTAPHTGRPPTANRGDPRLDLKRGCARLLTSIESRGRPAASAGLRRDRCALRRWPLRRAPLARATRRRAGSPRRCAPRPAPAPRMVRARHQPGGLCLLLLLLCQFMEDRSAQAGNCWLRQAKNGRCQVLYKTELSKEECCSTGRLSTSWTEEDVNDNTLFKWMIFNGGAPNCIPCKETCENVDCGPGKKCRMNKKNKPRCVCAPDCSNITWKGPVCGLDGKVISRYSGLRKEKEKTEAKSCEDIQCTGGKKCLWDFKVGRGRCSLCDELCPDSKSDEPVCASDNATYASECAMKEAACSSGVLLEVKHSGSCNSISEDTEEEEEDEDQDYSFPISSILEW

SEQ ID NO: 895634 - protein, 317 aa, Homo sapiens; identical to SEQ ID NO: 895630

SEQ ID NO: 895635 - protein, 244 aa, Homo sapiens
MELTIFILRLAIYILTFPLYLLNFLGLWSWICKKWFPYFLVRFTVIYNEQMASKKRELFSNLQEFAGPSGKLSLLEVGCGTGANFKFYPPGCRVTCIDPNPNFEKFLIKSIAENRHLQFERFVVAAGENMHQVADGSVDVVVCTLVLCSVKNQERILREVCRVLRPGGAFYFMEHVAAECSTWNYFWQQVLDPAWHLLFDGCNLTRESWKALERASFSKLKLQHIQAPLSWELVRPHIYGYAVK

SEQ ID NO: 895636 - protein, 244 aa, Homo sapiens; identical to SEQ ID NO: 895635

SEQ ID NO: 895637 - protein, 244 aa, Homo sapiens; identical to SEQ ID NO: 895635

SEQ ID NO: 895638 - protein, 244 aa, Homo sapiens; identical to SEQ ID NO: 895635

SEQ ID NO: 895639 - protein, 244 aa, Homo sapiens; identical to SEQ ID NO: 895635

SEQ ID NO: 895640 - protein, 242 aa, Homo sapiens
ERERERERERERERERERERNFLGLWSWICKKWFPYFLVRFTVIYNEQMASKKRELFSNLQEFAGPSGKLSLLEVGCGTGANFKFYPPGCRVTCIDPNPNFEKFLIKSIAENRHLQFERFVVAAGENMHQVADGSVDVVVCTLVLCSVKNQERILREVCRVLRPGGAFYFMEHVAAECSTWNYFWQQVLDPAWHLLFDGCNLTRESWKALERASFSKLKLQHIQAPLSWELVRPHIYGYAVK

SEQ ID NO: 895641 - protein, 244 aa, Homo sapiens; identical to SEQ ID NO: 895635

SEQ ID NO: 895642 - protein, 244 aa, Homo sapiens; identical to SEQ ID NO: 895635

SEQ ID NO: 895643 - protein, 244 aa, Homo sapiens; identical to SEQ ID NO: 895635

SEQ ID NO: 895644 - protein, 244 aa, Homo sapiens; identical to SEQ ID NO: 895635

SEQ ID NO: 895645 - protein, 244 aa, Homo sapiens; identical to SEQ ID NO: 895635

SEQ ID NO: 895646 - protein, 244 aa, Homo sapiens; identical to SEQ ID NO: 895635

SEQ ID NO: 895647 - protein, 244 aa, Homo sapiens; identical to SEQ ID NO: 895635

SEQ ID NO: 895648 - protein, 244 aa, Homo sapiens; identical to SEQ ID NO: 895635

SEQ ID NO: 895649 - protein, 378 aa, Homo sapiens
MTDPSLGLTVPMAPPLAPLPPRDPNGAGSEWRKPGAVSFADVAVYFSREEWGCLRPAQRALYRDVMRETYGHLGALGESPTCLPGPCASTGPAAPLGAACGVGGPGAGQAASSQRGVCVLLPQESEAASRRSSPGWRRRPNCGIRLPRILEVAKCPTEADPADSRNKEEERQREGTGALEKPDPVAAGSPGLKAPQAPFAGLEQLSKARRRSRPRFFAHPPVPRADQRHGCYVCGKSFAWRSTLVEHIYSHRGEKPFHCADCGKGFGHASSLSKHRAIHRGERPHRCPECGRAFMRRTALTSHLRVHTGEKPYRCPQCGRCFGLKTGMAKHQWVHRPGGEGRRGRRPGGLSVTLTPVRGDLDPPVGFQLYPEIFQECG

SEQ ID NO: 895650 - protein, 378 aa, Homo sapiens; identical to SEQ ID NO: 895649

SEQ ID NO: 895651 - protein, 378 aa, Homo sapiens; identical to SEQ ID NO: 895649

SEQ ID NO: 895652 - protein, 378 aa, Homo sapiens; identical to SEQ ID NO: 895649

SEQ ID NO: 895653 - protein, 148 aa, Homo sapiens
MAVASDFYLRYYVGHKGKFGHEFLEFEFRPDGKLRYANNSNYKNDVMIRKEAYVHKSVMEELKRIIDDSEITKEDDALWPPPDRVGRQELEIVIGDEHISFTTSKIGSLIDVNQSKDPEGLRVFYYLVQDLKCLVFSLIGLHFKIKPI

SEQ ID NO: 895654 - protein, 148 aa, Homo sapiens; identical to SEQ ID NO: 895653

SEQ ID NO: 895655 - protein, 130 aa, Homo sapiens
MAVASDFYLRYYVGHKGKFGHEFLEFEFRPDGKLRYANNSNYKNDVMIRKEAYVHKSVMEELKRIIDDSEITKEDDALWPPPDRVGRQELEIVIGDEHISFTTSIFYYLVQDLKCLVFSLIGLHFKIKPI

SEQ ID NO: 895656 - protein, 72 aa, Homo sapiens
TKMAVASDFYLRYYVGHKGKFGHEFLEFEFRPDGEKRPTARGAGKGERDREAGWCGGYRRRRPLLPSKEIGA

SEQ ID NO: 895657 - protein, 148 aa, Homo sapiens; identical to SEQ ID NO: 895653

SEQ ID NO: 895658 - protein, 102 aa, Homo sapiens
MIRKEAYVHKSVMEELKRIIDDSEITKEDDALWPPPDRVGRQELEIVIGDEHISFTTSKIGSLIDVNQSKDPEGLRVFYYLVQDLKCLVFSLIGLHFKIKPI

SEQ ID NO: 895659 - protein, 1175 aa, Homo sapiens
MKRTKCADIDVETPDSILVNTNLRALINKHTFSVLPGDCQQRLLLLLPEVDRQVGPDGLMKLNGSALNNEFFTSAAQGWKERLSEGEFTPEMQVRIRQEIEKEKKVEPWKEQFFESYYGQSSGLSLEDSKKLTASPSDPKVKKTPAEQPKSMPVSEASLIRIVPVVSQSECKEEALQMSSPGRKEECESQGEVQPNFSTSSEPLLSSALNTHELSSILPIKCPKDEDLLEQKPVTSAEQESEKNHLTTASNYNKSESQESLVTSPSKPKSPGVEKPIVKPTAGAGPQETNMKEPLATLVDQSPESLKRKSSLTQEEAPVSWEKRPRVTENRQHQQPFQVSPQPFLNRGDRIQVRKVPPLKIPVSRISPMPFHPSQVSPRARFPVSITSPNRTGARTLADIKAKAQLVKAQRAAAAAAAAAAAAASVGGTIPGPGPGGGQGPGEGGEGQTARGGSPGSDRVSETGKGPTLELAGTGSRGGTRELLPCGPETQPQSETKTTPSQAQPHSVSGAQLQQTPPVPPTPAVSGACTSVPSPAHIEKLDNEKLNPTRATATVASVSHPQGPSSCRQEKAPSPTGPALISGASPVHCAADGTVELKAGPSKNIPNPSASSKTDASVPVAVTPSPLTSLLTTATLEKLPVPQVSATTAPAGSAPPSSTLPAASSLKTPGTSLNMNGPTLRPTSSIPANNPLVTQLLQGKDVPMEQILPKPLTKVEMKTVPLTAKEERGMGALIATNTTENSTREEVNERQSHPATQQQLGKTLQSKQLPQVPRPLQLFSAKELRDSSIDTHQYHEGLSKATQDQILQTLIQRVRRQNLLSVVPPSQFNFAHSGFQLEDISTSQRFMLGFAGRRTSKPAMAGHYLLNISTYGRGSESFRRTHSVNPEDRFCLSSPTEALKMGYTDCKNATGESSSSKEDDTDEESTGDEQESVTVKEEPQVSQSAGKGDTSSGPHSRETLSTSDCLASKNVKAEIPLNEQTTLSKENYLFTRGQTFDEKTLARDLIQAAQKQMAHAVRGKAIRSSPELFSSTVLPLPADSPTHQPLLLPPLQTPKLYGSPTQIGPSYRGMINVSTSSDMDHNSAVPGSQVSSNVGDVMSFSVTVTTIPASQAMNPSSHGQTIPVQAFSEENSIEGTPSKCYCRLKAMIMCKGCGAFCHDDCIGPSKLCVSCLVVR

SEQ ID NO: 895660 - protein, 1113 aa, Homo sapiens
MAQPLTMNSSLQQPKAGRERLSEGEFTPEMQVRIRQEIEKEKKVEPWKEQFFESYYGQSSGLSLEDSKKLTASPSDPKVKKTPAEQPKSMPVSEASLIRIVPVVSQSECKEEALQMSSPGRKEECESQGEVQPNFSTSSEPLLSSALNTHELSSILPIKCPKDEDLLEQKPVTSAEQESEKNHLTTASNYNKSESQESLVTSPSKPKSPGVEKPIVKPTAGAGPQETNMKEPLATLVDQSPESLKRKSSLTQEEAPVSWEKRPRVTENRQHQQPFQVSPQPFLNRGDRIQVRKVPPLKIPVSRISPMPFHPSQVSPRARFPVSITSPNRTGARTLADIKAKAQLVKAQRAAAAAAAAAAAAASVGGTIPGPGPGGGQGPGEGGEGQTARGGSPGSDRVSETGKGPTLELAGTGSRGGTRELLPCGPETQPQSETKTTPSQAQPHSVSGAQLQQTPPVPPTPAVSGACTSVPSPAHIEKLDNEKLNPTRATATVASVSHPQGPSSCRQEKAPSPTGPALISGASPVHCAADGTVELKAGPSKNIPNPSASSKTDASVPVAVTPSPLTSLLTTATLEKLPVPQVSATTAPAGSAPPSSTLPAASSLKTPGTSLNMNGPTLRPTSSIPANNPLVTQLLQGKDVPMEQILPKPLTKVEMKTVPLTAKEERGMGALIATNTTENSTREEVNERQSHPATQQQLGKTLQSKQLPQVPRPLQLFSAKELRDSSIDTHQYHEGLSKATQDQILQTLIQRVRRQNLLSVVPPSQFNFAHSGFQLEDISTSQRFMLGFAGRRTSKPAMAGHYLLNISTYGRGSESFRRTHSVNPEDRFCLSSPTEALKMGYTDCKNATGESSSSKEDDTDEESTGDEQESVTVKEEPQVSQSAGKGDTSSGPHSRETLSTSDCLASKNVKAEIPLNEQTTLSKENYLFTRGQTFDEKTLARDLIQAAQKQMAHAVRGKAIRSSPELFSSTVLPLPADSPTHQPLLLPPLQTPKLYGSPTQIGPSYRGMINVSTSSDMDHNSAVPGSQVSSNVGDVMSFSVTVTTIPASQAMNPSSHGQTIPVQAFSEENSIEGTPSKCYCRLKAMIMCKGCGAFCHDDCIGPSKLCVSCLVVR

SEQ ID NO: 895661 - protein, 1289 aa, Homo sapiens
MVLTLLLDITILVPSDFLFPHHLRESKSAPSTLFQSHSHNLSLGFPLSFSLDYCTASDSVPAKPATWEGKQSDGQTGSPQNSNSSFSSSVKVENTLLGLGKKSFQRSERLHTRQMKRTKCADIDVETPDSILVNTNLRALINKHTFSVLPGDCQQRLLLLLPEVDRQVGPDGLMKLNGSALNNEFFTSAAQGWKERLSEGEFTPEMQVRIRQEIEKEKKVEPWKEQFFESYYGQSSGLSLEDSKKLTASPSDPKVKKTPAEQPKSMPVSEASLIRIVPVVSQSECKEEALQMSSPGRKEECESQGEVQPNFSTSSEPLLSSALNTHELSSILPIKCPKDEDLLEQKPVTSAEQESEKNHLTTASNYNKSESQESLVTSPSKPKSPGVEKPIVKPTAGAGPQETNMKEPLATLVDQSPESLKRKSSLTQEEAPVSWEKRPRVTENRQHQQPFQVSPQPFLNRGDRIQVRKVPPLKIPVSRISPMPFHPSQVSPRARFPVSITSPNRTGARTLADIKAKAQLVKAQRAAAAAAAAAAAAASVGGTIPGPGPGGGQGPGEGGEGQTARGGSPGSDRVSETGKGPTLELAGTGSRGGTRELLPCGPETQPQSETKTTPSQAQPHSVSGAQLQQTPPVPPTPAVSGACTSVPSPAHIEKLDNEKLNPTRATATVASVSHPQGPSSCRQEKAPSPTGPALISGASPVHCAADGTVELKAGPSKNIPNPSASSKTDASVPVAVTPSPLTSLLTTATLEKLPVPQVSATTAPAGSAPPSSTLPAASSLKTPGTSLNMNGPTLRPTSSIPANNPLVTQLLQGKDVPMEQILPKPLTKVEMKTVPLTAKEERGMGALIATNTTENSTREEVNERQSHPATQQQLGKTLQSKQLPQVPRPLQLFSAKELRDSSIDTHQYHEGLSKATQDQILQTLIQRVRRQNLLSVVPPSQFNFAHSGFQLEDISTSQRFMLGFAGRRTSKPAMAGHYLLNISTYGRGSESFRRTHSVNPEDRFCLSSPTEALKMGYTDCKNATGESSSSKEDDTDEESTGDEQESVTVKEEPQVSQSAGKGDTSSGPHSRETLSTSDCLASKNVKAEIPLNEQTTLSKENYLFTRGQTFDEKTLARDLIQAAQKQMAHAVRGKAIRSSPELFSSTVLPLPADSPTHQPLLLPPLQTPKLYGSPTQIGPSYRGMINVSTSSDMDHNSAVPGSQVSSNVGDVMSFSVTVTTIPASQAMNPSSHGQTIPVQAFSEENSIEGTPSKCYCRLKAMIMCKGCGAFCHDDCIGPSKLCVSCLVVR

SEQ ID NO: 895662 - protein, 1175 aa, Homo sapiens; identical to SEQ ID NO: 895659

SEQ ID NO: 895663 - protein, 1160 aa, Homo sapiens
MKRTKCADIDVETPDSILVNTNLRALINKHTFSVLPGDCQQRLLLLLPEVDRQVGPDGLMKLNGSALNNEFFTSAAQGWKERLSEGEFTPEMQVRIRQEIEKEKKVEPWKEQFFESYYGQSSGLSLEDSKKLTASPSDPKVKKTPAEQPKSMPVSEASLIRIVPVVSQSECKEEALQMSSPGRKEECESQGEVQPNFSTSSEPLLSSALNTHELSSILPIKCPKDEDLLEQKPVTSAEQESEKNHLTTASNYNKSESQESLVTSPSKPKSPGVEKPIVKPTAGAGPQETNMKEPLATLVDQSPESLKRKSSLTQEEAPVSWEKRPRVTENRQHQQPFQVSPQPFLNRGDRIQVRKVPPLKVSPRARFPVSITSPNRTGARTLADIKAKAQLVKAQRAAAAAAAAAAAAASVGGTIPGPGPGGGQGPGEGGEGQTARGGSPGSDRVSETGKGPTLELAGTGSRGGTRELLPCGPETQPQSETKTTPSQAQPHSVSGAQLQQTPPVPPTPAVSGACTSVPSPAHIEKLDNEKLNPTRATATVASVSHPQGPSSCRQEKAPSPTGPALISGASPVHCAADGTVELKAGPSKNIPNPSASSKTDASVPVAVTPSPLTSLLTTATLEKLPVPQVSATTAPAGSAPPSSTLPAASSLKTPGTSLNMNGPTLRPTSSIPANNPLVTQLLQGKDVPMEQILPKPLTKVEMKTVPLTAKEERGMGALIATNTTENSTREEVNERQSHPATQQQLGKTLQSKQLPQVPRPLQLFSAKELRDSSIDTHQYHEGLSKATQDQILQTLIQRVRRQNLLSVVPPSQFNFAHSGFQLEDISTSQRFMLGFAGRRTSKPAMAGHYLLNISTYGRGSESFRRTHSVNPEDRFCLSSPTEALKMGYTDCKNATGESSSSKEDDTDEESTGDEQESVTVKEEPQVSQSAGKGDTSSGPHSRETLSTSDCLASKNVKAEIPLNEQTTLSKENYLFTRGQTFDEKTLARDLIQAAQKQMAHAVRGKAIRSSPELFSSTVLPLPADSPTHQPLLLPPLQTPKLYGSPTQIGPSYRGMINVSTSSDMDHNSAVPGSQVSSNVGDVMSFSVTVTTIPASQAMNPSSHGQTIPVQAFSEENSIEGTPSKCYCRLKAMIMCKGCGAFCHDDCIGPSKLCVSCLVVR

SEQ ID NO: 895664 - protein, 1175 aa, Homo sapiens; identical to SEQ ID NO: 895659

SEQ ID NO: 895665 - protein, 138 aa, Homo sapiens
MREKGRRKKGRTWAEAAKTVLEKYPNTPMSHKEILQVIQREGLKEIRSGTSPLACLNAMLHTNSRGEEGIFYKVPGRMGVYTLKKDVPDGVKELSEGSEESSDGQSDSQSSENSSSSSDGGSNKEGKKSRWKRKGKST

SEQ ID NO: 895666 - protein, 1175 aa, Homo sapiens; identical to SEQ ID NO: 895659

SEQ ID NO: 895667 - protein, 1435 aa, Homo sapiens
MREKGRRKKGRTWAEAAKTVLEKYPNTPMSHKEILQVIQREGLKEIRSGTSPLACLNAMLHTNSRGEEGIFYKVPGRMGVYTLKKDVPDGVKELSEGSEESSDGQSDSQSSENSSSSSDGGSNKEGKKSRWKRKVSSSSPQSGCPSPTIPAGKVISPSQKHSKKALKQALKQQQQKKQQQQCRPSISISSNQHLSLKTVKAASDSVPAKPATWEGKQSDGQTGSPQNSNSSFSSSVKVENTLLGLGKKSFQRSERLHTRQMKRTKCADIDVETPDSILVNTNLRALINKHTFSVLPGDCQQRLLLLLPEVDRQVGPDGLMKLNGSALNNEFFTSAAQGWKERLSEGEFTPEMQVRIRQEIEKEKKVEPWKEQFFESYYGQSSGLSLEDSKKLTASPSDPKVKKTPAEQPKSMPVSEASLIRIVPVVSQSECKEEALQMSSPGRKEECESQGEVQPNFSTSSEPLLSSALNTHELSSILPIKCPKDEDLLEQKPVTSAEQESEKNHLTTASNYNKSESQESLVTSPSKPKSPGVEKPIVKPTAGAGPQETNMKEPLATLVDQSPESLKRKSSLTQEEAPVSWEKRPRVTENRQHQQPFQVSPQPFLNRGDRIQVRKVPPLKIPVSRISPMPFHPSQVSPRARFPVSITSPNRTGARTLADIKAKAQLVKAQRAAAAAAAAAAAAASVGGTIPGPGPGGGQGPGEGGEGQTARGGSPGSDRVSETGKGPTLELAGTGSRGGTRELLPCGPETQPQSETKTTPSQAQPHSVSGAQLQQTPPVPPTPAVSGACTSVPSPAHIEKLDNEKLNPTRATATVASVSHPQGPSSCRQEKAPSPTGPALISGASPVHCAADGTVELKAGPSKNIPNPSASSKTDASVPVAVTPSPLTSLLTTATLEKLPVPQVSATTAPAGSAPPSSTLPAASSLKTPGTSLNMNGPTLRPTSSIPANNPLVTQLLQGKDVPMEQILPKPLTKVEMKTVPLTAKEERGMGALIATNTTENSTREEVNERQSHPATQQQLGKTLQSKQLPQVPRPLQLFSAKELRDSSIDTHQYHEGLSKATQDQILQTLIQRVRRQNLLSVVPPSQFNFAHSGFQLEDISTSQRFMLGFAGRRTSKPAMAGHYLLNISTYGRGSESFRRTHSVNPEDRFCLSSPTEALKMGYTDCKNATGESSSSKEDDTDEESTGDEQESVTVKEEPQVSQSAGKGDTSSGPHSRETLSTSDCLASKNVKAEIPLNEQTTLSKENYLFTRGQTFDEKTLARDLIQAAQKQMAHAVRGKAIRSSPELFSSTVLPLPADSPTHQPLLLPPLQTPKLYGSPTQIGPSYRGMINVSTSSDMDHNSAVPGSQVSSNVGDVMSFSVTVTTIPASQAMNPSSHGQTIPVQAFSEENSIEGTPSKCYCRLKAMIMCKGCGAFCHDDCIGPSKLCVSCLVVR

SEQ ID NO: 895668 - protein, 1175 aa, Homo sapiens; identical to SEQ ID NO: 895659

SEQ ID NO: 895669 - protein, 1175 aa, Homo sapiens; identical to SEQ ID NO: 895659

SEQ ID NO: 895670 - protein, 98 aa, Homo sapiens
GPQETNMKEPLATLVDQSPESLKRKSSLTQEEAPVSWEKRPRVTENRQHQQPFQVSPQPFLNRGDRIQVRKVPPLKVREWRELEKQRSSEPYVFGHTY

SEQ ID NO: 895671 - protein, 125 aa, Homo sapiens
MHTVTSQKCPPSFCPLRVSSREREKFCRCMWRTASTAADSDSSSGTRPGRGRLLTDSKAALPGASLYFYTVLLRYNLHAIQPIYFKCTMQGVCIYSQSCVSITIVLEHSSLQKKLLPISSHCPFP

SEQ ID NO: 895672 - protein, 125 aa, Homo sapiens; identical to SEQ ID NO: 895671

SEQ ID NO: 895673 - protein, 125 aa, Homo sapiens; identical to SEQ ID NO: 895671

SEQ ID NO: 895674 - protein, 125 aa, Homo sapiens; identical to SEQ ID NO: 895671

SEQ ID NO: 895675 - protein, 100 aa, Homo sapiens
DTMDYTMPWVSVSQTILTAALTLLSTVVTTPTSSLVIKDSPCSLPPQDSIILILFKDPSPVAAVSAVTFCLLRARAQSSSRILGSSHNILSHDRCEKYVL

SEQ ID NO: 895676 - protein, 100 aa, Homo sapiens; identical to SEQ ID NO: 895675

SEQ ID NO: 895677 - protein, 110 aa, Homo sapiens
MSSFLPEGGCYELLTVIGMCRGRPYSPAFCSRGCCSFLSSPRCVYSRGHPLVRRIHGHRLASVGLLCFFMPSMGRDQTSRKEALLPSFLCGCHVSGVLAIVSQKGWLRRN

SEQ ID NO: 895678 - protein, 269 aa, Homo sapiens
MSFLTNDASSESIASFSKQEVMSSFLPEGGCYELLTVIGKGFEDLMTVNLARYKPTGEYVTVRRINLEACSNEMVTFLQGELHVSKLFNHPNIVPYRATFIADNELWVVTSFMAYGSAKDLICTHFMDGMNELAIAYILQGVLKALDYIHHMGYVHRSVKASHILISVDGKVYLSGLRSNLSMISHGQRQRVVHDFPKYSVKVLPWLSPEVLQQISFRCSRLTVDPSCEAAAIKERPWLNEGRCWTSPGMILRMRAPRAKNPQTTSRQP

SEQ ID NO: 895679 - protein, 373 aa, Homo sapiens
MSSFLPEGGCYELLTVIGKGFEDLMTVNLARYKPTGEYVTVRRINLEACSNEMVTFLQGELHVSKLFNHPNIVPYRATFIADNELWVVTSFMAYGSAKDLICTHFMDGMNELAIAYILQGVLKALDYIHHMGYVHRSVKASHILISVDGKVYLSGLRSNLSMISHGQRQRVVHDFPKYSVKVLPWLSPEVLQQNLQGYDAKSDIYSVGITACELANGHVPFKDMPATQMLLEKLNGTVPCLLDTSTIPAEELTMSPSRSVANSGLSDSLTTSTPRPSNGDSPSHPYHRTFSPHFHHFVEQCLQRNPDARPSASTLLNHSFFKQIKRRASEALPELLRPVTPITNFEGSQSQDHSGIFGLVTNLEELEVDDWEF

SEQ ID NO: 895680 - protein, 280 aa, Homo sapiens
MSSFLPEGGCYELLTVIGKGFEDLMTVNLARYKPTGEYVTVRRINLEACSNEMVTFLQGELHVSKLFNHPNIVPYRATFIADNELWVVTSFMAYGSAKDLICTHFMDGMNELAIAYILQGVLKALDYIHHMGYVHRSVKASHILISVDGKVYLSGLRSNLSMISHGQRQRVVHDFPKYSVKVLPWLSPEVLQQNLQGYDAKSDIYSVGITACELANGHVPFKDMPATQMLLEKLNGTVPCLLDTSTIPAEELTMSPSRSVANSGLSDSLTTSTRPVPAPS

SEQ ID NO: 895681 - protein, 394 aa, Homo sapiens
MSFLTNDASSESIASFSKQEVMSSFLPEGGCYELLTVIGKGFEDLMTVNLARYKPTGEYVTVRRINLEACSNEMVTFLQGELHVSKLFNHPNIVPYRATFIADNELWVVTSFMAYGSAKDLICTHFMDGMNELAIAYILQGVLKALDYIHHMGYVHRSVKASHILISVDGKVYLSGLRSNLSMISHGQRQRVVHDFPKYSVKVLPWLSPEVLQQNLQGYDAKSDIYSVGITACELANGHVPFKDMPATQMLLEKLNGTVPCLLDTSTIPAEELTMSPSRSVANSGLSDSLTTSTPRPSNGDSPSHPYHRTFSPHFHHFVEQCLQRNPDARPSASTLLNHSFFKQIKRRASEALPELLRPVTPITNFEGSQSQDHSGIFGLVTNLEELEVDDWEF

SEQ ID NO: 895682 - protein, 373 aa, Homo sapiens; identical to SEQ ID NO: 895679

SEQ ID NO: 895683 - protein, 402 aa, Homo sapiens
MSFLVSKPERIRTNDASSESIASFSKQEVMSSFLPEGGCYELLTVIGKGFEDLMTVNLARYKPTGEYVTVRRINLEACSNEMVTFLQGELHVSKLFNHPNIVPYRATFIADNELWVVTSFMAYGSAKDLICTHFMDGMNELAIAYILQGVLKALDYIHHMGYVHRSVKASHILISVDGKVYLSGLRSNLSMISHGQRQRVVHDFPKYSVKVLPWLSPEVLQQNLQGYDAKSDIYSVGITACELANGHVPFKDMPATQMLLEKLNGTVPCLLDTSTIPAEELTMSPSRSVANSGLSDSLTTSTPRPSNGDSPSHPYHRTFSPHFHHFVEQCLQRNPDARPSASTLLNHSFFKQIKRRASEALPELLRPVTPITNFEGSQSQDHSGIFGLVTNLEELEVDDWEF

SEQ ID NO: 895684 - protein, 231 aa, Homo sapiens
MSFLVSKPERIRRWVSEKFIVEGLRDLELFGEQPPGDTRRKTNDASSESIASFSKQEVMSSFLPEGGCYELLTVIGKGFEDLMTVNLARYKPTGEYVTVRRINLEACSNEMVTFLQGELHVSKLFNHPNIVPYRATFIADNELWVVTSFMAYGSAKDLICTHFMDGMNELAIAYILQGVLKALDYIHHMGYVHRISRVMMPSLTSTVWESQPVNWPTAMSPLRICLPPRCC

SEQ ID NO: 895685 - protein, 147 aa, Homo sapiens
MSPSRSVANSGLSDSLTTSTIPAEELTMSPSRSVANSGLSDSLTTSTPRPSNGDSPSHPYHRTFSPHFHHFVEQCLQRNPDARPSASTLLNHSFFKQIKRRASEALPELLRPVTPITNFEGSQSQDHSGIFGLVTNLEELEVDDWEF

SEQ ID NO: 895686 - protein, 373 aa, Homo sapiens; identical to SEQ ID NO: 895679

SEQ ID NO: 895687 - protein, 373 aa, Homo sapiens; identical to SEQ ID NO: 895679

SEQ ID NO: 895688 - protein, 204 aa, Homo sapiens
MSSFLPEGGCYELLTVIGKGFEDLMTVNLARYKPTGEYVTVRRINLEACSNEMVTFLQGELHVSKLFNHPNIVPYRATFIADNELWVVTSFMAYGSAKDLICTHFMDGMNELAIAYILQGVLKALDYIHHMGYVHRSVKASHILISVDGKVYLSGLRSNLSMISHGQRQRVVHDFPKYSVKVLPWLSPEVLQQGAFSKGHQCLA

SEQ ID NO: 895689 - protein, 176 aa, Homo sapiens
MSSFLPEGGCYELLTVIGKGFEDLMTVNLARYKPTGEYVTVRRINLEACSNEMVTFLQGELHVSKLFNHPNIVPYRATFIADNELWVVTSFMAYGSAKDLICTHFMDGMNELAIAYILQGVLKALDYIHHMGYVHRSVKASHILISVDGKVYLSGLRSNLRVLSPRAISVLPSLRA

SEQ ID NO: 895690 - protein, 233 aa, Homo sapiens
MSFLVSKPERIRTNDASSESIASFSKQEVMSSFLPEGGCYELLTVIGKGFEDLMTVNLARYKPTGEYVTVRRINLEACSNEMVTFLQGELHVSKLFNHPNIVPYRATFIADNELWVVTSFMAYGSAKDLICTHFMDGMNELAIAYILQGVLKALDYIHHMGYVHRSVKASHILISVDGKVYLSGLRSNLSMISHGQRQRVVHDFPKYSVKVLPWLSPEVLQQGAFSKGHQCLA

SEQ ID NO: 895691 - protein, 144 aa, Homo sapiens
MSSFLPEGGCYELLTVIGKGFEDLMTVNLARYKPTGEYVTVRRINLEACSNEMVTFLQGELHVSKLFNHPNIVPYRATFIADNELWVVTSFMAYGSAKDLICTHFMDGMNELAIAYILQGVLKALDYIHHMGYVHRCVLRRPFP

SEQ ID NO: 895692 - protein, 431 aa, Homo sapiens
MSFLVSKPERIRRWVSEKFIVEGLRDLELFGEQPPGDTRRKTNDASSESIASFSKQEVMSSFLPEGGCYELLTVIGKGFEDLMTVNLARYKPTGEYVTVRRINLEACSNEMVTFLQGELHVSKLFNHPNIVPYRATFIADNELWVVTSFMAYGSAKDLICTHFMDGMNELAIAYILQGVLKALDYIHHMGYVHRSVKASHILISVDGKVYLSGLRSNLSMISHGQRQRVVHDFPKYSVKVLPWLSPEVLQQNLQGYDAKSDIYSVGITACELANGHVPFKDMPATQMLLEKLNGTVPCLLDTSTIPAEELTMSPSRSVANSGLSDSLTTSTPRPSNGDSPSHPYHRTFSPHFHHFVEQCLQRNPDARPSASTLLNHSFFKQIKRRASEALPELLRPVTPITNFEGSQSQDHSGIFGLVTNLEELEVDDWEF

SEQ ID NO: 895693 - protein, 431 aa, Homo sapiens; identical to SEQ ID NO: 895692

SEQ ID NO: 895694 - protein, 325 aa, Homo sapiens [sequence omitted]

SEQ ID NO: 895695 - protein, 349 aa, Homo sapiens
MTVNLARYKPTGEYVTVRRINLEACSNEMVTFLQGELHVSKLFNHPNIVPYRATFIADNELWVVTSFMAYGSAKDLICTHFMDGMNELAIAYILQGVLKALDYIHHMGYVHRSVKASHILISVDGKVYLSGLRSNLSMISHGQRQRVVHDFPKYSVKVLPWLSPEVLQQNLQGYDAKSDIYSVGITACELANGHVPFKDMPATQMLLEKLNGTVPCLLDTSTIPAEELTMSPSRSVANSGLSDSLTTSTPRPSNGDSPSHPYHRTFSPHFHHFVEQCLQRNPDARPSASTLLNHSFFKQIKRRASEALPELLRPVTPITNFEGSQSQDHSGIFGLVTNLEELEVDDWEF

SEQ ID NO: 895696 - protein, 150 aa, Homo sapiens [sequence omitted]

SEQ ID NO: 895697 - protein, 443 aa, Homo sapiens
WRPGLSLQVTDGAGRPCPSPARCCRPPGVWSPAAARGLSVCRCCRLHPASAMDLFGDLPEPERSPRPAAGKEAQKGPLLFDDLPPASSTDSGSGGPLLFDDLPPASSGDSGSLATSISQMVKTEGKGAKRKTSEEEKNGSEELVEKKVCKASSVIFGLKGYVAERKGEREEMQDAHVILNDITEECRPPSSLITRVSYFAVFDGHGGIRASKFAAQNLHQNLIRKFPKGDVISVEKTVKRCLLDTFKHTDEEFLKQASSQKPAWKDGSTATCVLAVDNILYIANLGDSRAILCRYNEESQKHAALSLSKEHNPTQYEERMRIQKAGGNVRDGRVLGVLEVSRSIGDGQYKRCGVTSVPDIRRCQLTPNDRFILLACDGLFKVFTPEEAVNFILSCLEDEKIQTREGKSAADARYEAACNRLANKAVQRGSADNVTVMVVRIGH

SEQ ID NO: 895698 - protein, 443 aa, Homo sapiens; identical to SEQ ID NO: 895697

SEQ ID NO: 895699 - protein, 77 aa, Homo sapiens
WRPGLSLQVTDGAGRPCPSPARCCRPPGVWSPAVRSSLQQAGQQGGAAGLGRQRHCDGGADRALRGGARPGARMVLT

SEQ ID NO: 895700 - protein, 451 aa, Homo sapiens
WRPGLSLQVTDGAGRPCPSPARCCRPPGVWSPAAARGLSVCRCCRLHPASAMDLFGDLPEPERSPRPAAGKEAQKGPLLFDDLPPASSTDSGTVFRLLPGSGGPLLFDDLPPASSGDSGSLATSISQMVKTEGKGAKRKTSEEEKNGSEELVEKKVCKASSVIFGLKGYVAERKGEREEMQDAHVILNDITEECRPPSSLITRVSYFAVFDGHGGIRASKFAAQNLHQNLIRKFPKGDVISVEKTVKRCLLDTFKHTDEEFLKQASSQKPAWKDGSTATCVLAVDNILYIANLGDSRAILCRYNEESQKHAALSLSKEHNPTQYEERMRIQKAGGNVRDGRVLGVLEVSRSIGDGQYKRCGVTSVPDIRRCQLTPNDRFILLACDGLFKVFTPEEAVNFILSCLEDEKIQTREGKSAADARYEAACNRLANKAVQRGSADNVTVMVVRIGH

SEQ ID NO: 895701 - protein, 272 aa, Homo sapiens
MQDAHVILNDITEECRPPSSLITRVSYFAVFDGHGGIRASKFAAQNLHQNLIRKFPKGDVISVEKTVKRCLLDTFKHTDEEFLKQASSQKPAWKDGSTATCVLAVDNILYIANLGDSRAILCRYNEESQKHAALSLSKEHNPTQYEERMRIQKAGGNVRDGRVLGVLEVSRSIGDGQYKRCGVTSVPDIRRCQLTPNDRFILLACDGLFKVFTPEEAVNFILSCLEDEKIQTREGKSAADARYEAACNRLANKAVQRGSADNVTVMVVRIGH

SEQ ID NO: 895702 - protein, 443 aa, Homo sapiens; identical to SEQ ID NO: 895697

SEQ ID NO: 895703 - protein, 443 aa, Homo sapiens; identical to SEQ ID NO: 895697

SEQ ID NO: 895704 - protein, 532 aa, Homo sapiens
WRPGLSLQVTDGAGRPCPSPARCCRPPGVWSPAAARGLSVCRCCRLHPASAMDLFGDLPEPERSPRPAAGKEAQKGPLLFDDLPPASSTDSGSGGPLLFDDLPPASSGDSGSLATSISQMVKTEGKGAKRKTSEEEKNGSEELVEKKVCKASSVIFGLKGYVAERKGEREEMQDAHVILNDITEECRPPSSLITRVSYFAVFDGHGGIRASKFAAQNLHQNLIRKFPKGDVISVEKTVKRCLLDTFKHTDEEFLKQASSQKPAWKDGSTATCVLAVDNILYIANLGDSRAILCRYNEESQKHAALSLSKEHNPTQYEERMRIQKAGGNVRDGRVLGVLEVSRSIGDGQYKRCGVTSVPDIRRCQLTPNDRFILLACDGLFKVFTPEEAVNFILSCLEVRNLTRGWWCPNCVLVFREVEVLRPHFLPLWDSPCALFQCELCLLTHWSVCPASPDGDQSSSSSWQSCLRKVTGCGVTPFTHSLSHLVGDEKIQTREGKSAADARYEAACNRLANKAVQRGSADNVTVMVVRIGH

SEQ ID NO: 895705 - protein, 403 aa, Homo sapiens
WRPGLSLQVTDGAGRPCPSPARCCRPPGVWSPAAARGLSVCRCCRLHPASAMDLFGDLPEPERSPRPAAGKEAQKGPLLFDDLPPASSTDSGSGGPLLFDDLPPASSGDSGSLATSISQMVKTEGKGAKRKTSEEEKNGSEELVEKKVCKASSVIFGLKGYVAERKGEREEMQDAHVILNDITEECRPPSSLITRVSYFAVFDGHGGIRASKFAAQNLHQNLIRKFPKGDVISVEKTVKRCLLDTFKHTDEEFLKQASSQKPAWKDGSTATCVLAVDNILYIANLGDSRAILCRYNEESQKHAALSLSKEHNPTQYEERMRIQKAGGNVRFILLACDGLFKVFTPEEAVNFILSCLEDEKIQTREGKSAADARYEAACNRLANKAVQRGSADNVTVMVVRIGH

SEQ ID NO: 895706 - protein, 330 aa, Homo sapiens
WRPGLSLQVTDGAGRPCPSPARCCRPPGVWSPAAARGLSVCRCCRLHPASAMDLFGDLPEPERSPRPAAGKEAQKGPLLFDDLPPASSTDSGSGGPLLFDDLPPASSGDSGSLATSISQMVKTEGKGAKRKTSEEEKNGSEELVEKKVCKASSVIFGLKGYVAERKGEREEMQDAHVILNDITEECRPPSSLITRVSYFAVFDGHGGIRASKFAAQNLHQNLIRKFPKGDVISVEKTVKRCLLDTFKHTDEEFLKQASSQKPAWKDGSTATCVLAVDNILYIANLGDSRAILCRYNEESQKHAALSLSKEHNPTQYEERMRIQKAGGNVR

SEQ ID NO: 895707 - protein, 313 aa, Homo sapiens
WRPGLSLQVTDGAGRPCPSPARCCRPPGVWSPAAARGLSVCRCCRLHPASAMDLFGDLPEPERSPRPAAGKEAQKGPLLFDDLPPASSTDSGSGGPLLFDDLPPASSGDSGSLATSISQMVKTEGKGAKRKTSEEEKNGSEELVEKKVCKASSVIFGLKGYVAERKGEREEMQDAHVILNDITEECRPPSSLITRVSYFAVFDGHGGIRASKFAAQNLHQNLIRKFPKGDVISVEKTVKRCLLDTFKHTDEEFLKQASSQKPAWKDGSTATCVLAVDNILYIANLGDSRVCGSGATHLDDNTFYGEKTLARTC

SEQ ID NO: 895708 - protein, 329 aa, Homo sapiens
MAEAGTGEPSPSVEGEHGTEYDTLPSDTVSLSDSDSDLSLPGGAEVEALSPMGLPGEEDSGPDEPPSPPSGLLPATVQPFHLRGMSSTFSQRSRDIFDCLEGAARRAPSSVAHTSMSDNGGFKRPLAPSGRSPVEGLGRAHRSPASPRVPPVPDYVAHPERWTKYSLEDVTEVSEQSNQATALAFLGSQSLAAPTDCVSSFNQDPSSCGEGRVIFTKPVRGVEARHERKRVLGKVGEPGRGGLGNPATDRGEGPVELAHLAGPGSPEAEEWGSPHGGLQEVEALSGSVHSGSVPGLPPVETVGFHGSRKRSRDHFRNKSSSPEDPGAEV

SEQ ID NO: 895709 - protein, 329 aa, Homo sapiens; identical to SEQ ID NO: 895708

SEQ ID NO: 895710 - protein, 329 aa, Homo sapiens; identical to SEQ ID NO: 895708

SEQ ID NO: 895711 - protein, 329 aa, Homo sapiens; identical to SEQ ID NO: 895708

SEQ ID NO: 895712 - protein, 329 aa, Homo sapiens; identical to SEQ ID NO: 895708

SEQ ID NO: 895713 - protein, 329 aa, Homo sapiens; identical to SEQ ID NO: 895708

SEQ ID NO: 895714 - protein, 329 aa, Homo sapiens; identical to SEQ ID NO: 895708

SEQ ID NO: 895715 - protein, 79 aa, Homo sapiens
CFRAGPKGRGVEEERGERMRTGLHVPTGVGSGGPVPCGSCSSAGAEAVVLGRQSTRFPRGLSAPHGGAAPTKMETAEQP

SEQ ID NO: 895716 - protein, 265 aa, Homo sapiens
MAEAGTGLLPATVQPFHLRGMSSTFSQRSRDIFDCLEGAARRAPSSVAHTSMSDNGGFKRPLAPSGRSPVEGLGRAHRSPASPRVPPVPDYVAHPERWTKYSLEDVTEVSEQSNQATALAFLGSQSLAAPTDCVSSFNQDPSSCGEGRVIFTKPVRGVEARHERKRVLGKVGEPGRGGLGNPATDRGEGPVELAHLAGPGSPEAEEWGSPHGGLQEVEALSGSVHSGSVPGLPPVETVGFHGSRKRSRDHFRNKSSSPEDPGAEV

SEQ ID NO: 895717 - protein, 102 aa, Homo sapiens [sequence omitted]

SEQ ID NO: 895718 - protein, 102 aa, Homo sapiens [sequence omitted]

SEQ ID NO: 895719 - protein, 102 aa, Homo sapiens [sequence omitted]

SEQ ID NO: 895720 - protein, 56 aa, Homo sapiens
MAEAGTGEPSPSVEGEHGTEYDTLPSDTVSLSDSDSDLSLPGGAEVEALSPMGLPG

SEQ ID NO: 895721 - protein, 86 aa, Homo sapiens
PKPGSCLTQCIHCSPRGKLCANRLLKELGQIESREIAWHNKEPVYSLDFQHGTAGRIHRLASAGVDTNVRVNWGRDRHPGTLLEAI

SEQ ID NO: 895722 - protein, 559 aa, Homo sapiens
MKVITCEIAWHNKEPVYSLDFQHGTAGRIHRLASAGVDTNVRIWKVEKGPDGKAIVEFLSNLARHTKAVNVVRFSPTGEILASGGDDAVILLWKVNDNKEPEQIAFQDEDEAQLNKENWTVVKTLRGHLEDVYDICWATDGNLMASASVDNTAIIWDVSKGQKISIFNEHKSYVQGVTWDPLGQYVATLSCDRVLRVYSIQKKRVAFNVSKMLSGIGAEGEARSYRMFHDDSMKSFFRRLSFTPDGSLLLTPAGCVESGENVMNTTYVFSRKNLKRPIAHLPCPGKATLAVRCCPVYFELRPVVETGVELMSLPYRLVFAVASEDSVLLYDTQQSFPFGYVSNIHYHTLSDISWSSDGAFLAISSTDGYCSFVTFEKDELGIPLKEKPVLNMRTPDTAKKTKSQTHRGSSPGPRPVEGTPASRTQDPSSPGTTPPQARQAPAPTVIRDPPSITPAVKSPLPGPSEEKTLQPSSQNTKAHPSRRVTLNTLQAWSKTTPRRINLTPLKTDTPPSSVPTSVISTPSTEEIQSETPGDAQGSPPELKRPRLDENKGGTESLDP

SEQ ID NO: 895723 - protein, 559 aa, Homo sapiens; identical to SEQ ID NO: 895722

SEQ ID NO: 895724 - protein, 559 aa, Homo sapiens; identical to SEQ ID NO: 895722

SEQ ID NO: 895725 - protein, 348 aa, Homo sapiens [sequence omitted]

SEQ ID NO: 895726 - protein, 332 aa, Homo sapiens
MKVITCEIAWHNKEPVYSLDFQHGTAGRIHRLASAGVDTNVRIWKVEKGPDGKAIVEFLSNLARHTKAVNVVRFSPTGEILASGGDDAVILLWKVNDNKEPEQIAFQDEDEAQLNKENWTVVKTLRGHLEDVYDICWATDGNLMASASVDNTAIIWDVSKGQKISIFNEHKSYVQGVTWDPLGQYVATLSCDRVLRVYSIQKKRVAFNVSKMLSGIGAEGEARSYRMFHDDSMKSFFRRLSFTPDGSLLLTPGVELMSLPYRLVFAVASEDSVLLYDTQQSFPFGYVSNIHYHTLSDISCCIFSLVFAFKQACDFCSNFPLLSRCESVGKVC

SEQ ID NO: 895727 - protein, 280 aa, Homo sapiens
MKVITCEIAWHNKEPVYSLDFQHGTAGRIHRLASAGVDTNVRIWKVEKGPDGKAIVEFLSNLARHTKAVNVVRFSPTGEILASGGDDAVILLWKVNDNKEPEQIAFQDEDEAQLNKENWTVVKTLRGHLEDVYDICWATDGNLMASASVDNTAIIWDVSKGQKISIFNEHKSYVQGVTWDPLGQYVATLSCDRHSLTLSPRQVLWRNLTISAHCNLCLLVSSDSPVSASLLAGITGTCHHARLIFVFLVETGFHHVGQAVLKLLTSNDLPALANVLGLQA

SEQ ID NO: 895728 - protein, 510 aa, Homo sapiens
AGGGVLAMAGLSDLELRRELQALGFQPGPITDTTRDVYRNKLRRLRGEARLRDEERLREEARPRGEERLREEARLREDAPLRARPAAASPRAEPWLSQPASGSAYATPGAYGDIRPSAASWVGSRGLAYPARPAQLRRRASVRGSSEEDEDARTPDRATQGPGLAARRWWAASPAPARLPSSLLGPDPRPGLRATRAGPAGAARARPEVGRRLERWLSRLLLWASLGLLLVFLGILWVKMGKPSAPQEAEDNMKLLPVDCERKTDEFCQAKQKAALLELLHELYNFLAIQAGNFECGNPENLKSKCIPVMEAQEYIANVTSSSSAKFEAALTWILSSNKDVGIWLKGEDQSELVTTVDKVVCLESAHPRMGVGCRLSRALLTAVTNVLIFFWCLAFLWGLLILLKYRWRKLEEEEQAMYEMVKKIIDVVQDHYVDWEQDMERYPYVGILHVRDSLIPPQSRRRMKRVWDRAVEFLASNESRIQTESHRVAGEDMLVWRWTKPSSFSDSER

SEQ ID NO: 895729 - protein, 379 aa, Homo sapiens
AGGGVLAMAGLSDLELRRELQALGFQPGPITDTTRDVYRNKLRRLRGEARLRDEERLREEARPRGEERLREEARLREDAPLRARPAAASPRAEPWLSQPASGSAYATPGAYGDIRPSAASWVKLLPVDCERKTDEFCQAKQKAALLELLHELYNFLAIQAGNFECGNPENLKSKCIPVMEAQEYIANVTSSSSAKFEAALTWILSSNKDVGIWLKGEDQSELVTTVDKVVCLESAHPRMGVGCRLSRALLTAVTNVLIFFWCLAFLWGLLILLKYRWRKLEEEEQAMYEMVKKIIDVVQDHYVDWEQDMERYPYVGILHVRDSLIPPQSRRRMKRVWDRAVEFLASNESRIQTESHRVAGEDMLVWRWTKPSSFSDSER

SEQ ID NO: 895730 - protein, 471 aa, Homo sapiens
AGGGVLAMAGLSDLELRRELQALGFQPGPITDTTRDVYRNKLRRLRGEARLRDEERLREEARPRGEERLREEARLREDAPLRARPAAASPRAEPWLSQPASGSAYATPGAYGDIRPSAASWVGSRGLAYPARPAQLRRRASVRGSSEEDEDARTPDRATQGPGLAARRWWAASPAPARLPSSLLGPDPRPGLRATRAGPAGAARARPEVGRRLERWLSRLLLWASLGLLLVFLGILWVKMGKPSAPQEAEDNSNFECGNPENLKSKCIPVMEAQEYIANVTSSSSAKFEAALTWILSSNKDVGIWLKGEDQSELVTTVDKVVCLESAHPRMGVGCRLSRALLTAVTNVLIFFWCLAFLWGLLILLKYRWRKLEEEEQAMYEMVKKIIDVVQDHYVDWEQDMERYPYVGILHVRDSLIPPQSRRRMKRVWDRAVEFLASNESRIQTESHRVAGEDMLVWRWTKPSSFSDSER

SEQ ID NO: 895731 - protein, 201 aa, Homo sapiens
MEAQEYIANVTSSSSAKFEAALTWILSSNKDVGIWLKGEDQSELVTTVDKVVCLESAHPRMGVGCRLSRALLTAVTNVLIFFWCLAFLWGLLILLKYRWRKLEEEEQAMYEMVKKIIDVVQDHYVDWEQDMERYPYVGILHVRDSLIPPQSRRRMKRVWDRAVEFLASNESRIQTESHRVAGEDMLVWRWTKPSSFSDSER

SEQ ID NO: 895732 - protein, 510 aa, Homo sapiens; identical to SEQ ID NO: 895728

SEQ ID NO: 895733 - protein, 358 aa, Homo sapiens
AGGGVLAMAGLSDLELRRELQALGFQPGPITDTTRDVYRNKLRRLRGEARLRDEERLREEARPRGEERLREEARLREDAPLRARPAAASPRAEPWLSQPASGSAYATPGAYGDIRPSAASWVGSRGLAYPARPAQLRRRASVRGSSEEDEDARTPDRATQGPGLAARRWWAASPAPARLPSSLLGPDPRPGLRATRAGPAGAARARPEVGRRLERWLSRLLLWASLGLLLVFLGILWVKMGKPSAPQEAEDNMKLLPVDCERKTDEFCQAKQKAALLELLHELYNFLAIQAGNFECGNPENLKSKCIPVMEAQEYIALLSARSLSSESSPCVLICGRQERGSKQEIPQLPPETLTTPL

SEQ ID NO: 895734 - protein, 510 aa, Homo sapiens; identical to SEQ ID NO: 895728

SEQ ID NO: 895735 - protein, 448 aa, Homo sapiens
MKGFIDDANYSVGLLDEGTNLGNVIDNYVYEHTLTGKNAFFVGDLGKIVKKHSQWQNVVAQIKPFYTVKCNSAPAVLEILAALGTGFACSSKNEMALVQELGVPPENIIYISPCKQVSQIKYAAKVGVNILTCDNEIELKKIARNHPNAKVLLHIATEDNIGGEEGNMKFGTTLKNCRHLLECAKELDVQIIGVKFHVSSACKESQVYVHALSDARCVFDMAGEIGFTMNMLDIGGGFTGTEFQLEEVNHVISPLLDIYFPEGSGVKIISEPGSYYVSSAFTLAVNIIAKKVVENDKFPSGVEKTGSDEPAFMYYMNDGVYGSFASKLSEDLNTIPEVHKKYKEDEPLFTSSLWGPSCDELDQIVESCLLPELNVGDWLIFDNMGADSFHEPSAFNDFQRPAIYYMMSFSDWYEMQDAGITSDSMMKNFFFVPSCIQLSQEDSFSAEA

SEQ ID NO: 895736 - protein, 120 aa, Homo sapiens
LSGSDRGRSFSFFLLPSPSLPLLILSRSAALQCDESESSSHPARAFLLLPALLLNGGTVGGGGAAAEEWGAASRDDVGAEPESATQAGEDEDEEEDDEEEEDESSSSDGGEEESSAESLV

SEQ ID NO: 895737 - protein, 448 aa, Homo sapiens; identical to SEQ ID NO: 895735

SEQ ID NO: 895738 - protein, 448 aa, Homo sapiens; identical to SEQ ID NO: 895735

SEQ ID NO: 895739 - protein, 448 aa, Homo sapiens; identical to SEQ ID NO: 895735

SEQ ID NO: 895740 - protein, 448 aa, Homo sapiens; identical to SEQ ID NO: 895735

SEQ ID NO: 895741 - protein, 448 aa, Homo sapiens; identical to SEQ ID NO: 895735

SEQ ID NO: 895742 - protein, 448 aa, Homo sapiens; identical to SEQ ID NO: 895735

SEQ ID NO: 895743 - protein, 448 aa, Homo sapiens; identical to SEQ ID NO: 895735

SEQ ID NO: 895744 - protein, 448 aa, Homo sapiens; identical to SEQ ID NO: 895735

SEQ ID NO: 895745 - protein, 448 aa, Homo sapiens; identical to SEQ ID NO: 895735

SEQ ID NO: 895746 - protein, 391 aa, Homo sapiens
LSGSDRGRSFSFFLLPSPSLPLLILSRSAALQCDESESSSHPARAFLLLPALFYFSFGRRRHCCTQLVSVPRFYPQVVPAAYGPGRLGYFCSRVLLHIATEDNIGGEEGNMKFGTTLKNCRHLLECAKELDVQIIGVKFHVSSACKESQVYVHALSDARCVFDMAGEIGFTMNMLDIGGGFTGTEFQLEEVNHVISPLLDIYFPEGSGVKIISEPGSYYVSSAFTLAVNIIAKKVVENDKFPSGVEKTGSDEPAFMYYMNDGVYGSFASKLSEDLNTIPEVHKKYKEDEPLFTSSLWGPSCDELDQIVESCLLPELNVGDWLIFDNMGADSFHEPSAFNDFQRPAIYYMMSFSDWYEMQDAGITSDSMMKNFFFVPSCIQLSQEDSFSAEA

SEQ ID NO: 895747 - protein, 354 aa, Homo sapiens
MALVQELGVPPENIIYISPCKQVSQIKYAAKVGVNILTCDNEIELKKIARNHPNAKVLLHIATEDNIGGEEGNMKFGTTLKNCRHLLECAKELDVQIIGVKFHVSSACKESQVYVHALSDARCVFDMAGEIGFTMNMLDIGGGFTGTEFQLEEVNHVISPLLDIYFPEGSGVKIISEPGSYYVSSAFTLAVNIIAKKVVENDKFPSGVEKTGSDEPAFMYYMNDGVYGSFASKLSEDLNTIPEVHKKYKEDEPLFTSSLWGPSCDELDQIVESCLLPELNVGDWLIFDNMGADSFHEPSAFNDFQRPAIYYMMSFSDWYEMQDAGITSDSMMKNFFFVPSCIQLSQEDSFSAEA

SEQ ID NO: 895748 - protein, 448 aa, Homo sapiens; identical to SEQ ID NO: 895735

SEQ ID NO: 895749 - protein, 448 aa, Homo sapiens; identical to SEQ ID NO: 895735

SEQ ID NO: 895750 - protein, 281 aa, Homo sapiens
MKFGTTLKNCRHLLECAKELDVQIIGVKFHVSSACKESQVYVHALSDARCVFDMAGEIGFTMNMLDIGGGFTGTEFQLEEVNHVISPLLDIYFPEGSGVKIISEPGSYYVSSAFTLAVNIIAKKVVENDKFPSGVEKTGSDEPAFMYYMNDGVYGSFASKLSEDLNTIPEVHKKYKEDEPLFTSSLWGPSCDELDQIVESCLLPELNVGDWLIFDNMGADSFHEPSAFNDFQRPAIYYMMSFSDWYEMQDAGITSDSMMKNFFFVPSCIQLSQEDSFSAEA

SEQ ID NO: 895751 - protein, 356 aa, Homo sapiens
MKGFIDDANYSVGLLDEGTNLGNVIDNYVYEHTLTGKNAFFVGDLGKIVKKHSQWQNVVAQIKPFYTVKCNSAPAVLEILAALGTGFACSSKNEMALVQELGVPPENIIYISPCKQVSQIKYAAKVGVNILTCDNEIELKKIARNHPNAKVLLHIATEDNIGGEEGNMKFGTTLKNCRHLLECAKELDVQIIGVKFHVSSACKESQVYVHALSDARCVFDMAGEIGFTMNMLDIGGGFTGTEFQLEEVNHVISPLLDIYFPEGSGVKIISEPGSYYVSSAFTLAVNIIAKKVVENDKFPSGVEKTGSDEPAFMYYMNDGVYGSFASKLSEDLNTIPEVHKKYKEDEPLFTSSSAEA

SEQ ID NO: 895752 - protein, 364 aa, Homo sapiens
MKGFIDDANYSVGLLDEGTNLGNVIDNYVYEHTLTGKNAFFVGDLGKIVKKHSQWQNVVAQIKPFYTVKCNSAPAVLEILAALGTGFACSSKNEMALVQELGVPPENIIYISPCKQVSQIKYAAKVGVNILTCDNEIELKKIARNHPNAKVLLHIATEDNIGGEEGNMKFGTTLKNCRHLLECAKELDVQIIGVKFHVSSACKESQVYVHALSDARCVFDMAGEIGFTMNMLDIGGGFTGTEFQLEEVNHVISPLLDIYFPEGSGVKIISEPGSYYVSSAFTLAVNIIAKKVVENDKFPSGVEKTGSDEPAFMYYMNDGVYGSFASKLSEDLNTIPEVHKKYKEDEPLFTSSLWGPSCDESAEA

SEQ ID NO: 895753 - protein, 448 aa, Homo sapiens; identical to SEQ ID NO: 895735

SEQ ID NO: 895754 - protein, 448 aa, Homo sapiens; identical to SEQ ID NO: 895735

SEQ ID NO: 895755 - protein, 239 aa, Homo sapiens
LSGSDRGRSFSFFLLPSPSLPLLILSRSAALQCDESESSSHPARAFLLLPALFYFSFGRRRHCCTQLVSVPRFYPQVVPAAYGPGRLGYFCSRVLLHIATEDNIGGEEGNMKFGTTLKNCRHLLECAKELDVQIIGVKFHVSSACKESQVYVHALSDARCVFDMAGEIGFTMNMLDIGGGFTGTEFQLEEVNHVISPLLDIYFPEGSGVKIISEPGSYYVSSAFTLAVNIIAKKVVENG

SEQ ID NO: 895756 - protein, 448 aa, Homo sapiens; identical to SEQ ID NO: 895735

SEQ ID NO: 895757 - protein, 356 aa, Homo sapiens; identical to SEQ ID NO: 895751

SEQ ID NO: 895758 - protein, 135 aa, Homo sapiens
HFFPFFEILYPPPKRNFGPLGQKFRPKGPLDFSKVYYGVLCKIPSYHVTFFNHLTRRGNCFLPSLHVVHCCGPEMPNLFKDGATLSPWLDYTGLELHGISTLPYLQESCSIRNSSELQISHVNDTVTFKKCLYCI

SEQ ID NO: 895759 - protein, 296 aa, Homo sapiens
MKGFIDDANYSVGLLDEGTNLGNVIDNYVYEHTLTGKNAFFVGDLGKIVKKHSQWQNVVAQIKPFYTVKCNSAPAVLEILAALGTGFACSSKNEMALVQELGVPPENIIYISPCKQVSQIKYAAKVGVNILTCDNEIELKKIARNHPNAKVLLHIATEDNIGGEEGNMKFGTTLKNCRHLLECAKELDVQIIGVKFHVSSACKESQVYVHALSDARCVFDMAGEIGFTMNMLDIGGGFTGTEFQLEEVNHVISPLLDIYFPEGSGVKIISEPGSYYVSSAFTLAVNIIAKKVVENG

SEQ ID NO: 895760 - protein, 199 aa, Homo sapiens
SVALSSCLLGKMASRKEGTGSTATSSSSTAGAAGKGKGKGGSGDSAVKQVQIDGLVVLKIIKHYQEEGQGTEVVQGVLLGLVVEDRLEITNCFPFPQHTEDDADFDEVQYQMEMMRSLRHVNIDHLHVGWYQSTYYGSFVTRALLDSQFSYQHAIEESVVLIYDPIKTAQGSLSLKAYRLTPKLMEVCTHEHRIFPLKH

SEQ ID NO: 895761 - protein, 98 aa, Homo sapiens
RSNKNWHTSIDHILIHACCQTCISSVASRRICSARAEENPPLPEEDLSKLFKPPQPPARMDSLLIAGQINTYCQNIKEFTAQNLGKLFMAQALQEYNN

SEQ ID NO: 895762 - protein, 93 aa, Homo sapiens
DASQRHEQRRLILQISGISSVASRRICSARAEENPPLPEEDLSKLFKPPQPPARMDSLLIAGQINTYCQNIKEFTAQNLGKLFMAQALQEYNN

SEQ ID NO: 895763 - protein, 97 aa, Homo sapiens
HNIKTLFNHRPPIDKLDFMYNISSVASRRICSARAEENPPLPEEDLSKLFKPPQPPARMDSLLIAGQINTYCQNIKEFTAQNLGKLFMAQALQEYNN

SEQ ID NO: 895764 - protein, 82 aa, Homo sapiens
GERVRVIVTGAAPMSTSVMTFFRAAMGCQVYEAFFKPPQPPARMDSLLIAGQINTYCQNIKEFTAQNLGKLFMAQALQEYNN

SEQ ID NO: 895765 - protein, 95 aa, Homo sapiens
PVYRGNSQPNRIGQPRKCCISSVASRRICSARAEENPPLPEEDLSKLFKPPQPPARMDSLLIAGQINTYCQNIKEFTAQNLGKLFMAQALQEYNN

SEQ ID NO: 895766 - protein, 199 aa, Homo sapiens; identical to SEQ ID NO: 895760

SEQ ID NO: 895767 - protein, 199 aa, Homo sapiens; identical to SEQ ID NO: 895760

SEQ ID NO: 895768 - protein, 199 aa, Homo sapiens; identical to SEQ ID NO: 895760

SEQ ID NO: 895769 - protein, 222 aa, Homo sapiens
  misc_feature (4)..(5): Xaa can be any naturally occurring amino acid
ERLXXDQEKSQGVYYIPNRPVLTSSTSWCESTKKMASRKEGTGSTATSSSSTAGAAGKGKGKGGSGDSAVKQVQIDGLVVLKIIKHYQEEGQGTEVVQGVLLGLVVEDRLEITNCFPFPQHTEDDADFDEVQYQMEMMRSLRHVNIDHLHVGWYQSTYYGSFVTRALLDSQFSYQHAIEESVVLIYDPIKTAQGSLSLKAYRLTPKLMEVCTHEHRIFPLKH

SEQ ID NO: 895770 - protein, 199 aa, Homo sapiens; identical to SEQ ID NO: 895760

SEQ ID NO: 895771 - protein, 199 aa, Homo sapiens; identical to SEQ ID NO: 895760

SEQ ID NO: 895772 - protein, 199 aa, Homo sapiens; identical to SEQ ID NO: 895760

SEQ ID NO: 895773 - protein, 199 aa, Homo sapiens; identical to SEQ ID NO: 895760

SEQ ID NO: 895774 - protein, 199 aa, Homo sapiens; identical to SEQ ID NO: 895760

SEQ ID NO: 895775 - protein, 199 aa, Homo sapiens; identical to SEQ ID NO: 895760

SEQ ID NO: 895776 - protein, 199 aa, Homo sapiens; identical to SEQ ID NO: 895760

SEQ ID NO: 895777 - protein, 199 aa, Homo sapiens; identical to SEQ ID NO: 895760

SEQ ID NO: 895778 - protein, 199 aa, Homo sapiens; identical to SEQ ID NO: 895760

SEQ ID NO: 895779 - protein, 181 aa, Homo sapiens
MSPASSASQPASVTGDNVMGPTREISAGDTQVQIDGLVVLKIIKHYQEEGQGTEVVQGVLLGLVVEDRLEITNCFPFPQHTEDDADFDEVQYQMEMMRSLRHVNIDHLHVGWYQSTYYGSFVTRALLDSQFSYQHAIEESVVLIYDPIKTAQGSLSLKAYRLTPKLMEVCTHEHRIFPLKH

SEQ ID NO: 895780 - protein, 238 aa, Homo sapiens
  misc_feature (4)..(5): Xaa can be any naturally occurring amino acid
ERLXXDQEKSQGVYYIPNRPVLTSSTSWCESTKKMASRKEGTGSTATSSSSTAGAAGKGKGKGGSGDSAVKQVQIDGLFSGQVSSQKPFLDPPKVVLKIIKHYQEEGQGTEVVQGVLLGLVVEDRLEITNCFPFPQHTEDDADFDEVQYQMEMMRSLRHVNIDHLHVGWYQSTYYGSFVTRALLDSQFSYQHAIEESVVLIYDPIKTAQGSLSLKAYRLTPKLMEVCTHEHRIFPLKH

SEQ ID NO: 895781 - protein, 146 aa, Homo sapiens
RCSFFLSAWKDGVPQGRYRLYCHLFQLHRRRSRERQRQRRLGRFSREASADRWPFQYQMEMMRSLRHVNIDHLHVGWYQSTYYGSFVTRALLDSQFSYQHAIEESVVLIYDPIKTAQGSLSLKAYRLTPKLMEVCTHEHRIFPLKH

SEQ ID NO: 895782 - protein, 199 aa, Homo sapiens; identical to SEQ ID NO: 895760

SEQ ID NO: 895783 - protein, 199 aa, Homo sapiens; identical to SEQ ID NO: 895760

SEQ ID NO: 895784 - protein, 132 aa, Homo sapiens
SVALSSCLLGKMASRKEGTGSTATSSSSTAGAAGKGKGKGGSGDSAVKQVQIDGLVVLKIIKHYQEEGQGTEVVQGVLLGLVVEDRLEITNCFPFPQHTEDDADFDEAIIWGERIYTFADGTEWTEMSPRYS

SEQ ID NO: 895785 - protein, 154 aa, Homo sapiens
SVALSSCLLGKMASRKEGTGSTATSSSSTAGAAGKGKGKGGSGDSAVKQVQIDGLVVLKIIKHYQEEGQGTEVVQGVLLGLVVEDRLEITNCFPFPQHTEDDADFDEVQYQMEMMRSLRHVNIDHLHVGWYQSTYYGSFVTRALLDSQSQSVCL

SEQ ID NO: 895786 - protein, 70 aa, Homo sapiens
GVFEVPRMKCLWMQVSLDAKCLWMQSVTAACQVDSLLMRQINTYCQNIKEFTAQNLGKLFMAQALQEYNN

SEQ ID NO: 895787 - protein, 178 aa, Homo sapiens
GVDQISDACTHGVRAGQGALRGGAVQGAAGAAGHVVLKIIKHYQEEGQGTEVVQGVLLGLVVEDRLEITNCFPFPQHTEDDADFDEVQYQMEMMRSLRHVNIDHLHVGWYQSTYYGSFVTRALLDSQFSYQHAIEESVVLIYDPIKTAQGSLSLKAYRLTPKLMEVCTHEHRIFPLKH

SEQ ID NO: 895788 - protein, 199 aa, Homo sapiens; identical to SEQ ID NO: 895760

SEQ ID NO: 895789 - protein, 199 aa, Homo sapiens; identical to SEQ ID NO: 895760

SEQ ID NO: 895790 - protein, 146 aa, Homo sapiens; identical to SEQ ID NO: 895781

SEQ ID NO: 895791 - protein, 483 aa, Homo sapiens
MEEGGGGVRSLVPGGPVLLVLCGLLEASGGGRALPQLSDDIPFRVNWPGTEFSLPTTGVLYKEDNYVIMTTAHKEKYKCILPLVTSGDEEEEKDYKGPNPRELLEPLFKQSSCSYRIESYWTYEVCHGKHIRQYHEEKETGQKINIHEYYLGNMLAKNLLFEKEREAEEKEKSNEIPTKNIEGQMTPYYPVGMGNGTPCSLKQNRPRSSTVMYICHPESKHEILSVAEVTTCEYEVVILTPLLCSHPKYRFRASPVNDIFCQSLPGSPFKPLTLRQLEQQEEILRVPFRRNKEEDLQSTKEERFPAIHKSIAIGSQPVLTVGTTHISKLTDDQLIKEFLSGSYCFRGGVGWWKYEFCYGKHVHQYHEDKDSGKTSVVVGTWNQEEHIEWAKKNTARAYHLQDDGTQTVRMVSHFYGNGDICDITDKPRQVTVKLKCKESDSPHAVTVYMLEPHSCQYILGVESPVICKILDTADENGLLSLPN

SEQ ID NO: 895792 - protein, 197 aa, Homo sapiens
MEEGGGGVRSLVPGGPVLLVLCGLLEASGGGRALPQLSDDIPFRVNWPGTEFSLPTTGVLYKEDNYVIMTTAHKEKYKCILPLVTSGDEEEEKDYKGPNPRELLEPLFKQSSCSYRIESYWTYEVCHGKHIRQYHEEKETGQKINIHEYYLGNMLAKNLLFEKEREAEEKEKSNEIPLLYLEPNGPDQFLEDLCILN

SEQ ID NO: 895793 - protein, 483 aa, Homo sapiens; identical to SEQ ID NO: 895791

SEQ ID NO: 895794 - protein, 415 aa, Homo sapiens [sequence omitted]

SEQ ID NO: 895795 - protein, 464 aa, Homo sapiens
MEEGGGGVRSLVPGGPVLLVLCGLLEASGGGRALPQLSDDIPFRVNWPGTEFSLPTTGVLYKEDNYVIMTTAHKEKYKCILPLVTSGDEKQSSCSYRIESYWTYEVCHGKHIRQYHEEKETGQKINIHEYYLGNMLAKNLLFEKEREAEEKEKSNEIPTKNIEGQMTPYYPVGMGNGTPCSLKQNRPRSSTVMYICHPESKHEILSVAEVTTCEYEVVILTPLLCSHPKYRFRASPVNDIFCQSLPGSPFKPLTLRQLEQQEEILRVPFRRNKEEDLQSTKEERFPAIHKSIAIGSQPVLTVGTTHISKLTDDQLIKEFLSGSYCFRGGVGWWKYEFCYGKHVHQYHEDKDSGKTSVVVGTWNQEEHIEWAKKNTARAYHLQDDGTQTVRMVSHFYGNGDICDITDKPRQVTVKLKCKESDSPHAVTVYMLEPHSCQYILGVESPVICKILDTADENGLLSLPN

SEQ ID NO: 895796 - protein, 429 aa, Homo sapiens
MEEGGGGVRSLVPGGPVLLVLCGLLEASGGGRALPQLSDDIPFRVNWPGTEFSLPTTGVLYKEDNYVIMTTAHKEKYKCILPLVTSGDEEEEKDYKGPNPRELLEPLFKQSSCSYRIESYWTYEVCHGKHIRQYHEEKETGQKINIHEYYLGNMLAKNLLFEKEREAEEKEKSNEIPTKNIEGQMTPYYPVGMGNGTPCSLKQNRPRSSTVMYICHPESKHEILSVAEVTTCEYEVVILTPLLCSHPKYRFRASPVNDIFCQSLPGSPFKPLTLRQLEQQEEILRVPFRRNKEGVGWWKYEFCYGKHVHQYHEDKDSGKTSVVVGTWNQEEHIEWAKKNTARAYHLQDDGTQTVRMVSHFYGNGDICDITDKPRQVTVKLKCKESDSPHAVTVYMLEPHSCQYILGVESPVICKILDTADENGLLSLPN

SEQ ID NO: 895797 - protein, 180 aa, Homo sapiens
MEEGGGGVRSLVPGGPVLLVLCGLLEASGGGRALPQLSDDIPFRVNWPGTEFSLPTTGVLYKEDNYVIMTTAHKEKYKCILPLVTSGDEEEEKDYKGPNPRELLEPLFKQSSCSYRIESYWTYEVCHGKHIRQYHEEKETGQKINIHEYYLGNMLAKNLLFEKEREAEEKEKSNEVHLVV

SEQ ID NO: 895798 - protein, 457 aa, Homo sapiens
MEEGGGGVRSLVPGGPVLLVLCGLLEASGGGRALPQLSDDIPFRVNWPGTEFSLPTTGVLYKEDNYVIMTTAHKEKYKCILPLVTSGDEEEEKDYKGPNPRELLEPLFKQSSCSYRIESYWTYEVCHGKHIRQYHEEKETGQKINIHEYYLGNMLAKNLLFEKEREAEEKEKSNEIPTKNIEGQMTPYYPVGMGNGTPCSLKQNRPRSSTVMYICHPESKHEILSVAEVTTCEYEVVILTPLLCSHPKYRFRASPVNDIFCQSLPGSPFKPLTLRQLEQQEEILRVPFRRNKEEDLQSTKEERFPAIHKSIAIGSQPVLTVGTTHISKLTDDQLIKEFLSGSYCFRGGVGWWKYEFCYGKHVHQYHEDKDSGKTSVVVGTWNQEEHIEWAKKNTARAYHLQDDGTQTVRCKESDSPHAVTVYMLEPHSCQYILGVESPVICKILDTADENGLLSLPN

SEQ ID NO: 895799 - protein, 435 aa, Homo sapiens
MEEGGGGVRSLVPGGPVLLVLCGLLEASGGGRALPQLSDDIPFRVNWPGTEFSLPTTGVLYKEDNYVIMTTAHKEKYKCILPLVTSGDEEEEKDYKGPNPRELLEPLFKQSSCSYRIESYWTYEVCHGKHIRQYHEEKETGQKINIHEYYLGNMLAKNLLFEKEREAEEKEKSNEIPTKNIEGQMTPYYPVGMGNGTPCSLKQNRPRSSTVMYICHPESKHEILSVAEVTTCEYEVVILTPLLCSHPKYRFRASPVNDIFCQSLPGSPFKPLTLRQLEQQEEILRVPFRRNKEEDLQSTKEERFPAIHKSIAIGSQPVLTVGTTHISKLTDDQLIKEFLSGSYCFRGGVGWWKYEFCYGKHVHQYHEDKDSGKTSVVVGTWNQEEHIEWAKKNTARAYHLQDDGTQTVRMVSHFYGNGDICDITDKPRQVTVKLK

SEQ ID NO: 895800 - protein, 368 aa, Homo sapiens [sequence omitted]

SEQ ID NO: 895801 - protein, 359 aa, Homo sapiens
MPNPSSTSSPYPLPEEIRNLLADVETFVADILKGENLSKKAKEKRESLIKKIKDVKSIYLQEFQDKGDAEDGEEYDDPFAGPPDTISLASERYDKDDEAPSDGAQFPPIAAQDLPFVLKAGYLEKRRKDHSFLGFEWQKRWCALSKTVFYYYGSDKDKQQKGEFAIDGYSVRMNNTLRKDGKKDCCFEISAPDKRIYQFTAASPKDAEEWVQQLKFVLQDMESDIIPEDYDERGELYDDVDHPLPISNPLTSSQPIDDEIYEELPEEEEDSAPVKVEEQRKMSQDSVHHTSGDKSTDYANFYQGLWDCTGAFSDELSFKRGDVIYILSKEYNRYGWWVGEMKGAIGLVPKAYIMEMYDI

SEQ ID NO: 895802 - protein, 305 aa, Homo sapiens
MPNPSSTSSPYPLPEEIRNLLADVETFVADILKGENLSKKAKEKRESLIKKIKDVKSIYLQEFQDKGDAEDGEEYDDPFAGPPDTISLASERYDKDDEAPSDDKQQKGEFAIDGYSVRMNNTLRKDGKKDCCFEISAPDKRIYQFTAASPKDAEEWVQQLKFVLQDMESDIIPEDYDERGELYDDVDHPLPISNPLTSSQPIDDEIYEELPEEEEDSAPVKVEEQRKMSQDSVHHTSGDKSTDYANFYQGLWDCTGAFSDELSFKRGDVIYILSKEYNRYGWWVGEMKGAIGLVPKAYIMEMYDI

SEQ ID NO: 895803 - protein, 359 aa, Homo sapiens; identical to SEQ ID NO: 895801

SEQ ID NO: 895804 - protein, 252 aa, Homo sapiens
MRRSTPGVLPAAVGGARVRRAVGLSGTGAEAGRAGAMVEKEEAGGGISEEEAAQYDRQIRLWGLEAQKRLRASRVLLVGLKGLGAEIAKNLILAGVKGLTMLDHEQVTPEDPGAQFLIRTGSVGRNRAEASLERAQNLNPMVDVKVDTEDIEKKPESFFTQFDAVCLTCCSRDVIVKVDQICHKNSIKFFTGDVFGYHGYTFANLGEHEFVEEKTKVAKVSQGVEDGPDTKRAKLDSSETTMVKKKVVFCPG

SEQ ID NO: 895805 - protein, 188 aa, Homo sapiens
MFFRKLRASRVLLVGLKGLGAEIAKNLILAGVKGLTMLDHEQVTPEDPGAQFLIRTGSVGRNRAEASLERAQNLNPMVDVKVDTEDIEKKPESFFTQFDAVCLTCCSRDVIVKVDQICHKNSIKFFTGDVFGYHGYTFANLGEHEFVEEKTKVAKVSQGVEDGPDTKRAKLDSSETTMVKKKVVFCPG

SEQ ID NO: 895806 - protein, 216 aa, Homo sapiens
MVEKEEAGGGISEEEAAQYDRQIRLWGLEAQKRLRASRVLLVGLKGLGAEIAKNLILAGVKGLTMLDHEQVTPEDPGAQFLIRTGSVGRNRAEASLERAQNLNPMVDVKVDTEDIEKKPESFFTQFDAVCLTCCSRDVIVKVDQICHKNSIKFFTGDVFGYHGYTFANLGEHEFVEEKTKVAKVSQGVEDGPDTKRAKLDSSETTMVKKKVVFCPG

SEQ ID NO: 895807 - protein, 216 aa, Homo sapiens; identical to SEQ ID NO: 895806

SEQ ID NO: 895808 - protein, 216 aa, Homo sapiens; identical to SEQ ID NO: 895806

SEQ ID NO: 895809 - protein, 216 aa, Homo sapiens; identical to SEQ ID NO: 895806

SEQ ID NO: 895810 - protein, 216 aa, Homo sapiens; identical to SEQ ID NO: 895806

SEQ ID NO: 895811 - protein, 216 aa, Homo sapiens; identical to SEQ ID NO: 895806

SEQ ID NO: 895812 - protein, 152 aa, Homo sapiens
MLDHEQVTPEDPGAQFLIRTGSVGRNRAEASLERAQNLNPMVDVKVDTEDIEKKPESFFTQFDAVCLTCCSRDVIVKVDQICHKNSIKFFTGDVFGYHGYTFANLGEHEFVEEKTKVAKVSQGVEDGPDTKRAKLDSSETTMVKKKVVFCPG

SEQ ID NO: 895813 - protein, 224 aa, Homo sapiens
MRGSAYCSVEKRGCASAGVPYQLSDGGGQIRVIAVATGVPETVRALVILVGLKGLGAEIAKNLILAGVKGLTMLDHEQVTPEDPGAQFLIRTGSVGRNRAEASLERAQNLNPMVDVKVDTEDIEKKPESFFTQFDAVCLTCCSRDVIVKVDQICHKNSIKFFTGDVFGYHGYTFANLGEHEFVEEKTKVAKVSQGVEDGPDTKRAKLDSSETTMVKKKVVFCPG

SEQ ID NO: 895814 - protein, 216 aa, Homo sapiens; identical to SEQ ID NO: 895806

SEQ ID NO: 895815 - protein, 175 aa, Homo sapiens
TTARYEAGVKLAEAGAMVEKEEAGGGISEEEAAQYDRQIRLWGLEAQKRLRASRVLLVGLKGLGAEIAKNLILAGVKGLTMLDHEQVTPEDPGAQFLIRTGSVGRNRAEASLERAQNLNPMVDVKVDTEDIEKKPESFFTQFDAMGFFLGWLHSLKHQRNTFLCVSDLLLQGCHS

SEQ ID NO: 895816 - protein, 216 aa, Homo sapiens; identical to SEQ ID NO: 895806

SEQ ID NO: 895817 - protein, 216 aa, Homo sapiens; identical to SEQ ID NO: 895806

SEQ ID NO: 895818 - protein, 216 aa, Homo sapiens; identical to SEQ ID NO: 895806

SEQ ID NO: 895819 - protein, 216 aa, Homo sapiens; identical to SEQ ID NO: 895806

SEQ ID NO: 895820 - protein, 216 aa, Homo sapiens; identical to SEQ ID NO: 895806

SEQ ID NO: 895821 - protein, 152 aa, Homo sapiens
  misc_feature (24)..(24): Xaa can be any naturally occurring amino acid
MYKHALVKGVNLVRQVDEKVVMAXRSDSQALTLRDVRFVTSNVGSLEGYAVSMDKWYSSITRGLRSTYEEDSELLLQIRNDVLDSLGISPDLLPEDFVRYCFSEMAPVCAVVGGILAQEIVKALSQRDPPHNNFFFFDGMKGNGIVECLGPK

SEQ ID NO: 895822 - protein, 216 aa, Homo sapiens; identical to SEQ ID NO: 895806

SEQ ID NO: 895823 - protein, 175 aa, Homo sapiens; identical to SEQ ID NO: 895815

SEQ ID NO: 895824 - protein, 216 aa, Homo sapiens; identical to SEQ ID NO: 895806

SEQ ID NO: 895825 - protein, 139 aa, Homo sapiens
LQLGTRPGVKFGRGAEASLERAQNLNPMVDVKVDTEDIEKKPESFFTQFDAVCLTCCSRDVIVKVDQICHKNSIKFFTGDVFGYHGYTFANLGEHEFVEEKTKVAKVSQGVEDGPDTKRAKLDSSETTMVKKKVVFCPG

SEQ ID NO: 895826 - protein, 216 aa, Homo sapiens; identical to SEQ ID NO: 895806

SEQ ID NO: 895827 - protein, 216 aa, Homo sapiens; identical to SEQ ID NO: 895806

SEQ ID NO: 895828 - protein, 216 aa, Homo sapiens; identical to SEQ ID NO: 895806

SEQ ID NO: 895829 - protein, 216 aa, Homo sapiens; identical to SEQ ID NO: 895806

SEQ ID NO: 895830 - protein, 205 aa, Homo sapiens
MVEKEEAGGGISEEEAAQYDRQIRLWGLEAQKRLRASRVLLVGLKGLGAEIAKNLILAGVKGLTMLDHEQVTPEDPGAQFLIRTGSVGRNRAEASLERAQNLNPMVDVKVDTEDIEKKPESFFTQFDAVCLTCCSRDVIVKVDQICHKNSIKFFTGDVFGYHGYTFANLGEHEFVEEKTKVAKVTSRVAGTTGARHHARLIFLYF

SEQ ID NO: 895831 - protein, 204 aa, Homo sapiens
MVEKEEAGGGISEEEAAQYDRQIRLWGLEAQKRLRASRVLLVGLKGLGAEIAKNLILAGVKGLTMLDHEQVTPEDPGAQFLIRTGSVGRNRAEASLERAQNLNPMVDVKVDTEDIEKKPESFFTQFDAVCLTCCSRDVIVKVDQICHKNSIKFFTGDVFGYHGYTFANLGEHEFVEEKTKVADGNGLSQSAPFFCPPHVTEMLL

SEQ ID NO: 895832 - protein, 286 aa, Homo sapiens
  misc_feature (194)..(194): Xaa can be any naturally occurring amino acid
MLDHEQVTPEDPGAQFLIRTGSVGRNRAEASLERAQNLNPMVDVKVDTEDIEKKPESFFTQFDAVCLTCCSRDVIVKVDQICHKNSIKFFTGDVFGYHGYTFANLGEHEFVEEKTKVAKVSQGVEDGPDTKRAKLDSSETTMVKKVGLLAWFKKALVVGLGAVGKGKGGLERARTVGENISAQRGALKSGQIKXGRSPTAGNKERGDNIEGGGPITNNAGWDAHSGERYMKQNRYKTEASKSIARHATIGRGENQSKQKSTDEGKTNNDITWTATTKKDGHNRATE

SEQ ID NO: 895833 - protein, 501 aa, Homo sapiens
SPAPVVSAVLLFRSGSAPFPFPGGQAADPSVFIPLLHSQLLQLSRASMAAWKSWTALRLCATVVVLDMVVCKGFVEDLDESFKENRNDDIWLVDFYAPWCGHCKKLEPIWNEVGLEMKSIGSPVKVGKMDATSYSSIASEFGVRGYPTIKLLKGDLAYNYRGPRTKDDIIEFAHRVSGALIRPLPSQQMFEHMQKRHRVFFVYVGGESPLKEKYIDAASELIVYTYFFSASEEVVPEYVTLKEMPAVLVFKDETYFVYDEYEDGDLSSWINRERFQNYLAMDGFLLYELGDTGKLVALAVIDEKNTSVEHTRLKSIIQEVARDYRDLFHRDFQFGHMDGNDYINTLLMDELTVPTVVVLNTSNQQYFLLDRQIKNVEDMVQFINNILDGTVEAQGGDSILQRLKRIVFDAKSTIVSIFKSSPLMGCFLFGLPLGVISIMCYGIYTADTDGGYIEERYEVSKSENENQEQIEESKEQQEPSSGGSVVPTVQEPKDVLEKKKD

SEQ ID NO: 895834 - protein, 299 aa, Homo sapiens
SPAPVVSAVLLFRSGSAPFPFPGGQAADPSVFIPLLHSQLLQLSRASMAAWKSWTALRLCATVVVLDMVVCKGFVEDLDESFKENRNDDIWLVDFYAPWCGHCKKLEPIWNEVGLEMKSIGSPVKVGKMDATSYSSIASEFGVRGYPTIKLLKGDLAYNYRGPRTKDDIIEFAHRVSGALIRPLPSQQMFEHMQKRHRVFFVYVGGESPLKEKYIDAASELIVYTYFFSASEEVVPEYVTLKEMPAVLVFKDETYFVYDAFILDSESTCAGCYMGVLDDAEVWGTNDPVTQVISIVPNR

SEQ ID NO: 895835 - protein, 175 aa, Homo sapiens
SPAPVVSAVLLFRSGSAPFPFPGGQAADPSVFIPLLHSQLLQLSRASMAAWKSWTALRLCATVVVLDMVVCKGFVEDLDESFKENRNDDIWLVDFYAPWCGHCKKLEPIWNEVGLEMKSIGSPVKVGKMDATSYSSIASEFGVRGYPTIKLRFPGGLKIGVWPFFIGEIKRGLGI

SEQ ID NO: 895836 - protein, 175 aa, Homo sapiens; identical to SEQ ID NO: 895835

SEQ ID NO: 895837 - protein, 136 aa, Homo sapiens
SPAPVVSAVLLFRSGSAPFPFPGGQAADPSVFIPLLHSQLLQLSRASMAAWKSWTALRLCATVVVLDMVVCKGFVEDLDESFKENRNDDIWLVDFYAPWCGHCKKLEPIWNEVGLEMKSIGSPVKVGKMDATSYSN

SEQ ID NO: 895838 - protein, 157 aa, Homo sapiens
SPAPVVSAVLLFRSGSAPFPFPGGQAADPSVFIPLLHSQLLQLSRASMAAWKSWTALRLCATVVVLDMVVCKGFVEDLDESFKENRNDDIWLVDFYAPWCGHCKKLEPIWNEVGLEMSIASEFGVRGYPTIKLRFPGGLKIGVWPFFIGEIKRGLGI

SEQ ID NO: 895839 - protein, 170 aa, Homo sapiens
MIHRHLQLSLEISNKLKSELTVPTVVVLNTSNQQYFLLDRQIKNVEDMVQFINNILDGTVEAQGGDSILQRLKRIVFDAKSTIVSIFKSSPLMGCFLFGLPLGVISIMCYGIYTADTDGGYIEERYEVSKSENENQEQIEESKEQQEPSSGGSVVPTVQEPKDVLEKKKD

SEQ ID NO: 895840 - protein, 501 aa, Homo sapiens; identical to SEQ ID NO: 895833

SEQ ID NO: 895841 - protein, 501 aa, Homo sapiens; identical to SEQ ID NO: 895833

SEQ ID NO: 895842 - protein, 74 aa, Homo sapiens
SCPYPFDTVRRRMMKQSGRKGADIMYTGTDRLFRRKIFRDEGGKAFFKGAWSNVLRGKGGAFVLVLYDELKKVN

SEQ ID NO: 895843 - protein, 299 aa, Homo sapiens; identical to SEQ ID NO: 895834

SEQ ID NO: 895844 - protein, 242 aa, Homo sapiens
SPAPVVSAVLLFRSGSAPFPFPGGQAADPSVFIPLLHSQLLQLSRASMAAWKSWTALRLCATVVVLDMVVCKGFVEDLDESFKENRNDDIWLVDFYAPWCGHCKKLEPIWNEVGLEMKSIGSPVKVGKMDATSYSSIASEFGVRGYPTIKLLKGDLAYNYRGPRTKDDIIEFAHRVSGALIRPLPSQQMFEHMQKRHRVFFVYVGGESPLKEKYIDAASELIVYTYFFSASEEVVPEVIFKI

SEQ ID NO: 895845 - protein, 271 aa, Homo sapiens
SPAPVVSAVLLFRSGSAPFPFPGGQAADPSVFIPLLHSQLLQLSRASMAAWKSWTALRLCATVVVLDMVVCKGFVEDLDESFKENRNDDIWLVDFYAPWCGHCKKLEPIWNEVGLEMKSIGSPVKVGKMDATSYSSIASEFGVRGYPTIKLLKGDLAYNYRGPRTKDDIIEFAHRVSGALIRPLPSQQMFEHMQKRHRVFFVYVGGESPLKEKYIDAASELIVYTYFFSASEEVVPEYVTLKEMPAVLVFKDETYFVYDGKFQIFNSCKTF

SEQ ID NO: 895846 - protein, 252 aa, Homo sapiens
SPAPVVSAVLLFRSGSAPFPFPGGQAADPSVFIPLLHSQLLQLSRASMAAWKSWTALRLCATVVVLDMVVCKGFVEDLDESFKENRNDDIWLVDFYAPWCGHCKKLEPIWNEVGLEMKSIGSPVKVGKMDATSYSSIASEFGVRGYPTIKLLKGDLAYNYRGPRTKDDIIEFAHRVSGALIRPLPSQQMFEHMQKRHRVFFVYVGGESPLKVRLFFNPQKQMYCNLIYSIIKTSLETQNLLLCTYWKYFHSF

SEQ ID NO: 895847 - protein, 177 aa, Homo sapiens
WYVPRSAGPKMAASVCSGLLGPRVLSWSRELPCAWRALHTSPVCAKNRAARVRVSKGDKPVTYEEAHAPHYIAHRKGWLSLHTGNLDGEDHAAERTVEDVFLRKFMWGTFPGCLADQLVLKRRGNQLEICAVVLRQLSPHKYYFLVGYSETLLSYFYKCPVRLHLQTVPSKVVYKYL

SEQ ID NO: 895848 - protein, 203 aa, Homo sapiens
GTSRARLGPRWRPPCAAGCWGHGEWGDSAGPCESEVGSLVSASRALPPQVLSWSRELPCAWRALHTSPVCAKNRAARVRVSKGDKPVTYEEAHAPHYIAHRKGWLSLHTGNLDGEDHAAERTVEDVFLRKFMWGTFPGCLADQLVLKRRGNQLEICAVVLRQLSPHKYYFLVGYSETLLSYFYKCPVRLHLQTVPSKVVYKYL

SEQ ID NO: 895849 - protein, 121 aa, Homo sapiens
RFWMLTLELWQGPGAMRLIFYYALPSSGNLDGEDHAAERTVEDVFLRKFMWGTFPGCLADQLVLKRRGNQLEICAVVLRQLSPHKYYFLVGYSETLLSYFYKCPVRLHLQTVPSKVVYKYL

SEQ ID NO: 895850 - protein, 113 aa, Homo sapiens
RPRGGSEGGGSGDLAALMASPGHSDLGEVAPEIKASERRTAVAIADLEWREMEGDDCEFRYGDGTNEAQDNDFPTDQDTGPRASKQPAKGHTLGRSVFFVFFPLPFTTMLLKK

SEQ ID NO: 895851 - protein, 856 aa, Homo sapiens
MLSLLGLETYQVQKLSLQDSLQISFDSMKNWAPQVPKDLPWNFLRKLQALNADARNTTMVLDVLPDARPVEKESQMEEEIIYWDPADDLAADIYSFSELPTPDTPVNPLDLLCALLLSSDSFLQQEIALKMALCQFALPLVLPDSENHYHTFLLWAMRGIVRTWWSQPPRGMGSFREDSVVLSRAPAFAFVRMDVSSNSKSQLLNAVLSPGHRQWDCFWHRDLNLGTNAREISDGLVEISWFFPSGREDLDIFPEPVAFLNLRGDIGSHWLQFKLLTEISSAVFILTDNISKKEYKLLYSMKESTTKYYFILSPYRGKRNTNLRFLNKLIPVLKIDHSHVLVKVSSTDSDSFVKRIRAIVGNVLRAPCRRVSVEDMAHAARKLGLKVDEDCEECQKAKDRMERITRKIKDSDAYRRDELRLQGDPWRKAAQVEKEFCQLQWAVDPPEKHRAELRRRLLELRMQQNGHDPSSGVQEFISGISSPSLSEKQYFLRWMEWGLARVAQPRLRQPPETLLTLRPKHGGTTDVGEPLWPEPLGVEHFLREMGQFYEAESCLVEAGRLPAGQRRFAHFPGLASELLLTGLPLELIDGSTLSMPVRWVTGLLKELHVRLERRSRLVVLSTVGVPGTGKSTLLNTMFGLRFATGKSCGPRGAFMQLITVAEGFSQDLGCDHILVIDSGGLIGGALTSAGDRFELEASLATLLMGLSNVTVISLAETKDIPAAILHAFLRLEKTGHMPNYQFVYQNLHDVSVPGPRPRDKRQLLDPPGDLSRAAAQMEKQGDGFRALAGLAFCDPEKQHIWHIPGLWHGAPPMAAVSLAYSEAIFELKRCLLENIRNGLSNQNKNIQQLIELVRRL

SEQ ID NO: 895852 - protein, 155 aa, Homo sapiens
TGGTWREVGVWIGDLVESRPLLLQNRAARVRVSKGDKPVTYEEAHAPHYIAHRKGWLSLHTGNLDGEDHAAERTVEDVFLRKFMWGTFPGCLADQLVLKRRGNQLEICAVVLRQLSPHKYYFLVGYSETLLSYFYKCPVRLHLQTVPSKVVYKYL

SEQ ID NO: 895853 - protein, 177 aa, Homo sapiens; identical to SEQ ID NO: 895847

SEQ ID NO: 895854 - protein, 139 aa, Homo sapiens
MMLGTEGGEGFVVKVRGLPGLARPMKCRGFFLTAKFKMGLKVFVSSTPEKADQVARLLLNLNQKMKFMWGTFPGCLADQLVLKRRGNQLEICAVVLRQLSPHKYYFLVGYSETLLSYFYKCPVRLHLQTVPSKVVYKYL

SEQ ID NO: 895855 - protein, 84 aa, Homo sapiens
AARAWGAGGGAGGGQRSPGMRGSGYAGLGDPGRARGPEVPGARRERGPGERLGNRGAGPRRGPGQPAEAWKCFAPAPGIDVPGF

SEQ ID NO: 895856 - protein, 86 aa, Homo sapiens
SPRAERPGAAEGKQRGCPGYAGHPHLVLWLRPLVSKAPERPAKRRGSLALRRRAEHPQGATRSPAPCSYILGVFPGCHITPENSGS

SEQ ID NO: 895857 - protein, 948 aa, Homo sapiens
RPRGGSEGGGSGDLAALMASPGIEVELLGKGHSDLGEVAPEIKASERRTAVAIADLEWREMEGDDCEFRYGDGTNEAQDNDFPTVERSRLQEMLSLLGLETYQVQKLSLQDSLQISFDSMKNWAPQVPKDLPWNFLRKLQALNADARNTTMVLDVLPDARPVEKESQMEEEIIYWDPADDLAADIYSFSELPTPDTPVNPLDLLCALLLSSDSFLQQEIALKMALCQFALPLVLPDSENHYHTFLLWAMRGIVRTWWSQPPRGMGSFREDSVVLSRAPAFAFVRMDVSSNSKSQLLNAVLSPGHRQWDCFWHRDLNLGTNAREISDGLVEISWFFPSGREDLDIFPEPVAFLNLRGDIGSHWLQFKLLTEISSAVFILTDNISKKEYKLLYSMKESTTKYYFILSPYRGKRNTNLRFLNKLIPVLKIDHSHVLVKVSSTDSDSFVKRIRAIVGNVLRAPCRRVSVEDMAHAARKLGLKVDEDCEECQKAKDRMERITRKIKDSDAYRRDELRLQGDPWRKAAQVEKEFCQLQWAVDPPEKHRAELRRRLLELRMQQNGHDPSSGVQEFISGISSPSLSEKQYFLRWMEWGLARVAQPRLRQPPETLLTLRPKHGGTTDVGEPLWPEPLGVEHFLREMGQFYEAESCLVEAGRLPAGQRRFAHFPGLASELLLTGLPLELIDGSTLSMPVRWVTGLLKELHVRLERRSRLVVLSTVGVPGTGKSTLLNTMFGLRFATGKSCGPRGAFMQLITVAEGFSQDLGCDHILVIDSGGLIGGALTSAGDRFELEASLATLLMGLSNVTVISLAETKDIPAAILHAFLRLEKTGHMPNYQFVYQNLHDVSVPGPRPRDKRQLLDPPGDLSRAAAQMEKQGDGFRALAGLAFCDPEKQHIWHIPGLWHGAPPMAAVSLAYSEAIFELKRCLLENIRNGLSNQNKNIQQLIELVRRL

SEQ ID NO: 895858 - protein, 888 aa, Homo sapiens
MEGDDCEFRYGDGTNEAQDNDFPTVERSRLQEMLSLLGLETYQVQKLSLQDSLQISFDSMKNWAPQVPKDLPWNFLRKLQALNADARNTTMVLDVLPDARPVEKESQMEEEIIYWDPADDLAADIYSFSELPTPDTPVNPLDLLCALLLSSDSFLQQEIALKMALCQFALPLVLPDSENHYHTFLLWAMRGIVRTWWSQPPRGMGSFREDSVVLSRAPAFAFVRMDVSSNSKSQLLNAVLSPGHRQWDCFWHRDLNLGTNAREISDGLVEISWFFPSGREDLDIFPEPVAFLNLRGDIGSHWLQFKLLTEISSAVFILTDNISKKEYKLLYSMKESTTKYYFILSPYRGKRNTNLRFLNKLIPVLKIDHSHVLVKVSSTDSDSFVKRIRAIVGNVLRAPCRRVSVEDMAHAARKLGLKVDEDCEECQKAKDRMERITRKIKDSDAYRRDELRLQGDPWRKAAQVEKEFCQLQWAVDPPEKHRAELRRRLLELRMQQNGHDPSSGVQEFISGISSPSLSEKQYFLRWMEWGLARVAQPRLRQPPETLLTLRPKHGGTTDVGEPLWPEPLGVEHFLREMGQFYEAESCLVEAGRLPAGQRRFAHFPGLASELLLTGLPLELIDGSTLSMPVRWVTGLLKELHVRLERRSRLVVLSTVGVPGTGKSTLLNTMFGLRFATGKSCGPRGAFMQLITVAEGFSQDLGCDHILVIDSGGLIGGALTSAGDRFELEASLATLLMGLSNVTVISLAETKDIPAAILHAFLRLEKTGHMPNYQFVYQNLHDVSVPGPRPRDKRQLLDPPGDLSRAAAQMEKQGDGFRALAGLAFCDPEKQHIWHIPGLWHGAPPMAAVSLAYSEAIFELKRCLLENIRNGLSNQNKNIQQLIELVRRL

SEQ ID NO: 895859 - protein, 948 aa, Homo sapiens
WLQPPRLRRSYHLSLLSSWDYRIEVELLGKGHSDLGEVAPEIKASERRTAVAIADLEWREMEGDDCEFRYGDGTNEAQDNDFPTVERSRLQEMLSLLGLETYQVQKLSLQDSLQISFDSMKNWAPQVPKDLPWNFLRKLQALNADARNTTMVLDVLPDARPVEKESQMEEEIIYWDPADDLAADIYSFSELPTPDTPVNPLDLLCALLLSSDSFLQQEIALKMALCQFALPLVLPDSENHYHTFLLWAMRGIVRTWWSQPPRGMGSFREDSVVLSRAPAFAFVRMDVSSNSKSQLLNAVLSPGHRQWDCFWHRDLNLGTNAREISDGLVEISWFFPSGREDLDIFPEPVAFLNLRGDIGSHWLQFKLLTEISSAVFILTDNISKKEYKLLYSMKESTTKYYFILSPYRGKRNTNLRFLNKLIPVLKIDHSHVLVKVSSTDSDSFVKRIRAIVGNVLRAPCRRVSVEDMAHAARKLGLKVDEDCEECQKAKDRMERITRKIKDSDAYRRDELRLQGDPWRKAAQVEKEFCQLQWAVDPPEKHRAELRRRLLELRMQQNGHDPSSGVQEFISGISSPSLSEKQYFLRWMEWGLARVAQPRLRQPPETLLTLRPKHGGTTDVGEPLWPEPLGVEHFLREMGQFYEAESCLVEAGRLPAGQRRFAHFPGLASELLLTGLPLELIDGSTLSMPVRWVTGLLKELHVRLERRSRLVVLSTVGVPGTGKSTLLNTMFGLRFATGKSCGPRGAFMQLITVAEGFSQDLGCDHILVIDSGGLIGGALTSAGDRFELEASLATLLMGLSNVTVISLAETKDIPAAILHAFLRLEKTGHMPNYQFVYQNLHDVSVPGPRPRDKRQLLDPPGDLSRAAAQMEKQGDGFRALAGLAFCDPEKQHIWHIPGLWHGAPPMAAVSLAYSEAIFELKRCLLENIRNGLSNQNKNIQQLIELVRRL

SEQ ID NO: 895860 - protein, 935 aa, Homo sapiens
MRGSTHASGLAALMASPGHSDLGEVAPEIKASERRTAVAIADLEWREMEGDDCEFRYGDGTNEAQDNDFPTVERSRLQEMLSLLGLETYQVQKLSLQDSLQISFDSMKNWAPQVPKDLPWNFLRKLQALNADARNTTMVLDVLPDARPVEKESQMEEEIIYWDPADDLAADIYSFSELPTPDTPVNPLDLLCALLLSSDSFLQQEIALKMALCQFALPLVLPDSENHYHTFLLWAMRGIVRTWWSQPPRGMGSFREDSVVLSRAPAFAFVRMDVSSNSKSQLLNAVLSPGHRQWDCFWHRDLNLGTNAREISDGLVEISWFFPSGREDLDIFPEPVAFLNLRGDIGSHWLQFKLLTEISSAVFILTDNISKKEYKLLYSMKESTTKYYFILSPYRGKRNTNLRFLNKLIPVLKIDHSHVLVKVSSTDSDSFVKRIRAIVGNVLRAPCRRVSVEDMAHAARKLGLKVDEDCEECQKAKDRMERITRKIKDSDAYRRDELRLQGDPWRKAAQVEKEFCQLQWAVDPPEKHRAELRRRLLELRMQQNGHDPSSGVQEFISGISSPSLSEKQYFLRWMEWGLARVAQPRLRQPPETLLTLRPKHGGTTDVGEPLWPEPLGVEHFLREMGQFYEAESCLVEAGRLPAGQRRFAHFPGLASELLLTGLPLELIDGSTLSMPVRWVTGLLKELHVRLERRSRLVVLSTVGVPGTGKSTLLNTMFGLRFATGKSCGPRGAFMQLITVAEGFSQDLGCDHILVIDSGGLIGGALTSAGDRFELEASLATLLMGLSNVTVISLAETKDIPAAILHAFLRLEKTGHMPNYQFVYQNLHDVSVPGPRPRDKRQLLDPPGDLSRAAAQMEKQGDGFRALAGLAFCDPEKQHIWHIPGLWHGAPPMAAVSLAYSEAIFELKRCLLENIRNGLSNQNKNIQQLIELVRRL

SEQ ID NO: 895861 - protein, 827 aa, Homo sapiens
YWWCSQPLWPEPLGVEHFLREMGQLYEAESCPEEAGRLPAGQKESQMEEEIIYWDPADDLAADIYSFSELPTPDTPVNPLDLLCALLLSSDSFLQQEIALKMALCQFALPLVLPDSENHYHTFLLWAMRGIVRTWWSQPPRGMGSFREDSVVLSRAPAFAFVRMDVSSNSKSQLLNAVLSPGHRQWDCFWHRDLNLGTNAREISDGLVEISWFFPSGREDLDIFPEPVAFLNLRGDIGSHWLQFKLLTEISSAVFILTDNISKKEYKLLYSMKESTTKYYFILSPYRGKRNTNLRFLNKLIPVLKIDHSHVLVKVSSTDSDSFVKRIRAIVGNVLRAPCRRVSVEDMAHAARKLGLKVDEDCEECQKAKDRMERITRKIKDSDAYRRDELRLQGDPWRKAAQVEKEFCQLQWAVDPPEKHRAELRRRLLELRMQQNGHDPSSGVQEFISGISSPSLSEKQYFLRWMEWGLARVAQPRLRQPPETLLTLRPKHGGTTDVGEPLWPEPLGVEHFLREMGQFYEAESCLVEAGRLPAGQRRFAHFPGLASELLLTGLPLELIDGSTLSMPVRWVTGLLKELHVRLERRSRLVVLSTVGVPGTGKSTLLNTMFGLRFATGKSCGPRGAFMQLITVAEGFSQDLGCDHILVIDSGGLIGGALTSAGDRFELEASLATLLMGLSNVTVISLAETKDIPAAILHAFLRLEKTGHMPNYQFVYQNLHDVSVPGPRPRDKRQLLDPPGDLSRAAAQMEKQGDGFRALAGLAFCDPEKQHIWHIPGLWHGAPPMAAVSLAYSEAIFELKRCLLENIRNGLSNQNKNIQQLIELVRRL

SEQ ID NO: 895862 - protein, 424 aa, Homo sapiens
MTLQNHRGLDLLTAEKGGLCTFLGEDCCFYTNQSGILRDATRCLQEKASEIRQHLSNSYTNLLEWGLARVAQPRLRQPPETLLTLRPKHGGTTDVGEPLWPEPLGVEHFLREMGQFYEAESCLVEAGRLPAGQRRFAHFPGLASELLLTGLPLELIDGSTLSMPVRWVTGLLKELHVRLERRSRLVVLSTVGVPGTGKSTLLNTMFGLRFATGKSCGPRGAFMQLITVAEGFSQDLGCDHILVIDSGGLIGGALTSAGDRFELEASLATLLMGLSNVTVISLAETKDIPAAILHAFLRLEKTGHMPNYQFVYQNLHDVSVPGPRPRDKRQLLDPPGDLSRAAAQMEKQGDGFRALAGLAFCDPEKQHIWHIPGLWHGAPPMAAVSLAYSEAIFELKRCLLENIRNGLSNQNKNIQQLIELVRRL

SEQ ID NO: 895863 - protein, 167 aa, Homo sapiens
MVQMRLRTMIFQQVLSWSRELPCAWRALHTSPVCAKNRAARVRVSKGDKPVTYEEAHAPHYIAHRKGWLSLHTGNLDGEDHAAERTVEDVFLRKFMWGTFPGCLADQLVLKRRGNQLEICAVVLRQLSPHKYYFLVGYSETLLSYFYKCPVRLHLQTVPSKVVYKYL

SEQ ID NO: 895864 - protein, 175 aa, Homo sapiens
MIASSVMEMVQMRLRTMIFQQVLSWSRELPCAWRALHTSPVCAKNRAARVRVSKGDKPVTYEEAHAPHYIAHRKGWLSLHTGNLDGEDHAAERTVEDVFLRKFMWGTFPGCLADQLVLKRRGNQLEICAVVLRQLSPHKYYFLVGYSETLLSYFYKCPVRLHLQTVPSKVVYKYL

SEQ ID NO: 895865 - protein, 948 aa, Homo sapiens; identical to SEQ ID NO: 895857

SEQ ID NO: 895866 - protein, 797 aa, Homo sapiens
RPRGGSEGGGSGDLAALMASPGIEVELLGKGHSDLGEVAPEIKASERRTAVAIADLEWREMEGDDCEFRYGDGTNEAQDNDFPTVERSRLQEMLSLLGLETYQVQKLSLQDSLQISFDSMKNWAPQVPKDLPWNFLRKLQALNADARNTTMVLDVLPDARPVEKESQMEEEIIYWDPADDLAADIYSFSELPTPDTPVNPLDLLCALLLSSDSFLQQEIALKMALCQFALPLVLPDSENHYHTFLLWAMRGIVRTWWSQPPRGMGSFREDSVVLSRAPAFAFVRMDVSSNSKSQLLNAVLSPGHRQWDCFWHRDLNLGTNAREISDGLVEISWFFPSGREDLDIFPEPVAFLNLRGDIGSHWLQFKLLTEISSAVFILTDNISKKEYKLLYSMKESTTKYYFILSPYRGKRNTNLRFLNKLIPVLKIDHSHVLVKVSSTDSDSFVKRIRAIVGNVLRAPCRRVSVEDMAHAARKLGLKVDEDCEECQKAKDRMERITRKIKDSDAYRRDELRLQGDPWRKAAQVEKEFCQLQWAVDPPEKHRAELRRRLLELRMQQNGHDPSSGVQEFISGISSPSLSEKQYFLRWMEWGLARVAQPRLRQPPETLLTLRPKHGGTTDVGEPLWPEPLGVEHFLREMGQFYEAESCLVEAGRLPAGQRRFAHFPGLASELLLTGLPLELIDGSTLSMPVRWVTGLLKELHVRLERRSRLVVLSTVGVPGTGKSTLLNTMFGLRFATGKSCGPRGAFMQLITVAEGFSQDLGCDHILVIDSGGLIGGALTSAGDRFELEASLATLLWD

SEQ ID NO: 895867 - protein, 203 aa, Homo sapiens; identical to SEQ ID NO: 895848

SEQ ID NO: 895868 - protein, 84 aa, Homo sapiens; identical to SEQ ID NO: 895855

SEQ ID NO: 895869 - protein, 175 aa, Homo sapiens
WYVPRSAGPKMAASVCSGLLGPRVLSWSRELPCAWRALHTSPVCAKNRAARVRVSKGDKPVTYEEAHAPHYIAHRKGWLSLHTGNLDGEDHAAERTVEDVFLRKFMWGTFPGCLADQLVLKRRGNQLEICAVVLRQLSPHNTSRTIPFFPSSCSLQRMETWERNGMWGKCIPSED

SEQ ID NO: 895870 - protein, 84 aa, Homo sapiens; identical to SEQ ID NO: 895855

SEQ ID NO: 895871 - protein, 311 aa, Homo sapiens
RRAFPAAPGLATRTGECDCVSGSMAEKRHTRDSEAQRLPDSFKDSPSKGLGPCGWILVAFSFLFTVITFPISIWMCIKIIKEYERAIIFRLGRILQGGAKGPGLFFILPCTDSFIKVDMRTISFDIPPQEILTKDSVTISVDGVVYYRVQNATLAVANITNADSATRLLAQTTLRNVLGTKNLSQILSDREEIAHNMQSTLDDATDAWGIKVERVEIKDVKLPVQLQRAMAAEAEASREARAKVIAAEGEMNASRALKEASMVITESPAALQLRYLQTLTTIAAEKNSTIVFPLPIDMLQGIIGAKHSHLG

SEQ ID NO: 895872 - protein, 311 aa, Homo sapiens; identical to SEQ ID NO: 895871

SEQ ID NO: 895873 - protein, 182 aa, Homo sapiens
QLQANSTINATFSNSRPAFLTPMKNDQFKKHRSQVSSQAVSERCYRSRLPCPNNSKATLPPASSRIALERDQSDITDAWGIKVERVEIKDVKLPVQLQRAMAAEAEASREARAKVIAAEGEMNASRALKEASMVITESPAALQLRYLQTLTTIAAEKNSTIVFPLPIDMLQGIIGAKHSHLG

SEQ ID NO: 895874 - protein, 405 aa, Homo sapiens
RRAFPAAPGLATRTGECDCVSGSMAEKRHTRDSEAQRLPDSFKDSPSKGLGPCGWILVAFSFLFTVITFPISIWMCIKHHKQFINKQSLHKQPIPSYSISGQPFTQCAGSPKAPRGLFLIIHCPCDLHQLSIQQVRTMQHTHFQYCIISISPGKHPSTTSAFPCGTTYQQSRIGWWIIFTCCSRIAHPCACRAPLIHQSARPQATPDLLLRTKLTTRATLVLGATNSNRFYRILLLDHDEAHTCTQTMPVSLLRIDRHLHALGAHHTVDAVLHTHRDCDNNLVPGSRRAMGWPRKQTARPSEGQSPMGYRSTNGSTSTAFQRALERSFPKGQFSWNLTLDAHVQTPKHGNTGQPIDGCDTTPPRLVTLVPMKSAQEDNIGERQRHRPTDSADATSQHRMATMHGH

SEQ ID NO: 895875 - protein, 71 aa, Homo sapiens
WRGPEGLLFVSAGLRHRREVVGKDPIFGGEHFMLEETDWYLLNLFRLWWHYGISFLRLQMWVEELMEKFMR

SEQ ID NO: 895876 - protein, 311 aa, Homo sapiens; identical to SEQ ID NO: 895871

SEQ ID NO: 895877 - protein, 233 aa, Homo sapiens
MDFGGVLILIHRYNFPNLNMDVHKGLFFILPCTDSFIKVDMRTISFDIPPQEILTKDSVTISVDGVVYYRVQNATLAVANITNADSATRLLAQTTLRNVLGTKNLSQILSDREEIAHNMQSTLDDATDAWGIKVERVEIKDVKLPVQLQRAMAAEAEASREARAKVIAAEGEMNASRALKEASMVITESPAALQLRYLQTLTTIAAEKNSTIVFPLPIDMLQGIIGAKHSHLG

SEQ ID NO: 895878 - protein, 146 aa, Homo sapiens
RRAFPAAPGLATRTGECDCVSGSMAEKRHTRDSEAQRLPDSFKDSPSKGLGPCGWILVAFSFLFTVITFPISIWMCIKVIAAEGEMNASRALKEASMVITESPAALQLRYLQTLTTIAAEKNSTIVFPLPIDMLQGIIGAKHSHLG

SEQ ID NO: 895879 - protein, 220 aa, Homo sapiens
RRAFPAAPGLATRTGECDCVSGSMAEKRHTRDSEAQRLPDSFKDSPSKGLGPCGWILVAFSFLFTVITFPISIWMCIKIIKEYERAIIFRLGRILQGGAKGPGLFFILPCTDSFIKVDMRTISFDIPPQEILTKDSVTISVDGVVYYRVQNATLAVANITNADSATRLLAQTTLRNVLGTKNLSQILSDREEIAHNMQSTLDDATDAWGIKVERVEIKDK

SEQ ID NO: 895880 - protein, 311 aa, Homo sapiens; identical to SEQ ID NO: 895871

SEQ ID NO: 895881 - protein, 311 aa, Homo sapiens; identical to SEQ ID NO: 895871

SEQ ID NO: 895882 - protein, 311 aa, Homo sapiens; identical to SEQ ID NO: 895871

SEQ ID NO: 895883 - protein, 311 aa, Homo sapiens; identical to SEQ ID NO: 895871

SEQ ID NO: 895884 - protein, 311 aa, Homo sapiens; identical to SEQ ID NO: 895871

SEQ ID NO: 895885 - protein, 311 aa, Homo sapiens; identical to SEQ ID NO: 895871

SEQ ID NO: 895886 - protein, 311 aa, Homo sapiens; identical to SEQ ID NO: 895871

SEQ ID NO: 895887 - protein, 311 aa, Homo sapiens; identical to SEQ ID NO: 895871

SEQ ID NO: 895888 - protein, 146 aa, Homo sapiens; identical to SEQ ID NO: 895878

SEQ ID NO: 895889 - protein, 259 aa, Homo sapiens
RRAFPAAPGLATRTGECDCVSGSMAEKRHTRDSEAQRLPDSFKDSPSKGLGPCGWILVAFSFLFTVITFPISIWMCIKIIKEYERAIIFRLGRILQGGAKGPGLFFILPCTDSFIKVDMRTISFDIPPQEILTKDSVTISVDGVVYYRVQNATLAVANITNADSATRLLAQTTLRNVLGTKNLSQILSDREEIAHNMQSTLDDATDAWGIKVERVEIKDVKLPVQLQRAMAAEAEASREARAKVTFFLNLFFLLSFLFY

SEQ ID NO: 895890 - protein, 131 aa, Homo sapiens
MDFGGVLILIHRYNFPNLNMDVHKGLFFILPCTDSFIKVDMRTISFDIPPQEILTKDSVTISVDGVVYYRVQNATLAVANITNADSATRLLAQTTLRNVLGTKNLSQILSDREEIAHNMQHVLTYLSLLYE

SEQ ID NO: 895891 - protein, 67 aa, Homo sapiens
LSSCLARSGQQCLGRASEAHTRIARGRTSSLRLGLGAAPRLQPRKRILTFPRLPVPGGAGLRSSSLS

SEQ ID NO: 895892 - protein, 67 aa, Homo sapiens; identical to SEQ ID NO: 895891

SEQ ID NO: 895893 - protein, 67 aa, Homo sapiens; identical to SEQ ID NO: 895891

SEQ ID NO: 895894 - protein, 67 aa, Homo sapiens; identical to SEQ ID NO: 895891

SEQ ID NO: 895895 - protein, 67 aa, Homo sapiens; identical to SEQ ID NO: 895891

SEQ ID NO: 895896 - protein, 90 aa, Homo sapiens
MPKRKAKGDAKGDKAKVKDEPQRRSARLSAKPAPPKPEPRPKKASAKKGEKLPKGRKGKADAGKDGNNPAKNRDASTLQSQKAEGTGDAK

SEQ ID NO: 895897 - protein, 237 aa, Homo sapiens
MSDSDLGEDEGLLSLAGKRKRRGNLPKESVKILRDWLYLHRYNAYPSEQEKLSLSGQTNLSVLQICNWFINARRRLLPDMLRKDGKDPNQFTISRRGGKASDVALPRGSSPSVLAVSVPAPTNVLSLSVCSMPLHSGQGEKPAAPFPRGELESPKPLVTPGSTLTLLTRAEAGSPTGGLFNTPPPTPPEQDKEDFSSFQLLVEVALQRAAEMELQKQQDPSLPLLHTPIPLVSENPQ

SEQ ID NO: 895898 - protein, 237 aa, Homo sapiens; identical to SEQ ID NO: 895897

SEQ ID NO: 895899 - protein, 158 aa, Homo sapiens [sequence omitted]

SEQ ID NO: 895900 - protein, 237 aa, Homo sapiens; identical to SEQ ID NO: 895897

SEQ ID NO: 895901 - protein, 101 aa, Homo sapiens
RGVGAARRAPHKVCFLPPGGWGRAQRARGEERGSDVRPRGAFHAASCQAECQAGQVRGARPRRPPLPAGTPRAEPEAAWTRKPLGKVYPRSSLAPRHHVGQ

SEQ ID NO: 895902 - protein, 237 aa, Homo sapiens; identical to SEQ ID NO: 895897

SEQ ID NO: 895903 - protein, 375 aa, Homo sapiens
MSASAPAAEGEGTPTQPASEKEPEMPGPREESEEEEDEDDEEEEEEEKEKSLIVEGKREKKKVERLTMQVSSLQREPFTIAQGKGQKLCEIERIHFFLSKKKTDELRNLHKLLYNRPGTVSSLKKNVGQFSGFPFEKGSVQYKKKEEMLKKFRNAMLKSICEVLDLERSGVNSELVKRILNFLMHPKPSGKPLPKSKKTCSKGSKKERNSSGMARKAKRTKCPEILSDESSSDEDEKKNKEESSDDEDKESEEEPPKKTAKREKPKQKATSKSKKSVKSANVKKADSSTTKKNQNSSKKESESEDSSDDEPLIKKLKKPPTDEELKETIKKLLASANLEEVTMKQICKKVYENYPTYDLTERKDFIKTTVKELIS

SEQ ID NO: 895904 - protein, 91 aa, Homo sapiens
VLRSPYGASVSDGKVSLMEKVSGMQSVSVMQSVSGCKVSLDAKASGCKVSLDAKCLWMQSVSGCKESLDAKCPLDAKCPLDAKCPLDAKCL

SEQ ID NO: 895905 - protein, 459 aa, Homo sapiens
NSPFTVALLLKFFPPRESLDGGGGAGGKPPLGTERCGPGYGRRQLSGQVSRGKGSIIQGGRPVLPAGVGGPRRPAFFPHAGVHSMSASAPAAEGEGTPTQPASEKEPEMPGPREESEEEEDEDDEEEEEEEKEKSLIVEGKREKKKVERLTMQVSSLQREPFTIAQGKGQKLCEIERIHFFLSKKKTDELRNLHKLLYNRPGTVSSLKKNVGQFSGFPFEKGSVQYKKKEEMLKKFRNAMLKSICEVLDLERSGVNSELVKRILNFLMHPKPSGKPLPKSKKTCSKGSKKERNSSGMARKAKRTKCPEILSDESSSDEDEKKNKEESSDDEDKESEEEPPKKTAKREKPKQKATSKSKKSVKSANVKKADSSTTKKNQNSSKKESESEDSSDDEPLIKKLKKPPTDEELKETIKKLLASANLEEVTMKQICKKVYENYPTYDLTERKDFIKTTVKELIS

SEQ ID NO: 895906 - protein, 375 aa, Homo sapiens; identical to SEQ ID NO: 895903

SEQ ID NO: 895907 - protein, 399 aa, Homo sapiens
GRGDVKLSRLLPLRSALASLIVHSMSASAPAAEGEGTPTQPASEKEPEMPGPREESEEEEDEDDEEEEEEEKEKSLIVEGKREKKKVERLTMQVSSLQREPFTIAQGKGQKLCEIERIHFFLSKKKTDELRNLHKLLYNRPGTVSSLKKNVGQFSGFPFEKGSVQYKKKEEMLKKFRNAMLKSICEVLDLERSGVNSELVKRILNFLMHPKPSGKPLPKSKKTCSKGSKKERNSSGMARKAKRTKCPEILSDESSSDEDEKKNKEESSDDEDKESEEEPPKKTAKREKPKQKATSKSKKSVKSANVKKADSSTTKKNQNSSKKESESEDSSDDEPLIKKLKKPPTDEELKETIKKLLASANLEEVTMKQICKKVYENYPTYDLTERKDFIKTTVKELIS

SEQ ID NO: 895908 - protein, 341 aa, Homo sapiens
MSASAPAAEGEGTPTQPASEKEPEMPGPREESEEEEDEDDEEEEEEEKGKGQKLCEIERIHFFLSKKKTDELRNLHKLLYNRPGTVSSLKKNVGQFSGFPFEKGSVQYKKKEEMLKKFRNAMLKSICEVLDLERSGVNSELVKRILNFLMHPKPSGKPLPKSKKTCSKGSKKERNSSGMARKAKRTKCPEILSDESSSDEDEKKNKEESSDDEDKESEEEPPKKTAKREKPKQKATSKSKKSVKSANVKKADSSTTKKNQNSSKKESESEDSSDDEPLIKKLKKPPTDEELKETIKKLLASANLEEVTMKQICKKVYENYPTYDLTERKDFIKTTVKELIS

SEQ ID NO: 895909 - protein, 307 aa, Homo sapiens
MSASAPAAEGEGTPTQPASEKEPEMPGPREESEEEEDEDDEEEEEEEKEKSLIVEGKREKKKVERLTMQVSSLHKKKEEMLKKFRNAMLKSICEVLDLERSGVNSELVKRILNFLMHPKPSGKPLPKSKKTCSKGSKKERNSSGMARKAKRTKCPEILSDESSSDEDEKKNKEESSDDEDKESEEEPPKKTAKREKPKQKATSKSKKSVKSANVKKADSSTTKKNQNSSKKESESEDSSDDEPLIKKLKKPPTDEELKETIKKLLASANLEEVTMKQICKKVYENYPTYDLTERKDFIKTTVKELIS

SEQ ID NO: 895910 - protein, 228 aa, Homo sapiens
  misc_feature (5)..(5): Xaa can be any naturally occurring amino acid
IWSPXSIGYRRPRPSVLDLERSGVNSELVKRILNFLMHPKPSGKPLPKSKKTCSKGSKKERNSSGMARKAKRTKCPEILSDESSSDEDEKKNKEESSDDEDKESEEEPPKKTAKREKPKQKATSKSKKSVKSANVKKADSSTTKKNQNSSKKESESEDSSDDEPLIKKLKKPPTDEELKETIKKLLASANLEEVTMKQICKKVYENYPTYDLTERKDFIKTTVKELIS

SEQ ID NO: 895911 - protein, 140 aa, Homo sapiens
  misc_feature (17)..(17): Xaa can be any naturally occurring amino acid
SGDVGVGRGQGEMLRKXFQPPKKTAKREKPKQKATSKSKKSVKSANVKKADSSTTKKNQNSSKKESESEDSSDDEPLIKKLKKPPTDEELKETIKKLLASANLEEVTMKQICKKVYENYPTYDLTERKDFIKTTVKELIS

SEQ ID NO: 895912 - protein, 375 aa, Homo sapiens; identical to SEQ ID NO: 895903

SEQ ID NO: 895913 - protein, 375 aa, Homo sapiens; identical to SEQ ID NO: 895903

SEQ ID NO: 895914 - protein, 375 aa, Homo sapiens; identical to SEQ ID NO: 895903

SEQ ID NO: 895915 - protein, 375 aa, Homo sapiens; identical to SEQ ID NO: 895903

SEQ ID NO: 895916 - protein, 375 aa, Homo sapiens; identical to SEQ ID NO: 895903

SEQ ID NO: 895917 - protein, 375 aa, Homo sapiens; identical to SEQ ID NO: 895903

SEQ ID NO: 895918 - protein, 375 aa, Homo sapiens; identical to SEQ ID NO: 895903

SEQ ID NO: 895919 - protein, 375 aa, Homo sapiens; identical to SEQ ID NO: 895903

SEQ ID NO: 895920 - protein, 375 aa, Homo sapiens; identical to SEQ ID NO: 895903

SEQ ID NO: 895921 - protein, 375 aa, Homo sapiens; identical to SEQ ID NO: 895903

SEQ ID NO: 895922 - protein, 375 aa, Homo sapiens; identical to SEQ ID NO: 895903

SEQ ID NO: 895923 - protein, 375 aa, Homo sapiens; identical to SEQ ID NO: 895903

SEQ ID NO: 895924 - protein, 375 aa, Homo sapiens; identical to SEQ ID NO: 895903

SEQ ID NO: 895925 - protein, 91 aa, Homo sapiens; identical to SEQ ID NO: 895904

SEQ ID NO: 895926 - protein, 375 aa, Homo sapiens; identical to SEQ ID NO: 895903

SEQ ID NO: 895927 - protein, 375 aa, Homo sapiens; identical to SEQ ID NO: 895903

SEQ ID NO: 895928 - protein, 380 aa, Homo sapiens
MSASAPAAEGEGTPTQPASEKEPEMPGPREESEEEEDEDDEEEEEEEKEKSLIVEGKREKKKVERLTMQVSSLQREPFTIAQGKGQKLCEIERIHFFLSKKKTDELRNLHKLLYNRPGTVSSLKKNVGQFSGFPFEKGSVQYKKKEEMLKKFRNAMLKSICEVLDLERSGVNSELVKRILNFLMHPKPSGKPLPKSKKTCSKGSKKERNSSGMARKAKRTKCPEILSDESSSDEDEKKNKEESSDDEDKESEEEPPKKTAKREKPKQKATSKSKKSVKSANVKKADSSTTKKNQNSSKKESESEDSSDDEPLIKKLKKPPTDEELKETIKKLLASANLEEVTMKQICKKVYENYPTYDLTERKDFIKTTVKEVNISVFQV

SEQ ID NO: 895929 - protein, 383 aa, Homo sapiens
MSASAPAAEGEGTPTQPASEKEPEMPGPREESEEEEDEDDEEEEEEEKEKSLIVEGKREKKKVERLTMQVSSLQREPFTIAQGKGQKLCEIERIHFFLSKKKTDELRNLHKLLYNRPGTVSSLKKNVGQFSGFPFEKGSVQYKKKEEMLKKFRNAMLKSICEVLDLERSGVNSELVKRILNFLMHPKPSGKPLPKSKKTCSKGSKKERNSSGMARKAKRTKCPEILSDESSSDEDEKKNKEESSDDEDKESEEEPPKKTAKREKPKQKATSKSKKSVKSANVKKADSSTTKKNQNSSKKESESEDSSDDEPLIKKLKKPPTDEELKETIKKLLASANLEEVTMKQICKKKKSLIVEGKREKKKVERLTMQVSSLQREPFTIAQ

SEQ ID NO: 895930 - protein, 303 aa, Homo sapiens
MSASAPAAEGEGTPTQPASEKEPEMPGPREESEEEEDEDDEEEEEEEKEKSLIVEGKREKKKVERLTMQVSSLQREPFTIAQGKGQKLCEIERIHFFLSKKKTDELRNLHKLLYNRPGTVSSLKKNVGQFSGFPFEKGSVQYKKKEEMLKKFRNAMLKSICEVLDLERSGVNSELVKRILNFLMHPKPSGKPLPKSKKTCSKGSKKERNSSGMARKAKRTKCPEILSDESSSDEDEKKNKEESSDDEDKESEEEPPKKTAKREKPKQKATSKSKKSVKSANVKKADSSTTKKNQNSSKKESES

SEQ ID NO: 895931 - protein, 638 aa, Homo sapiens
MQVSSLNEVKIYSLSCGKSLPEWLSDRKKRALQKKDVDVRRRIELIQDFEMPTVCTTIKVSKDGQYILATGTYKPRVRCYDTYQLSLKFERCLDSEVVTFEILSDDYSKIVFLHNDRYIEFHSQSGFYYKTRIPKFGRDFSYHYPSCDLYFVGASSEVYRLNLEQGRYLNPLQTDAAENNVCDINSVHGLFATGTIEGRVECWDPRTRNRVGLLDCALNSVTADSEINSLPTISALKFNGALTMAVGTTTGQGKIFTSLEPEHDLNDVCLYPNSGMLLTANETPKMGIYYIPVLGPAPRWCSFLDNLTEELEENPESTVYDDYKFVTKKDLENLGLTHLIGSPFLRAYMHGFFMDIRLYHKVKLMVNPFAYEEYRKDKIRQKIEETRAQRVQLKKLPKVNKELALKLIEEEEEKQKSTWKKKVKSLPNILTDDRFKVMFENPDFQVDEESEEFRLLNPLVSKISEKRKKKLRLLEQQELREKEEEEEPEGKPSDAESSESSDDEKAWVEEVRKQRRLLQQEEKVKRQERLKEDQQTVLKPQFYEIKAGEEFRSFKDSATKQKLMNKTLEDRLKIEAKNGTLSVSDTTVGSKQLTFTLKRSEQQKKQQEAEKLHRQERKRLRRSAGHLKSRHKRGRSFH

SEQ ID NO: 895932 - protein, 688 aa, Homo sapiens
MQVSSLNEVKIYSLSCGKSLPEWLSDRKKRALQKKDVDVRRRIELIQDFEMPTVCTTIKVSKDGQYILATGTYKPRVRCYDTYQLSLKFERCLDSEVVTFEILSDDYSKIVFLHNDRYIEFHSQSGFYYKTRIPKFGRDFSYHYPSCDLYFVGASSEVYRLNLEQGRYLNPLQTDAAENNVCDINSVHGLFATGTIEGRVECWDPRTRNRVGLLDCALNSVTADSEINSLPTISALKFNGALTMAVGTTTGQVLLYDLRSDKPLLVKDHQYGLPIKSVHFQDSLDLILSADSRIVKMWNKNSGKIFTSLEPEHDLNDVCLYPNSGMLLTANETPKMGIYYIPVLGPAPRWCSFLDNLTEELEENPESTVYDDYKFVTKKDLENLGLTHLIGSPFLRAYMHGFFMDIRLYHKVKLMVNPFAYEEYRKDKIRQKIEETRAQRVQLKKLPKVNKELALKLIEEEEEKQKSTWKKKVKSLPNILTDDRFKVMFENPDFQVDEESEEFRLLNPLVSKISEKRKKKLRLLEQQELREKEEEEEPEGKPSDAESSESSDDEKAWVEEVRKQRRLLQQEEKVKRQERLKEDQQTVLKPQFYEIKAGEEFRSFKDSATKQKLMNKTLEDRLKIEAKNGTLSVSDTTVGSKQLTFTLKRSEQQKKQQEAEKLHRQERKRLRRSAGHLKSRHKRGRSFH

SEQ ID NO: 895933 - protein, 195 aa, Homo sapiens
MTTQSSEVYRLNLEQGRYLNPLQTDAAENNVCDINSVHGLFATGTIEGRVECWDPRTRNRVGLLDCALNSVTADSEINSLPTISALKFNGALTMAVGTTTGQVLLYDLRSDKPLLVKDHQYGLPIKSVHFQDSLDLILSADSRIVKMWNKNSGKIFTSLEPEHDLNDVCLYPNSGMLLTANETPKMGIYYIPPSL

SEQ ID NO: 895934 - protein, 701 aa, Homo sapiens
AVNRYQGHSRSRGSPSSSYHEVKIYSLSCGKSLPEWLSDRKKRALQKKDVDVRRRIELIQDFEMPTVCTTIKVSKDGQYILATGTYKPRVRCYDTYQLSLKFERCLDSEVVTFEILSDDYSKIVFLHNDRYIEFHSQSGFYYKTRIPKFGRDFSYHYPSCDLYFVGASSEVYRLNLEQGRYLNPLQTDAAENNVCDINSVHGLFATGTIEGRVECWDPRTRNRVGLLDCALNSVTADSEINSLPTISALKFNGALTMAVGTTTGQVLLYDLRSDKPLLVKDHQYGLPIKSVHFQDSLDLILSADSRIVKMWNKNSGKIFTSLEPEHDLNDVCLYPNSGMLLTANETPKMGIYYIPVLGPAPRWCSFLDNLTEELEENPESTVYDDYKFVTKKDLENLGLTHLIGSPFLRAYMHGFFMDIRLYHKVKLMVNPFAYEEYRKDKIRQKIEETRAQRVQLKKLPKVNKELALKLIEEEEEKQKSTWKKKVKSLPNILTDDRFKVMFENPDFQVDEESEEFRLLNPLVSKISEKRKKKLRLLEQQELREKEEEEEPEGKPSDAESSESSDDEKAWVEEVRKQRRLLQQEEKVKRQERLKEDQQTVLKPQFYEIKAGEEFRSFKDSATKQKLMNKTLEDRLKIEAKNGTLSVSDTTVGSKQLTFTLKRSEQQKKQQEAEKLHRQERKRLRRSAGHLKSRHKRGRSFH

SEQ ID NO: 895935 - protein, 365 aa, Homo sapiens
CGGVSSATPGVYIRNHPNLVLGPAPRWCSFLDNLTEELEENPESTVYDDYKFVTKKDLENLGLTHLIGSPFLRAYMHGFFMDIRLYHKVKLMVNPFAYEEYRKDKIRQKIEETRAQRVQLKKLPKVNKELALKLIEEEEEKQKSTWKKKVKSLPNILTDDRFKVMFENPDFQVDEESEEFRLLNPLVSKISEKRKKKLRLLEQQELREKEEEEEPEGKPSDAESSESSDDEKAWVEEVRKQRRLLQQEEKVKRQERLKEDQQTVLKPQFYEIKAGEEFRSFKDSATKQKLMNKTLEDRLKIEAKNGTLSVSDTTVGSKQLTFTLKRSEQQKKQQEAEKLHRQERKRLRRSAGHLKSRHKRGRSFH

SEQ ID NO: 895936 - protein, 688 aa, Homo sapiens; identical to SEQ ID NO: 895932

SEQ ID NO: 895937 - protein, 688 aa, Homo sapiens; identical to SEQ ID NO: 895932

SEQ ID NO: 895938 - protein, 567 aa, Homo sapiens
MQVSSLNEVKIYSLSCGKSLPEWLSDRKKRALQKKDVDVRRRIELIQDFEMPTVCTTIKVSKDGQYILATGTYKPRVRCYDTYQLSLKFERCLDSEVVTFEILSDDYSKIVFLHNDRYIEFHSQSGFYYKTRIPKFGRDFSYHYPSCDLYFVGASSEVYRLNLEQGRYLNPLQTDAAENNVCDINSVHGLFATGTIEGRVECWDPRTRNRVGLLDCALNSVTADSEINSLPTISALKFNGALTMAVGTTTGQVLLYDLRSDKPLLVKDHQYGLPIKSVHFQDSLDLILSADSRIVKMWNKNSGKIFTSLEPEHDLNDVCLYPNSGMLLTANETPKMGIYYIPVLGPAPRWCSFLDNLTEELEENPESTVYDDYKFVTKKDLENLGLTHLIGSPFLRAYMHGFFMDIRLYHKVKLMVNPFAYEEYRKDKIRQKIEETRAQRVQLKKLPKVNKELALKLIEEEEEKQKSTWKKKVKSLPNILTDDRFKVMFENPDFQVDEESEEFRLLNPLVSKISEKRKKKLRLLEQQELREKEEEEEPEGKPSDAESSESSYCPGWSSSSAAGPQVT

SEQ ID NO: 895939 - protein, 538 aa, Homo sapiens
MTTQSSEVYRLNLEQGRYLNPLQTDAAENNVCDINSVHGLFATGTIEGRVECWDPRTRNRVGLLDCALNSVTADSEINSLPTISALKFNGALTMAVGTTTGQVLLYDLRSDKPLLVKDHQYGLPIKSVHFQDSLDLILSADSRIVKMWNKNSGKIFTSLEPEHDLNDVCLYPNSGMLLTANETPKMGIYYIPVLGPAPRWCSFLDNLTEELEENPESTVYDDYKFVTKKDLENLGLTHLIGSPFLRAYMHGFFMDIRLYHKVKLMVNPFAYEEYRKDKIRQKIEETRAQRVQLKKLPKVNKELALKLIEEEEEKQKSTWKKKVKSLPNILTDDRFKVMFENPDFQVDEESEEFRLLNPLVSKISEKRKKKLRLLEQQELREKEEEEEPEGKPSDAESSESSDDEKAWVEEVRKQRRLLQQEEKVKRQERLKEDQQTVLKPQFYEIKAGEEFRSFKDSATKQKLMNKTLEDRLKIEAKNGTLSVSDTTVGSKQLTFTLKRSEQQKKQQEAEKLHRQERKRLRRSAGHLKSRHKRGRSFH

SEQ ID NO: 895940 - protein, 365 aa, Homo sapiens
PSLFHPSSYCFSSPNRGDSVLGPAPRWCSFLDNLTEELEENPESTVYDDYKFVTKKDLENLGLTHLIGSPFLRAYMHGFFMDIRLYHKVKLMVNPFAYEEYRKDKIRQKIEETRAQRVQLKKLPKVNKELALKLIEEEEEKQKSTWKKKVKSLPNILTDDRFKVMFENPDFQVDEESEEFRLLNPLVSKISEKRKKKLRLLEQQELREKEEEEEPEGKPSDAESSESSDDEKAWVEEVRKQRRLLQQEEKVKRQERLKEDQQTVLKPQFYEIKAGEEFRSFKDSATKQKLMNKTLEDRLKIEAKNGTLSVSDTTVGSKQLTFTLKRSEQQKKQQEAEKLHRQERKRLRRSAGHLKSRHKRGRSFH

SEQ ID NO: 895941 - protein, 186 aa, Homo sapiens
GHDTTRVSDPGVVQRKKKLRLLEQQELREKEEEEEPEGKPSDAESSESSDDEKAWVEEVRKQRRLLQQEEKVKRQERLKEDQQTVLKPQFYEIKAGEEFRSFKDSATKQKLMNKTLEDRLKIEAKNGTLSVSDTTVGSKQLTFTLKRSEQQKKQQEAEKLHRQERKRLRRSAGHLKSRHKRGRSFH

SEQ ID NO: 895942 - protein, 401 aa, Homo sapiens
MSLYDDLGVETSDSKTEGWSKNFKLLQSQLQVKKAALTQAKSQRTKQSTVLAPVIDLKRGGSSDDRQIVDTPPHVAAGLKDPVPSGFSAGEVLIPLADEYDPMFPNDYEKVVKRQREERQRQRELERQKEIEEREKRRKDRHEASGFARRPDPDSDEDEDYERERRKRSMGGAAIAPPTSLVEKDKELPRDFPYEEDSRPRSQSSKAAIPPPVYEEQDRPRSPTGPSNSFLANMGGTVAHKIMQKYGFREGQGLGKHEQGLSTALSVEKTSKRGGKIIVGDATEKDASKKSDSNPLTEILKCPTKVVLLRNMVGAGEVDEDLEVETKEECEKYGKVGKCVIFEIPGAPDDEAVRIFLEFERVESAIKAVVDLNGRYFGGRVVKACFYNLDKFRVLDLAEQV

SEQ ID NO: 895943 - protein, 401 aa, Homo sapiens; identical to SEQ ID NO: 895942

SEQ ID NO: 895944 - protein, 401 aa, Homo sapiens; identical to SEQ ID NO: 895942

SEQ ID NO: 895945 - protein, 318 aa, Homo sapiens [sequence omitted]

SEQ ID NO: 895946 - protein, 368 aa, Homo sapiens [sequence omitted]

SEQ ID NO: 895947 - protein, 401 aa, Homo sapiens; identical to SEQ ID NO: 895942

SEQ ID NO: 895948 - protein, 401 aa, Homo sapiens; identical to SEQ ID NO: 895942

SEQ ID NO: 895949 - protein, 410 aa, Homo sapiens
YFLLSFQLPMSLYDDLGVETSDSKTEGWSKNFKLLQSQLQVKKAALTQAKSQRTKQSTVLAPVIDLKRGGSSDDRQIVDTPPHVAAGLKDPVPSGFSAGEVLIPLADEYDPMFPNDYEKVVKRQREERQRQRELERQKEIEEREKRRKDRHEASGFARRPDPDSDEDEDYERERRKRSMGGAAIAPPTSLVEKDKELPRDFPYEEDSRPRSQSSKAAIPPPVYEEQDRPRSPTGPSNSFLANMGGTVAHKIMQKYGFREGQGLGKHEQGLSTALSVEKTSKRGGKIIVGDATEKDASKKSDSNPLTEILKCPTKVVLLRNMVGAGEVDEDLEVETKEECEKYGKVGKCVIFEIPGAPDDEAVRIFLEFERVESAIKAVVDLNGRYFGGRVVKACFYNLDKFRVLDLAEQV

SEQ ID NO: 895950 - protein, 367 aa, Homo sapiens
KAPAQAKSQRTKQSTVLAPVIDLKRGGSSDDRQIVDTPPHVAAGLKDPVPSGFSAGEVLIPLADEYDPMFPNDYEKVVKRQREERQRQRELERQKEIEEREKRRKDRHEASGFARRPDPDSDEDEDYERERRKRSMGGAAIAPPTSLVEKDKELPRDFPYEEDSRPRSQSSKAAIPPPVYEEQDRPRSPTGPSNSFLANMGGTVAHKIMQKYGFREGQGLGKHEQGLSTALSVEKTSKRGGKIIVGDATEKDASKKSDSNPLTEILKCPTKVVLLRNMVGAGEVDEDLEVETKEECEKYGKVGKCVIFEIPGAPDDEAVRIFLEFERVESAIKAVVDLNGRYFGGRVVKACFYNLDKFRVLDLAEQV

SEQ ID NO: 895951 - protein, 318 aa, Homo sapiens [sequence omitted]

SEQ ID NO: 895952 - protein, 382 aa, Homo sapiens
MSLYDDLGVETSDSKTEGWSKNFKLLQSQLQVKKAALTQAKSQRTKQSTVLAPVIDLKRGGSSDDRQIVDTPPHVAAGLKDPVPSGFSAGEVLIPLADEYDPMFPNDYEKVVKRQREERQRQRELERQKEIEEREKRRKDRHEASGFARRPDPDSDEDEDYERERRKRIPRDFPYEEDSRPRSQSSKAAIPPPVYEEQDRPRSPTGPSNSFLANMGGTVAHKIMQKYGFREGQGLGKHEQGLSTALSVEKTSKRGGKIIVGDATEKDASKKSDSNPLTEILKCPTKVVLLRNMVGAGEVDEDLEVETKEECEKYGKVGKCVIFEIPGAPDDEAVRIFLEFERVESAIKAVVDLNGRYFGGRVVKACFYNLDKFRVLDLAEQV

SEQ ID NO: 895953 - protein, 401 aa, Homo sapiens; identical to SEQ ID NO: 895942

SEQ ID NO: 895954 - protein, 168 aa, Homo sapiens [sequence omitted]

SEQ ID NO: 895955 - protein, 368 aa, Homo sapiens [sequence omitted]

SEQ ID NO: 895956 - protein, 351 aa, Homo sapiens
MSLYDDLGVETSDSKTEGWSKNFKLLQSQLQVKKAALTQAKSQRTKQSTVLAPVIDLKRGGSSDDRQIVDTPPHVAAGLKDPVPSGFSAGEVLIPLADEYDPMFPNDYEKVVKRQREERQRQRELERQKEIEEREKRRKDRHEASGFARRPDPDSDEDEDYERERRKRSMGGAAIAPPTSLVEKDKELPRDFPYEEDSRPRSQSSKAAIPPPVYEEQDRPRSPTGPSNSFLANMGGTVAHKIMQKYGFREGQGLGKHEQGLSTALSVEKTSKRGGKIIVGDATEKDASKKSDSNPLTEILKCPTKVVLLRNMVGAGEVDEDLEVETKEECEVDEVTAWIQRLLVNKEVRAR

SEQ ID NO: 895957 - protein, 318 aa, Homo sapiens [sequence omitted]

SEQ ID NO: 895958 - protein, 171 aa, Homo sapiens [sequence omitted]

SEQ ID NO: 895959 - protein, 539 aa, Homo sapiens
MSLYDDLGVETSDSKTEGWSKNFKLLQSQLQVKKAALTQAKSQRTKQSTVLAPVIDLKRGGSSDDRQIVDTPPHVAAGLKDPVPSGFSAGEVLIPLADEYDPMFPNDYEKVVKRQREERQRQRELESTHRQHQHSNRATHTGVNSTAPCTAQAGSIAKAAPSIQAFMQCTGMQSISLPAQQQRGQHSKSSGRAACHICTHTHTFLWVSQPQAQQAASPPSRHYLPSLRKARHITTTLRIHEIRFTKPAQPTLPIPHRMVPNGTPKDQRTPQQSSTHPGEPYSAKHFPLSPYGHTTKRGETPTREPRPATNRNSNWRTNTITRGTFPRGQAATKGDSIAQEDTGTFGTAQAGQLTGQPLGPLDHKDRGHAHRTTTQQTVAQGSKKHNKASRDQNTDHTHEKRTKRTGQNHPTEKDVTQHIQNDYTKRTIAANRHGVAPTPPTGGPTTPQRTTRGRDARTPRSQVHNTRADADTAGTAGEPTTRTTDEQRTLRPSQADVLEAQPAETQAHQAHHLDTRHDRQHTANKPREQHERATNDRTT

SEQ ID NO: 895960 - protein, 246 aa, Homo sapiens
MAAALGASGGAGAGDDDFDQFDKPGAERSWRRRAADEDWDSELEDDLLGEDLLSGKKNQSDLSDEELNDDLLQSDNEDEENFSSQGVTISLNATSGMVTSFELSDNTNDQSGEQESEYEQEQGEDELVYHKSDGSELYTQEYPEEGQYEGHEAELTEDQIEYVEEPEEEQLYTDEVLDIEINEPLDEFTDEEYLQAYGGQQGLQEQEDCVAEDELDEITDAQVAPATEEGGMETLELYKGPSCRLV

SEQ ID NO: 895961 - protein, 1024 aa, Homo sapiens
MAAALGASGGAGAGDDDFDQFDKPGAERSWRRRAADEDWDSELEDDLLGEDLLSGKKNQSDLSDEELNDDLLQSDNEDEENFSSQGVTISLNATSGMVTSFELSDNTNDQSGEQESEYEQEQGEDELVYHKSDGSELYTQEYPEEGQYEGHEAELTEDQIEYVEEPEEEQLYTDEVLDIEINEPLDEFTGGMETLELQKDIKEESDEEEEDDEESGRLRFKTERKEGTIIRLSDVTRERRNIPETLELSAEAKAALLEFEERERQHKQGRYSSRRGGRRGGPLMCRGVGDQRRESTERGRMKDHRPALLPTQPPVVILPEEELMSDLMPSDDISCWTLLPKASREPQAPPPPPPPPQQQPIRSLFQPQPLQPLLPVQHPHHPSPPQGMHMPPQLETPRMMMTPPPVTPQQPKNIHINPHFKGTVVTPVQVPLLPVPSQPRPAVGPQRFPGPPEFPQHTPGPVPNSFSQPPRLPLQDQWRAPPPPQDRDPFFLGVSGEPRFPSHLFLEQRSPPPPPPPPTLLNSSHPVPTQSPLPFTQPGPAFNQQGQQPVFPRERPVRPALQPPGPVGILHFSQPGSATTRPFIPPRQPFLPGPGQPFLPTHTQPNLQGPLHPPLPPPHQPQPQQPQQQPPPQHQPPHQPPHQPPPQHQPPPQHPPQHPPQHQHHHHHHHLSVPPPPLMPMSQPQFRPHVQTAQPQASSSRMQCPQRQGLRHNTTSQNVSKRPMQQMQPTAPRNSNLRELPIAPSHVIEMSSSRCSATPSAQVKPIVSASPPSRAVAGSRSSQGKTEVKVKPASPVAQPKEEAKTETEFPDEDEETRLYRLKIEEQKRLREEILKQKELRRQQQAGARKKELLERLAQQQQQLYAPPPPAEQEEQALSPSPTNGNPLLPFPGAQVRQNVKNRLLVKNQDVSISNVQPKTSNFVPSSANMQYQGQQMKALKHLRQTRTVPQSQTQPLHKVLPIKPADVEEPAVPQTPRVASIQGRPQDTKPGVKRTVTHRTNSGGGDGPHISSKVRVIKLSGGVS

SEQ ID NO: 895962 - protein, 592 aa, Homo sapiens
SVALGSSRDCVGPQRFPGPPEFPQHTPGPVPNSFSQPPRLPLQDQWRAPPPPQDRDPFFLGVSGEPRFPSHLFLEQRSPPPPPPPPTLLNSSHPVPTQSPLPFTQPGPAFNQQGQQPVFPRERPVRPALQPPGPVGILHFSQPGSATTRPFIPPRQPFLPGPGQPFLPTHTQPNLQGPLHPPLPPPHQPQPQQPQQQPPPQHQPPHQPPHQPPPQHQPPPQHPPQHPPQHQHHHHHHHLSVPPPPLMPMSQPQFRPHVQTAQPQASSSRMQCPQRQGLRHNTTSQNVSKRPMQQMQPTAPRNSNLRELPIAPSHVIEMSSSRCSATPSAQVKPIVSASPPSRAVAGSRSSQGKTEVKVKPASPVAQPKEEAKTETEFPDEDEETRLYRLKIEEQKRLREEILKQKELRRQQQAGARKKELLERLAQQQQQLYAPPPPAEQEEQALSPSPTNGNPLLPFPGAQVRQNVKNRLLVKNQDVSISNVQPKTSNFVPSSANMQYQGQQMKALKHLRQTRTVPQSQTQPLHKVLPIKPADVEEPAVPQTPRVASIQGRPQDTKPGVKRTVTHRTNSGGGDGPHISSKVRVIKLSGGVS

SEQ ID NO: 895963 - protein, 193 aa, Homo sapiens
RRSPESTYGQQSSPPCFKHLGFRSRAEVTAACLRCTPTARNTAAASGLLRPRRGQAPAPARLPASIIPGCTAAGAGARPCCGSLLFSSCGGEGPAVDREAPGFASASCSPLPSLSSVTRTRARTRHVGPPAGLVGEAEGRAPRVPWRPPWERAEEQAPEMMTLTSLISLARNGRGEEELLMRTGTGTCTLCFT

SEQ ID NO: 895964 - protein, 268 aa, Homo sapiens
MAAALGASGGAGAGDDDFDQFDKPGAERSWRRRAADEDWDSELEDDLLGEDLLSGKKNQSDLSDEELNDDLLQSDNEDEENFSSQGVTISLNATSGMVTSFELSDNTNDQSGEQESEYEQEQGEDELVYHKSDGSELYTQEYPEEGQYEGHEAELTEDQIEYVEEPEEEQLYTDEVLDIEINEPLDEFTGGMETLELQKDIKEESDEEEEDDEESGRLRFKTERKEGTIIRLSDVTRERRNIPETLGNFFACLPSSFTLISTSSIVLL

SEQ ID NO: 895965 - protein, 613 aa, Homo sapiens
MAAALGASGGAGAGDDDFDQFDKPGAERSWRRRAADEDWDSELEDDLLGEDLLSGKKNQSDLSDEELNDDLLQSDNEDEENFSSQGVTISLNATSGMVTSFELSDNTNDQSGEQESEYEQEQGEDELVYHKSDGSELYTQEYPEEGQYEGHEAELTEDQIEYVEEPEEEQLYTDEVLDIEINEPLDEFTGGMETLELQKDIKEESDEEEEDDEESGRLRFKTERKEGTIIRLSDVTRERRNIPETLELSAEAKAALLEFEERERQHKQGRYSSRRGGRRGGPLMCRGVGDQRRESTERGRMKDHRPALLPTQPPVVILPEEELMSDLMPSDDISCWTLLPKASREPQAPPPPPPPPQQQPIRSLFQPQPLQPLLPVQHPHHPSPPQGMHMPPQLETPRMMMTPPPVTPQQPKNIHINPHFKGTVVTPVQVPLLPVPSQPRPAVGPQRFPGPPEFPQHTPGPVPNSFSQPPRLPLQDQWRAPPPPQDRDPFFLGVSGEPRFPSHLFLEQRSPPPPPPPPTLLNSSHPVPTQSPLPFTQPGPAFNQQGQQPVFPRERPVRPALQPPGPVGILHFSQPGSATTRPFIPPRQPFLPGPGQPFLPTHTQPNLQVMHPE

SEQ ID NO: 895966 - protein, 995 aa, Homo sapiens
MAAALGASGGAGAGDDDFDQFDKPGAERSWRRRAADEDWDSELEDDLLGEDLLSGKKNQSDLSDEELNDDLLQSDNEDEENFSSQGVTISLNATSGMVTSFELSDNTNDQSGEQESEYEQEQGEDELVYHKSDGSELYTQEYPEEGQYEGHEAELTEDQIEYVEEPEEEQLYTDEVLDIEINEPLDEFTGGMETLELQKDIKEESDEEEEDDEESGRLRFKTERKEGTIIRLSDVTRERRNIPETLELSAEAKAALLEFEERERQHKQGRYSSRRGGRRGGPLMCRGVGDQRRESTERGRMKDHRPALLPTQPPVVPQAPPPPPPPPQQQPIRSLFQPQPLQPLLPVQHPHHPSPPQGMHMPPQLETPRMMMTPPPVTPQQPKNIHINPHFKGTVVTPVQVPLLPVPSQPRPAVGPQRFPGPPEFPQHTPGPVPNSFSQPPRLPLQDQWRAPPPPQDRDPFFLGVSGEPRFPSHLFLEQRSPPPPPPPPTLLNSSHPVPTQSPLPFTQPGPAFNQQGQQPVFPRERPVRPALQPPGPVGILHFSQPGSATTRPFIPPRQPFLPGPGQPFLPTHTQPNLQGPLHPPLPPPHQPQPQQPQQQPPPQHQPPHQPPHQPPPQHQPPPQHPPQHPPQHQHHHHHHHLSVPPPPLMPMSQPQFRPHVQTAQPQASSSRMQCPQRQGLRHNTTSQNVSKRPMQQMQPTAPRNSNLRELPIAPSHVIEMSSSRCSATPSAQVKPIVSASPPSRAVAGSRSSQGKTEVKVKPASPVAQPKEEAKTETEFPDEDEETRLYRLKIEEQKRLREEILKQKELRRQQQAGARKKELLERLAQQQQQLYAPPPPAEQEEQALSPSPTNGNPLLPFPGAQVRQNVKNRLLVKNQDVSISNVQPKTSNFVPSSANMQYQGQQMKALKHLRQTRTVPQSQTQPLHKVLPIKPADVEEPAVPQTPRVASIQGRPQDTKPGVKRTVTHRTNSGGGDGPHISSKVRVIKLSGGVS

SEQ ID NO: 895967 - protein, 362 aa, Homo sapiens
QKLGRLRAQRGLPGDAGPLPARSPQVGPAPGRWGAARCPQVAASSRPPSAASPDRGRTSPRACSPGAPLRTPGPSQVCARGPSRPCGERGPERRRGLRAPETEGLAAEGTAPRRASGPGAAGTCAGGHSLFDSCQTMFTLLVLLSQLPTVTLGFPHCARGPKASKHAGEEVFTSKEEANFFIHRRLLYNRFDLELFTPGNLERECNEELCNYEEAREIFVDEDKTIAFWQEYSAKGPTTKSDGNREKIDVMGLLTGLIAAGVFLVIFGLLGYYLCITKCNRLQHPCSSAVYERGRHTPSIIFRRPEEAALSPLPPSVEDAGLPSYEQAVALTRKHSVSPPPPYPGHTKGFRVFKKSMSLPSH

SEQ ID NO: 895968 - protein, 362 aa, Homo sapiens; identical to SEQ ID NO: 895967

SEQ ID NO: 895969 - protein, 760 aa, Homo sapiens
QSGLALGYWLGPMLGTLRAMEGEDVEDDQLLQKLRASRRRFQRRMQRLIEKYNQPFEDTPVVQMATLTYETPQGLRIWGGRLIKERNKGEIQDSSMKPADRTDGSVQAAAWGPELPSHRTVLGADSKSGEVDATSDQEESVAWALAPAVPQSPLKNELRRKYLTQVDILLQGAEYFECAGNRAGRDVRVTPLPSLASPAVPAPGYCSRISGKSPGDPAKPASSPREWDPLHPSSTDMALVPRNDSLSLQETSSSSFLSSQPFEDDDICNVTISDLYAGMLHSMSRLLSTKPSSIISTKTFIMQNWNSRRRHRYKSRMNKTYCKGARRSQRSSKENFIPCSEPVKGTGALRDCKNVLDVSCRKTGLKLEKAFLEVNRPQIHKLDPSWKERKVTPSKYSSLIYFDSSATYNLDEENRFRTLKWLISPVKIVSRPTIRQGHGENRQREIEIRFDQLHREYCLSPRNQPRRMCLPDSWAMNMYRGGPASPGGLQGLETRRLSLPSSKAKAKSLSEAFENLGKRSLEAGRCLPKSDSSSSLPKTNPTHSATRPQQTSDLHVQGNSSGIFRKSVSPSKTLSVPDKEVPGHGRNRYDEIKEEFDKLHQKYCLKSPGQMTVPLCIGVSTDKASMEVRYQTEGFLGKLNPDPHFQGFQKLPSSPLGCRKSLLGSTAIEAPSSTCVARAITRDGTRDHQFPAKRPRLSEPQGSGRQGNSLGASDGVDNTVRPGDQGSSSQPNSEERGENTSYRMEEKSDFMLEKLETKSV

SEQ ID NO: 895970 - protein, 727 aa, Homo sapiens
VRVGAWVLAGSDAGYAARHGGRGRGRRPAAAEAQGQSPPLPEAHAAADREVQPALRGHPGGANGHADLRDATGIENLGWKTNKGKKQRRDPDSKSGEVDATSDQEESVAWALAPAVPQSPLKNELRRKYLTQVDILLQGAEYFECAGNRAGRDVRVTPLPSLASPAVPAPGYCSRISGKSPGDPAKPASSPREWDPLHPSSTDMALVPRNDSLSLQETSSSSFLSSQPFEDDDICNVTISDLYAGMLHSMSRLLSTKPSSIISTKTFIMQNWNSRRRHRYKSRMNKTYCKGARRSQRSSKENFIPCSEPVKGTGALRDCKNVLDVSCRKTGLKLEKAFLEVNRPQIHKLDPSWKERKVTPSKYSSLIYFDSSATYNLDEENRFRTLKWLISPVKIVSRPTIRQGHGENRQREIEIRFDQLHREYCLSPRNQPRRMCLPDSWAMNMYRGGPASPGGLQGLETRRLSLPSSKAKAKSLSEAFENLGKRSLEAGRCLPKSDSSSSLPKTNPTHSATRPQQTSDLHVQGNSSGIFRKSVSPSKTLSVPDKEVPGHGRNRYDEIKEEFDKLHQKYCLKSPGQMTVPLCIGVSTDKASMEVRYQTEGFLGKLNPDPHFQGFQKLPSSPLGCRKSLLGSTAIEAPSSTCVARAITRDGTRDHQFPAKRPRLSEPQGSGRQGNSLGASDGVDNTVRPGDQGSSSQPNSEERGENTSYRMEEKSDFMLEKLETKSV

SEQ ID NO: 895971 - protein, 524 aa, Homo sapiens [sequence omitted]

SEQ ID NO: 895972 - protein, 760 aa, Homo sapiens; identical to SEQ ID NO: 895969

SEQ ID NO: 895973 - protein, 760 aa, Homo sapiens; identical to SEQ ID NO: 895969

SEQ ID NO: 895974 - protein, 444 aa, Homo sapiens
QSGLALGYWLGPMLGTLRAMEGEDVEDDQLLQKLRASRRRFQRRMQRLIEKYNQPFEDTPVVQMATLTYETPQGLRIWGGRLIKERNKGEIQDSSMKPADRTDGSVQAAAWGPELPSHRTVLGADSKSGEVDATSDQEESVAWALAPAVPQSPLKNELRRKYLTQVDILLQGAEYFECAGNRAGRDVRVTPLPSLASPAVPAPGYCSRISGKSPGDPAKPASSPREWDPLHPSSTDMALVPRNSSGIFRKSVSPSKTLSVPDKEVPGHGRNRYDEIKEEFDKLHQKYCLKSPGQMTVPLCIGVSTDKASMEVRYQTEGFLGKLNPDPHFQGFQKLPSSPLGCRKSLLGSTAIEAPSSTCVARAITRDGTRDHQFPAKRPRLSEPQGSGRQGNSLGASDGVDNTVRPGDQGSSSQPNSEERGENTSYRMEEKSDFMLEKLETKSV

SEQ ID NO: 895975 - protein, 260 aa, Homo sapiens
MGGVERHRLLVVPAEHAHLQLGLQQPGGRRPGGRVQPGLGRPRRGPLLARRRLAGGGGGGGGGGRAAQQHGGGTTRERAQLGEALLQQPGLGGARAQLQRAQFQRAPQVAAPGPRLVAVVVVVLVVVGRPQRRPQRPRPGPRVGGAAGRRGGGGRGAAAAVPTAGAAEARLAVHRFGDERGEPQVVVPGAEGLRVRRARGAHVAGAGHERHGRGGAAAAGRAGRPGESLHGRAAGRAPPPRRRRGPDGRDTPSLPAGLPR

SEQ ID NO: 895976 - protein, 260 aa, Homo sapiens; identical to SEQ ID NO: 895975

SEQ ID NO: 895977 - protein, 260 aa, Homo sapiens; identical to SEQ ID NO: 895975

SEQ ID NO: 895978 - protein, 1063 aa, Homo sapiens [sequence omitted]

SEQ ID NO: 895979 - protein, 1050 aa, Homo sapiens
PAAAHAPAGAPPPCAARLQGHVPGSGLVDSSVPAAAGRPGIAAGPPEQISAPFQTLLMPHLPLASFRPPFWGLRHSRGLPRFHSVSTQSEPHGSPISRRNREAKQKRLREKQATLEAEIAGESKSPAESIKAWRPKELVLYEIPTKPGEKKDVSGPLPPAYSPRYVEAAWYPWWVREGFFKPEYQARLPQATGETFSMCIPPPNVTGSLHIGHALTVAIQDALVRWHRMRGDQVLWVPGSDHAGIATQAVVEKQLWKERGVRRHELSREAFLREVWQWKEAKGGEICEQLRALGASLDWDRECFTMDVGSSVAVTEAFVRLYKAGLLYRNHQLVNWSCALRSAISDIEVENRPLPGHTPPLPLITDYAVQPHVGTGAVKVTPAHSPADAEMGARHGLSPLNVIAEDGTMTSLCGDWLQGLHRFVAREKIMSVLSERGLFRGLQNHPMVLPICSRSGDVIEYLLKNQWFVRCQEMGARAAKAVESGALELSPSFHQKNWQHWFSHIGDWCVSRQLWWGHQIPAYLVVEDHAQGEEDCWVVGRSEAEAREVAAELTGRPGAELTLERDPDVLDTWFSSALFPFSALGWPQETPDLARFYPLSLLETGSDLLLFWVGRMVMLGTQLTGQLPFSKVLLHPMVRDRQGRKMSKSLGNVLDPRDIISGVEMQLLQEKLRSGNLDPAELAIVAAAQKKDFPHGIPECGTDALRFTLCSHGVQAGDLHLSVSEVQSCRHFCNKIWNALRFILNALGEKFVPQPAEELSPSSPMDAWILSRLALAAQECERGFLTRELSLVTHALHHFWLHNLCDVYLEAVKPVLWHSPRPLGPPQVLFSCADLGLRLLAPLMPFLAEELWQRLPPRPGCPPAPSISVAPYPSACSLEHWRQPELERRFSRVQEVVQVLRALRATYQLTKARPRVLLQSSEPGDQGLFEAFLEPLGTLGYCGAVGLLPPGAAAPSGWAQAPLSDTAQVYMELQGLVDPQIQLPLLAARRYKLQKQLDSLTARTPSEGEAGTQRQQKLSSLQLELSKLDKAASHLRQLMDEPPAPGSPEL

SEQ ID NO: 895980 - protein, 1120 aa, Homo sapiens
PAAAHAPAGAPPPCAARLQGHVPGSGLVDSSVPAAAGRPGIAAGPPEQISAPFQTLLMPHLPLASFRPPFWGLRHSRGLPRFHSVSTQSEPHGSPISRRNREAKQKRLREKQATLEAEIAGESKSPAESIKAWRPKELVLYEIPTKPGEKKDVSGPLPPAYSPRYVEAAWYPWWVREGFFKPEYQARLPQATGETFSMCIPPPNVTGSLHIGHALTVAIQDALVRWHRMRGDQVLWVPGSDHAGIATQAVVEKQLWKERGVRRHELSREAFLREVWQWKEAKGGEICEQLRALGASLDWDRECFTMDVGSSVAVTEAFVRLYKAGLLYRNHQLVNWSCALRSAISDIEVENRPLPGHTQLRLPGCPTPVSFGLLFSVAFPVDGEPDAEVVVGTTRPETLPGDVAVAVHPDDSRYTHLHGRQLRHPLMGQPLPLITDYAVQPHVGTGAVKVTPAHSPADAEMGARHGLSPLNVIAEDGTMTSLCGDWLQGLHRFVAREKIMSVLSERGLFRGLQNHPMVLPICSRSGDVIEYLLKNQWFVRCQEMGARAAKAVESGALELSPSFHQKNWQHWFSHIGDWCVSRQLWWGHQIPAYLVVEDHAQGEEDCWVVGRSEAEAREVAAELTGRPGAELTLERDPDVLDTWFSSALFPFSALGWPQETPDLARFYPLSLLETGSDLLLFWVGRMVMLGTQLTGQLPFSKVLLHPMVRDRQGRKMSKSLGNVLDPRDIISGVEMQLLQEKLRSGNLDPAELAIVAAAQKKDFPHGIPECGTDALRFTLCSHGVQAGDLHLSVSEVQSCRHFCNKIWNALRFILNALGEKFVPQPAEELSPSSPMDAWILSRLALAAQECERGFLTRELSLVTHALHHFWLHNLCDVYLEAVKPVLWHSPRPLGPPQVLFSCADLGLRLLAPLMPFLAEELWQRLPPRPGCPPAPSISVAPYPSACSLEHWRQPELERRFSRVQEVVQVLRALRATYQLTKARPRVLLQSSEPGDQGLFEAFLEPLGTLGYCGAVGLLPPGAAAPSGWAQAPLSDTAQVYMELQGLVDPQIQLPLLAARRYKLQKQLDSLTARTPSEGEAGTQRQQKLSSLQLELSKLDKAASHLRQLMDEPPAPGSPEL

SEQ ID NO: 895981 - protein, 1096 aa, Homo sapiens
PAAAHAPAGAPPPCAARLQGHVPGSGLVDSSVPAAAGRPGIAAGPPEQISAPFQTLLMPHLPLASFRPPFWGLRHSRGLPRFHSVSTQSEPHGSPISRRNREAKQKRLREKQATLEAEIAGESKSPAESIKAWRPKELVLYEIPTKPGEKKDVSGPLPPAYSPRYVEAAWYPWWVREGFFKPEYQARLPQATGETFSMCIPPPNVTGSLHIGHALTVAIQDALVRWHRMRGDQVLWVPGSDHAGIATQAVVEKQLWKERGVRRHELSREAFLREVWQWKEAKGGEICEQLRALGASLDWDRECFTMDVGSSVAVTEAFVRLYKAGLLYRNHQLVNWSCALRSAISDIEVENRPLPGHTQLRLPGCPTPVSFGLLFSVAFPVDGEPDAEVVVGTTRPETLPGDVAVAVHPDDSRYTHLHGRQLRHPLMGQPLPLITDYAVQPHVGTGAVKVTPAHSPADAEMGARHGLSPLNVIAEDGTMTSLCGDWLQGLHRFVAREKIMSVLSERGLFRGLQNHPMVLPICSRSGDVIEYLLKNQWFVRCQEMGARAAKAVESGALELSPSFHQKNWQHWFSHIGDWCVSRQLWWGHQIPAYLVVEDHAQGEEDCWVVGRSEAEAREVAAELTGRPGAELTLERDPRPCSFLPPVTFGNGQRPSAVLGGPHGHVGDPAHRAAALQQGASSSHGSGQAGRKMSKSLGNVLDPRDIISGVEMQLLQEKLRSGNLDPAELAIVAAAQKKDFPHGIPECGTDALRFTLCSHGVQAGDLHLSVSEVQSCRHFCNKIWNALRFILNALGEKFVPQPAEELSPSSPMDAWILSRLALAAQECERGFLTRELSLVTHALHHFWLHNLCDVYLEAVKPVLWHSPRPLGPPQVLFSCADLGLRLLAPLMPFLAEELWQRLPPRPGCPPAPSISVAPYPSACSLEHWRQPELERRFSRVQEVVQVLRALRATYQLTKARPRVLLQSSEPGDQGLFEAFLEPLGTLGYCGAVGLLPPGAAAPSGWAQAPLSDTAQVYMELQGLVDPQIQLPLLAARRYKLQKQLDSLTARTPSEGEAGTQRQQKLSSLQLELSKLDKAASHLRQLMDEPPAPGSPEL

SEQ ID NO: 895982 - protein, 1120 aa, Homo sapiens; identical to SEQ ID NO: 895980

SEQ ID NO: 895983 - protein, 1007 aa, Homo sapiens
PAAAHAPAGAPPPCAARLQGHVPGSGLVDSSVPAAAGRPGIAAGPPEQISAPFQTLLMPHLPLASFRPPFWGLRHSRGLPRFHSVSTQSEPHGSPISRRNREAKQKRLREKQATLEAEIAGESKSPAESIKAWRPKELVLYEIPTKPGEKKDVSGPLPPAYSPRYVEAAWYPWWVREGFFKPEYQARLPQATGETFSMCIPPPNVTGSLHIGHALTVAIQDALVRWHRMRGDQVLWVPGSDHAGIATQAVVEKQLWKERGVRRHELSREAFLREVWQWKEAKGGEICEQLRALGASLDWDRECFTMDVGSSVAVTEAFVRLYKAGLLYRNHQLVNWSCALRSAISDIEVENRPLPGHTQLRLPGCPTPVSFGLLFSVAFPVDGEPDAEVVVGTTRPETLPGDVAVAVHPDDSRYTHLHGRQLRHPLMGQPLPLITDYAVQPHVGTGAVKVTPAHSPADAEMGARHGLSPLNVIAEDGTMTSLCGDWLQGLHRFVAREKIMSVLSERGLFRGLQNHPMVLPICSRSGDVIEYLLKNQWFVRCQEMGARAAKAVESGALELSPSFHQKNWQHWFSHIGDWCVSRQLWWGHQIPAYLVVEDHAQGEEDCWVVGRSEAEAREVAAELTGRPGAELTLERDPDVLDTWFSSALFPFSALGWPQETPDLARFYPLSLLETGSDLLLFWVGRMVMLGTQLTGQLPFSKVLLHPMVRDRQGRKMSKSLGNVLDPRDIISGVEMQLLQEKLRSGNLDPAELAIVAAAQKKDFPHGIPECGTDALRFTLCSHGVQAGDLHLSVSEVQSCRHFCNKIWNALRFILNALGEKFVPQPAEELSPSSPMDAWILSRLALAAQECERGFLTRELSLVTHALHHFWLHNLCDVYLEAVKPVLWHSPRPLGPPQVLFSCADLGLRLLAPLMPFLAEELWQRLPPRPGCPPAPSISVAPYPSACSLEHWRQPELERRFSRVQEVVQVLRALRATYQLTKARPRVLLQSSEPGDQGLFEAFLDPEL

SEQ ID NO: 895984 - protein, 769 aa, Homo sapiens
PAAAHAPAGAPPPCAARLQGHVPGSGLVDSSVPAAAGRPGIAAGPPEQISAPFQTLLMPHLPLASFRPPFWGLRHSRGLPRFHSVSTQSEPHGSPISRRNREAKQKRLREKQATLEAEIAGESKSPAESIKAWRPKELVLYEIPTKPGEKKDVSGPLPPAYSPRYVEAAWYPWWVREGFFKPEYQARLPQATGETFSMCIPPPNVTGSLHIGHALTVAIQDALVRWHRMRGDQVLWVPGSDHAGIATQAVVEKQLWKERGVRRHELSREAFLREVWQWKEAKGGEICEQLRALGASLDWDRECFTMDVGSSVAVTEAFVRLYKAGLLYRNHQLVNWSCALRSAISDIEVENRPLPGHTQLRLPGCPTPVSFGLLFSVAFPVDGEPDAEVVVGTTRPETLPGDVAVAVHPDDSRYTHLHGRQLRHPLMGQPLPLITDYAVQPHVGTGAVKVTPAHSPADAEMGARHGLSPLNVIAEDGTMTSLCGDWLQGLHRFVAREKIMSVLSERGLFRGLQNHPMVLPICSRSGDVIEYLLKNQWFVRCQEMGARAAKAVESGALELSPSFHQKNWQHWFSHIGDWCVSRQLWWGHQIPAYLVVEDHAQGEEDCWVVGRSEAEAREVAAELTGRPGAELTLERDPRPCSFLPPVTFGNGQRPSAVLGGPHGHVGDPAHRAAALQQGASSSHGSGQAGPEDEQVPGECAGPKRHHQWGGDAVAAGKAEKRKFGPCRAGHCGCSTVFLPLRPVFEDKQICQLSGCSGTSETMWSIAFIV

SEQ ID NO: 895985 - protein, 112 aa, Homo sapiens
MQDTGSVVPLHWFGFGYAALVASGGIIGYVKAGSVPSLAAGLLFGSLAGLGAYQLSQDPRNVWVFLATSGTLAGIMGMRFYHSGKFMPAGLIAGASLLMVAKVGVSMFNRPH

SEQ ID NO: 895986 - protein, 89 aa, Homo sapiens
LDSGARRDAPPHSPPAECRAHAATWRLKPRPHRPHSLTAPLPVHCAGTTEPLPSPRPATGTESARRCISGDTSQSFLRLARPCRQPGPS

SEQ ID NO: 895987 - protein, 112 aa, Homo sapiens; identical to SEQ ID NO: 895985

SEQ ID NO: 895988 - protein, 112 aa, Homo sapiens; identical to SEQ ID NO: 895985

SEQ ID NO: 895989 - protein, 112 aa, Homo sapiens; identical to SEQ ID NO: 895985

SEQ ID NO: 895990 - protein, 89 aa, Homo sapiens; identical to SEQ ID NO: 895986

SEQ ID NO: 895991 - protein, 89 aa, Homo sapiens; identical to SEQ ID NO: 895986

SEQ ID NO: 895992 - protein, 112 aa, Homo sapiens; identical to SEQ ID NO: 895985

SEQ ID NO: 895993 - protein, 112 aa, Homo sapiens; identical to SEQ ID NO: 895985

SEQ ID NO: 895994 - protein, 89 aa, Homo sapiens; identical to SEQ ID NO: 895986

SEQ ID NO: 895995 - protein, 112 aa, Homo sapiens; identical to SEQ ID NO: 895985

SEQ ID NO: 895996 - protein, 166 aa, Homo sapiens
  misc_feature (73)..(73): Xaa can be any naturally occurring amino acid
  misc_feature (90)..(90): Xaa can be any naturally occurring amino acid
  misc_feature (94)..(94): Xaa can be any naturally occurring amino acid
  misc_feature (105)..(105): Xaa can be any naturally occurring amino acid
  misc_feature (113)..(113): Xaa can be any naturally occurring amino acid
  misc_feature (121)..(121): Xaa can be any naturally occurring amino acid
MQDTGSVVPLHWFGFGYAALVASGGIIGYVKAGSVPSLAAGLLFGSLAGLGAYQLSQDPRNVWVFLALHPVPXLALGEGGPTTPENPRPXAQSXAPVRRRPPKWXSARPAAPXRRSHAPAXTDEELKICIFHYFQYIKRNKCSIFASDILPKKKDTKLGREVENQS

SEQ ID NO: 895997 - protein, 112 aa, Homo sapiens; identical to SEQ ID NO: 895985

SEQ ID NO: 895998 - protein, 112 aa, Homo sapiens; identical to SEQ ID NO: 895985

SEQ ID NO: 895999 - protein, 112 aa, Homo sapiens; identical to SEQ ID NO: 895985

SEQ ID NO: 896000 - protein, 1004 aa, Homo sapiens
MATESTPSEIIERERKKLLEILQHDPDSILDTLTSRRLISEEEYETLENVTDLLKKSRKLLILVQKKGEATCQHFLKCLFSTFPQSAAICGLRHEVLKHENTVPPQSMGASSNSEDAFSPGIKQPEAPEITVFFSEKEHLDLETSEFFRDKKTSYRETALSARKNEKEYDTPEVTLSYSVEKVGCEVPATITYIKDGQRYEELDDSLYLGKEEYLGSVDTPEDAEATVEEEVYDDPEHVGYDGEEDFENSETTEFSGEEPSYEGSETSLSLEEEQEKSIEERKKVFKDVLLCLNMDRSRKVLPDFVKQFSLDRGCKWTPESPGDLAWNFLMKVQARDVTARDSILSHKVLDEDSKEDLLAGVENLEIRDIQTINPLDVLCATMLCSDSSLQRQVMSNMYQCQFALPLLLPDAENNKSILMLGAMKDIVKKQSTQFSGGPTEDTEKFLTLMKMPVISFVRLGYCSFSKSRILNTLLSPAQLKLHKIFLHQDLPLLVLPRQISDGLVEITWCFPDSDDRKENPFFQKPVALANLRGNLESFWTQFGFLMEVSSAVFFFTDCLGEKEWDLLMFLGEAAIERCYFVLSSQARESEEAQIFQRILNLKPAQLLFWERGDAGDRRKNMEGLQAALQEVMFSSCLRCVSVEDMAALARELGIQVDEDFENTQRIQVSSGENMAGTAEGEGQQRHSQLKSSSKSQALMPIQEPGTQCELSQNLQNLYGTPVFRPVLENSWLFPTRIGGNFNHVSLKASWVMGRPFGSEQRPKWFHPLPFQNAGAQGRGKSFGIQSFHPQIFYSGERFMKFSRVARGCHSNGTFGRLPRPICQHVQACPERPQMMGTLERSRAVASKIGHSYSLDSQPARAVGKPWPQQACTRVTELTEATGKLIRTSHIGKPHPQSFQPAAATQKLRPASQQGVQMKTQGGASNPALQIGSHPMCKSSQFKSDQSNPSTVKHSQPKPFHSVPSQPKSSQTKSCQSQPSQTKPWFLHVGQAGLELPTSGDPPT

SEQ ID NO: 896001 - protein, 943 aa, Homo sapiens
MATESTPSEIIERERKKLLEILQHDPDSILDTLTSRRLISEEEYETLENVTDLLKKSRKLLILVQKKGEATCQHFLKCLFSTFPQSAAICGLRHEVLKHENTVPPQSMGASSNSEDAFSPGIKQPEAPEITVFFSEKEHLDLETSEFFRDKKTSYRETALSARKNEKEYDTPEVTLSYSVEKVGCEVPATITYIKDGQRYEELDDSLYLGKEEYLGSVDTPEDAEATVEEEVYDDPEHVGYDGEEDFENSETTEFSGEEPSYEGSETSLSLEEEQEKSIEERKKVFKDVLLCLNMDRSRKVLPDFVKQFSLDRGCKWTPESPGDLAWNFLMKVQARDVTARDSILSHKVLDEDSKEDLLAGVENLEIRDIQTINPLDVLCATMLCSDSSLQRQVMSNMYQCQFALPLLLPDAENNKSILMLGAMKDIVKKQSTQFSGGPTEDTEKFLTLMKMPVISFVRLGYCSFSKSRILNTLLSPAQLKLHKIFLHQDLPLLVLPRQISDGLVEITWCFPDSDDRKENPFFQKPVALANLRGNLESFWTQFGFLMEVSSAVFFFTDCLGEKEWDLLMFLGEAAIERCYFVLSSQARESEEAQIFQRILNLKPAQLLFWERGDAGDRRKNMEGLQAALQEVMFSSCLRCVSVEDMAALARELGIQVDEDFENTQRIQVSSGENMAGTAEGEGQQRHSQLKSSSKSQALMPIQEPGTQCELSQNLQNLYGTPVFRPVLENSWLFPTRIGGNFNHVSLKASWVMGRPFGSEQRPKWFHPLPFQNAGAQGRGKSFGIQSFHPQIFYSGERFMKFSRVARGCHSNGTFGRLPRPICQHVQACPERPQMMGTLERSRAVASKIGHSYSLDSQPARAVGKPWPQQACTRVTELTEATGKLIRTSHIGKPHPQSFQPAAATHNAIKFDCFKQIRFQLSSNPLVNTRIIVFSVFRDQGLT

SEQ ID NO: 896002 - protein, 1037 aa, Homo sapiens
MATESTPSEIIERERKKLLEILQHDPDSILDTLTSRRLISEEEYETLENVTDLLKKSRKLLILVQKKGEATCQHFLKCLFSTFPQSAAICGLRHEVLKHENTVPPQSMGASSNSEDAFSPGIKQPEAPEITVFFSEKEHLDLETSEFFRDKKTSYRETALSARKNEKEYDTPEVTLSYSVEKVGCEVPATITYIKDGQRYEELDDSLYLGKEEYLGSVDTPEDAEATVEEEVYDDPEHVGYDGEEDFENSETTEFSGEEPSYEGSETSLSLEEEQEKSIEERKKVFKDVLLCLNMDRSRKVLPDFVKQFSLDRGCKWTPESPGDLAWNFLMKVQARDVTARDSILSHKVLDEDSKEDLLAGVENLEIRDIQTINPLDVLCATMLCSDSSLQRQVMSNMYQCQFALPLLLPDAENNKSILMLGAMKDIVKKQSTQFSGGPTEDTEKFLTLMKMPVISFVRLGYCSFSKSRILNTLLSPAQLKLHKIFLHQDLPLLVLPRQISDGLVEITWCFPDSDDRKENPFFQKPVALANLRGNLESFWTQFGFLMEVSSAVFFFTDCLGEKEWDLLMFLGEAAIERCYFVLSSQARESEEAQIFQRILNLKPAQLLFWERGDAGDRRKNMEGLQAALQEVMFSSCLRCVSVEDMAALARELGIQVDEDFENTQRIQVSSGENMAGTAEGEGQQRHSQLKSSSKSQALMPIQEPGTQCELSQNLQNLYGTPVFRPVLENSWLFPTRIGGNFNHVSLKASWVMGRPFGSEQRPKWFHPLPFQNAGAQGRGKSFGIQSFHPQIFYSGERFMKFSRVARGCHSNGTFGRLPRPICQHVQACPERPQMMGTLERSRAVASKIGHSYSLDSQPARAVGKPWPQQACTRVTELTEATGKLIRTSHIGKPHPQSFQPAAATQKLRPASQQGVQMKTQGGASNPALQIGSHPMCKSSQFKSDQSNPSTVKHSQPKPFHSVPSQPKSSQTKSCQSQPSQTKPSPCKSTQPKPSQPWPPQSKPSQPRPPQPKSSSTNPSQAKAHHSKAGQKRGGKH

SEQ ID NO: 896003 - protein, 1021 aa, Homo sapiens
MATESTPSEIIERERKKLLEILQHDPDSILDTLTSRRLISEEEYETLENVTDLLKKSRKLLILVQKKGEATCQHFLKCLFSTFPQSAAICGLRHEVLKHENTVPPQSMGASSNSEDAFSPGIKQPEAPEITVFFSEKEHLDLETSEFFRDKKTSYRETALSARKNEKEYDTPEVTLSYSVEKVGCEVPATITYIKDGQRYEELDDSLYLGKEEYLGSVDTPEDAEATVEEEVYDDPEHVGYDGEEDFENSETTEFSGEEPSYEGSETSLSLEEEQEKSIEERKKVFKDVLLCLNMDRSRKVLPDFVKQFSLDRGCKWTPESPGDLAWNFLMKVQARDVTARDSILSHKVLDEDSKEDLLAGVENLEIRDIQTINPLDVLCATMLCSDSSLQRQVMSNMYQCQFALPLLLPDAENNKSILMLGAMKDIVKKQSTQFSGGPTEDTEKFLTLMKMPVISFVRLGYCSFSKSRILNTLLSPAQLKLHKIFLHQDLPLLVLPRQISDGLVEITWCFPDSDDRKENPFFQKPVALANLRGNLESFWTQFGFLMEVSSAVFFFTDCLGEKEWDLLMFLGEAAIERCYFVLSSQARESEEAQIFQRILNLKPAQLLFWERGDAGDRRKNMEGLQAALQEVMFSSCLRCVSVEDMAALARELGIQVDEDFENTQRIQVSSGENMAGTAEGEGQQRHSQLKSSSKSQALMPIQEPGTQCELSQNLQNLYGTPVFRPVLENSWLFPTRIGGNFNHVSLKASWVMGRPFGSEQRPKWFHPLPFQNAGAQGRGKSFGIQSFHPQIFYSGERFMKFSRVARGCHSNGTFGRLPRPICQHVQACPERPQMMGTLERSRAVASKIGHSYSLDSQPARAVGKPWPQQACTRVTELTEATGKLIRTSHIGKPHPQSFQPAAATQKLRPASQQGVQMKTQGGASNPALQIGSHPMCKSSQFKSDQSNPSTVKHSQPKPFHSVPSQPKSSQTKSCQSQPSQTKPSPCKSTQPKPSQPWPPQSKASGSISATEQITLLIWCG

SEQ ID NO: 896004 - protein, 941 aa, Homo sapiens
MATESTPSEIIERERKKLLEILQHDPDSILDTLTSRRLISEEEYETLENVTDLLKKSRKLLILVQKKGEATCQHFLKCLFSTFPQSAAICGLRHEVLKHENTVPPQSMGASSNSEDAFSPGIKQPEAPEITVFFSEKEHLDLETSEFFRDKKTSYRETALSARKNEKEYDTPEVTLSYSVEKVGCEVPATITYIKDGQRYEELDDSLYLGKEEYLGSVDTPEDAEATVEEEVYDDPEHVGYDGEEDFENSETTEFSGEEPSYEGSETSLSLEEEQEKSIEERKKVFKDVLLCLNMDRSRKVLPDFVKQFSLDRGCKWTPESPGDLAWNFLMKVQARDVTARDSILSHKVLDEDSKEDLLAGVENLEIRDIQTINPLDVLCATMLCSDSSLQRQVMSNMYQCQFALPLLLPDAENNKSILMLGAMKDIVKKQSTQFSGGPTEDTEKFLTLMKMPVISFVRLGYCSFSKSRILNTLLSPAQLKLHKIFLHQDLPLLVLPRQISDGLVEITWCFPDSDDRKENPFFQKPVALANLRGNLESFWTQFGFLMEVSSAVFFFTDCLGEKEWDLLMFLGEAAIERCYFVLSSQARESEEAQIFQRILNLKPAQLLFWERGDAGDRRKNMEGLQAALQEVMFSSCLRCVSVEDMAALARELGIQVDEDFENTQRIQVSSGENMAGTAEGEGQQRHSQLKSSSKSQALMPIQEPGTQCELSQNLQNLYGTPVFRPVLENSWLFPTRIGGNFNHVSLKASWVMGRPFGSEQRPKWFHPLPFQNAGAQGRGKSFGIQSFHPQIFYSGERFMKFSRVARGCHSNGTFGRLPRPICQHVQACPERPQMMGTLERSRAVASKIGHSYSLDSQPARAVGKPWPQQACTRVTELTEATGKLIRTSHIGKPHPQSFQPAAATHTYTHTHAEETDLLGFKTLQYLRHTDDPQSTGPGLL

SEQ ID NO: 896005 - protein, 187 aa, Homo sapiens
EKPTETEPLSTLQLSSADRLPPPPPPDSGGEERKAENMDVNIAPLRAWDDFFPGSDRFARPDFRDISKWNNRVVSNLLYYQTNYLVVAAMMISIVGFLSPFNMILGGIVVVLVFTGFVWAAHNKDVLRRMKKRYPTTFVMVVMLASYFLISMFGGVMVFVFGITFPCAVDVYPCIVETSEPQEQTGE

SEQ ID NO: 896006 - protein, 187 aa, Homo sapiens; identical to SEQ ID NO: 896005

SEQ ID NO: 896007 - protein, 212 aa, Homo sapiens
MLECSGTISAHCNLHLPCSSDFFCLSLLSSWDCRCVPPHLANFSIFYRDGGDSGGEERKAENMDVNIAPLRAWDDFFPGSDRFARPDFRDISKWNNRVVSNLLYYQTNYLVVAAMMISIVGFLSPFNMILGGIVVVLVFTGFVWAAHNKDVLRRMKKRYPTTFVMVVMLASYFLISMFGGVMVFVFGITFPCAVDVYPCIVETSEPQEQTGE

SEQ ID NO: 896008 - protein, 107 aa, Homo sapiens
HRARSGVIDAPLSPFATSIAELVTPHFFFLIFQVFLSPFNMILGGIVVVLVFTGFVWAAHNKDVLRRMKKRYPTTFVMVVMLASYFLISMFGGVMVFVFGITFPCAV

SEQ ID NO: 896009 - protein, 187 aa, Homo sapiens; identical to SEQ ID NO: 896005

SEQ ID NO: 896010 - protein, 187 aa, Homo sapiens; identical to SEQ ID NO: 896005

SEQ ID NO: 896011 - protein, 187 aa, Homo sapiens; identical to SEQ ID NO: 896005

SEQ ID NO: 896012 - protein, 187 aa, Homo sapiens; identical to SEQ ID NO: 896005

SEQ ID NO: 896013 - protein, 212 aa, Homo sapiens; identical to SEQ ID NO: 896007

SEQ ID NO: 896014 - protein, 187 aa, Homo sapiens; identical to SEQ ID NO: 896005

SEQ ID NO: 896015 - protein, 187 aa, Homo sapiens; identical to SEQ ID NO: 896005

SEQ ID NO: 896016 - protein, 187 aa, Homo sapiens; identical to SEQ ID NO: 896005

SEQ ID NO: 896017 - protein, 187 aa, Homo sapiens; identical to SEQ ID NO: 896005

SEQ ID NO: 896018 - protein, 150 aa, Homo sapiens
MDVNIAPLRAWDDFFPGSDRFARPDFRDISKWNNRVVSNLLYYQTNYLVVAAMMISIVGFLSPFNMILGGIVVVLVFTGFVWAAHNKDVLRRMKKRYPTTFVMVVMLASYFLISMFGGVMVFVFGITFPCAVDVYPCIVETSEPQEQTGE

SEQ ID NO: 896019 - protein, 187 aa, Homo sapiens; identical to SEQ ID NO: 896005

SEQ ID NO: 896020 - protein, 207 aa, Homo sapiens
  misc_feature (1)..(1): Xaa can be any naturally occurring amino acid
  misc_feature (92)..(92): Xaa can be any naturally occurring amino acid
XGCAYARHVALGAGDGRPESAITLEAMSANSLDYSYRSIPVCSSGTELSCACFYPELTYKRRGGTYPEALLHTMSTDATYWKATLVAVIYSXTREVTHRLSRAESLLECIVPLLSGFLSPFNMILGGIVVVLVFTGFVWAAHNKDVLRRMKKRYPTTFVMVVMLASYFLISMFGGVMVFVFGITFPCAVDVYPCIVETSEPQEQTGE

SEQ ID NO: 896021 - protein, 178 aa, Homo sapiens
MNDTLGTVDVNICPHSLLSMGMDLYRTSASADLQLAAGDTPADIIQDMEATRGYVERNMIPIQRQYLDVTMDGGLIMHGFPCRAIMEFLSPFNMILGGIVVVLVFTGFVWAAHNKDVLRRMKKRYPTTFVMVVMLASYFLISMFGGVMVFVFGITFPCAVDVYPCIVETSEPQEQTGE

SEQ ID NO: 896022 - protein, 155 aa, Homo sapiens
MLECSGTISAHCNLHLPCSSDFFCLSLLSSWDCRCVPPHLANFSIFYRDGGDSGGEERKAENMDVNIAPLRAWDDFFPGSDRFARPDFRDISKWNNRVVSNLLYYQTNYLVVAAMMISIVGLECNGVISAHCNLHLLSSSDSPASASQVAGITGF

SEQ ID NO: 896023 - protein, 103 aa, Homo sapiens
FPEKPLTVIYCPFLSPFNMILGGIVVVLVFTGFVWAAHNKDVLRRMKKRYPTTFVMVVMLASYFLISMFGGVMVFVFGITFPCAVDVYPCIVETSEPQEQTGE

SEQ ID NO: 896024 - protein, 82 aa, Homo sapiens
LFPFFFWLSTGFVWAAHNKDVLRRMKKRYPTTFVMVVMLASYFLISMFGGVMVFVFGITFPCAVDVYPCIVETSEPQEQTGE

SEQ ID NO: 896025 - protein, 205 aa, Homo sapiens
EKPTETEPLSTLQLSSADRLPPPPPPDSGGEERKAENMDVNIAPLRAWDDFFPGSDRFARPDFRDISKWNNRVVSNLLYYQTNYLVVAAMMISIVGFLSPFNMILGGIVVVLVFTGFVWAAHNKDVLRRMKKRYPTTFVMVVMLASYFLISMFGGVMVFVFGITFPCAVDVYPCIVETSEPQEQTGESRTAGTKASTDSLTISAK

SEQ ID NO: 896026 - protein, 139 aa, Homo sapiens
MLECSGTISAHCNLHLPCSSDFFCLSLLSSWDCRCVPPHLANFSIFYRDGGDSGGEERKAENMDVNIAPLRAWDDFFPGSDRFARPDFRDISKWNNRVVSNLLYYQTNYLVVAAMMISIVGDVYPCIVETSEPQEQTGE

SEQ ID NO: 896027 - protein, 182 aa, Homo sapiens
IRGRVDARRRQKGNMDVNIAPLRAWDDFFPGSDRFARPDFRDISKWNNRVVSNLLYYQTNYLVVAAMMISIVGFLSPFNMILGGIVVVLVFTGFVWAAHNKDVLRRMKKRYPTTFVMVVMLASYFLISMFGGVMVFVFGITFPCAVDVYPCIVETSEPQEQTGESRTAGTKASTDSLTISAK

SEQ ID NO: 896028 - protein, 187 aa, Homo sapiens; identical to SEQ ID NO: 896005

SEQ ID NO: 896029 - protein, 187 aa, Homo sapiens; identical to SEQ ID NO: 896005

SEQ ID NO: 896030 - protein, 153 aa, Homo sapiens
EKPTETEPLSTLQLSSADRLPPPPPPDSGGEERKAENMDVNIAPLRAWDDFFPGSDRFARPDFRDISKWNNRVVSNLLYYQTNYLVVAAMMISIVGFLSPFNMILGGIVVVLVFTELVGMWCTWAWWSQPCQGGFECTRPSLPQALTCLCFPK

SEQ ID NO: 896031 - protein, 564 aa, Homo sapiens
RRGLGPPSWQEAKRQRFLSRGQQVQSCWCSRSPDPTPIPSGAGVRARPTTALTMVLLAAAVCTKAGKAIVSRQFVEMTRTRIEGLLAAFPKLMNTGKQHTFVETESVRYVYQPMEKLYMVLITTKNSNILEDLETLRLFSRVIPEYCRALEENEISEHCFDLIFAFDEIVALGYRENVNLAQIRTFTEMDSHEEKVFRAVRETQEREAKAEMRRKAKELQQARRDAERQGKKAPGFGGFGSSAVSGGSTAAMITETIIETDKPKVAPAPARPSGPSKALKLGAKGKEVDNFVDKLKSEGETIMSSSMGKRTSEATKMHAPPINMESVHMKIEEKITLTCGRDGGLQNMELHGMIMLRISDDKYGRIRLHVENEDKKGVQLQTHPNVDKKLFTAESLIGLKNPEKSFPVNSDVGVLKWRLQTTEESFIPLTINCWPSESGNGCDVNIEYELQEDNLELNDVVITIPLPSGVGAPVIGEIDGEYRHDSRRNTLEWCLPVIDAKNKSGSLEFSIAGQPNDFFPVQVSFVSKKNYCNIQVTKVTQVDGNSPVRFSTETTFLVDKYEIL

SEQ ID NO: 896032 - protein, 484 aa, Homo sapiens
MNSHVLAAFPKLMNTGKQHTFVETESVRYVYQPMEKLYMVLITTKNSNILEDLETLRLFSRVIPEYCRALEENEISEHCFDLIFAFDEIVALGYRENVNLAQIRTFTEMDSHEEKVFRAVRETQEREAKAEMRRKAKELQQARRDAERQGKKAPGFGGFGSSAVSGGSTAAMITETIIETDKPKVAPAPARPSGPSKALKLGAKGKEVDNFVDKLKSEGETIMSSSMGKRTSEATKMHAPPINMESVHMKIEEKITLTCGRDGGLQNMELHGMIMLRISDDKYGRIRLHVENEDKKGVQLQTHPNVDKKLFTAESLIGLKNPEKSFPVNSDVGVLKWRLQTTEESFIPLTINCWPSESGNGCDVNIEYELQEDNLELNDVVITIPLPSGVGAPVIGEIDGEYRHDSRRNTLEWCLPVIDAKNKSGSLEFSIAGQPNDFFPVQVSFVSKKNYCNIQVTKVTQVDGNSPVRFSTETTFLVDKYEIL

SEQ ID NO: 896033 - protein, 583 aa, Homo sapiens
RRGLGPPSWQEAKRQRFLSRGQQVQSCWCSRSPDPTPIPSGAGVRARPTTALTMVLLAAAVCTKAGKAIVSRQFVEMTRTRIEGLLAAFPKLMNTGKQHTFVETESVRYVYQPMEKLYMVLITTKNSNILEDLETLRLFSRVIPEYCRALEENEISEHCFDLIFAFDEIVALGYRENVNLAQIRTFTEMDSHEEKVFRAVRETQEREAKAEMRRKAKELQQARRDAERQGKKAPGFGGFGSSAVSGGSTAAMITETIIETDKPKVAPAPARPSGPSKALKLGAKGKEVDNFVDKLKSEGETIMSSSMGKRTSEATKMHAPPINMESVHMKIEEKITLTCGRDGGLQNMELHGMIMLRISDDKYGRIRLHVENEDKKGVQLQTHPNVDKKLFTAESLIGLKNPEKSFPVNSDVGVLKWRLQTTEESFIPLTINCWPSESGNGCDVNIEYELQEDNLELNDVVITIPLPSGVGAPVIGEIDGEYRHDSRRNTLEWCLPVIDAKNKSGSLEFSIAGQPKQGQMELSFPGFKGFPFGSSSRKKITVVKPINRVSQQGGTQGLRNWEPRPRFRVFPNQRKNQLSLKWN

SEQ ID NO: 896034 - protein, 106 aa, Homo sapiens
LDQNVSHNRSGVGAPVIGEIDGEYRHDSRRNTLEWCLPVIDAKNKSGSLEFSIAGQPNDFFPVQVSFVSKKNYCNIQVTKVTQVDGNSPVRFSTETTFLVDKYEIL

SEQ ID NO: 896035 - protein, 564 aa, Homo sapiens; identical to SEQ ID NO: 896031

SEQ ID NO: 896036 - protein, 530 aa, Homo sapiens
RRGLGPPSWQEAKRQRFLSRGQQVQSCWCSRSPDPTPIPSGAGVRARPTTALTMVLLAAAVCTKAGKAIVSRQFVEMTRTRIEGLLAAFPKLMNTGKQHTFVETESVRYVYQPMEKLYMVLITTKNSNILEDLETLRLFSRVIPEYCRALEENEISEHCFDLIFAFDEIVALGYRENVNLAQIRTFTEMDSHEEKVFRAVRETQEREAKAEMRRKAKELQQARRDAERQGKKAPGFGGFGSSAVSGGSTAAMITETIIETDKPKVAPAPARPSGPSKALKLGAKGKEVDNFVDKLKSEGETIMSSSMGKRTSEATKMHAPPINMESVHMKIEEKITLTCGRDGGLQNMELHGMIMLRISDDKYGRIRLHVENEDKKGVQLQTHPNVDKKLFTAESLIGLKNPEKSFPVNSDVGVLKWRLQTTEESFIPLTINCWPSESGNGCDVNIEYELQEDNLELNDVVITIPLPSGVGAPVIGEIDGEYRHDSRRNTLEWCLPVIDAKNKSGSLEFSIAGQPNFPFPLTASGKNSYL

SEQ ID NO: 896037 - protein, 518 aa, Homo sapiens
RRGLGPPSWQEAKRQRFLSRGQQVQSCWCSRSPDPTPIPSGAGVRARPTTALTMVLLAAAVCTKAGKAIVSRQFVEMTRTRIEGLLAAFPKLMNTGKQHTFVETESVRYVYQPMEKLYMVLITTKNSNILEDLETLRLFSRVIPEYCRALEENEISEHCFDLIFAFDEIVALGYRENVNLAQIRTFTEMDSHEEKVFRAVRETQEREAKAEMRRKAKELQQARRDAERQGKKAPGFGGFGSSAVSGGSTAAMITETIIETDKPKVAPAPARPSGPSKALKLGAKGKEVDNFVDKLKSEGETIMSSSMGKRTSEATKMHAPPINMESVHMKIEEKITLTCGRDGGLQNMELHGMIMLRISDDKYGRIRLHVENEDKKGVQLQTHPNVDKKLFTAESLIGLKNPEKSFPVNSDVGVLKWRLQTTEESFIPLTINCWPSESGNGCDVNIEYELQEDNLELNDVVITIPLPSGVGAPVIGEIDGEYRHDSRRNTLEWCLPVIDAKNKSGSLEFSIAGQPNLK

SEQ ID NO: 896038 - protein, 136 aa, Homo sapiens
RRGLGPPSWQEAKRQRFLSRGQQVQSCWCSRSPDPTPIPSGAGVRARPTTALTMVLLAAAVCTKAGKAIVSRQFVEMTRTRIEGLLAAFPKLMNTGKQHTFVETESVRYVYQPMEKLYMVLITTKNSNILEDLVST

SEQ ID NO: 896039 - protein, 564 aa, Homo sapiens; identical to SEQ ID NO: 896031

SEQ ID NO: 896040 - protein, 531 aa, Homo sapiens
TLQLANGVSDSDVLELPFSRPYSSSDRNRYVSASLSCGNHGAADSTSLDPGRRRSSFRTVCVYDHCCDEGLAAFPKLMNTGKQHTFVETESVRYVYQPMEKLYMVLITTIPEYCRALEENEISEHCFDLIFAFDEIVALGYRENVNLAQIRTFTEMDSHEEKVFRAVRETQEREAKAEMRRKAKELQQARRDAERQGKKAPGFGGFGSSAVSGGSTAAMITETIIETDKPKVAPAPARPSGPSKALKLGAKGKEVDNFVDKLKSEGETIMSSSMGKRTSEATKMHAPPINMESVHMKIEEKITLTCGRDGGLQNMELHGMIMLRISDDKYGRIRLHVENEDKKGVQLQTHPNVDKKLFTAESLIGLKNPEKSFPVNSDVGVLKWRLQTTEESFIPLTINCWPSESGNGCDVNIEYELQEDNLELNDVVITIPLPSGVGAPVIGEIDGEYRHDSRRNTLEWCLPVIDAKNKSGSLEFSIAGQPNDFFPVQVSFVSKKNYCNIQVTKVTQVDGNSPVRFSTETTFLVDKYEIL

SEQ ID NO: 896041 - protein, 564 aa, Homo sapiens; identical to SEQ ID NO: 896031

SEQ ID NO: 896042 - protein, 540 aa, Homo sapiens
RRGLGPPSWQEAKRQRFLSRGQQVQSCWCSRSPDPTPIPSGAGVRARPTTALTMVLLAAAVCTKAGKAIVSRQFVEMTRTRIEGLLAAFPKLMNTGKQHTFVETESVRYVYQPMEKLYMVLITTKNSNILEDLETLRLFSRVIPEYCRALEENEISEHCFDLIFAFDEIVALGYRENVNLAQIRTFTEMDSHEEKVFRAVRETQEREAKAEMRRKAKELQQARRDAERQGKKAPGFGGFGSSAVSGGSTAAMITETIIETDKPKVAPAPARPSGPSKALKLGAKGKEVDNFVDKLKSEGETIMSSSMGKRTSEATKMHAPPINMESVHMKIEEKITLTCGRDGGLQNMELHGMIMLRISDDKYGRIRLHVENEDKKGVQLQTHPNVDKKLFTAESLIGLKNPEKSFPVNSDVGVLKWRLQTTEESFIPLTINCWPSESGNGCDVNIEYELQEDNLELNDVVITIPLPSGVGAPVIGEIDGEYRHDSRRNTLEWCLPVIDAKNKSGSLEFSIAGQPNDFFPVQVSFVSKKNYCNIQVLHFS

SEQ ID NO: 896043 - protein, 316 aa, Homo sapiens
RRGLGPPSWQEAKRQRFLSRGQQVQSCWCSRSPDPTPIPSGAGVRARPTTALTMVLLAAAVCTKAGKAIVSRQFVEMTRTRIEGLLAAFPKLMNTGKQHTFVETESVRYVYQPMEKLYMVLITTKNSNILEDLETLRLFSRVIPEYCRALEENEISEHCFDLIFAFDEIVALGYRENVNLAQIRTFTEMDSHEEKVFRAVRETQEREAKAEMRRKAKELQQARRDAERQGKKAPGFGGFGSSAVSGGSTAAMITETIIETDKPKVAPAPARPSGRRRNSENSKAWKCYRLCHKDYPEKVERGQKAEPNWGFSKAAL

SEQ ID NO: 896044 - protein, 1719 aa, Homo sapiens [sequence omitted]

SEQ ID NO: 896045 - protein, 226 aa, Homo sapiens [sequence omitted]

SEQ ID NO: 896046 - protein, 1707 aa, Homo sapiens
GRGRRGRRNSGGGGGPRCSEALARRARNTTEPVAATETLAEVPEHVLRGLPEEVRLFPSAVDKTRIGVWATKPILKGKKFGPFVGDKKKRSQVKNNVYMWEVYYPNLGWMCIDATDPEKGNWLRYVNWACSGEEQNLFPLEINRAIYYKTLKPIAPGEELLVWYNGEDNPEIAAAIEEERASARSKRSSPKSRKGKKKSQENKNKGNKIQDIQLKTSEPDFTSANMRDSAEGPKEDEEKPSASALEQPATLQEVASQEVPPELATPAPAWEPQPEPDERLEAAACEVNDLGEEEEEEEEEDEEEEEDDDDDELEDEGEEEASMPNENSVKEPEIRCDEKPEDLLEEPKTTSEETLEDCSEVTPAMQIPRTKEEANGDVFETFMFPCQHCERKFTTKQGLERHMHIHISTVNHAFKCKYCGKAFGTQINRRRHERRHEAGLKRKPSQTLQPSEDLADGKASGENVASKDDSSPPSLGPDCLIMNSEKASQDTINSSVVEENGEVKELHPCKYCKKVFGTHTNMRRHQRRVHERHLIPKGVRRKGGLEEPQPPAEQAQATQNVYVPSTEPEEEGEADDVYIMDISSNISENLNYYIDGKIQTNNNTSNCDVIEMESASADLYGINCLLTPVTVEITQNIKTTQVPVTEDLPKEPLGSTNSEAKKRRTASPPALPKIKAETDSDPMVPSCSLSLPLSISTTEAVSFHKEKSVYLSSKLKQLLQTQDKLTPPAGISATEIAKLGPVCVSAPASMLPVTSSRFKRRTSSPPSSPQHSPALRDFGKPSDGKAAWTDAGLTSKKSKLESHSDSPAWSLSGRDERETVSPPCFDEYKMSKEWTASSAFSSVCNQQPLDLSSGVKQKAEGTGKTPVQWESVLDLSVHKKHCSDSEGKEFKESHSVQPTCSAVKKRKPTTCMLQKVLLNEYNGIDLPVENPADGTRSPSPCKSLEAQPDPDLGPGSGFPAPTVESTPDVCPSSPALQTPSLSSGQLPPLLIPTDPSSPPPCPPVLTVATPPPPLLPTVPLPAPSSSASPHPCPSPLSNATAQSPLPILSPTVSPSPSPIPPVEPLMSAASPGPPTLSSSSSSSSSSSSFSSSSSSSSPSPPPLSAISSVVSSGDNLEASLPMISFKQEELENEGLKPREEPQSAAEQDVVVQETFNKNFVCNVCESPFLSIKDLTKHLSIHAEEWPFKCEFCVQLFKDKTDLSEHRFLLHGVGNIFVCSVCKKEFAFLCNLQQHQRDLHPDKVCTHHEFESGTLRPQNFTDPSKAHVEHMQSLPEDPLETSKEEEELNDSSEELYTTIKIMASGIKTKDPDVRLGLNQHYPSFKPPPFQYHHRNPMGIGVTATNFTTHNIPQTFTTAIRCTKCGKGVDNMPELHKHILACASASDKKRYTPKKNPVPLKQTVQPKNGVVVLDNSGKNAFRRMGQPKRLNFSVELSKMSSNKLKLNALKKKNQLVQKAILQKNKSAKQKADLKNACESSSHICPYCNREFTYIGSLNKHAAFSCPKKPLSPPKKKVSHSSKKGGHSSPASSDKNSNSNHRRRTADAEIKMQSMQTPLGKTRARSSGPTQVPLPSSSFRSKQNVKFAASVKSKKPSSSSLRNSSPIRMAKITHVEGKKPKAVAKNHSAQLSSKTSRSLHVRVQKSKAVLQSKSTLASKKRTDRFNIKSRERSGGPVTRSLQLAAAADLSENKREDGSAKQELKDFRNFL

SEQ ID NO: 896047 - protein, 1683 aa, Homo sapiens [sequence omitted]

SEQ ID NO: 896048 - protein, 1707 aa, Homo sapiens; identical to SEQ ID NO: 896046

SEQ ID NO: 896049 - protein, 1707 aa, Homo sapiens; identical to SEQ ID NO: 896046

SEQ ID NO: 896050 - protein, 1550 aa, Homo sapiens
RSLCGGPVTRSLQLAAAADLSENQREDGSAKPELKDFRKKKSQENKNKGNKIQDIQLKTSEPDFTSANMRDSAEGPKEDEEKPSASALEQPATLQEVASQEVPPELATPAPAWEPQPEPDERLEAAACEVNDLGEEEEEEEEEDEEEEEDDDDDELEDEGEEEASMPNENSVKEPEIRCDEKPEDLLEEPKTTSEETLEDCSEVTPAMQIPRTKEEANGDVFETFMFPCQHCERKFTTKQGLERHMHIHISTVNHAFKCKYCGKAFGTQINRRRHERRHEAGLKRKPSQTLQPSEDLADGKASGENVASKDDSSPPSLGPDCLIMNSEKASQDTINSSVVEENGEVKELHPCKYCKKVFGTHTNMRRHQRRVHERHLIPKGVRRKGGLEEPQPPAEQAQATQNVYVPSTEPEEEGEADDVYIMDISSNISENLNYYIDGKIQTNNNTSNCDVIEMESASADLYGINCLLTPVTVEITQNIKTTQVPVTEDLPKEPLGSTNSEAKKRRTASPPALPKIKAETDSDPMVPSCSLSLPLSISTTEAVSFHKEKSVYLSSKLKQLLQTQDKLTPPAGISATEIAKLGPVCVSAPASMLPVTSSRFKRRTSSPPSSPQHSPALRDFGKPSDGKAAWTDAGLTSKKSKLESHSDSPAWSLSGRDERETVSPPCFDEYKMSKEWTASSAFSSVCNQQPLDLSSGVKQKAEGTGKTPVQWESVLDLSVHKKHCSDSEGKEFKESHSVQPTCSAVKKRKPTTCMLQKVLLNEYNGIDLPVENPADGTRSPSPCKSLEAQPDPDLGPGSGFPAPTVESTPDVCPSSPALQTPSLSSGQLPPLLIPTDPSSPPPCPPVLTVATPPPPLLPTVPLPAPSSSASPHPCPSPLSNATAQSPLPILSPTVSPSPSPIPPVEPLMSAASPGPPTLSSSSSSSSSSSSFSSSSSSSSPSPPPLSAISSVVSSGDNLEASLPMISFKQEELENEGLKPREEPQSAAEQDVVVQETFNKNFVCNVCESPFLSIKDLTKHLSIHAEEWPFKCEFCVQLFKDKTDLSEHRFLLHGVGNIFVCSVCKKEFAFLCNLQQHQRDLHPDKVCTHHEFESGTLRPQNFTDPSKAHVEHMQSLPEDPLETSKEEEELNDSSEELYTTIKIMASGIKTKDPDVRLGLNQHYPSFKPPPFQYHHRNPMGIGVTATNFTTHNIPQTFTTAIRCTKCGKGVDNMPELHKHILACASASDKKRYTPKKNPVPLKQTVQPKNGVVVLDNSGKNAFRRMGQPKRLNFSVELSKMSSNKLKLNALKKKNQLVQKAILQKNKSAKQKADLKNACESSSHICPYCNREFTYIGSLNKHAAFSCPKKPLSPPKKKVSHSSKKGGHSSPASSDKNSNSNHRRRTADAEIKMQSMQTPLGKTRARSSGPTQVPLPSSSFRSKQNVKFAASVKSKKPSSSSLRNSSPIRMAKITHVEGKKPKAVAKNHSAQLSSKTSRSLHVRVQKSKAVLQSKSTLASKKRTDRFNIKSRERSGGPVTRSLQLAAAADLSENKREDGSAKQELKDFRNFL

SEQ ID NO: 896051 - protein, 1226 aa, Homo sapiens
MNSEKASQDTINSSVVEENGEVKELHPCKYCKKVFGTHTNMRRHQRRVHERHLIPKGVRRKGGLEEPQPPAEQAQATQNVYVPSTEPEEEGEADDVYIMDISSNISENLNYYIDGKIQTNNNTSNCDVIEMESASADLYGINCLLTPVTVEITQNIKTTQVPVTEDLPKEPLGSTNSEAKKRRTASPPALPKIKAETDSDPMVPSCSLSLPLSISTTEAVSFHKEKSVYLSSKLKQLLQTQDKLTPPAGISATEIAKLGPVCVSAPASMLPVTSSRFKRRTSSPPSSPQHSPALRDFGKPSDGKAAWTDAGLTSKKSKLESHSDSPAWSLSGRDERETVSPPCFDEYKMSKEWTASSAFSSVCNQQPLDLSSGVKQKAEGTGKTPVQWESVLDLSVHKKHCSDSEGKEFKESHSVQPTCSAVKKRKPTTCMLQKVLLNEYNGIDLPVENPADGTRSPSPCKSLEAQPDPDLGPGSGFPAPTVESTPDVCPSSPALQTPSLSSGQLPPLLIPTDPSSPPPCPPVLTVATPPPPLLPTVPLPAPSSSASPHPCPSPLSNATAQSPLPILSPTVSPSPSPIPPVEPLMSAASPGPPTLSSSSSSSSSSSSFSSSSSSSSPSPPPLSAISSVVSSGDNLEASLPMISFKQEELENEGLKPREEPQSAAEQDVVVQETFNKNFVCNVCESPFLSIKDLTKHLSIHAEEWPFKCEFCVQLFKDKTDLSEHRFLLHGVGNIFVCSVCKKEFAFLCNLQQHQRDLHPDKVCTHHEFESGTLRPQNFTDPSKAHVEHMQSLPEDPLETSKEEEELNDSSEELYTTIKIMASGIKTKDPDVRLGLNQHYPSFKPPPFQYHHRNPMGIGVTATNFTTHNIPQTFTTAIRCTKCGKGVDNMPELHKHILACASASDKKRYTPKKNPVPLKQTVQPKNGVVVLDNSGKNAFRRMGQPKRLNFSVELSKMSSNKLKLNALKKKNQLVQKAILQKNKSAKQKADLKNACESSSHICPYCNREFTYIGSLNKHAAFSCPKKPLSPPKKKVSHSSKKGGHSSPASSDKNSNSNHRRRTADAEIKMQSMQTPLGKTRARSSGPTQVPLPSSSFRSKQNVKFAASVKSKKPSSSSLRNSSPIRMAKITHVEGKKPKAVAKNHSAQLSSKTSRSLHVRVQKSKAVLQSKSTLASKKRTDRFNIKSRERSGGPVTRSLQLAAAADLSENKREDGSAKQELKDFRNFL

SEQ ID NO: 896052 - protein, 953 aa, Homo sapiens
GRGRRGRRNSGGGGGPRCSEALARRARNTTEPVAATETLAEVPEHVLRGLPEEVRLFPSAVDKTRIGVWATKPILKGKKFGPFVGDKKKRSQVKNNVYMWEVYYPNLGWMCIDATDPEKGNWLRYVNWACSGEEQNLFPLEINRAIYYKTLKPIAPGEELLVWYNGEDNPEIAAAIEEERASARSKRSSPKSRKGKKKSQENKNKGNKIQDIQLKTSEPDFTSANMRDSAEGPKEDEEKPSASALEQPATLQEVASQEVPPELATPAPAWEPQPEPDERLEAAACEVNDLGEEEEEEEEEDEEEEEDDDDDDLPPHPGLQQLSSSSSSSSSSSSFSSSSSSSSPSPPPLSAISSVVSSGDNLEASLPMISFKQEELENEGLKPREEPQSAAEQDVVVQETFNKNFVCNVCESPFLSIKDLTKHLSIHAEEWPFKCEFCVQLFKDKTDLSEHRFLLHGVGNIFVCSVCKKEFAFLCNLQQHQRDLHPDKVCTHHEFESGTLRPQNFTDPSKAHVEHMQSLPEDPLETSKEEEELNDSSEELYTTIKIMASGIKTKDPDVRLGLNQHYPSFKPPPFQYHHRNPMGIGVTATNFTTHNIPQTFTTAIRCTKCGKGVDNMPELHKHILACASASDKKRYTPKKNPVPLKQTVQPKNGVVVLDNSGKNAFRRMGQPKRLNFSVELSKMSSNKLKLNALKKKNQLVQKAILQKNKSAKQKADLKNACESSSHICPYCNREFTYIGSLNKHAAFSCPKKPLSPPKKKVSHSSKKGGHSSPASSDKNSNSNHRRRTADAEIKMQSMQTPLGKTRARSSGPTQVPLPSSSFRSKQNVKFAASVKSKKPSSSSLRNSSPIRMAKITHVEGKKPKAVAKNHSAQLSSKTSRSLHVRVQKSKAVLQSKSTLASKKRTDRFNIKSRERSGGPVTRSLQLAAAADLSENKREDGSAKQELKDFRNFL

SEQ ID NO: 896053 - protein, 287 aa, Homo sapiens
GRGRRGRRNSGGGGGPRCSEALARRARNTTEPVAATETLAEVPEHVLRGLPEEVRLFPSAVDKTRIGVWATKPILKGKKFGPFVGDKKKRSQVKNNVYMWEVYYPNLGWMCIDATDPEKGNWLRYVNWACSGEEQNLFPLEINRAIYYKTLKPIAPGEELLVWYNGEDNPEIAAAIEEERASARSKRSSPKSRKGKKKSQENKNKGNKIQDIQLKTSEPDFTSANMRDSAEATASAWRPDALHQRPRTSPGSIGRSKLRLQPSSRDHSSKSRHSGCSLTAPEVTWNQ

SEQ ID NO: 896054 - protein, 250 aa, Homo sapiens
GRGRRGRRNSGGGGGPRCSEALARRARNTTEPVAATETLAEVPEHVLRGLPEEVRLFPSAVDKTRIGVWATKPILKGKKFGPFVGDKKKRSQVKNNVYMWEVYYPNLGWMCIDATDPEKGNWLRYVNWACSGEEQNLFPLEINRAIYYKTLKPIAPGEELLVWYNGEDNPEIAAAIEEERASARSKRSSPKSRKATASAWRPDALHQRPRTSPGSIGRSKLRLQPSSRDHSSKSRHSGCSLTGTRQDGTA

SEQ ID NO: 896055 - protein, 268 aa, Homo sapiens
MPRSFLVKKHFNASKKPNYSELDTHTVIISPYLYESYSMPVIPQPEILSSGAYSPITVWTTAAPFHAQLPNGLSPLSGYSSSLGRVSPPPPSDTSSKDHSGSESPISDEEERLQSKLSDPHAIEAEKFQCNLCNKTYSTFSGLAKHKQLHCDAQSRKSFSCKYCDKEYVSLGALKMHIRTHTLPCVCKICGKAFSRPWLLQGHIRTHTGEKPFSCPHCNRAFADRSNLRAHLQTHSDVKKYQCKNCSKTFSRMSLLHKHEESGCCVAH

SEQ ID NO: 896056 - protein, 255 aa, Homo sapiens
  misc_feature (1)..(1): Xaa can be any naturally occurring amino acid
XRHRNYSELDTHTVIISPYLYESYSMPVIPQPEILSSGAYSPITVWTTAAPFHAQLPNGLSPLSGYSSSLGRVSPPPPSDTSSKDHSGSESPISDEEERLQSKLSDPHAIEAEKFQCNLCNKTYSTFSGLAKHKQLHCDAQSRKSFSCKYCDKEYVSLGALKMHIRTHTLPCVCKICGKAFSRPWLLQGHIRTHTGEKPFSCPHCNRAFADRSNLRAHLQTHSDVKKYQCKNCSKTFSRMSLLHKHEESGCCVAH

SEQ ID NO: 896057 - protein, 343 aa, Homo sapiens
MNIHRSTPITIARYGRSRNKTQDFEELSSIRSAEPSQSFSPNLGSPSPPETPNLSHCVSCIGKYLLLEPLEGDHVFRAVHLHSGEELVCKVFDISCYQESLAPCFCLSAHSNINQITEIILGETKAYVFFERSYGDMHSFVRTCKKLREEEAARLFYQIASAVAHCHDGGLVLRDLKLRKFIFKDEERTRVKLESLEDAYILRGDDDSLSDKHGCPAYVSPEILNTSGSYSGKAADVWSLGVMLYTMLVGRYPFHDIEPSSLFSKIRRGQFNIPETLSPKAKCLIRSILRREPSERLTSQEILDHPWFSTDFSVSNSAYGAKEVSDQLVPDVNMEENLDPFFN

SEQ ID NO: 896058 - protein, 343 aa, Homo sapiens; identical to SEQ ID NO: 896057

SEQ ID NO: 896059 - protein, 343 aa, Homo sapiens; identical to SEQ ID NO: 896057

SEQ ID NO: 896060 - protein, 343 aa, Homo sapiens; identical to SEQ ID NO: 896057

SEQ ID NO: 896061 - protein, 293 aa, Homo sapiens
GGRRLRGNVSVTLNGETERERGARAHTRTHGPARSEIPGHVFDISCYQESLAPCFCLSAHSNINQITEIILGETKAYVFFERSYGDMHSFVRTCKKLREEEAARLFYQIASAVAHCHDGGLVLRDLKLRKFIFKDEERTRVKLESLEDAYILRGDDDSLSDKHGCPAYVSPEILNTSGSYSGKAADVWSLGVMLYTMLVGRYPFHDIEPSSLFSKIRRGQFNIPETLSPKAKCLIRSILRREPSERLTSQEILDHPWFSTDFSVSNSAYGAKEVSDQLVPDVNMEENLDPFFN

SEQ ID NO: 896062 - protein, 177 aa, Homo sapiens
MMLVVTCLWAPSGAYVFLLSCRTRVKLESLEDAYILRGDDDSLSDKHGCPAYVSPEILNTSGSYSGKAADVWSLGVMLYTMLVGRYPFHDIEPSSLFSKIRRGQFNIPETLSPKAKCLIRSILRREPSERLTSQEILDHPWFSTDFSVSNSAYGAKEVSDQLVPDVNMEENLDPFFN

SEQ ID NO: 896063 - protein, 343 aa, Homo sapiens; identical to SEQ ID NO: 896057

SEQ ID NO: 896064 - protein, 343 aa, Homo sapiens; identical to SEQ ID NO: 896057

SEQ ID NO: 896065 - protein, 171 aa, Homo sapiens [sequence omitted]

SEQ ID NO: 896066 - protein, 343 aa, Homo sapiens; identical to SEQ ID NO: 896057

SEQ ID NO: 896067 - protein, 236 aa, Homo sapiens
MNIHRSTPITIARYGRSRNKTQDFEELSSIRSAEPSQSFSPNLGSPSPPETPNLSHCVSCIGKYLLLEPLEGDHVFRAVHLHSGEELVCKVFDISCYQESLAPCFCLSAHSNINQITEIILGETKAYVFFERSYGDMHSFVRTCKKLREEEAARLFYQIASAVAHCHDGGLVLRDLKLRKFIFKDEESLPLEPGDVSPGFAFDTLCDLGLVLRLFPPSPYQPHISPSVTFCMLYWL

SEQ ID NO: 896068 - protein, 357 aa, Homo sapiens
MNIHRSTPITIARYGRSRNKTQDFEELSSIRSAEPSQSFSPNLGSPSPPETPNLSHCVSCIGKYLLLEPLEGDHVFRAVHLHSGEELVCKVFDISCYQESLAPCFCLSAHSNINQITEIILGETKAYVFFERSYGDMHSFVRTCKKLREEEAARLFYQIASAVAHCHDGGLVLRDLKLRKFIFKDEESECSTHAPLATRPSSSKAATLAERSQSLRTRTSSTQAKGHTPTYHSGSPPGKSLDTTPYISARGRLTDSPLPTKPWPAPAYRSAPRRLSAPPSCARLHSAAMTPPPTCCDALRRADSLAPHPACAGGRAHPFSVAPLTPVPLIQPVIRRSAPSPFPAPPGPPGPPPSPTP

SEQ ID NO: 896069 - protein, 188 aa, Homo sapiens
MNIHRSTPITIARYGRSRNKTQDFEELSSIRSAEPSQSFSPNLGSPSPPETPNLSHCVSCIGKYLLLEPLEGDHVFRAVHLHSGEELVCKVFDISCYQESLAPCFCLSAHSNINQITEIILGETKAYVFFERSYGDMHSFVRTCKKLREEEAARLFYQIASAVAHCHDGGLVLRDLKLRKFIFKDEER

SEQ ID NO: 896070 - protein, 208 aa, Homo sapiens
MNIHRSTPITIARYGRSRNKTQDFEELSSIRSAEPSQSFSPNLGSPSPPETPNLSHCVSCIGKYLLLEPLEGDHVFRAVHLHSGEELVCKVFDISCYQESLAPCFCLSAHSNINQITEIILGETKAYVFFERSYGDMHSFVRTCKKLREEEAARLFYQIALPLEPGDVSPGFAFDTLCDLGLVLRLFPPSPYQPHISPSVTFCMLYWL

SEQ ID NO: 896071 - protein, 701 aa, Homo sapiens
MAQAGVVGEVTQVLCAAGGALELPELRRRLRMGLSADALERLLRQRGRFVVAVRAGGAAAAPERVVLAASPLRLCRAHQGSKPGCVGLCAQLHLCRFMVYGACKFLRAGKNCRNSHSLTTEHNLSVLRTHGVDHLSYNELCQLLFQNDPWLLPEICQHYNKGDGPHGSCAFQKQCIKLHICQYFLQGECKFGTSCKRSHDFSNSENLEKLEKLGMSSDLVSRLPTIYRNAHDIKNKSSAPSRVPPLFVPQGTSERKDSSGSVSPNTLSQEEGDQICLYHIRKSCSFQDKCHRVHFHLPYRWQFLDRGKWEDLDNMELIEEAYCNPKIERILCSESASTFHSHCLNFNAMTYGATQARRLSTASSVTKPPHFILTTDWIWYWSDEFGSWQEYGRQGTVHPVTTVSSSDVEKAYLAYCTPGSDGQAATLKFQAGKHNYELDFKAFVQKNLVYGTTKKVCRRPKYVSPQDVTTMQTCNTKFPGPKSIPDYWDSSALPDPGFQKITLSSSSEEYQKVWNLFNRTLPFYFVQKIERVQNLALWEVYQWQKGQMQKQNGGKAVDERQLFHGTSAIFVDAICQQNFDWRVCGVHGTSYGKGSYFARDAAYSHHYSKSDTQTHTMFLARVLVGEFVRGNASFVRPPAKEGWSNAFYDSCVNSVSDPSIFVIFEKHQVYPEYVIQYTTSSKPSVTPSILLALGSLFSSRQ

SEQ ID NO: 896072 - protein, 120 aa, Homo sapiens
DCFHSEGDQICLYHIRKSCSFPRKNCRNSHSLTTEHNLSVLRTHGVDHLSYNELCQLLFQNDPWLLPEKFGMWSRRSSEVQGPALPTTQFHKHHTDAMDSCATRADSLTSLSLSVCSIEK

SEQ ID NO: 896073 - protein, 565 aa, Homo sapiens
MAQAGVVGEVTQVLCAAGGALELPELRRRLRMGLSADALERLLRQRGRFVVAVRAGGAAAAPERVVLAASPLRLCRAHQGSKPGCVGLCAQLHLCRFMVYGACKFLRAGKNCRNSHSLTTEHNLSVLRTHGVDHLSYNELCQLLFQNDPWLLPEICQHYNKGDGPHGSCAFQKQCIKLHICQYFLQGECKFGTSCKRSHDFSNSENLEKLEKLGMSSDLVSRLPTIYRNAHDIKNKSSAPSRVPPLFVPQGTSERKDSSGSVSPNTLSQEEGDQICLYHIRKSCSFQDKCLEFISICRIDGNSWIEANGRIWTTWKTKKVCRRPKYVSPQDVTTMQTCNTKFPGPKSIPDYWDSSALPDPGFQKITLSSSSEEYQKVWNLFNRTLPFYFVQKIERVQNLALWEVYQWQKGQMQKQNGGKAVDERQLFHGTSAIFVDAICQQNFDWRVCGVHGTSYGKGSYFARDAAYSHHYSKSDTQTHTMFLARVLVGEFVRGNASFVRPPAKEGWSNAFYDSCVNSVSDPSIFVIFEKHQVYPEYVIQYTTSSKPSVTPSILLALGSLFSSRQ

SEQ ID NO: 896074 - protein, 337 aa, Homo sapiens
MHMTSRIRALPPAECLLFLSHRGLLKEKTVQVLCPQTLLARRRVIRSVCTISGKVVAFKISAIEFISICRIDGNSWIEANGRIWTTWKTKKVCRRPKYVSPQDVTTMQTCNTKFPGPKSIPDYWDSSALPDPGFQKITLSSSSEEYQKVWNLFNRTLPFYFVQKIERVQNLALWEVYQWQKGQMQKQNGGKAVDERQLFHGTSAIFVDAICQQNFDWRVCGVHGTSYGKGSYFARDAAYSHHYSKSDTQTHTMFLARVLVGEFVRGNASFVRPPAKEGWSNAFYDSCVNSVSDPSIFVIFEKHQVYPEYVIQYTTSSKPSVTPSILLALGSLFSSRQ

SEQ ID NO: 896075 - protein, 487 aa, Homo sapiens [sequence omitted]

SEQ ID NO: 896076 - protein, 428 aa, Homo sapiens
MAQAGVVGEVTQVLCAAGGALELPELRRRLRMGLSADALERLLRQRGRFVVAVRAGGAAAAPERVVLAASPLRLCRAHQGSKPGCVGLCAQLHLCRFMVYGACKFLRAGKNCRNSHSLTTEHNLSVLRTHGVDHLSYNELCQLLFQNDPWLLPEICQHYNKGDGPHGSCAFQKQCIKLHICQYFLQGECKFGTSCKRSHDFSNSENLEKLEKLGMSSDLVSRLPTIYRNAHDIKNKSSAPSRVPPLFVPQGTSERKDSSGSVSPNTLSQEEGDQICLYISGKVVAFKGTVHPVTTVSSSDVEKAYLAYCTPGSDGQAATLKFQAGKHNYELDFKAFVQKNLVYGTTKKVCRRPKYVSPQDVTTMQTCNTKFPGPKSIPDYWDSSALPDPGFQAKRTDAEAERREGRGRAAAVPRHQRHFCGRHLPAEL

SEQ ID NO: 896077 - protein, 701 aa, Homo sapiens; identical to SEQ ID NO: 896071

SEQ ID NO: 896078 - protein, 231 aa, Homo sapiens [sequence omitted]

SEQ ID NO: 896079 - protein, 235 aa, Homo sapiens
TNGRASSGNTKFPGPKSIPDYWDSSALPDPGFQKITLSSSSEEYQKVWNLFNRTLPFYFVQKIERVQNLALWEVYQWQKGQMQKQNGGKAVDERQLFHGTSAIFVDAICQQNFDWRVCGVHGTSYGKGSYFARDAAYSHHYSKSDTQTHTMFLARVLVGEFVRGNASFVRPPAKEGWSNAFYDSCVNSVSDPSIFVIFEKHQVYPEYVIQYTTSSKPSVTPSILLALGSLFSSRQ

SEQ ID NO: 896080 - protein, 487 aa, Homo sapiens
MAQAGVVGEVTQVLCAAGGALELPELRRRLRMGLSADALERLLRQRGRFVVAVRAGGAAAAPERVVLAASPLRLCRAHQGSKPGCVGLCAQLHLCRFMVYGACKFLRAGKNCRNSHSLTTEHNLSVLRTHGVDHLSYNELCQLLFQNDPWLLPEICQHYNKGDGPHGSCAFQKQCIKLHICQYFLQGECKFGTSCKRSHDFSNSENLEKLEKLGMSSDLVSRLPTIYRNAHDIKNKSSAPSRVPPLFVPQGTSERKDSSGSVSPNTLSQEEGDQICLYHIRKSCSFQDKCHRVHFHLPYRWQFLDRGKWEDLDNMELIEEAYCNPKIERILCSESASTFHSHCLNFNAMTYGATQARRLSTASSVTKPPHFILTTDWIWYWSDEFGSWQEYGRQGTVHPVTTVSSSDVEKAYLAYCTPGSDGQAATLKFQAGKHNYELDFKAFVQKNLVYGTTKKVCRRPKYVSPQDVTTMQTCWTRVGITLWVEAS

SEQ ID NO: 896081 - protein, 474 aa, Homo sapiens [sequence omitted]

SEQ ID NO: 896082 - protein, 206 aa, Homo sapiens
MAQAGVVGEVTQVLCAAGGALELPELRRRLRMGLSADALERLLRQRGRFVVAVRAGGAAAAPERVVLAASPLRLCRAHQGSKPGCVGLCAQLHLCRFMVYGACKFLRAGKNCRNSHSLTTEHNLSVLRTHGVDHLSYNELCQLLFQNDPWLLPEKFGMWSRRSSEVQGPALPTTQFHKHHTDAMDSCATRADSLTSLSLSVCSIEK

SEQ ID NO: 896083 - protein, 124 aa, Homo sapiens
LVFTRSFGKGLIYILHVDGNALKTFAPCRRSPLVLPRKSIRRSGTSLTARCLSTLFRRLSEYRTWPSGKSTSGALGLALGGLVTLSLHTTGWLPHVARVSRKSRAAVRAAMCWELCVCSPSSAP

SEQ ID NO: 896084 - protein, 154 aa, Homo sapiens
MGKSASKQFHNEVLKAHNEYRQKHGVPPLKLCKNLNREAQQYSEALASTRILKHSPESSRGQCGENLAWASYDQTGKEVADRWYSEIKNYNFQQPGFTSGTGHFTAMVWKNTKKMGVGKASASDGSSFVVARYFPAGNVVNEGFFEENVLPPKK

SEQ ID NO: 896085 - protein, 169 aa, Homo sapiens
MVRNPALPDLAVSLVRRKPASKQFHNEVLKAHNEYRQKHGVPPLKLCKNLNREAQQYSEALASTRILKHSPESSRGQCGENLAWASYDQTGKEVADRWYSEIKNYNFQQPGFTSGTGHFTAMVWKNTKKMGVGKASASDGSSFVVARYFPAGNVVNEGFFEENVLPPKK

SEQ ID NO: 896086 - protein, 128 aa, Homo sapiens
MGKSASKQFHNEVLKAHNEYRQKHGVPPLKLCKNLNREAQQYSEALASTRILKHSPESSRGQCGENLAWASYDQTGHFTAMVWKNTKKMGVGKASASDGSSFVVARYFPAGNVVNEGFFEENVLPPKK

SEQ ID NO: 896087 - protein, 152 aa, Homo sapiens
MGKSASKQFHNEVLKAHNEYRQKHGVPPLKLCKNLNREAQQYSEALASTRILKHSPESSRGQCGENLAWASYDQTGKEVADRWYSEIKNYNFQQPGFTSGTGHFTAMVWKNTKKMGVGKASASDGSSFVVARYFPAGNVVNEGFFEDLRTWI

SEQ ID NO: 896088 - protein, 154 aa, Homo sapiens; identical to SEQ ID NO: 896084

SEQ ID NO: 896089 - protein, 143 aa, Homo sapiens
MSLLIRRGPGGAGGGAAASARSWALGRRWAGRAECSAAAGSEERAEPAMGKSASKQFHNEVLKAHNEYRQKHGVPPLKLCKNLNREAQQYSEALASTRILKHSPESSRGQCGENLAWASYDQTGKEVADRWYMKFILCDLHAS

SEQ ID NO: 896090 - protein, 145 aa, Homo sapiens
RPHPGSPRQSRSCFPGVSSPGGPRGGPGRLRPQLSLLIRRGPGGAGGGAAASARSWALGRRWAGRAECSAAAGSEERAEPAMGKSGEPAGSPAAEWFGTPRSRTSPSPSSAASQVLGSAGARGAGGGRAGGAPRRGFRGTRGEGE

SEQ ID NO: 896091 - protein, 164 aa, Homo sapiens
MWCFVYAVKHFGDLQKEGAAFLSITTIYAETGSGFVVPSASAKAGVEAMSKSLAAEWGKYGMRFNVIQPGPIKTKGAFSRLDPTGTFEKEMIGRIPCGRLGTVEELANLAAFLCSDYASWINGAVIKFDGGEEVLISGEFNDLRKVTKEQWDTIEELIRKTKGS

SEQ ID NO: 896092 - protein, 335 aa, Homo sapiens
MKLPARVFFTLGSRLPCGLAPRRFFSYGTKILYQNTEALQSKFFSPLQKAMLPPNSFQGKVAFITGGGTGLGKGMTTLLSSLGAQCVIASRKMDVLKATAEQISSQTGNKVHAIQCDVRDPDMVQNTVSELIKVAGHPNIVINNAAGNFISPTERLSPNAWKTITDIVLNGTAFVTLEIGKQLIKAQKGAAFLSITTIYAETGSGFVVPSASAKAGVEAMSKSLAAEWGKYGMRFNVIQPGPIKTKGAFSRLDPTGTFEKEMIGRIPCGRLGTVEELANLAAFLCSDYASWINGAVIKFDGGEEVLISGEFNDLRKVTKEQWDTIEELIRKTKGS

SEQ ID NO: 896093 - protein, 348 aa, Homo sapiens
MTSSLSLSCRIRGMKLPARVFFTLGSRLPCGLAPRRFFSYGTKILYQNTEALQSKFFSPLQKAMLPPNSFQGKVAFITGGGTGLGKGMTTLLSSLGAQCVIASRKMDVLKATAEQISSQTGNKVHAIQCDVRDPDMVQNTVSELIKVAGHPNIVINNAAGNFISPTERLSPNAWKTITDIVLNGTAFVTLEIGKQLIKAQKGAAFLSITTIYAETGSGFVVPSASAKAGVEAMSKSLAAEWGKYGMRFNVIQPGPIKTKGAFSRLDPTGTFEKEMIGRIPCGRLGTVEELANLAAFLCSDYASWINGAVIKFDGGEEVLISGEFNDLRKVTKEQWDTIEELIRKTKGS

SEQ ID NO: 896094 - protein, 335 aa, Homo sapiens; identical to SEQ ID NO: 896092

SEQ ID NO: 896095 - protein, 335 aa, Homo sapiens; identical to SEQ ID NO: 896092

SEQ ID NO: 896096 - protein, 335 aa, Homo sapiens; identical to SEQ ID NO: 896092

SEQ ID NO: 896097 - protein, 335 aa, Homo sapiens; identical to SEQ ID NO: 896092

SEQ ID NO: 896098 - protein, 326 aa, Homo sapiens
MSGLGKKHLLLMGEFFSYGTKILYQNTEALQSKFFSPLQKAMLPPNSFQGKVAFITGGGTGLGKGMTTLLSSLGAQCVIASRKMDVLKATAEQISSQTGNKVHAIQCDVRDPDMVQNTVSELIKVAGHPNIVINNAAGNFISPTERLSPNAWKTITDIVLNGTAFVTLEIGKQLIKAQKGAAFLSITTIYAETGSGFVVPSASAKAGVEAMSKSLAAEWGKYGMRFNVIQPGPIKTKGAFSRLDPTGTFEKEMIGRIPCGRLGTVEELANLAAFLCSDYASWINGAVIKFDGGEEVLISGEFNDLRKVTKEQWDTIEELIRKTKGS

SEQ ID NO: 896099 - protein, 326 aa, Homo sapiens; identical to SEQ ID NO: 896098

SEQ ID NO: 896100 - protein, 313 aa, Homo sapiens [sequence omitted]

SEQ ID NO: 896101 - protein, 326 aa, Homo sapiens
MTAYLATGILWKEMFFSYGTKILYQNTEALQSKFFSPLQKAMLPPNSFQGKVAFITGGGTGLGKGMTTLLSSLGAQCVIASRKMDVLKATAEQISSQTGNKVHAIQCDVRDPDMVQNTVSELIKVAGHPNIVINNAAGNFISPTERLSPNAWKTITDIVLNGTAFVTLEIGKQLIKAQKGAAFLSITTIYAETGSGFVVPSASAKAGVEAMSKSLAAEWGKYGMRFNVIQPGPIKTKGAFSRLDPTGTFEKEMIGRIPCGRLGTVEELANLAAFLCSDYASWINGAVIKFDGGEEVLISGEFNDLRKVTKEQWDTIEELIRKTKGS

SEQ ID NO: 896102 - protein, 355 aa, Homo sapiens
AAWVPVPVPSPGGLGSVSSPENFVLFVPPPAPNRLRRLPARVLETQHEATGQGFLYSGVPAALWPRSSEAMLPPNSFQGKVAFITGGGTGLGKGMTTLLSSLGAQCVIASRKMDVLKATAEQISSQTGNKVHAIQCDVRDPDMVQNTVSELIKVAGHPNIVINNAAGNFISPTERLSPNAWKTITDIVLNGTAFVTLEIGKQLIKAQKGAAFLSITTIYAETGSGFVVPSASAKAGVEAMSKSLAAEWGKYGMRFNVIQPGPIKTKGAFSRLDPTGTFEKEMIGRIPCGRLGTVEELANLAAFLCSDYASWINGAVIKFDGGEEVLISGEFNDLRKVTKEQWDTIEELIRKTKGS

SEQ ID NO: 896103 - protein, 243 aa, Homo sapiens
MDVLKATAEQISSQTGNKVHAIQCDVRDPDMVQNTVSELIKVAGHPNIVINNAAGNFISPTERLSPNAWKTITDIVLNGTAFVTLEIGKQLIKAQKGAAFLSITTIYAETGSGFVVPSASAKAGVEAMSKSLAAEWGKYGMRFNVIQPGPIKTKGAFSRLDPTGTFEKEMIGRIPCGRLGTVEELANLAAFLCSDYASWINGAVIKFDGGEEVLISGEFNDLRKVTKEQWDTIEELIRKTKGS

SEQ ID NO: 896104 - protein, 322 aa, Homo sapiens
AAWVPVPVPSPGGLGSVSSPENFVLFVPPPAPNRLRRLPARVLETQHEATGQGFLYSGVPAALWPRSSEGAQCVIASRKMDVLKATAEQISSQTGNKVHAIQCDVRDPDMVQNTVSELIKVAGHPNIVINNAAGNFISPTERLSPNAWKTITDIVLNGTAFVTLEIGKQLIKAQKGAAFLSITTIYAETGSGFVVPSASAKAGVEAMSKSLAAEWGKYGMRFNVIQPGPIKTKGAFSRLDPTGTFEKEMIGRIPCGRLGTVEELANLAAFLCSDYASWINGAVIKFDGGEEVLISGEFNDLRKVTKEQWDTIEELIRKTKGS

SEQ ID NO: 896105 - protein, 269 aa, Homo sapiens [sequence omitted]

SEQ ID NO: 896106 - protein, 269 aa, Homo sapiens [sequence omitted]

SEQ ID NO: 896107 - protein, 386 aa, Homo sapiens
AAWVPVPVPSPGGLGSVSSPENFVLFVPPPAPNRLRRLPARVLETQHEATGQGFLYSGVPAALWPRSSEAMLPPNSFQGKVAFITGGGTGLGKGMTTLLSSLGAQCVIASRNAFLQAMDSLYSSIYEIEKYNMKSYKVFISRKMDVLKATAEQISSQTGNKVHAIQCDVRDPDMVQNTVSELIKVAGHPNIVINNAAGNFISPTERLSPNAWKTITDIVLNGTAFVTLEIGKQLIKAQKGAAFLSITTIYAETGSGFVVPSASAKAGVEAMSKSLAAEWGKYGMRFNVIQPGPIKTKGAFSRLDPTGTFEKEMIGRIPCGRLGTVEELANLAAFLCSDYASWINGAVIKFDGGEEVLISGEFNDLRKVTKEQWDTIEELIRKTKGS

SEQ ID NO: 896108 - protein, 318 aa, Homo sapiens
MKLPARVFFTLGSRLPCGLAPRRFFSYGTKILYQNTEALQSKFFSPLQKAMLPPNSFQGKVAFITGGGTGLGKGMTTLLSSLGAQCVIASRKMDVLKATAEQISSQTGNKVHAIQCDVRDPDMVQNTVSELIKVAGHPNIVINNAAGNFISPTERLSPNAWKTITDIVLNGTAFVTLEIGIYAETGSGFVVPSASAKAGVEAMSKSLAAEWGKYGMRFNVIQPGPIKTKGAFSRLDPTGTFEKEMIGRIPCGRLGTVEELANLAAFLCSDYASWINGAVIKFDGGEEVLISGEFNDLRKVTKEQWDTIEELIRKTKGS

SEQ ID NO: 896109 - protein, 225 aa, Homo sapiens
MKLPARVFFTLGSRLPCGLAPRRFFSYGTKILYQNTEALQSKFFSPLQKAMLPPNSFQGKVAFITGGGTGLGKGMTTLLSSLGAQCVIASRKMDVLKATAEQISSQTGNKVHAIQCDVRDPDMVQNTVSELIKVAGHPNIVINNAAGNFISPTERLSPNAWKTITDIVLNGTAFVTLEIGKQLIKAQKGAAFLSITTIYAETGSGFVVPSASAKAGVEAMSNSCS

SEQ ID NO: 896110 - protein, 203 aa, Homo sapiens
MKLPARVFFTLGSRLPCGLAPRRFFSYGTKILYQNTEALQSKFFSPLQKAMLPPNSFQGKVAFITGGGTGLGKGMTTLLSSLGAQCVIASRKMDVLKATAEQISSQTGNKVHAIQCDVRDPDMVQNTVSELIKVAGHPNIVINNAAGNFISPTERLSPNAWKTITDIVLNGTAFVTLEIGKQLIKAQKGLLQLNGVNMECDSM

SEQ ID NO: 896111 - protein, 103 aa, Homo sapiens
MRFNVIQPGPIKTKGAFSRLDPTGTFEKEMIGRIPCGRLGTVEELANLAAFLCSDYASWINGAVIKFDGGEEVLISGEFNDLRKVTKEQWDTIEELIRKTKGS

SEQ ID NO: 896112 - protein, 203 aa, Homo sapiens; identical to SEQ ID NO: 896110

SEQ ID NO: 896113 - protein, 70 aa, Homo sapiens
AAWVPVPVPSPGGLGSVSSPENFVLFVPPPAPNRLRRLPARVLETQHEATGQGFLYSGVPAALWPRSSEV

SEQ ID NO: 896114 - protein, 116 aa, Homo sapiens
QQGGVAPRFLTSPPTAYEHVDIQNFSSSWSDGMAFCALVHNFFPEAFDYGQLSPQNRRQNFEVAFSSAETHADCPQLLDTEDMVRLREPDWKCVYTYIQEFYRCLVQKGLVKTKKS

SEQ ID NO: 896115 - protein, 130 aa, Homo sapiens
MGLSSAISASTCLALLPRPERCLQAWVDEARGFLPSWKAFPCLEFMKDQQAMRQEKRPWGRGAPREAGLALTSNPVPPPCRMLVDCVPLVEVDDMMIMGKKPDPKCVFTYVQSLYNHLRRHELRLRGKNV

SEQ ID NO: 896116 - protein, 915 aa, Homo sapiens [sequence omitted]

SEQ ID NO: 896117 - protein, 45 aa, Homo sapiens
MGTGVGQFHVADAEALVACACPCLVLKPSPSQPSTATTCLNSNCC

SEQ ID NO: 896118 - protein, 917 aa, Homo sapiens [sequence omitted]

SEQ ID NO: 896119 - protein, 596 aa, Homo sapiens
MADEALAGLDEGALRKLLEVTADLAERRRIRSAIRELQRQELEREEEALASKRFRAERQDNKENWLHSQQREAEQRAALARLAGQLESMNDVEELTALLRSAGEYEERKLIRAAIRRVRAQEIEAATLAGRLYSGRPNSGSREDSKGLAAHRLEQCEVPEREEQEQQAEVSKPTPTPEGTSQDVTTVTLLLRAPPGSTSSSPASPSSSPTPASPEPPLEPAEAQCLTAEVPGSPEPPPSPPKTTSPEPQESPTLPSTEGQVVNKLLSGPKETPAAQSPTRGPSDTKRADVAGPRPCQRSLSVLSPRQPAQNRESTPLASGPSSFQRAGSVRDRVHKFTSDSPMAARLQDGTPQAALSPLTPARLLGPSLTSTTPASSSSGSSSRGPSDTSSRFSKEQRGVAQPLAQLRSCPQEEGPRGRGLAARPLENRAGGPVARSEEPGAPLPVAVGTAEPGGSMKTTFTIEIKDGRGQASTGRVLLPTGNQRAELTLGLRAPPTLLSTSSGGKSTITRVNSPGTLARLGSVTHVTSFSHAPPSSRGGCSIKMEPEPAEPLAAAVEAANGAEQTRVNKAPEGRSPLSAEELMTIEDEGVLDKMV

SEQ ID NO: 896120 - protein, 628 aa, Homo sapiens [sequence omitted]

SEQ ID NO: 896121 - protein, 596 aa, Homo sapiens; identical to SEQ ID NO: 896119

SEQ ID NO: 896122 - protein, 984 aa, Homo sapiens
MADEALAGLDEGALRKLLEVTADLAERRRIRSAIRELQRQELEREEEALASKRFRAERQDNKENWLHSQQREAEQRAALARLAGQLESMNDVEELTALLRSAGEYEERKLIRAAIRRVRAQEIEAATLAGRLYSGRPNSGSREDSKGLAAHRLEQCEVPEREEQEQQAEVSKPTPTPEGTSQDVTTVTLLLRAPPGSTSSSPASPSSSPTPASPEPPLEPAEAQCLTAEVPGSPEPPPSPPKTTSPEPQESPTLPSTEGQVVNKLLSGPKETPAAQSPTRGPSDTKRADVAGPRPCQRSLSVLSPRQPAQNRESTPLASGPSSFQRAGSVRDRVHKFTSDSPMAARLQDGTPQAALSPLTPARLLGPSLTSTTPASSSSGSSSRGPSDTSSRFSKEQRGVAQPLAQLRSCPQEEGPRGRGLAARPLENRAGGPVARSEEPGAPLPVAVGTAEPGGSMKTTFTIEIKDGRGQASTGRVLLPTGNQRAELTLGLRAPPTLLSTSSGGKSTITRVNSPGTLARLGSVTHVTSFSHAPPSSRGGCSIKMEPEPAEPLAAAVEAANGAEQTRVNKAPEGRSPLSAEELMTIEDEGVLDKMLDQSTDFEERKLIRAALRELRQRKRDQRDKERERRLQEARGRPGEGRGNTATETTTRHSQRAADGSAVSTVTKTERLVHSNDGTRTARTTTVESSFVRRSESKATWCRPVPACLSAHLLRLFLELSLRVFNCAVTFSSLPAAITTPPYSLPSHLLMSSPGPHLVPLPLFADGSGSTMMQTKTFSSSSSSKKMGSIFDREDQASPRAGSLAALEKRQAEKKKELMKAQSLPKTSASQARKAMIEKLEKEGAAGSPGGPRAAVQRSTSFGVPNANSIKQMLLDWCRAKTRGYEHVDIQNFSSSWSDGMAFCALVHNFFPEAFDYGQLSPQNRRQNFEVAFSSAETHADCPQLLDTEDMVRLREPDWKCVYTYIQEFYRCLVQKGLVKTKKS

SEQ ID NO: 896123 - protein, 646 aa, Homo sapiens
MADEALAGLDEGALRKLLEVTADLAERRRIRSAIRELQRQELEREEEALASKRFRAERQDNKENWLHSQQREAEQRAALARLAGQLESMNDVEELTALLRSAGEYEERKLIRAAIRRVRAQEIEAATLAGRLYSGRPNSGSREDSKGLAAHRLEQCEVPEREEQEQQAEVSKPTPTPEGTSQDVTTVTLLLRAPPGSTSSSPASPSSSPTPASPEPPLEPAEAQCLTAEVPGSPEPPPSPPKTTSPEPQESPTLPSTEGQVVNKLLSGPKETPAAQSPTRGPSDTKRADVAGPRPCQRSLSVLSPRQPAQNRESTPLASGPSSFQRAGSVRDRVHKFTSDSPMAARLQDGTPQAALSPLTPARLLGPSLTSTTPASSSSGSSSRGPSDTSSRFSKEQRGVAQPLAQLRSCPQEEGPRGRGLAARPLENRAGGPVARSEEPGAPLPVAVGTAEPGGSMKTTFTIEIKDGRGQASTGRVLLPTGNQRAELTLGLRAPPTLLSTSSGGKSTITRVNSPGTLARLGSVTHVTSFSHAPPSSRGGCSIKMEPEPAEPLAAAVEAANGAEQTRVNKAPEGRSPLSAEELMTIEDEGVLDKMLDQSTDFEERKLIRAALRELRQRKRDPDTPSRSYSLLGSSCLSKYCQRLLP

SEQ ID NO: 896124 - protein, 839 aa, Homo sapiens
MADEALAGLDEGALRKLLEVTADLAERRRIRSAIRELQRQELEREEEALASKRFRAERQDNKENWLHSQQREAEQRAALARLAGQLESMNDVEELTALLRSAGEYEERKLIRAAIRRVRAQEIEAATLAGRLYSGRPNSGSREDSKGLAAHRLEQCEVPEREEQEQQAEVSKPTPTPEGTSQDVTTVTLLLRAPPGSTSSSPASPSSSPTPASPEPPLEPAEAQCLTAEVPGSPEPPPSPPKTTSPEPQESPTLPSTEGQVVNKLLSGPKETPAAQSPTRGPSDTKRADVAGPRPCQRSLSVLSPRQPAQNRESTPLASGPSSFQRAGSVRDRVHKFTSDSPMAARLQDGTPQAALSPLTPARLLGPSLTSTTPASSSSGSSSRGPSDTSSRFSKEQRGVAQPLAQLRSCPQEEGPRGRGLAARPLENRAGGPVARSEEPGAPLPVAVGTAEPGGSMKTTFTIEIKDGRGQASTGRVLLPTGNQRAELTLGLRAPPTLLSTSSGGKSTITRVNSPGTLARLGSVTHVTSFSHAPPSSRGGCSIKMEPEPAEPLAAAVEAANGAEQTRVNKAPEGRSPLSAEELMTIEDEGVLDKMLDQSTDFEERKLIRAALRELRQRKRDGSGSTMMQTKTFSSSSSSKKMGSIFDREDQASPRAGSLAALEKRQAEKKKELMKAQSLPKTSASQARKAMIEKLEKEGAAGSPGGPRAAVQRSTSFGVPNANSIKQMLLDWCRAKTRGYEHVDIQNFSSSWSDGMAFCALVHNFFPEAFDYGQLSPQNRRQNFEVAFSSAETHADCPQLLDTEDMVRLREPDWKCVYTYIQEFYRCLVQKGLVKTKKS

SEQ ID NO: 896125 - protein, 352 aa, Homo sapiens
MAVPSPQLLLERPLLPVSFMFLTSHPPPRLVCPMHLCICAVWVLVALLRMHGASPAQNQRDKERERRLQEARGRPGEGRGNTATETTTRHSQRAADGSAVSTVTKTERLVHSNDGTRTARTTTVESSFVRRSENGSGSTMMQTKTFSSSSSSKKMGSIFDREDQASPRAGSLAALEKRQAEKKKELMKAQSLPKTSASQARKAMIEKLEKEGAAGSPGGPRAAVQRSTSFGVPNANSIKQMLLDWCRAKTRGYEHVDIQNFSSSWSDGMAFCALVHNFFPEAFDYGQLSPQNRRQNFEVAFSSAETHADCPQLLDTEDMVRLREPDWKCVYTYIQEFYRCLVQKGLVKTKKS

SEQ ID NO: 896126 - protein, 352 aa, Homo sapiens; identical to SEQ ID NO: 896125

SEQ ID NO: 896127 - protein, 596 aa, Homo sapiens; identical to SEQ ID NO: 896119

SEQ ID NO: 896128 - protein, 233 aa, Homo sapiens
MADEALAGLDEGALRKLLEVTADLAERRRIRSAIRELQRQELEREEEALASKRFRAERQDNKENWLHSQQREAEQRAALARLAGQLESMNDVEELTALLRSAGEYEERKLIRAAIRRVRAQEIEAATLAGRLYSGRPNSGSREDSKGLAAHRLEQCEVPEREEQEQQAEVSKPTPTPEGTSQDVTTVTLLLRAPPGSTSSSPASPSSSPVACTSPVAVPHQELYLTRSCTSPV

SEQ ID NO: 896129 - protein, 45 aa, Homo sapiens
AGEDLDSTAQHPRPVSYPQLRSAGEYEERKLIRAAIRRVRAQEIE

SEQ ID NO: 896130 - protein, 946 aa, Homo sapiens
MADEALAGLDEGALRKLLEVTADLAERRRIRSAIRELQRQELEREEEALASKRFRAERQDNKENWLHSQQREAEQRAALARLAGQLESMNDVEELTALLRSAGEYEERKLIRAAIRRVRAQEIEAATLAGRLYSGRPNSGSREDSKGLAAHRLEQCEVPEREEQEQQAEVSKPTPTPEGTSQDVTTVTLLLRAPPGSTSSSPASPSSSPTPASPEPPLEPAEAQCLTAEVPGSPEPPPSPPKTTSPEPQESPTLPSTEGQVVNKLLSGPKETPAAQSPTRGPSDTKRADVAGPRPCQRSLSVLSPRQPAQNRESTPLASGPSSFQRAGSVRDRVHKFTSDSPMAARLQDGTPQAALSPLTPARLLGPSLTSTTPASSSSGSSSRGPSDTSSRFSKEQRGVAQPLAQLRSCPQEEGPRGRGLAARPLENRAGGPVARSEEPGAPLPVAVGTAEPGGSMKTTFTIEIKDGRGQASTGRVLLPTGNQRAELTLGLRAPPTLLSTSSGGKSTITRVNSPGTLARLGSVTHVTSFSHAPPSSRGGCSIKAAEDAGTPVAHPPAFSTRRRSSTGTTRSTSLMEPEPAEPLAAAVEAANGAEQTRVNKAPEGRSPLSAEELMTIEDEGVLDKMLDQSTDFEERKLIRAALRELRQRKRDQRDKERERRLQEARGRPGEGRGNTATETTTRHSQRAADGSAVSTVTKTERLVHSNDGTRTARTTTVESSFVRRSENGSGSTMMQTKTFSSSSSSKKMGSIFDREDQASPRAGSLAALEKRQAEKKKELMKAQSLPKTSASQARKAMIEKLEKEGAAGSPGGPRAAVQRSTSFGVPNANSIKQMLLDWCRAKTRGYEHVDIQNFSSSWSDGMAFCALVHNFFPEAFDYGQLSPQNRRQNFEVAFSSAETHADCPQLLDTEDMVRLREPDWKCVYTYIQEFYRCLVQKGLVKTKKS

SEQ ID NO: 896131 - protein, 596 aa, Homo sapiens; identical to SEQ ID NO: 896119

SEQ ID NO: 896132 - protein, 352 aa, Homo sapiens; identical to SEQ ID NO: 896125

SEQ ID NO: 896133 - protein, 596 aa, Homo sapiens; identical to SEQ ID NO: 896119

SEQ ID NO: 896134 - protein, 211 aa, Homo sapiens
MADEALAGLDEGALRKLLEVTADLAERRRIRSAIRELQRQELEREEEALASKRFRAERQDNKENWLHSQQREAEQRAALARLAGQLESMNDVEELTALLRSAGEYEERKLIRAAIRRVRAQEIEAATLAGRLYSGRPNSGSREDSKGLAAHRLEQCEVPEREEQEQQAEVSKPTPTPEGTSQDVTTVTLLLRAPPGSTSSSPAIKGAVQLL

SEQ ID NO: 896135 - protein, 227 aa, Homo sapiens
MFKRMAEFGPDSGGRVKGVTIVKPIVYGNVARYFGKKREEDGHTHQWTVYVKPYRNEDMSAYVKKIQFKLHESYGNPLRVVTKPPYEITETGWGEFEIIIKIFFIDPNERPVTLYHLLKLFQSDTNAMLGKKTVVSEFYDEMIFQDPTAMMQQLLTTSRQLTLGAYKHETEFAELEVKTREKLEAAKKKTSFEIAELKERLKASRETINCLKNEIRKLEEDDQAKDI

SEQ ID NO: 896136 - protein, 227 aa, Homo sapiens; identical to SEQ ID NO: 896135

SEQ ID NO: 896137 - protein, 227 aa, Homo sapiens; identical to SEQ ID NO: 896135

SEQ ID NO: 896138 - protein, 268 aa, Homo sapiens
MFKRMAEFGPDSGGRVKGVTIVKPIVYGNVARYFGKKREEDGHTHQWTVYVKPYRNEAKWLIPVISALWEAQAGGSLEPRSLRPDWQHSKTPSLQKKKDMSAYVKKIQFKLHESYGNPLRVVTKPPYEITETGWGEFEIIIKIFFIDPNERPVTLYHLLKLFQSDTNAMLGKKTVVSEFYDEMIFQDPTAMMQQLLTTSRQLTLGAYKHETEFAELEVKTREKLEAAKKKTSFEIAELKERLKASRETINCLKNEIRKLEEDDQAKDI

SEQ ID NO: 896139 - protein, 266 aa, Homo sapiens
MFKRMAEFGPDSGGRVKLECTSAISALRNLHLLDSSDSPASTRFSCLSLLNELELQGVTIVKPIVYGNVARYFGKKREEDGHTHQWTVYVKPYRNEDMSAYVKKIQFKLHESYGNPLRVVTKPPYEITETGWGEFEIIIKIFFIDPNERPVTLYHLLKLFQSDTNAMLGKKTVVSEFYDEMIFQDPTAMMQQLLTTSRQLTLGAYKHETEFAELEVKTREKLEAAKKKTSFEIAELKERLKASRETINCLKNEIRKLEEDDQAKDI

SEQ ID NO: 896140 - protein, 173 aa, Homo sapiens
MFKRMAEFGPDSGGRVKGVTIVKPIVYGNVARYFGKKREEDGHTHQWTVYVKPYRNEVTLYHLLKLFQSDTNAMLGKKTVVSEFYDEMIFQDPTAMMQQLLTTSRQLTLGAYKHETEFAELEVKTREKLEAAKKKTSFEIAELKERLKASRETINCLKNEIRKLEEDDQAKDI

SEQ ID NO: 896141 - protein, 647 aa, Homo sapiens
RALGVRCRKRKPLAGARSSAGRAPAAAELAGAKRLHLAGDGARCGRPGIAWARLRGPGAHARTSPQPWRGPSPAQAAMGFLQLLVVAVLASEHRVAGAAEVFGNSSEGLIEFSVGKFRYFELNRPFPEEAILHDISSNVTFLIFQIHSQYQNTTVSFSPTLLSNSSETGTASGLVFILRPEQSTCTWYLGTSGIQPVQNMAILLSYSERDPVPGGCNLEFDLDIDPNIYLEYNFFETTIKFAPANLGYARGVDPPPCDAGTDQDSRWRLQYDVYQYFLPENDLTEEMLLKHLQRMVSVPQVKASALKVVTLTANDKTSVSFSSLPGQGVIYNVIVWDPFLNTSAAYIPAHTYACSFEAGEGSCASLGRVSSKVFFTLFALLGFFICFFGHRFWKTELFFIGFIIMGFFFYILITRLTPIKYDVNLILTAVTGSVGGMFLVAVWWRFGILSICMLCVGLVLGFLISSVTFFTPLGNLKIFHDDGVFWVTFSCIAILIPVVFMGCLRILNILTCGVIGSYSVVLAIDSYWSTSLSYITLNVLKRALNKDFHRAFTNVPFQTNDFIILAVWGMLAVSGITLQIRRERGRPFFPPHPYKLWKQERERRVTNILDPSYHIPPLRERLYGRLTQIKGLFQKEQPAGERTPLLL

SEQ ID NO: 896142 - protein, 618 aa, Homo sapiens
RALGVRCRKRKPLAGARSSAGRAPAAAELAGAKRLHLAGDGARCGRPGIAWARLRGPGAHARTSPQPWRGPSPAQAAMGFLQLLVVAVLASEHRVAGAAEVFGNSSEGLIEFSVGKFRYFELNRPFPEEAILHDISSNVTFLIFQIHSQYQNTTVSFSPTLLSNSSETGTASGLVFILRPEQSTCTWYLGTSGIQPVQNMAILLSYSERDPVPGGCNLEFDLDIDPNIYLEYNFFETTIKFAPANLGYARGVDPPPCDAGTDQDSRWRLQYDVYQYFLPENDLTEEMLLKHLQRMVSVPQVKASALKVVTLTANDKTSVSFSSLPGQGVIYNVIVWDPFLNTSAAYIPAHTYACSFEAGEGSCASLELFFIGFIIMGFFFYILITRLTPIKYDVNLILTAVTGSVGGMFLVAVWWRFGILSICMLCVGLVLGFLISSVTFFTPLGNLKIFHDDGVFWVTFSCIAILIPVVFMGCLRILNILTCGVIGSYSVVLAIDSYWSTSLSYITLNVLKRALNKDFHRAFTNVPFQTNDFIILAVWGMLAVSGITLQIRRERGRPFFPPHPYKLWKQERERRVTNILDPSYHIPPLRERLYGRLTQIKGLFQKEQPAGERTPLLL

SEQ ID NO: 896143 - protein, 631 aa, Homo sapiens
RALGVRCRKRKPLAGARSSAGRAPAAAELAGAKRLHLAGDGARCGRPGIAWARLRGPGAHARTSPQPWRGPSPAQAAMGFLQLLVVAVLASEHRVAGAAEVFGNSSEGLIEFSVGKFRYFELNRPFPEEAILHDISSNVTFLIFQIHSQYQNTTVSFSPTLLSNSSETGTASGLVFILRPEQSTCTWYLGTSGIQPVQNMAILLSYSERDPVPGGCNLEFDLDIDPNIYLEYNFFETTIKFAPANLGYARGVDPPPCDAGTDQDSRWRLQYDVYQYFLPENDLTEEMLLKHLQRMVSVPQVKASALKVVTLTANDKTSVSFSSLPGQGVIYNVIVWDPFLNTSAAYIPAHTYACSFEAGEGSCASLGRVSSKVFFTLFALLGFFICFFGHRFWKTVITRLTPIKYDVNLILTAVTGSVGGMFLVAVWWRFGILSICMLCVGLVLGFLISSVTFFTPLGNLKIFHDDGVFWVTFSCIAILIPVVFMGCLRILNILTCGVIGSYSVVLAIDSYWSTSLSYITLNVLKRALNKDFHRAFTNVPFQTNDFIILAVWGMLAVSGITLQIRRERGRPFFPPHPYKLWKQERERRVTNILDPSYHIPPLRERLYGRLTQIKGLFQKEQPAGERTPLLL

SEQ ID NO: 896144 - protein, 596 aa, Homo sapiens
RALGVRCRKRKPLAGARSSAGRAPAAAELAGAKRLHLAGDGARCGRPGIAWARLRGPGAHARTSPQPWRGPSPAQAAMGFLQLLVVAVLASEHRVAGAAEVFGNSSEGLIEFSVGKFRYFELNRPFPEEAILHDISSNVTFLIFQIHSQYQNTTVSFSPTLLSNSSETGTASGLVFILRPEQSTCTWYLGTSGIQPVQNMAILLSYSERDPVPGGCNLEFDLDIDPNIYLEYNFFETTIKFAPANLGYARGVDPPPCDAGTDQDSRWRLQYDVYQYFLPENDLTEEMLLKHLQRMVSVPQVKASALKVVTLTANDKTSVSFSSLPGQGVIYNVIVWDPFLNTSAAYIPAHTYACSFEAGEGSCASLGRVSSKVFFTLFALLGFFICFFGHRFWKTELFFIGFIIMGFFFYILITRLTPIKYDGNLKIFHDDGVFWVTFSCIAILIPVVFMGCLRILNILTCGVIGSYSVVLAIDSYWSTSLSYITLNVLKRALNKDFHRAFTNVPFQTNDFIILAVWGMLAVSGITLQIRRERGRPFFPPHPYKLWKQERERRVTNILDPSYHIPPLRERLYGRLTQIKGLFQKEQPAGERTPLLL

SEQ ID NO: 896145 - protein, 545 aa, Homo sapiens
RALGVRCRKRKPLAGARSSAGRAPAAAELAGAKRLHLAGDGARCGRPGIAWARLRGPGAHARTSPQPWRGPSPAQAAMGFLQLLVVAVLASEHRVAGAAEVFGNSSEDPVPGGCNLEFDLDIDPNIYLEYNFFETTIKFAPANLGYARGVDPPPCDAGTDQDSRWRLQYDVYQYFLPENDLTEEMLLKHLQRMVSVPQVKASALKVVTLTANDKTSVSFSSLPGQGVIYNVIVWDPFLNTSAAYIPAHTYACSFEAGEGSCASLGRVSSKVFFTLFALLGFFICFFGHRFWKTELFFIGFIIMGFFFYILITRLTPIKYDVNLILTAVTGSVGGMFLVAVWWRFGILSICMLCVGLVLGFLISSVTFFTPLGNLKIFHDDGVFWVTFSCIAILIPVVFMGCLRILNILTCGVIGSYSVVLAIDSYWSTSLSYITLNVLKRALNKDFHRAFTNVPFQTNDFIILAVWGMLAVSGITLQIRRERGRPFFPPHPYKLWKQERERRVTNILDPSYHIPPLRERLYGRLTQIKGLFQKEQPAGERTPLLL

SEQ ID NO: 896146 - protein, 631 aa, Homo sapiens
RALGVRCRKRKPLAGARSSAGRAPAAAELAGAKRLHLAGDGARCGRPGIAWARLRGPGAHARTSPQPWRGPSPAQAAMGFLQLLVVAVLASEHRVAGAAEVFGNSSEGLIEFSVGKFRYFELNRPFPEEAILHDISSNVTFLIFQIHSQYQNTTVSFSPTLLSNSSETGTASGLVFILRPEQSTCTWYLGTSGIQPVQNMAILLSYSERDPVPGGCNLEFDLDIDPNIYLEYNFFETTIKFAPANLGYARGVDPPPCDAGTDQDSRWRLQYDVYQYFLPENDLTEEMLLKHLQRMVSVPQVKASALKVVTLTANDKTSVSFSSLPGQGVIYNVIVWDPFLNTSAAYIPAHTYACSFEAGEGSCASLAVLYLLLCLSTIITLLYHWIILKQIPGHHVTHKYFRRVSSKVFFTLFALLGFFICFFGHRFWKTELFFIGFIIMGFFFYILITRLTPIKYDGNLKIFHDDGVFWVTFSCIAILIPVVFMGCLRILNILTCGVIGSYSVVLAIDSYWSTSLSYITLNVLKRALNKDFHRAFTNVPFQTNDFIILAVWGMLAVSGITLQIRRERGRPFFPPHPYKLWKQERERRVTNILDPSYHIPPLRERLYGRLTQIKGLFQKEQPAGERTPLLL

SEQ ID NO: 896147 - protein, 361 aa, Homo sapiens
MLLKHLQRMVSVPQVKASALKVVTLTANDKTSVSFSSLPGQGVIYNVIVWDPFLNTSAAYIPAHTYACSFEAGEGSCASLGRVSSKVFFTLFALLGFFICFFGHRFWKTELFFIGFIIMGFFFYILITRLTPIKYDVNLILTAVTGSVGGMFLVAVWWRFGILSICMLCVGLVLGFLISSVTFFTPLGNLKIFHDDGVFWVTFSCIAILIPVVFMGCLRILNILTCGVIGSYSVVLAIDSYWSTSLSYITLNVLKRALNKDFHRAFTNVPFQTNDFIILAVWGMLAVSGITLQIRRERGRPFFPPHPYKLWKQERERRVTNILDPSYHIPPLRERLYGRLTQIKGLFQKEQPAGERTPLLL

SEQ ID NO: 896148 - protein, 647 aa, Homo sapiens; identical to SEQ ID NO: 896141

SEQ ID NO: 896149 - protein, 647 aa, Homo sapiens; identical to SEQ ID NO: 896141

SEQ ID NO: 896150 - protein, 411 aa, Homo sapiens
MRAPRDSVGEAAGPRRARPHLSPALAWAQPGPGSNGVPAAAGRSGAGIRTPGGWCSRGLREFQRGGVDPPPCDAGTDQDSRWRLQYDVYQYFLPENDLTEEMLLKHLQRMVSVPQVKASALKVVTLTANDKTSVSFSSLPGQGVIYNVIVWDPFLNTSAAYIPAHTYACSFEAGEGSCASLGRVSSKVFFTLFALLGFFICFFGHRFWKTELFFIGFIIMGFFFYILITRLTPIKYDGNLKIFHDDGVFWVTFSCIAILIPVVFMGCLRILNILTCGVIGSYSVVLAIDSYWSTSLSYITLNVLKRALNKDFHRAFTNVPFQTNDFIILAVWGMLAVSGITLQIRRERGRPFFPPHPYKLWKQERERRVTNILDPSYHIPPLRERLYGRLTQIKGLFQKEQPAGERTPLLL

SEQ ID NO: 896151 - protein, 234 aa, Homo sapiens
VRSNRYAPRVVVLDREGRPFLWYVHGSVCGALEISDLHALCKKKKLSFLIFVSDYYTPLGNLKMHDDGVFWVTYYKDRPIPHSSNKQGLDKGGLNILTCGVIGSYSVVLAIDSYWSTSLSYITLNVLKRALNKDFHRAFTNVPFQTNDFIILAVWGMLAVSGITLQIRRERGRPFFPPHPYKLWKQERERRVTNILDPSYHIPPLRERLYGRLTQIKGLFQKEQPAGERTPLLL

SEQ ID NO: 896152 - protein, 387 aa, Homo sapiens
RALGVRCRKRKPLAGARSSAGRAPAAAELAGAKRLHLAGDGARCGRPGIAWARLRGPGAHARTSPQPWRGPSPAQAAMGFLQLLVVAVLASEHRVAGAAEVFGNSSEGLIEFSVGKFRYFELNRPFPEEAILHDISSNVTFLIFQIHSQYQNTTVSFSPTLLSNSSETGTASGLVFILRPEQSTCTWYLGTSGIQPVQNMAILLSYSERDPVPGGCNLEFDLDIDPNIYLEYNFFETTIKFAPANLGYARGVDPPPCDAGTDQDSRWRLQYDVYQYFLPENDLTEEMLLKHLQRMVSVPQVKASALKVVTLTANDKTSVSFSSLPGQGVIYNVIVWDPFLNTSAAYIPAHTYACSFEAGEGSCASLGEYVALNFYKFSFGLADNAFV

SEQ ID NO: 896153 - protein, 219 aa, Homo sapiens
RALGVRCRKRKPLAGARSSAGRAPAAAELAGAKRLHLAGDGARCGRPGIAWARLRGPGAHARTSPQPWRGPSPAQAAMGFLQLLVVAVLASEHRVAGAAEVFGNSSEGLIEFSVGKFRYFELNRPFPEEAILHDISSNVTFLIFQIHSQYQNTTVSFSPTLLSNSSETGTASGLVFILRPEQSTCTWYLGTSGIQPVQNMAILLSYSERVLSESGSELN

SEQ ID NO: 896154 - protein, 215 aa, Homo sapiens
RALGVRCRKRKPLAGARSSAGRAPAAAELAGAKRLHLAGDGARCGRPGIAWARLRGPGAHARTSPQPWRGPSPAQAAMGFLQLLVVAVLASEHRVAGAAEVFGNSSEGLIEFSVGKFRYFELNRPFPEEAILHDISSNVTFLIFQIHSQYQNTTVSFSPTLLSNSSETGTASGLVFILRPEQSTCTWYLGTSGIQPVQNMAILLSYSERGESGDP

SEQ ID NO: 896155 - protein, 109 aa, Homo sapiens
GCIIMLDFKILEFKLYFFYCFLDFIILAVWGMLAVSGITLQIRRERGRPFFPPHPYKLWKQERERRVTNILDPSYHIPPLRERLYGRLTQIKGLFQKEQPAGERTPLLL

SEQ ID NO: 896156 - protein, 647 aa, Homo sapiens; identical to SEQ ID NO: 896141

SEQ ID NO: 896157 - protein, 570 aa, Homo sapiens
RALGVRCRKRKPLAGARSSAGRAPAAAELAGLIEFSVGKFRYFELNRPFPEEAILHDISSNVTFLIFQIHSQYQNTTVSFSPTLLSNSSETGTASGLVFILRPEQSTCTWYLGTSGIQPVQNMAILLSYSERDPVPGGCNLEFDLDIDPNIYLEYNFFETTIKFAPANLGYARGVDPPPCDAGTDQDSRWRLQYDVYQYFLPENDLTEEMLLKHLQRMVSVPQVKASALKVVTLTANDKTSVSFSSLPGQGVIYNVIVWDPFLNTSAAYIPAHTYACSFEAGEGSCASLGRVSSKVFFTLFALLGFFICFFGHRFWKTELFFIGFIIMGFFFYILITRLTPIKYDVNLILTAVTGSVGGMFLVAVWWRFGILSICMLCVGLVLGFLISSVTFFTPLGNLKIFHDDGVFWVTFSCIAILIPVVFMGCLRILNILTCGVIGSYSVVLAIDSYWSTSLSYITLNVLKRALNKDFHRAFTNVPFQTNDFIILAVWGMLAVSGITLQIRRERGRPFFPPHPYKLWKQERERRVTNILDPSYHIPPLRERLYGRLTQIKGLFQKEQPAGERTPLLL

SEQ ID NO: 896158 - protein, 448 aa, Homo sapiens
MAILLSYSERDPVPGGCNLEFDLDIDPNIYLEYNFFETTIKFAPANLGYARGVDPPPCDAGTDQDSRWRLQYDVYQYFLPENDLTEEMLLKHLQRMVSVPQVKASALKVVTLTANDKTSVSFSSLPGQGVIYNVIVWDPFLNTSAAYIPAHTYACSFEAGEGSCASLGRVSSKVFFTLFALLGFFICFFGHRFWKTELFFIGFIIMGFFFYILITRLTPIKYDVNLILTAVTGSVGGMFLVAVWWRFGILSICMLCVGLVLGFLISSVTFFTPLGNLKIFHDDGVFWVTFSCIAILIPVVFMGCLRILNILTCGVIGSYSVVLAIDSYWSTSLSYITLNVLKRALNKDFHRAFTNVPFQTNDFIILAVWGMLAVSGITLQIRRERGRPFFPPHPYKLWKQERERRVTNILDPSYHIPPLRERLYGRLTQIKGLFQKEQPAGERTPLLL

SEQ ID NO: 896159 - protein, 440 aa, Homo sapiens
RALGVRCRKRKPLAGARSSAGRAPAAAELAGAKRLHLAGDGARCGRPGIAWARLRGPGAHARTSPQPWRGPSPAQAAMGFLQLLVVAVLASEHRVAGAAEVFGNSSEGLIEFSVGKFRYFELNRPFPEEAILHDISSNVTFLIFQIHSQYQNTTVSFSPTLLSNSSETGTASGLVFILRPEQSTCTWYLGTSGIQPVQNMAILLSYSERDPVPGGCNLEFDLDIDPNIYLEYNFFETTIKFAPANLGYARGVDPPPCDAGTDQDSRWRLQYDVYQYFLPENDLTEEMLLKHLQRMVSVPQVKASALKVVTLTANDKTSVSFSSLPGQGVIYNVIVWDPFLNTSAAYIPAHTYACSFEAGEGSCASLGRVSSKVFFTLFALLGFFICFFGHRFWKTELFFIGFIIMGFFFYILITRLTPIKYDAEHTDLWSHWLLFGGFSH

SEQ ID NO: 896160 - protein, 462 aa, Homo sapiens
MRAPRDSVGEAAGPRRARPHLSPALAWAQPGPGSNGVPAAAGRSGAGIRTPGGWCSRGLREFQRGGVDPPPCDAGTDQDSRWRLQYDVYQYFLPENDLTEEMLLKHLQRMVSVPQVKASALKVVTLTANDKTSVSFSSLPGQGVIYNVIVWDPFLNTSAAYIPAHTYACSFEAGEGSCASLGRVSSKVFFTLFALLGFFICFFGHRFWKTELFFIGFIIMGFFFYILITRLTPIKYDVNLILTAVTGSVGGMFLVAVWWRFGILSICMLCVGLVLGFLISSVTFFTPLGNLKIFHDDGVFWVTFSCIAILIPVVFMGCLRILNILTCGVIGSYSVVLAIDSYWSTSLSYITLNVLKRALNKDFHRAFTNVPFQTNDFIILAVWGMLAVSGITLQIRRERGRPFFPPHPYKLWKQERERRVTNILDPSYHIPPLRERLYGRLTQIKGLFQKEQPAGERTPLLL

SEQ ID NO: 896161 - protein, 333 aa, Homo sapiens
MWSSAPILPSLTSFSLSRICNVIPLTASMPQYCQDNEVISLKRHICESSVEILVERSLEYVQSDVGKACGPVTCQWLKPPNELFFIGFIIMGFFFYILITRLTPIKYDVNLILTAVTGSVGGMFLVAVWWRFGILSICMLCVGLVLGFLISSVTFFTPLGNLKIFHDDGVFWVTFSCIAILIPVVFMGCLRILNILTCGVIGSYSVVLAIDSYWSTSLSYITLNVLKRALNKDFHRAFTNVPFQTNDFIILAVWGMLAVSGITLQIRRERGRPFFPPHPYKLWKQERERRVTNILDPSYHIPPLRERLYGRLTQIKGLFQKEQPAGERTPLLL

SEQ ID NO: 896162 - protein, 192 aa, Homo sapiens
CHCFQLDGSHLCVFLYSTGNLKIFHDDGVFWVTFSCIAILIPVVFMGCLRILNILTCGVIGSYSVVLAIDSYWSTSLSYITLNVLKRALNKDFHRAFTNVPFQTNDFIILAVWGMLAVSGITLQIRRERGRPFFPPHPYKLWKQERERRVTNILDPSYHIPPLRERLYGRLTQIKGLFQKEQPAGERTPLLL

SEQ ID NO: 896163 - protein, 150 aa, Homo sapiens
MPKLFHSSTLNILTCGVIGSYSVVLAIDSYWSTSLSYITLNVLKRALNKDFHRAFTNVPFQTNDFIILAVWGMLAVSGITLQIRRERGRPFFPPHPYKLWKQERERRVTNILDPSYHIPPLRERLYGRLTQIKGLFQKEQPAGERTPLLL

SEQ ID NO: 896164 - protein, 488 aa, Homo sapiens
RALGVRCRKRKPLAGARSSAGRAPAAAELAGAKRLHLAGDGARCGRPGIAWARLRGPGAHARTSPQPWRGPSPAQAAMGFLQLLVVAVLASEHRVAGAAEVFGNSSEGLIEFSVGKFRYFELNRPFPEEAILHDISSNVTFLIFQIHSQYQNTTVSFSPTLLSNSSETGTASGLVFILRPEQSTCTWYLGTSGIQPVQNMAILLSYSERDPVPGGCNLEFDLDIDPNIYLEYNFFETTIKFAPANLGYARGVDPPPCDAGTDQDSRWRLQYDVYQYFLPENDLTEEMLLKHLQRMVSVPQVKASALKVVTLTANDKTSVSFSSLPGQGVIYNVIVWDPFLNTSAAYIPAHTYACSFEAGEGSCASLGRVSSKVFFTLFALLGFFICFFGHRFWKTELFFIGFIIMGFFFYILITRLTPIKYDVNLILTAVTGSVGGMFLVAVWWRFGILSICMLCVGLVLGFLISSVTFFTPLGRRYVTDVLCVRVTV

SEQ ID NO: 896165 - protein, 82 aa, Homo sapiens
GKIWNRTCTLDQLSNLCFGRLPIHDNVSSGLQTLLSNSSETGTASGLVFILRPEQSTCTWYLGTSGIQPVQNMAILLSYSER

SEQ ID NO: 896166 - protein, 368 aa, Homo sapiens
MISDPPSNNSWNSVLYLLEDRKLFVGMLGKQQGEEDVRRLFQPFGHIEECTVLRSPDGTSKGCAFVKFGSQGEAQAAIRGLHGSRTMAGASSSLVVKLADTDRERALRRMQQMAGHLGAFHPAPLPLGACGAYTTAILQHQAALLAAAQGPGLGPVAAVAAQMQHVAAFSLVAAPLLPAAAANSPPGSGPGTLPGLPAPIGVNGFGPLTPQTNGQPGSDTLYNNGLSPYPAQSPGVADPLQQAYAGMHHYAAAYPSAYAPVSTAFPQQPSALPQQQREGPEGCNLFIYHLPQEFGDAELIQTFLPFGAVVSAKVFVDRATNQSKCFGFVSFDNPTSAQTAIQAMNGFQIGMKRLKVQLKRPKDANRPY

SEQ ID NO: 896167 - protein, 481 aa, Homo sapiens
MAAAPGGSAQPAGPGPRLGFSTADSGVGMSGLNPGPAVPMKDHDAIKLFVGQIPRGLDEQDLKPLFEEFGRIYELTVLKDRLTGLHKGCAFLTYCARDSALKAQSALHEQKTLPGMNRPIQVKPAASEGRGEDRKLFVGMLGKQQGEEDVRRLFQPFGHIEECTVLRSPDGTSKGCAFVKFGSQGEAQAAIRGLHGSRTMAGASSSLVVKLADTDRERALRRMQQMAGHLGAFHPAPLPLGACGAYTTAILQHQAALLAAAQGPGLGPVAAVAAQMQHVAAFSLVAAPLLPAAAANSPPGSGPGTLPGLPAPIGVNGFGPLTPQTNGQPGSDTLYNNGLSPYPAQSPGVADPLQQAYAGMHHYAAAYPSAYAPVSTAFPQQPSALPQQQREGPEGCNLFIYHLPQEFGDAELIQTFLPFGAVVSAKVFVDRATNQSKCFGFVSFDNPTSAQTAIQAMNGFQIGMKRLKVQLKRPKDANRPY

SEQ ID NO: 896168 - protein, 626 aa, Homo sapiens
DALDAVQESAAASRLGPERGGRQAGPLAGSLRRTAPAWRRFPSSVPTGPAAPPSLRPAPEKTHSSGRAGAGAAEPLLPGSSRRKAKLRADAARAGPQPRRVGAAGGVSAAGDKGVPHLKTASWVLSDAPQLSVQGWPEEPPLAPPFPMEKGLTLPQDCRDFVHSLKMRSKYALFLVFVVIVFVFIEKENKIISRVSDKLKQIPQALADANSTDPALILAENASLLSLSELDSAFSQLQSRLRNLSLQLGVEPAMEAAGEEEEEQRKEEEPPRPAVAGPRRHVLLMATTRTGSSFVGEFFNQQGNIFYLFEPLWHIERTVSFEPGGANAAGSALVYRDVLKQLFLCDLYVLEHFITPLPEDHLTQFMFRRGSSRSLCEDPVCTPFVKKVFEKYHCKNRRCGPLNVTLAAEACRRKEHMALKAVRIRQLEFLQPLAEDPRLDLRVIQLVRDPRAVLASRMVAFAGKYKTWKKWLDDEGQDGLREEEVQRLRGNCESIRLSAELGLRQPAWLRGRYMLVRYEDVARGPLQKAREMYRFAGIPLTPQVEDWIQKNTQAAHDGSGIYSTQKNSSEQFEKWRFSMPFKLAQVVQAACGPAMRLFGYKLARDAAALTNRSVSLLEERGTFWVT

SEQ ID NO: 896169 - protein, 107 aa, Homo sapiens
MFPGSVFPWGSAMLWEPLGFGEGQCGVTIGLKRYGYGWSHPCGYDFQLGAGMEKMEALVAGPLFPARPALASPLFQLVCQKPSPARCPPARRQREQLRPLSTGRQPP

SEQ ID NO: 896170 - protein, 76 aa, Homo sapiens
QGASPPRPSPGGAAAPARYPRPAGGRSGGRVPEAGAKGLPLTRAFGGLRRPDDAVQVENGQQNREIWMQRHRENAM

SEQ ID NO: 896171 - protein, 163 aa, Homo sapiens
MAAAVVLAAGLRAARRAVAATGVRGGQVRGAAGVTDGNEVAKAQQATPGGAAPTIFSRILDKSLPADILYEDQQCLVFRDVAPQAPVHFLVIPKKPIPRISQAEEEDQQLLGHLLLVAKQTAKAEGLGDGYRLVINDGKLGAQSVYHLHIHVLGGRQLQWPPG

SEQ ID NO: 896172 - protein, 163 aa, Homo sapiens; identical to SEQ ID NO: 896171

SEQ ID NO: 896173 - protein, 135 aa, Homo sapiens
MAAAVVLAAGLRAARRAVAATGVRGGQVRGAAGVTDGNEVAKAQQATPGGAAPTIFSRILDKSLPADILYEDQQCLVFRDVAPQAPVHFLVIPKKPIPRISQAEEEDQQLLGHLLLVAKQTAKAEGLGDGYRLGE

SEQ ID NO: 896174 - protein, 206 aa, Homo sapiens
MEWKIVLALVEAANEMKRARLQSGCRGNGVNLCSEARSNGVAGLARPPLPRFPAPGVPTHGRPRSRVLTRVRGAAGVTDGNEVAKAQQATPGGAAPTIFSRILDKSLPADILYEDQQCLVFRDVAPQAPVHFLVIPKKPIPRISQAEEEDQQLLGHLLLVAKQTAKAEGLGDGYRLVINDGKLGAQSVYHLHIHVLGGRQLQWPPG

SEQ ID NO: 896175 - protein, 153 aa, Homo sapiens
MAAAVVLAAGLRAARRAVAATGVRGGQVRGAAGVTDGNEVAKAQQATPGGAAPTIFSRILDKSLPADILYEDQQAPVHFLVIPKKPIPRISQAEEEDQQLLGHLLLVAKQTAKAEGLGDGYRLVINDGKLGAQSVYHLHIHVLGGRQLQWPPG

SEQ ID NO: 896176 - protein, 532 aa, Homo sapiens
RPRRSHKMAAGGSGGRASCPPGVGVGPGTGGSPGPSANAAATPAPGNAAAAAAAAAAAAAAPGPTPPAPPGPGTDAQAAGAERAEEAAGPGAAALQREAAYNWQASKPTVQERFAFLFNNEVLCDVHFLVGKGLSSQRIPAHRFVLAVGSAVFDAMFNGGMATTSTEIELPDVEPAAFLALLKFLYSDEVQIGPETVMTTLYTAKKYAVPALEAHCVEFLKKNLRADNAFMLLTQARLFDEPQLASLCLENIDKNTADAITAEGFTDIDLDTLVAVLERDTLGIREVRLFNAVVRWSEAECQRQQLQVTPENRRKVLGKALGLIRFPLMTIEEFAAGPAQSGILVDREVVSLFLHFTVNPKPRVEFIDRPRCCLRGKECSINRFQQVESRWGYSGTSDRIRFSVNKRIFVVGFGLYGSIHGPTDYQVNIQIIHTDSNTVLGQNDTGFSCDGSASTFRVMFKEPVEVLPNVNYTACATLKGPDSHYGTKGLRKVTHESPTTGAKTCFTFCYAAGNNNGTSVEDGQIPEVIFYT

SEQ ID NO: 896177 - protein, 302 aa, Homo sapiens
MVSCQARLFDEPQLASLCLENIDKNTADAITAEGFTDIDLDTLVAVLERDTLGIREVRLFNAVVRWSEAECQRQQLQVTPENRRKVLGKALGLIRFPLMTIEEFAAGPAQSGILVDREVVSLFLHFTVNPKPRVEFIDRPRCCLRGKECSINRFQQVESRWGYSGTSDRIRFSVNKRIFVVGFGLYGSIHGPTDYQVNIQIIHTDSNTVLGQNDTGFSCDGSASTFRVMFKEPVEVLPNVNYTACATLKGPDSHYGTKGLRKVTHESPTTGAKTCFTFCYAAGNNNGTSVEDGQIPEVIFYT

SEQ ID NO: 896178 - protein, 377 aa, Homo sapiens
MFNGGMATTSTEIELPDVEPAAFLALLKFLYSDEVQIGPETVMTTLYTAKKYAVPALEAHCVEFLKKNLRADNAFMLLTQARLFDEPQLASLCLENIDKNTADAITAEGFTDIDLDTLVAVLERDTLGIREVRLFNAVVRWSEAECQRQQLQVTPENRRKVLGKALGLIRFPLMTIEEFAAGPAQSGILVDREVVSLFLHFTVNPKPRVEFIDRPRCCLRGKECSINRFQQVESRWGYSGTSDRIRFSVNKRIFVVGFGLYGSIHGPTDYQVNIQIIHTDSNTVLGQNDTGFSCDGSASTFRVMFKEPVEVLPNVNYTACATLKGPDSHYGTKGLRKVTHESPTTGAKTCFTFCYAAGNNNGTSVEDGQIPEVIFYT

SEQ ID NO: 896179 - protein, 276 aa, Homo sapiens [sequence omitted]

SEQ ID NO: 896180 - protein, 397 aa, Homo sapiens
RPRRSHKMAAGGSGGRASCPPGVGVGPGTGGSPGPSANAAATPAPGNAAAAAAAAAAAAAAPGPTPPAPPGPGTDAQAAGAERAEEAAGPGAAALQREAAYNWQASKPTVQERFAFLFNNEVLCDVHFLVGKGLSSQRIPAHRFVLAVGSAVFDAMFNGGMATTSTEIELPDVEPAAFLALLKFLYSDEVQIGPETVMTTLYTAKKYAVPALEAHCVEFLKKNLRADNAFMLLTQARLFDEPQLASLCLENIDKNTADAITAEGFTDIDLDTLVAVLERDTLGIREVRLFNAVVRWSEAECQRQQLQVPHSRASWWTARWSASSCTSPSTPSHEWSSLTGPAAACVGRSAASTASSRWRVAGATAGPVTASGSQSTSASSWWDLGCMDPSTGPPTTK

SEQ ID NO: 896181 - protein, 532 aa, Homo sapiens; identical to SEQ ID NO: 896176

SEQ ID NO: 896182 - protein, 532 aa, Homo sapiens; identical to SEQ ID NO: 896176

SEQ ID NO: 896183 - protein, 276 aa, Homo sapiens
RPRRSHKMAAGGSGGRASCPPGVGVGPGTGGSPGPSANAAATPAPGNAAAAAAAAAAAAAAPGPTPPAPPGPGTDAQAAGAERAEEAAGPGAAALQREAAYNWQASKPTVQERFAFLFNNEVLCDVHFLVGKGLSSQRIPAHRFVLAVGSAVFDAMFNGGMATTSTEIELPDVEPAAFLALLKFLYSDEVQIGPETVMTTLYTAKKYAVPALEAHCVEFLKKNLRADNAFMLLTQAGVQWRDLSSLQPSPPAFKRFSCLSLHSSWDYRPPPPRLAK

SEQ ID NO: 896184 - protein, 122 aa, Homo sapiens [sequence omitted]

SEQ ID NO: 896185 - protein, 204 aa, Homo sapiens
MTIEEFAAGPAQSGILVDREVVSLFLHFTVNPKPRVEFIDRPRCCLRGKECSINRFQQVESRWGYSGTSDRIRFSVNKRIFVVGFGLYGSIHGPTDYQVNIQIIHTDSNTVLGQNDTGFSCDGSASTFRVMFKEPVEVLPNVNYTACATLKGPDSHYGTKGLRKVTHESPTTGAKTCFTFCYAAGNNNGTSVEDGQIPEVIFYT

SEQ ID NO: 896186 - protein, 532 aa, Homo sapiens; identical to SEQ ID NO: 896176

SEQ ID NO: 896187 - protein, 157 aa, Homo sapiens [sequence omitted]

SEQ ID NO: 896188 - protein, 196 aa, Homo sapiens
AHAAATKWRRVGAAGVRRARRGSGSARARGAVPGPAPTPPPPRPPATRPPPPPPPPPPPPPLGRRRPPRRAPGQTRRPRARSGRRRRRARGRRRCSARPRTTGRPASPPCRSASPSSSTTRCCATCTSWWARGSARSASPRTGSCWPWAAPSLMPCSTGEWPQHPRRLSCPTWNPLPSSHCSSFSTRTRCRLARRR

SEQ ID NO: 896189 - protein, 122 aa, Homo sapiens [sequence omitted]

SEQ ID NO: 896190 - protein, 423 aa, Homo sapiens
MVPHLLLLCLLPLVRATEPHEGRADEQSAEAALAVPNASHFFSWNNYTFSDWQNFVGRRRYGAESQNPTVKALLIVAYSFIIVFSLFGNVLVCHVIFKNQRMHSATSLFIVNLAVADIMITLLNTPFTLVRFVNSTWIFGKGMCHVSRFAQYCSLHVSALTLTAIAVDRHQVIMHPLKPRISITKGVIYIAVIWTMATFFSLPHAICQKLFTFKYSEDIVRSLCLPDFPEPADLFWKYLDLATFILLYILPLLIISVAYARVAKKLWLCNMIGDVTTEQYFALRRKKKKTIKMLMLVVVLFALCWFPLNCYVLLLSSKVIRTNNALYFAFHWFAMSSTCYNPFIYCWLNENFRIELKALLSMCQRPPKPQEDRQPSPVPSFRVAWTEKNDGQRAPLANNLLPTSQLQSGKTDLSSVEPIVTMS

SEQ ID NO: 896191 - protein, 166 aa, Homo sapiens
MAGQAGGADLALPEAGCGPQASLEEGERGGQEPLLPLREAGQHPPSARSASQGARPLSTGKLEGFQSIDEAIAWLRKELTEMRLQDQQLARQLMRLRGDINKLKIEHTCRLHRRMLNDATYELEERDELADLFCDSPLASSFSLSTPLKLIGVTKMNINSRRFSLC

SEQ ID NO: 896192 - protein, 166 aa, Homo sapiens; identical to SEQ ID NO: 896191

SEQ ID NO: 896193 - protein, 166 aa, Homo sapiens; identical to SEQ ID NO: 896191

SEQ ID NO: 896194 - protein, 166 aa, Homo sapiens; identical to SEQ ID NO: 896191

SEQ ID NO: 896195 - protein, 166 aa, Homo sapiens; identical to SEQ ID NO: 896191

SEQ ID NO: 896196 - protein, 166 aa, Homo sapiens; identical to SEQ ID NO: 896191

SEQ ID NO: 896197 - protein, 166 aa, Homo sapiens; identical to SEQ ID NO: 896191

SEQ ID NO: 896198 - protein, 342 aa, Homo sapiens
ARSNIRMVTAFRSLPAGSSGAARAMSAHNRGTELDLSWISKIQVNHPAVLRRAEQIQARRTVKKEWQAAWLLKAVTFIDLTTLSGDDTSSNIQRLCYKAKYPIREDLLKALNMHDKGITTAAVCVYPARVCDAVKALKAAGCNIPVASVAAGFPAGQTHLKTRLEEIRLAVEDGATEIDVVINRSLVLTGQWEALYDEIRQFRKACGEAHLKTILATGELGTLTNVYKASMIAMMAGSDFIKTSTGKETVNATFPVAIVMLRAIRDFFWKTGNKIGFKPAGGIRSAKDSLAWLSLVKEELGDEWLKPELFRIGASTLLSDIERQIYHHVTGRYAAYHDLPMS

SEQ ID NO: 896199 - protein, 342 aa, Homo sapiens; identical to SEQ ID NO: 896198

SEQ ID NO: 896200 - protein, 342 aa, Homo sapiens; identical to SEQ ID NO: 896198

SEQ ID NO: 896201 - protein, 318 aa, Homo sapiens
MSAHNRGTELDLSWISKIQVNHPAVLRRAEQIQARRTVKKEWQAAWLLKAVTFIDLTTLSGDDTSSNIQRLCYKAKYPIREDLLKALNMHDKGITTAAVCVYPARVCDAVKALKAAGCNIPVASVAAGFPAGQTHLKTRLEEIRLAVEDGATEIDVVINRSLVLTGQWEALYDEIRQFRKACGEAHLKTILATGELGTLTNVYKASMIAMMAGSDFIKTSTGKETVNATFPVAIVMLRAIRDFFWKTGNKIGFKPAGGIRSAKDSLAWLSLVKEELGDEWLKPELFRIGASTLLSDIERQIYHHVTGRYAAYHDLPMS

SEQ ID NO: 896202 - protein, 230 aa, Homo sapiens
MHDKGITTAAVCVYPARVCDAVKALKAAGCNIPVASVAAGFPAGQTHLKTRLEEIRLAVEDGATEIDVVINRSLVLTGQWEALYDEIRQFRKACGEAHLKTILATGELGTLTNVYKASMIAMMAGSDFIKTSTGKETVNATFPVAIVMLRAIRDFFWKTGNKIGFKPAGGIRSAKDSLAWLSLVKEELGDEWLKPELFRIGASTLLSDIERQIYHHVTGRYAAYHDLPMS

SEQ ID NO: 896203 - protein, 363 aa, Homo sapiens
ARSNIRMVTAFRSLPAGSSGAARAMSAHNRGTELARWLENPTTQKTKPKTNNPQADLSWISKIQVNHPAVLRRAEQIQARRTVKKEWQAAWLLKAVTFIDLTTLSGDDTSSNIQRLCYKAKYPIREDLLKALNMHDKGITTAAVCVYPARVCDAVKALKAAGCNIPVASVAAGFPAGQTHLKTRLEEIRLAVEDGATEIDVVINRSLVLTGQWEALYDEIRQFRKACGEAHLKTILATGELGTLTNVYKASMIAMMAGSDFIKTSTGKETVNATFPVAIVMLRAIRDFFWKTGNKIGFKPAGGIRSAKDSLAWLSLVKEELGDEWLKPELFRIGASTLLSDIERQIYHHVTGRYAAYHDLPMS

SEQ ID NO: 896204 - protein, 112 aa, Homo sapiens [sequence omitted]

SEQ ID NO: 896205 - protein, 300 aa, Homo sapiens
MSAHNRGTELDLSWISKIQVNHPAVLRRAEQIQARRTVKKEWQAAWLLKAVTFIDLTTLSGDDTSSNIQRLCYKAKYPIREDLLKALNMHDKGITTAAVCVYPARVLAAGFPAGQTHLKTRLEEIRLAVEDGATEIDVVINRSLVLTGQWEALYDEIRQFRKACGEAHLKTILATGELGTLTNVYKASMIAMMAGSDFIKTSTGKETVNATFPVAIVMLRAIRDFFWKTGNKIGFKPAGGIRSAKDSLAWLSLVKEELGDEWLKPELFRIGASTLLSDIERQIYHHVTGRYAAYHDLPMS

SEQ ID NO: 896206 - protein, 275 aa, Homo sapiens
MSAHNRGTELDLSWISKIQVNHPAVLRRAEQIQARRTVKKEWQAAWLLKAVTFIDLTTLSGDDTSSNIQRLCYKAKYPIREDLLKALNMHDKGITTAAVCVYPARVCDAVKALKAAGCNIPVASVAAGFPAGQTHLKTRLEEIRLAVEDGATEIDVVINRSLVLTGQWEGSDFIKTSTGKETVNATFPVAIVMLRAIRDFFWKTGNKIGFKPAGGIRSAKDSLAWLSLVKEELGDEWLKPELFRIGASTLLSDIERQIYHHVTGRYAAYHDLPMS

SEQ ID NO: 896207 - protein, 315 aa, Homo sapiens
MSAHNRGTELDLSWISKIQVNHPAVLRRAEQIQARRTVKKEWQAAWLLKAVTFIDLTTLSGDDTSSNIQRLCYKAKYPIREDLLKALNMHDKGITTAAVCVYPARVCDAVKALKAAGCNIPVASVAAGFPAGQTHLKTRLEEIRLAVEDGATEIDVVINRSLVLTGQWEALYDEIRQFRKACGEAHLKTILATGELGTLTNVYKASMIAMMAGSDFIKTSTGKETVNATFPVAIVMLRAIRDFFWKTGNKIGFKPAGGIRSAKDSLAWLSLVKEELGDEWLKPELFRIGASTLLSDIERQVSNHLCLWNKLTSVF

SEQ ID NO: 896208 - protein, 219 aa, Homo sapiens
MSAHNRGTELDLSWISKIQVNHPAVLRRAEQIQARRTVKKEWQAAWLLKAVTFIDLTTLSGDDTSSNIQRLCYKAKYPIREDLLKALNMHDKGITTAAVCVYPARVCDAVKALKAAGCNIPVASVAAGFPAGQTHLKTRLEEIRLAVEDGATEIDVVINRSLVLTGQWEALYDEIRQFRKACGEAHLKTILATGELGTLTNVYKASMIAMMAGKCFMFK

SEQ ID NO: 896209 - protein, 331 aa, Homo sapiens
MGTPQKDVIIKSDAPDTLLLEKHADYIASYGSKKDDYEYCMSEYLRMSGIYWGLTVMDLMGQLHRMNREEILAFIKSCQHECGGISASIGHDPHLLYTLSAVQILTLYDSINVIDVNKVVEYVKGLQKEDGSFAGDIWGEIDTRFSFCAVATLALLGKLDAINVEKAIEFVLSCMNFDGGFGCRPGSESHAGQIYCCTGFLAITSQLHQVNSDLLGWWLCERQLPSGGLNGRPEKLPDVCYSWWVLASLKIIGRLHWIDREKLRNFILACQDEETGGFADRPGDMVDPFHTLFGIAGLSLLGEEQIKPVNPVFCMPEEVLQRVNVQPELVS

SEQ ID NO: 896210 - protein, 331 aa, Homo sapiens; identical to SEQ ID NO: 896209

SEQ ID NO: 896211 - protein, 291 aa, Homo sapiens [sequence omitted]

SEQ ID NO: 896212 - protein, 291 aa, Homo sapiens [sequence omitted]

SEQ ID NO: 896213 - protein, 291 aa, Homo sapiens [sequence omitted]

SEQ ID NO: 896214 - protein, 331 aa, Homo sapiens; identical to SEQ ID NO: 896209

SEQ ID NO: 896215 - protein, 291 aa, Homo sapiens [sequence omitted]

SEQ ID NO: 896216 - protein, 265 aa, Homo sapiens
MGTPQKDVIIKSDAPDTLLLEKHADYIASYGSKKDDYILTLYDSINVIDVNKVVEYVKGLQKEDGSFAGDIWGEIDTRFSFCAVATLALLGKLDAINVEKAIEFVLSCMNFDGGFGCRPGSESHAGQIYCCTGFLAITSQLHQVNSDLLGWWLCERQLPSGGLNGRPEKLPDVCYSWWVLASLKIIGRLHWIDREKLRNFILACQDEETGGFADRPGDMVDPFHTLFGIAGLSLLGEEQIKPVNPVFCMPEEVLQRVNVQPELVS

SEQ ID NO: 896217 - protein, 316 aa, Homo sapiens
MGTPQKDVIIKSDAPDTLLLEKHADYIASYGSKKDDYEYCMSEYLRMSGIYWGLTVMDLMGQLHRMNREEILAFIKSCQHECGGISASIGHDPHLLYTLSAVQILTLYDSINVIDVNKVVEYVKGLQKEDGSFAGDIWGEIDTRFSFCAVATLALLGKLDAINVEKAIEFVLSCMNFDGGFGCRPGSESHAGQIYCCTGFLAITSQLHQVNSDLLGWWLCERQLPSGGLNGRPEKLPDVCYSWWVLASLKIIGRLHWIDREKLRNFILACQDEETGGFADRPGDMVDPFHTLFGIAGLSLLGEVLQRVNVQPELVS

SEQ ID NO: 896218 - protein, 281 aa, Homo sapiens
MGTPQKDVIIKSDAPDTLLLEKHADYIASYGSKKDDYEYCMSEYLRMSGIYWGLTVMDLMGQLHRMNREEILAFIKSCQHECGGISASIGHDPHLLYTLSAVQILTLYDSINVIDVNKVVEYVKGLQKEDGSFAGDIWGEIDTRFSFCAVATLALLGKLDAINVEKAIEFVLSCMNFDGGFGCRPGSESHAGQIYCCTGFLAITSQLHQVNSDLLGWWLCERQLPSGGLNGRPEKVDPFHTLFGIAGLSLLGEEQIKPVNPVFCMPEEVLQRVNVQPELVS

SEQ ID NO: 896219 - protein, 199 aa, Homo sapiens
MGTPQKDVIIKSDAPDTLLLEKHADYIASYGSKKDDYEYCMSEYLRMSGIYWGLTVMDLMGQLHRMNREEILAFIKSCQHECGGISASIGHDPHLLYTLSAVQILTLYDSINVIDVNKVVEYVKGLQKEDGSFAGDIWGEIDTRFSFCAVATLALLGKLDAINVEKAIEFVLSCMNFDGGFGCRPGSESHAGQVIYEYR

SEQ ID NO: 896220 - protein, 782 aa, Homo sapiens
MFPPSGSTGLIPPSHFQARPLSTLPRMAPTWLSDIPLVQPPGHQDVSERRLDTQRPQVTMWERDVSSDRQEPGRRGRSWGLEGSQALSQQAEVIVRQLQELRRLEEEVRLLRETSLQQKMRLEAQAMELEALARAEKAGRAEAEGLRAALAGAEVVRKNLEEGSQRELEEVQRLHQEQLSSLTQAHEEALSSLTSKAEGLEKSLSSLETRRAGEAKELAEAQREAELLRKQLSKTQEDLEAQVTLVENLRKYVGEQVPSEVHSQTWELERQKLLETMQHLQEDRDSLHATAELLQVRVQSLTHILALQEEELTRKVQPSDSLEPEFTRKCQSLLNRWREKVFALMVQLKAQELEHSDSVKQLKGQVASLQEKVTSQSQEQAILQRSLQDKAAEVEVERMGAKGLQLELSRAQEARRRWQQQTASAEEQLRLVVNAVSSSQIWLETTMAKVEGAAAQLPSLNNRLSYAVRKVHTIRGLIARKLALAQLRQESCPLPPPVTDVSLELQQLREERNRLDAELQLSARLIQQEVGRAREQGEAERQQLSKVAQQLEQELQQTQESLASLGLQLEVARQGQQESTEEAASLRQELTQQQELYGQALQEKVAEVETRLREQLSDTERRLNEARREHAKAVVSLRQIQRRAAQEKERSQELRRLQEEARKEEGQRLARRLQELERDKNLMLATLQQEGLLSRYKQQRLLTVLPSLLDKKKSVVSSPRPPECSASAPVAAAVPTRESIKGSLSVLLDDLQDLSEAISKEEAVCQGDNLDRCSSSNPQMSS

SEQ ID NO: 896221 - protein, 115 aa, Homo sapiens
RDKCAHFRNLLFRLWHDECCSLRSFEALKPLLAMPSLDQRASSLPFLISLCQPCFLCNHEHLPLSGAHLLSSFPGSLSVLLDDLQDLSEAISKEEAVCQGDNLDRCSSSNPQMSS

SEQ ID NO: 896222 - protein, 782 aa, Homo sapiens; identical to SEQ ID NO: 896220

SEQ ID NO: 896223 - protein, 782 aa, Homo sapiens; identical to SEQ ID NO: 896220

SEQ ID NO: 896224 - protein, 782 aa, Homo sapiens; identical to SEQ ID NO: 896220

SEQ ID NO: 896225 - protein, 808 aa, Homo sapiens
MFPPSGQWDQTRGVVVVSAWETDHLCFCNSSGSTGLIPPSHFQARPLSTLPRMAPTWLSDIPLVQPPGHQDVSERRLDTQRPQVTMWERDVSSDRQEPGRRGRSWGLEGSQALSQQAEVIVRQLQELRRLEEEVRLLRETSLQQKMRLEAQAMELEALARAEKAGRAEAEGLRAALAGAEVVRKNLEEGSQRELEEVQRLHQEQLSSLTQAHEEALSSLTSKAEGLEKSLSSLETRRAGEAKELAEAQREAELLRKQLSKTQEDLEAQVTLVENLRKYVGEQVPSEVHSQTWELERQKLLETMQHLQEDRDSLHATAELLQVRVQSLTHILALQEEELTRKVQPSDSLEPEFTRKCQSLLNRWREKVFALMVQLKAQELEHSDSVKQLKGQVASLQEKVTSQSQEQAILQRSLQDKAAEVEVERMGAKGLQLELSRAQEARRRWQQQTASAEEQLRLVVNAVSSSQIWLETTMAKVEGAAAQLPSLNNRLSYAVRKVHTIRGLIARKLALAQLRQESCPLPPPVTDVSLELQQLREERNRLDAELQLSARLIQQEVGRAREQGEAERQQLSKVAQQLEQELQQTQESLASLGLQLEVARQGQQESTEEAASLRQELTQQQELYGQALQEKVAEVETRLREQLSDTERRLNEARREHAKAVVSLRQIQRRAAQEKERSQELRRLQEEARKEEGQRLARRLQELERDKNLMLATLQQEGLLSRYKQQRLLTVLPSLLDKKKSVVSSPRPPECSASAPVAAAVPTRESIKGSLSVLLDDLQDLSEAISKEEAVCQGDNLDRCSSSNPQMSS

SEQ ID NO: 896226 - protein, 808 aa, Homo sapiens; identical to SEQ ID NO: 896225

SEQ ID NO: 896227 - protein, 506 aa, Homo sapiens
MQHLQEDRDSLHATAELLQVRVQSLTHILALQEEELTRKVQPSDSLEPEFTRKCQSLLNRWREKVFALMVQLKAQELEHSDSVKQLKGQVASLQEKVTSQSQEQAILQRSLQDKAAEVEVERMGAKGLQLELSRAQEARRRWQQQTASAEEQLRLVVNAVSSSQIWLETTMAKVEGAAAQLPSLNNRLSYAVRKVHTIRGLIARKLALAQLRQESCPLPPPVTDVSLELQQLREERNRLDAELQLSARLIQQEVGRAREQGEAERQQLSKVAQQLEQELQQTQESLASLGLQLEVARQGQQESTEEAASLRQELTQQQELYGQALQEKVAEVETRLREQLSDTERRLNEARREHAKAVVSLRQIQRRAAQEKERSQELRRLQEEARKEEGQRLARRLQELERDKNLMLATLQQEGLLSRYKQQRLLTVLPSLLDKKKSVVSSPRPPECSASAPVAAAVPTRESIKGSLSVLLDDLQDLSEAISKEEAVCQGDNLDRCSSSNPQMSS

SEQ ID NO: 896228 - protein, 768 aa, Homo sapiens
MFPPSGSTGLIPPSHFQARPLSTLPRMAPTWLSDIPLVQPPGHQDVSERRLDTQRPQVTMWERDVSSDRQEPGRRGRSWGLEGSQALSQQAEVIVRQLQELRRLEEEVRLLRETSLQQKMRLEAQAMELEALARAEKAGRAEAEGLRAALAGAEVVRKNLEEGSQRELEEVQRLHQEQLSSLTQAHEEALSSLTSKAEGLEKSLSSLETRRAGEAKELAEAQREAELLRKQLSKTQEDLEAQVTLVENLRKYVGEQVPSEVHSQTWELERQKLLETMQHLQEDRDSLHATAELLQVRVQSLTHILALQEEELTRKVQPSDSLEPEFTRKCQSLLNRWREKVFALMVQLKAQELEHSDSVKQLKGQVASLQEKVTSQSQEQAILQRSLQDKAAEVEVERMGAKGLQLELSRAQEARRRWQQQTASAEEQLRLVVNAVSSSQIWLETTMAKVEGAAAQLPSLNNRLSYAVRKVHTIRGLIARKLALAQLRQESCPLPPPVTDVSLELQQLREERNRLDAELQLSARLIQQEVGRAREQGEAERQQLSKVAQQLEQELQQTQESLASLGLQLEVARQGQQESTEEAASLRQELTQQQELYGQALQEKVAEVETRLREQLSDTERRLNEARREHAKAVVSLRQIQRRAAQEKERSQELRRLQEEARKEEGQRLARRLQELERDKNLMLQRLLTVLPSLLDKKKSVVSSPRPPECSASAPVAAAVPTRESIKGSLSVLLDDLQDLSEAISKEEAVCQGDNLDRCSSSNPQMSS

SEQ ID NO: 896229 - protein, 659 aa, Homo sapiens
MFPPSGSTGLIPPSHFQARPLSTLPRMAPTWLSDIPLVQPPGHQDVSERRLDTQRPQVTMWERDVSSDRQEPGRRGRSWGLEGSQALSQQAEVIVRQLQELRRLEEEVRLLRETSLQQKMRLEAQAMELEALARAEKAGRAEAEGLRAALAGAEVVRKNLEEGSQRELEEVQRLHQEQLSSLTQAHEEALSSLTSKAEGLEKSLSSLETRRAGEAKELAEAQREAELLRKQLSKTQEDLEAQVTLVENLRKYVGEQVPSEVHSQTWELERQKLLETMQHLQEDRDSLHATAELLQVRVQSLTHILALQEEELTRKVQPSDSLEPEFTRKCQSLLNRWREKVFALMVQLKAQELEHSDSVKQLKGQVASLQEKVTSQSQEQAILQRSLQDKAAEVEVERMGAKGLQLELSRAQEARRRWQQQTASAEEQLRLVVNAVSSSQIWLETTMAKVEGAAAQLPSLNNRLSYAVRKVHTIRGLIARKLALAQLRQESCPLPPPVTDVSLELQQLREERNRLDAELQLSARLIQQEVGRAREQGEAERQQLSKVAQQLEQELQQTQESLASLGLQLEVARQGQQESTEEAASLRQELTQQQELYGQALQEKVAEVETRLREQLSDTERRLNEARREHAKAGHLAAGRSPLPLQAAATVDSSSFPTG

SEQ ID NO: 896230 - protein, 736 aa, Homo sapiens
MFPPSGSTGLIPPSHFQARPLSTLPRMAPTWLSDIPLVQPPGHQDVSERRLDTQRPQVTMWERDVSSDRQEPGRRGRSWGLEGSQALSQQAEVIVRQLQELRRLEEEVRLLRETSLQQKMRLEAQAMELEALARAEKAGRAEAEGLRAALAGAEVVRKNLEEGSQRELEEVQRLHQEQLSSLTQAHEEALSSLTSKAEGLEKSLSSLETRRAGEAKELAEAQREAELLRKQLSKTQEDLEAQVTLVENLRKYVGEQVPSEVHSQTWELERQKLLETMQHLQEDRDSLHATAELLQVRVQSLTHILALQEEELTRKVQPSDSLEPEFTRKCQSLLNRWREKVFALMVQLKAQELEHSDSVKQLKGQVASLQEKVTSQSQEQAILQRSLQDKAAEVEVERMGAKGLQLELSRAQEARRRWQQQTASAEEQLRLVVNAVSSSQIWLETTMAKVEGAAAQLPSLNNRLSYAVRKVHTIRGLIARKLALAQLRQESCPLPPPVTDVSLELQQLREERNRLDAELQLSARLIQQEVGRAREQGEAERQQLSKVAQQLEQELQQTQESLASLGLQLEVARQGQQESTEEAASLRQELTQQQELYGQALQEKVAEVETRLREQLSDTERRLNEARREHAKAVVSLRQIQRRAAQEKERSQELRRLQEEARKEEGQRLARRLQELERDKNLMLATLQQEGLLSRYKQQRLLTVLPSLLDKKKSVVSSPRPPECSASAPVAAAMSS

SEQ ID NO: 896231 - protein, 536 aa, Homo sapiens
MFPPSGSTGLIPPSHFQARPLSTLPRMAPTWLSDIPLVQPPGHQDVSERRLDTQRPQVTMWERDVSSDRQEPGRRGRSWGLEGSQALSQQAEVIVRQLQELRRLEEEVRLLRETSLQQKMRLEAQAMELEALARAEKAGRAEAEGLRAALAGAEVVRKNLEEGSQRELEEVQRLHQEQLSSLTQAHEEALSSLTSKAEGLEKSLSSLETRRAGEAKELAEAQREAELLRKQLSKTQEDLEAQVTLVENLRKYVGEQVPSEVHSQTWELERQKLLETMQHLQEDRDSLHATAELLQVRVQSLTHILALQEEELTRKVQPSDSLEPEFTRKCQSLLNRWREKVFALMVQLKAQELEHSDSVKQLKGQVASLQEKVTSQSQEQAILQRSLQDKAAEVEVERMGAKGLQLELSRAQEARRRWQQQTASAEEQLRLVVNAVSSSQIWLETTMAKVEGAAAQLPSLNNRLSYAVRKVHTIRGLIARKLALAQLRQESCPLPPPVTDVSLELQQLREERNRLDAELQLSARLIQQEGRQSGSS

SEQ ID NO: 896232 - protein, 215 aa, Homo sapiens
EKWDLTILPRLDLNSLKSSHLRLLSELELYGQALQEKVAEVETRLREQLSDTERRLNEARREHAKAVVSLRQIQRRAAQEKERSQELRRLQEEARKEEGQRLARRLQELERDKNLMLATLQQEGLLSRYKQQRLLTVLPSLLDKKKSVVSSPRPPECSASAPVAAAVPTRESIKGSLSVLLDDLQDLSEAISKEEAVCQGDNLDRCSSSNPQMSS

SEQ ID NO: 896233 - protein, 107 aa, Homo sapiens
RLEEEVRLLRETSLQQKMRLEAQAMELEALARAEKAGRAEAEGLRAALAGAEVVRKNLEEGSQRELEEVQRLHQEQVNAGVERIQIHNGELGSSFQAKNRYCRKDPP

SEQ ID NO: 896234 - protein, 973 aa, Homo sapiens
MASILDEYENSLSRSAVLQPGCPSVGIPHSGYVNAQLEKEVPIFTKQRIDFTPSERITSLVVSSNQLCMSLGKDTLLRIDLGKANEPNHVELGRKDDAKVHKMFLDHTGSHLLIALSSTEVLYVNRNGQKVRPLARWKGQLVESVGWNKALGTESSTGPILVGTAQGHIFEAELSASEGGLFGPAPDLYFRPLYVLNEEGGPAPVCSLEAERGPDGRSFVIATTRQRLFQFIGRAAEGAEAQGFSGLFAAYTDHPPPFREFPSNLGYSELAFYTPKLRSAPRAFAWMMGDGVLYGALDCGRPDSLLSEERVWEYPEGVGPGASPPLAIVLTQFHFLLLLADRVEAVCTLTGQVVLRDHFLEKFGPLKHMVKDSSTGQLWAYTERAVFRYHVQREARDVWRTYLDMNRFDLAKEYCRERPDCLDTVLAREADFCFRQRRYLESARCYALTQSYFEEIALKFLEARQEEALAEFLQRKLASLKPAERTQATLLTTWLTELYLSRLGALQGDPEALTLYRETKECFRTFLSSPRHKEWLFASRASIHELLASHGDTEHMVYFAVIMQDYERVVAYHCQHEAYEEALAVLARHRDPQLFYKFSPILIRHIPRQLVDAWIEMGSRLDARQLIPALVNYSQGGEVQQVSQAIRYMEFCVNVLGETEQAIHNYLLSLYARGRPDSLLAYLEQAGASPHRVHYDLKYALRLCAEHGHHRACVHVYKVLELYEEAVDLALQVDVDLAKQCADLPEEDEELRKKLWLKIARHVVQEEEDVQTAMACLASCPLLKIEDVLPFFPDFVTIDHFKEAICSSLKAYNHHIQELQREMEEATASAQRIRRDLQELRGRYGTVEPQDKCATCDFPLLNRPFYLFLCGHMFHADCLLQAVRPGLPAYKQARLEELQRKLGAAPPPAKGSARAKEAEGGAATAGPSREQLKADLDELVAAECVYCGELMIRSIDRPFIDPQRYEEEQLSWL

SEQ ID NO: 896235 - protein, 962 aa, Homo sapiens
MASILDEYENSLSRSAVLQPGCPSVGIPHSGYVNAQLEKEVPIFTKQRIDFTPSERITSLVVSSNQLCMSLGKDTLLRIDLGKANEPNHVELGRKDDAKVHKMFLDHTGSHLLIALSSTEVLYVNRNGQKVRPLARWKGQLVESVGWNKALGTESSTGPILVGTAQGHIFEAELSASEGGLFGPAPDLYFRPLYVLNEEGGPAPVCSLEAERGPDGRSFVIATTRQRLFQFIGRAAEGAEAQGFSGLFAAYTDHPPPFREFPSNLGYSELAFYTPKLRSAPRAFAWMMGDGVLYGALDCGRPDSLLSEERVWEYPEGVGPGASPPLAIVLTQFHFLLLLADRVEAVCTLTGQVVLRDHFLEKFGPLKHMVKDSSTGQLWAYTERAVFRYHVQREARDVWRTYLDMNRFDLAKEYCRERPDCLDTVLAREADFCFRQRRYLESARCYALTQSYFEEIALKFLEARQMASLKPAERTQATLLTTWLTELYLSRLGALQGDPEALTLYRETKECFRTFLSSPRHKEWLFASRASIHELLASHGDTEHMVYFAVIMQDYERVVAYHCQHEAYEEALAVLARHRDPQLFYKFSPILIRHIPRQLVDAWIEMGSRLDARQLIPALVNYSQGGEVQQVSQAIRYMEFCVNVLGETEQAIHNYLLSLYARGRPDSLLAYLEQAGASPHRVHYDLKYALRLCAEHGHHRACVHVYKVLELYEEAVDLALQVDVDLAKQCADLPEEDEELRKKLWLKIARHVVQEEEDVQTAMACLASCPLLKIEDVLPFFPDFVTIDHFKEAICSSLKAYNHHIQELQREMEEATASAQRIRRDLQELRGRYGTVEPQDKCATCDFPLLNRPFYLFLCGHMFHADCLLQAVRPGLPAYKQARLEELQRKLGAAPPPAKGSARAKEAEGGAATAGPSREQLKADLDELVAAECVYCGELMIRSIDRPFIDPQRYEEEQLSWL

SEQ ID NO: 896236 - protein, 254 aa, Homo sapiens
MTQKFTRCSLTILVDVDLAKQCADLPEEDEELRKKLWLKIARHVVQEEEDVQTAMACLASCPLLKIEDVLPFFPDFVTIDHFKEAICSSLKAYNHHIQELQREMEEATASAQRIRRDLQELRGRYGTVEPQDKCATCDFPLLNRPFYLFLCGHMFHADCLLQAVRPGLPAYKQARLEELQRKLGAAPPPAKGSARAKEAEGGAATAGPSREQLKADLDELVAAECVYCGELMIRSIDRPFIDPQRYEEEQLSWL

SEQ ID NO: 896237 - protein, 973 aa, Homo sapiens; identical to SEQ ID NO: 896234

SEQ ID NO: 896238 - protein, 525 aa, Homo sapiens
MASILDEYENSLSRSAVLQPGCPSVGIPHSGYVNAQLEKEVPIFTKQRIDFTPSERITSLVVSSNQLCMSLGKDTLLRIDLGKANEPNHVELGRKDDAKVHKMFLDHTGSHLLIALSSTEVLYVNRNGQKVRPLARWKGQLVESVGWNKALGTESSTGPILVGTAQGHIFEAELSASEGGLFGPAPDLYFRPLYVLNEEGGPAPVCSLEAERGPDGRSFVIATTRQRLFQFIGRAAEGAEAQGFSGLFAAYTDHPPPFREFPSNLGYSELAFYTPKLRSAPRAFAWMMGDGVLYGALDCGRPDSLLSEERVWEYPEGVGPGASPPLAIVLTQFHFLLLLADRVEAVCTLTGQVVLRDHFLEKFGPLKHMVKDSSTGQLWAYTERAVFRYHVQREARDVWRTYLDMNRFDLAKEYCRERPDCLDTVLAREADFCFRQRRYLESARCYALTQSYFEEIALKFLEARQEEALAEFLQRKLASLKPAERTQATLLTTWLTELYLSRLGALQGDPEALTLSEEAFSSSCL

SEQ ID NO: 896239 - protein, 178 aa, Homo sapiens
MSEVRLPPLRALDDFVLGSARLAAPDPCDPQRWCHRVINNLLYYQTNYLLCFGIGLALAGYVRPLHTLLSALVVAVALGVLVWAAETRAAVRRCRRSHPAACLAAVLAVGLLVLWVAGGACTFLFSIAGPVLLILVHASLRLRNLKNKIENKIESIGLKRTPMGLLLEALGQEQEAGS

SEQ ID NO: 896240 - protein, 178 aa, Homo sapiens; identical to SEQ ID NO: 896239

SEQ ID NO: 896241 - protein, 178 aa, Homo sapiens; identical to SEQ ID NO: 896239

SEQ ID NO: 896242 - protein, 78 aa, Homo sapiens
TVVVVRPPPGWSSHINRQDVGGAAATATRPGRLCSGVGASGGSGSMRPAAMVPPRHQQPPLLPNQLPSLLRHRPRSRR

SEQ ID NO: 896243 - protein, 178 aa, Homo sapiens; identical to SEQ ID NO: 896239

SEQ ID NO: 896244 - protein, 160 aa, Homo sapiens
MSEVRLPPLRALDDFVLGSARLAAPDPCDPQRWCHRVINNLLYYQTNYLLCFGIGLALAGYVRPLHTLLSALVVAVALGVLVWAAETRAAVRRCRRSHPAACLAAVLAVGLLVLWVAGGACTFLFSIAGPVLRESPLPRDSQESSQSMLKAPGQPCRSPG

SEQ ID NO: 896245 - protein, 4365 aa, Homo sapiens
MYDDLVQVIEGASKILETSLKRPKRPLFNFALVPFHDPEIGPVTITTDPKKFQYELRELYVQGGGDCPEMSIGAIKIALEISLPGSFIYVFTDARSKDYRLTHEVLQLIQQKQSQVVFVLTGDCDDRTHIGYKVYEEIASTSSGQVFHLDKKQVNEVLKWVEEAVQASKVHLLSTDHLEQAVNTWRIPFDPSLKEVTVSLSGPSPMIEIRNPLGKLIKKGFGLHELLNIHNSAKVVNVKEPEAGMWTVKTSSSGRHSVRITGLSTIDFRAGFSRKPTLDFKKTVSRPVQGIPTYVLLNTSGISTPARIDLLELLSISGSSLKTIPVKYYPHRKPYGIWNISDFVPPNEAFFLKVTGYDKDDYLFQRVSSVSFSSIVPDAPKVTMPEKTPGYYLQPGQIPCSVDSLLPFTLSFVRNGVTLGVDQYLKESASVNLDIAKVTLSDEGFYECIAVSSAGTGRAQTFFDVSEPPPVIQVPNNVTVTPGERAVLTCLIISAVDYNLTWQRNDRDVRLAEPARIRTLANLSLELKSVKFNDAGEYHCMVSSEGGSSAASVFLTVQEPPKVTVMPKNQSFTGGSEVSIMCSATGYPKPKIAWTVNDMFIVGSHRYRMTSDGTLFIKNAAPKDAGIYGCLASNSAGTDKQNSTLRYIEAPKLMVVQSELLVALGDITVMECKTSGIPPPQVKWFKGDLELRPSTFLIIDPLLGLLKIQETQDLDAGDYTCVAINEAGRATGKITLDVGSPPVFIQEPADVSMEIGSNVTLPCYVQGYPEPTIKWRRLDNMPIFSRPFSVSSISQLRTGALFILNLWASDKGTYICEAENQFGKIQSETTVTVTGLVAPLIGISPSVANVIEGQQLTLPCTLLAGNPIPERRWIKNSAMLLQNPYITVRSDGSLHIERVQLQDGGEYTCVASNVAGTNNKTTSVVVHVLPTIQHGQQILSTIEGIPVTLPCKASGNPKPSVIWSKKGELISTSSAKFSAGADGSLYVVSPGGEESGEYVCTATNTAGYAKRKVQLTVYVRPRVFGDQRGLSQDKPVEISVLAGEEVTLPCEVKSLPPPIITWAKETQLISPFSPRHTFLPSGSMKITETRTSDSGMYLCVATNIAGNVTQAVKLNVHVPPKIQRGPKHLKVQVGQRVDIPCNAQGTPLPVITWSKGGSTMLVDGEHHVSNPDGTLSIDQATPSDAGIYTCVATNIAGTDETEITLHVQEPPTVEDLEPPYNTTFQERVANQRIEFPCPAKGTPKPTIKWLHNGRELTGREPGISILEDGTLLVIASVTPYDNGEYICVAVNEAGTTERKYNLKVHVPPVIKDKEQVTNVSVLLNQLTNLFCEVEGTPSPIIMWYKDNVQVTESSTIQTVNNGKILKLFRATPEDAGRYSCKAINIAGTSQKYFNIDVLVPPTIIGTNFPNEVSVVLNRDVALECQVKGTPFPDIHWFKDGKPLFLGDPNVELLDRGQVLHLKNARRNDKGRYQCTVSNAAGKQAKDIKLTIYNPPSIKGGNVTTDISVLINSLIKLECETRGLPMPAITWYKDGQPIMSSSQALYIDKGQYLHIPRAQVSDSATYTCHVANVAGTAEKSFHVDVYVPPMIEGNLATPLNKQVVIAHSLTLECKAAGNPSPILTWLKDGVPVKANDNIRIEAGGKKLEIMSAQEIDRGQYICVATSVAGEKEIKYEVDVLVPPAIEGGDETSYFIVMVNNLLELDCHVTGSPPPTIMWLKDGQLIDERDGFKILLNGRKLVIAQAQVSNTGLYRCMAANTAGDHKKEFEVTVHVPPTIKSSGLSERVVVKYKPVALQCIANGIPNPSITWLKDDQPVNTAQGNLKIQSSGRVLQIAKTLLEDAGRYTCVATNAAGETQQHIQLHVHEPPSLEDAGKMLNETVLVSNPVQLECKAAGNPVPVITWYKDNRLLSGSTSMTFLNRGQIIDIESAQISDAGIYKCVAINSAGATELFYSLQVHVAPSISGSNNMVAVVVNNPVRLECEARGIPAPSLTWLKDGSPVSSFSNGLQVLSGGRILALTSAQISDTGRYTCVAVNAAGEKQRDIDLRVYVPPNIMGEEQNVSVLISQAVELLCQSDAIPPPTLTWLKDGHPLLKKPGLSISENRSVLKIEDAQVQDTGRYTCEATNVAGKTEKKNYNVNIWVPPNIGGSDELTQLTVIEGNLISLLCESSGIPPPNLIWKKKGSPVLTDSMGRVRILSGGRQLQISIAEKSDAALYSCVASNVAGTAKKEYNLQVYIRPTITNSGSHPTEIIVTRGKSISLECEVQGIPPPTVTWMKDGHPLIKAKGVEILDEGHILQLKNIHVSDTGRYVCVAVNVAGMTDKKYDLSVHAPPSIIGNHRSPENISVVEKNSVSLTCEASGIPLPSITWFKDGWPVSLSNSVRILSGGRMLRLMQTTMEDAGQYTCVVRNAAGEERKIFGLSVLVPPHIVGENTLEDVKVKEKQSVTLTCEVTGNPVPEITWHKDGQPLQEDEAHHIISGGRFLQITNVQVPHTGRYTCLASSPAGHKSRSFSLNVFVSPTIAGVGSDGNPEDVTVILNSPTSLVCEAYSYPPATITWFKDGTPLESNRNIRILPGGRTLQILNAQEDNAGRYSCVATNEAGEMIKHYEVKVYIPPIINKGDLWGPGLSPKEVKIKVNNTLTLECEAYAIPSASLSWYKDGQPLKSDDHVNIAANGHTLQIKEAQISDTGRYTCVASNIAGEDELDFDVNIQVPPSFQKLWEIGNMLDTGRNGEAKDVIINNPISLYCETNAAPPPTLTWYKDGHPLTSSDKVLILPGGRVLQIPRAKVEDAGRYTCVAVNEAGEDSLQYDVRVLVPPIIKGANSDLPEEVTVLVNKSALIECLSSGSPAPRNSWQKDGQPLLEDDHHKFLSNGRILQILNTQITDIGRYVCVAENTAGSAKKYFNLNVHVPPSVIGPKSENLTVVVNNFISLTCEVSGFPPPDLSWLKNEQPIKLNTNTLIVPGGRTLQIIRAKVSDGGEYTCIAINQAGESKKKFSLTVYVPPSIKDHDSESLSVVNVREGTSVSLECESNAVPPPVITWYKNGRMITESTHVEILADGQMLHIKKAEVSDTGQYVCRAINVAGRDDKNFHLNVYVPPSIEGPEREVIVETISNPVTLTCDATGIPPPTIAWLKNHKRIENSDSLEVRILSGGSKLQIARSQHSDSGNYTCIASNMEGKAQKYYFLSIQVPPSVAGAEIPSDVSVLLGENVELVCNANGIPTPLIQWLKDGKPIASGETERIRVSANGSTLNIYGALTSDTGKYTCVATNPAGEEDRIFNLNVYVTPTIRGNKDEAEKLMTLVDTSINIECRATGTPPPQINWLKNGLPLPLSSHIRLLAAGQVIRIVRAQVSDVAVYTCVASNRAGVDNKHYNLQVFAPPNMDNSMGTEEITVLKGSSTSMACITDGTPAPSMAWLRDGQPLGLDAHLTVSTHGMVLQLLKAETEDSGKYTCIASNEAGEVSKHFILKVLEPPHINGSEEHEEISVIVNNPLELTCIASGIPAPKMTWMKDGRPLPQTDQVQTLGGGEVLRISTAQVEDTGRYTCLASSPAGDDDKEYLVRVHVPPNIAGTDEPRDITVLRNRQVTLECKSDAVPPPVITWLRNGERLQATPRVRILSGGRYLQINNADLGDTANYTCVASNIAGKTTREFILTVNVPPNIKGGPQSLVILLNKSTVLECIAEGVPTPRITWRKDGAVLAGNHARYSILENGFLHIQSAHVTDTGRYLCMATNAAGTDRRRIDLQVHVPPSIAPGPTNMTVIVNVQTTLACEATGIPKPSINWRKNGHLLNVDQNQNSYRLLSSGSLVIISPSVDDTATYECTVTNGAGDDKRTVDLTVQVPPSIADEPTDFLVTKHAPAVITCTASGVPFPSIHWTKNGIRLLPRGDGYRILSSGAIEILATQLNHAGRYTCVARNAAGSAHRHVTLHVHEPPVIQPQPSELHVILNNPILLPCEATGTPSPFITWQKEGINVNTSGRNHAVLPSGGLQISRAVREDAGTYMCVAQNPAGTALGKIKLNVQVPPVISPHLKEYVIAVDKPITLSCEADGLPPPDITWHKDGRAIVESIRQRVLSSGSLQIAFVQPGDAGHYTCMAANVAGSSSTSTKLTVHVPPRIRSTEGHYTVNENSQAILPCVADGIPTPAINWKKDNVLLANLLGKYTAEPYGELILENVVLEDSGFYTCVANNAAGEDTHTVSLTVHVLPTFTELPGDVSLNKGEQLRLSCKATGIPLPKLTWTFNNNIIPAHFDSVNGHSELVIERVSKEDSGTYVCTAENSVGFVKAIGFVYVKEPPVFKGDYPSNWIEPLGGNAILNCEVKGDPTPTIQWNRKGVDIEISHRIRQLGNGSLAIYGTVNEDAE

SEQ ID NO: 896246 - protein, 4365 aa, Homo sapiens; identical to SEQ ID NO: 896245

SEQ ID NO: 896247 - protein, 4365 aa, Homo sapiens; identical to SEQ ID NO: 896245

SEQ ID NO: 896248 - protein, 4365 aa, Homo sapiens; identical to SEQ ID NO: 896245

SEQ ID NO: 896249 - protein, 414 aa, Homo sapiens
RIQRPLNSSTGVQKVIAAVVAMGKSDFLTPKAIANRIKSKGLQKLRWYCQMCQKQCRDENGFKCHCMSESHQRQLLLASENPQQFMDYFSEEFRNDFLELLRRRFGTKRVHNNIVYNEYISHREHIHMNATQWETLTDFTKWLGREGLCKVDETPKGWYIQYIDRDPETIRRQLELEKKKKQDLDDEEKTAKFIEEQVRRGLEGKEQEVPTFTELSRENDEEKVTFNLSKGACSSSGATSSKSSTLGPSALKTIGSSASVKRKESSQSSTQSKEKKKKKSALDEIMEIEEEKKRTARTDYWLQPEIIVKIITKKLGEKYHKKKAIVKEVIDKYTAVVKMIDSGDKLKLDQTHLETVIPAPGKRILVLNGGYRGNEGTLESINEKTFSATIVIETGPLKGRRVEGIQYEDISKLA

SEQ ID NO: 896250 - protein, 395 aa, Homo sapiens
RIQRPLNSSTGVQKVIAAVVAMGKSDFLTPKAIANRIKSKGLQKLRWYCQMCQKQCRDENGFKCHCMSESHQRQLLLASENPQQFMDYFSEEFRNDFLELLRRRFGTKRVHNNIVYNEYISHREHIHMNATQWETLTDFTKWLGREGLCKVDETPKGWYIQYIDRDPETIRRQLELEKKKKQDLDDEEKTAKFIEEQVRRGLEGKEQEVPTFTELSRENDEEKVTFNLSKGACSSSGATSSKSSTLGPSALKTIGSSASVKRKESSQSSTQSKEKKKKKSALDEIMEIEEEKKRTARTDYWLQPEIIVKIITKKLGEKYHKKKAIVKEVIDKYTAVVKMIDSGDKLKLDQTHLETVIPAPGKRILVLNGGYRGNEGTLESINEKTFSATIVIETV

SEQ ID NO: 896251 - protein, 395 aa, Homo sapiens; identical to SEQ ID NO: 896250

SEQ ID NO: 896252 - protein, 371 aa, Homo sapiens
RIQRPLNSSTGVQKVIAAVVAMGKSDFLTPKAIANRIKSKGLQKLRWYCQMCQKQCRDENGFKCHCMSESHQRQLLLASENPQQFMDYFSEEFRNDFLELLRRRFGTKRVHNNIVYNEYISHREHIHMNATQWETLTDFTKWLGREGLCKVDETPKGWYIQYIDRDPETIRRQLELEKKKKQDLDDEEKTAKFIEEQVRRGLEGKEQEVPTFTELSRENDEEKVTFNLSKGACSSSGATSSKSSTLGPSALKTIGSSASVKRKESSQSSTQSKEKKKKKSALDEIMEIEEEKKRTARTDYWLQPEIIVKIITKKLGEKYHKKKAIVKEVIDKYTAVVKMIDSGDKLKLDQTHLETVIPAPGVFAFWKLIRI

SEQ ID NO: 896253 - protein, 160 aa, Homo sapiens
RIQRPLNSSTGVQKVIAAVVAMGKSDFLTPKAIANRIKSKGLQKLRWYCQMCQKQCRDENGFKCHCMSESHQRQLLLASENPQQFMDYFSEEFRNDFLELLRRRFGTKRVHNNIVYNEYISHREHIHMNATQWETLTDFTKWLGREGKNEILKLLFLSHF

SEQ ID NO: 896254 - protein, 233 aa, Homo sapiens
RIQRPLNSSTGVQKVIAAVVAMGKSDFLTPKAIANRIKSKGLQKLRWYCQMCQKQCRDENGFKCHCMSESHQRQLLLASENPQQFMDYFSEEFRNDFLELLRRRFGTKRVHNNIVYNEYISHREHIHMNATQWETLTDFTKWLGREGLCKVDETPKGWYIQYIDRDPETIRRQLELEKKKKQDLDDEEKTAKFIEEQVRRGLEGKEQEVPTFTELSRENDEEKGSFIFYFFFF

SEQ ID NO: 896255 - protein, 155 aa, Homo sapiens
MHQQKRQPELVEGNLPVFVFPTELIFYADDQSTHKQVLTLYNPYEFALKFKVLCTTPNKYVVVDAAGAVKPQCCVDIVIRHRDVRSCHYGVIDKFRLQVSEQSQRKALGRKEVVATLLPSAKEQQKEEEEKRLKEHLTESLFFEQSFQPGSLGLF

SEQ ID NO: 896256 - protein, 213 aa, Homo sapiens
MHQQKRQPELVEGNLPVFVFPTELIFYADDQSTHKQVLTLYNPYEFALKFKVLCTTPNKYVVVDAAGAVKPQCCVDIVIRHRDVRSCHYGVIDKFRLQVSEQSQRKALGRKEVVATLLPSAKEQQKEEEEKRLKEHLTESLFFEQSFQPENRAVSSGPSLLTVFLGVVCIAALMLPTLGDVESLVPLYLHLSVNQKLVAAYILGLITMAILRT

SEQ ID NO: 896257 - protein, 159 aa, Homo sapiens
MHQQKRQPELVEGNLPVFVFPTELIFYADDQSTHKQVLTLYNPYEFALKFKVLCTTPNKYVVVDAAGAVKPQCCVDIVIRHRDVRSCHYGVIDKFRLQVSEQSQRKALGRKEVVATLLPSAKEQQKEEEEKRLKEHLTESLFFEQSFQPGLITMAILRT

SEQ ID NO: 896258 - protein, 213 aa, Homo sapiens; identical to SEQ ID NO: 896256

SEQ ID NO: 896259 - protein, 213 aa, Homo sapiens; identical to SEQ ID NO: 896256

SEQ ID NO: 896260 - protein, 213 aa, Homo sapiens; identical to SEQ ID NO: 896256

SEQ ID NO: 896261 - protein, 213 aa, Homo sapiens; identical to SEQ ID NO: 896256

SEQ ID NO: 896262 - protein, 467 aa, Homo sapiens
MRTAPSLRRCVCLLLAAILDLARGYLTVNIEPLPPVVAGDAVTLKCNFKTDGRMREIVWYRVTDGGTIKQKIFTFDAMFSTNYSHMENYRKREDLVYQSTVRLPEVRISDNGPYECHVGIYDRATREKVVLASGNIFLNVMAPPTSIEVVAADTPAPFSRYQAQNFTLVCIVSGGKPAPMVYFKRDGEPIDAVPLSEPPAASSGPLQDSRPFRSLLHRDLDDTKMQKSLSLLDAENRGGRPYTERPSRGLTPDPNILLQPTTENIPETVVSREFPRWVHSAEPTYFLRHSRTPSSDGTVEVRALLTWTLNPQIDNEALFSCEVKHPALSMPMQAEVTLVAPKGPKIVMTPSRARVGDTVRILVHGFQNEVFPEPMFTWTRVGSRLLDGSAEFDGKELVLERVPAELNGSMYRCTAQNPLGSTDTHTRLIVFENPNIPRGTEDSNGSIGPTGARLTLVLALTVILELT

SEQ ID NO: 896263 - protein, 419 aa, Homo sapiens
APSPCSHFNCGSQVTDGGTIKQKIFTFDAMFSTNYSHMENYRKREDLVYQSTVRLPEVRISDNGPYECHVGIYDRATREKVVLASGNIFLNVMAPPTSIEVVAADTPAPFSRYQAQNFTLVCIVSGGKPAPMVYFKRDGEPIDAVPLSEPPAASSGPLQDSRPFRSLLHRDLDDTKMQKSLSLLDAENRGGRPYTERPSRGLTPDPNILLQPTTENIPETVVSREFPRWVHSAEPTYFLRHSRTPSSDGTVEVRALLTWTLNPQIDNEALFSCEVKHPALSMPMQAEVTLVAPKGPKIVMTPSRARVGDTVRILVHGFQNEVFPEPMFTWTRVGSRLLDGSAEFDGKELVLERVPAELNGSMYRCTAQNPLGSTDTHTRLIVFENPNIPRGTEDSNGSIGPTGARLTLVLALTVILELT

SEQ ID NO: 896264 - protein, 412 aa, Homo sapiens
MARGPAGNRLSPKLSSHHGGKLSASAEGPLGVSRPPVYGVPEGARDLLDHMGALYCSCPCGATLSSSAHPGEKVVLASGNIFLNVMAPPTSIEVVAADTPAPFSRYQAQNFTLVCIVSGGKPAPMVYFKRDGEPIDAVPLSEPPAASSGPLQDSRPFRSLLHRDLDDTKMQKSLSLLDAENRGGRPYTERPSRGLTPDPNILLQPTTENIPETVVSREFPRWVHSAEPTYFLRHSRTPSSDGTVEVRALLTWTLNPQIDNEALFSCEVKHPALSMPMQAEVTLVAPKGPKIVMTPSRARVGDTVRILVHGFQNEVFPEPMFTWTRVGSRLLDGSAEFDGKELVLERVPAELNGSMYRCTAQNPLGSTDTHTRLIVFENPNIPRGTEDSNGSIGPTGARLTLVLALTVILELT

SEQ ID NO: 896265 - protein, 120 aa, Homo sapiens
MTPSRARVGDTVRILVHGFQNEVFPEPMFTWTRVGSRLLDGSAEFDGKELVLERVPAELNGSMYRCTAQNPLGSTDTHTRLIVFENPNIPRGTEDSNGSIGPTGARLTLVLALTVILELT

SEQ ID NO: 896266 - protein, 343 aa, Homo sapiens [sequence omitted]

SEQ ID NO: 896267 - protein, 454 aa, Homo sapiens
MDQGRIIKNTAMMREAARKIEERHFSNHATHVEFLPVEWRSKLTLDGDTVDSITPDKVRGLRDMLNSSAMDIMYYTSPLYRDELVKGLQQELNRLYSLFCSRNPDFEEKGGKVSIVSHSLGCVITYDIMTGWNPVRLYEQLLQKEEELPDERWMSYEERHLLDELYITKRRLKEIEERLHGLKASSMTQTPALKFKVENFFCMGSPLAVFLALRGIRPGNTGSQDHILPREICNRLLNIFHPTDPVAYRLEPLILKHYSNISPVQIHWYNTSNPLPYEHMKPSFLNPAKEPTSVSENEGISTIPSPVTSPVLSRRHYGESITNIGKASILGAASIGKGLGGMLFSRFGRSSTTQSSETSKDSMEDEKKPVASPSATTVGTQTLPHSSSGFLDSALELDHRIDFELREGLVESRYWSAVTSHTAYWSSLDVALFLLTFMYKHEHDDDAKPNLDPI

SEQ ID NO: 896268 - protein, 517 aa, Homo sapiens
MGLGQPQAWLLGLPTAVVYGSLALFTTILHNVFLLYYVDTFVSVYKINKMAFWVGETVFLLWNSLNDPLFGWLSDRQFLSSQPRSGAGLSSRAVVLARVQALGWHGPLLALSFLAFWVPWAPAGLQFLLCLCLYDGFLTLVDLHHHALLADLALSAHDRTHLNFYWSLFSAAGSLSVFASYAFWNKEDFSSFRAFCVTLAVSSGLGFLGATQLLRRRVEAARKDPGCSGLVVDSGLCGEELLVGSEEADSITLGRYLRQLARHRNFLWFVSMDLVQVFHCHFNSNFFPLFLEHLLSDHISLSTGSILLGLSYVAPHLNNLYFLSLCRRWGVYAVVRGLFLLKLGLSLLMLLAGPDHLSLLCLFIASNRVFTEGTCKLLTLVVTDLVDEDLVLNHRKQAASALLFGMVALVTKPGQTFAPLLGTWLLCFYTGHDLFQQSLITPVGSAHPWPEPPAPAPAQAPTLRQGCFYLLVLVPITCALLQLFTWSQFTLHGRRLHMVKAQRQNLSQAQTLDVKMV

SEQ ID NO: 896269 - protein, 517 aa, Homo sapiens; identical to SEQ ID NO: 896268

SEQ ID NO: 896270 - protein, 517 aa, Homo sapiens; identical to SEQ ID NO: 896268

SEQ ID NO: 896271 - protein, 236 aa, Homo sapiens
MQSAVKLMALTGTAAVPLKGGSPSSSPGLSYVAPHLNNLYFLSLCRRWGVYAVVRGLFLLKLGLSLLMLLAGPDHLSLLCLFIASNRVFTEGTCKLLTLVVTDLVDEDLVLNHRKQAASALLFGMVALVTKPGQTFAPLLGTWLLCFYTGHDLFQQSLITPVGSAHPWPEPPAPAPAQAPTLRQGCFYLLVLVPITCALLQLFTWSQFTLHGRRLHMVKAQRQNLSQAQTLDVKMV

SEQ ID NO: 896272 - protein, 120 aa, Homo sapiens
MGLGQPQAWLLGLPTAVVYGSLALFTTILHNVFLLYYVDTFVSVYKINKMAFWVGEAGVQWRNLSSLQPPPSWFKWFSCLNLMSRWDYKHPPPRPANFCIFSRDGVSPCWPGWSQTPDLR

SEQ ID NO: 896273 - protein, 517 aa, Homo sapiens; identical to SEQ ID NO: 896268

SEQ ID NO: 896274 - protein, 723 aa, Homo sapiens
MGLGQPQAWLLGLPTAVVYGSLALFTTILHNVFLLYYVDTFVSVYKINKMAFWVGETVFLLWNSLNDPLFGWLSDRQFLSSQPRSGAGLSSRAVVLARVQALGWHGPLLALSFLAFWVPWAPAGLQFLLCLCLYDGFLTLVDLHHHALLADLALSAHDRTHLNFYWSLFSAAGSLSVFASYAFWNKEDFSSFRAFCVTLAVSSGLGFLGATQLLRRRVEAARKDPGCSGLVVDSGLCGEELLVGSEEADSITLGRYLRQLARHRNFLWFVSMDLVQVFHCHFNSNFFPLFLEHLLSDHISLSTGSILLGECGPWVLHASWKERDLYFYVEMGFHRISQDGLHSRPSDPPASASQSTGITGVSHCAQPGTIFLRHQVLPGAVGMGGRVWWVLRGAEAVLVWVLLEMVHPEGVQWLVNTEEYHLMGLGVSLDSVLIWWAASGGLVHLFGPLFLIRKVGMIIVLTLRGCEDEQDSEALSTEPSASLVYRNAVGCEADGAHWHCSSALDKVAAPSSSPGLSYVAPHLNNLYFLSLCRRWGVYAVVRGLFLLKLGLSLLMLLAGPDHLSLLCLFIASNRVFTEGTCKLLTLVVTDLVDEDLVLNHRKQAASALLFGMVALVTKPGQTFAPLLGTWLLCFYTGHDLFQQSLITPVGSAHPWPEPPAPAPAQAPTLRQGCFYLLVLVPITCALLQLFTWSQFTLHGRRLHMVKAQRQNLSQAQTLDVKMV

SEQ ID NO: 896275 - protein, 304 aa, Homo sapiens
MGLGQPQAWLLGLPTAVVYGSLALFTTILHNVFLLYYVDTFVSVYKINKMAFWVGETVFLLWNSLNDPLFGWLSDRQFLSSQPRSGAGLSSRAVVLARVQALGWHGPLLALSFLAFWVPWAPAGLQFLLCLCLYDGFLTLVDLHHHALLADLALSAHDRTHLNFYWSLFSAAGSLSVFASYAFWNKEDFSSFRAFCVTLAVSSGLGFLGATQLLRRRVEAARKDPGCSGLVVDSGLCGEELLVGSEEADSITLGRYLRQLARHRNFLWFVSMDLVQVQWLTPVIPALRDAKVERPLEPRSSRLQ

SEQ ID NO: 896276 - protein, 50 aa, Homo sapiens
MGLGQPQAWLLGLPTAVVYGSLALFTTILHNVFLLYYVDTFVSVYKINKM

SEQ ID NO: 896277 - protein, 1025 aa, Homo sapiens
MHRKKVDNRIRILIENGVAERQRSLFVVVGDRGKDQVVILHHMLSKATVKARPSVLWCYKKELGFSSHRKKRMRQLQKKIKNGTLNIKQDDPFELFIAATNIRYCYYNETHKILGNTFGMCVLQDFEALTPNLLARTVETVEGGGLVVILLRTMNSLKQLYTVTMDVHSRYRTEAHQDVVGRFNERFILSLASCKKCLVIDDQLNILPISSHVATMEALPPQTPDESLGPSDLELRELKESLQDTQPVGVLVDCCKTLDQAKAVLKFIEGISEKTLRSTVALTAARGRGKSAALGLAIAGAVAFGYSNIFVTSPSPDNLHTLFEFVFKGFDALQYQEHLDYEIIQSLNPEFNKAVIRVNVFREHRQTIQYIHPADAVKLGQAELVVIDEAAAIPLPLVKSLLGPYLVFMASTINGYEGTGRSLSLKLIQQLRQQSAQSQVSTTAENKTTTTARLASARTLHEVSLQESIRYAPGDAVEKWLNDLLCLDCLNITRIVSGCPLPEACELYYVNRDTLFCYHKASEVFLQRLMALYVASHYKNSPNDLQMLSDAPAHHLFCLLPPVPPTQNALPEVLAVIQVCLEGEISRQSILNSLSRGKKASGDLIPWTVSEQFQDPDFGGLSGGRVVRIAVHPDYQGMGYGSRALQLLQMYYEGRFPCLEEKVLETPQEIHTVSSEAVSLLEEVITPRKDLPPLLLKLNERPAERLDYLGVSYGLTPRLLKFWKRAGFVPVYLRQTPNDLTGEHSCIMLKTLTDEDEADQGGWLAAFWKDFRRRFLALLSYQFSTFSPSLALNIIQNRNMGKPAQPALSREELEALFLPYDLKRLEMYSRNMVDYHLIMDMIPAISRIYFLNQLGDLALSAAQSALLLGIGLQHKSVDQLEKEIELPSGQLMGLFNRIIRKVVKLFNEVQEKAIEEQMVAAKDVVMEPTMKTLSDDLDEAAKEFQEKHKKEVGKLKSMDLSEYIIRGDDEEWNEVLNKAGPNASIISLKSDKKRKLEAKQEPKQSKKLKNRETKNKKDMKLKRKK

SEQ ID NO: 896278 - protein, 1025 aa, Homo sapiens; identical to SEQ ID NO: 896277

SEQ ID NO: 896279 - protein, 1025 aa, Homo sapiens; identical to SEQ ID NO: 896277

SEQ ID NO: 896280 - protein, 1025 aa, Homo sapiens; identical to SEQ ID NO: 896277

SEQ ID NO: 896281 - protein, 1025 aa, Homo sapiens; identical to SEQ ID NO: 896277

SEQ ID NO: 896282 - protein, 1025 aa, Homo sapiens; identical to SEQ ID NO: 896277

SEQ ID NO: 896283 - protein, 307 aa, Homo sapiens
MGYSKKGGSWCQLNLCVAQNDLTGEHSCIMLKTLTDEDEADQGGWLAAFWKDFRRRFLALLSYQFSTFSPSLALNIIQNRNMGKPAQPALSREELEALFLPYDLKRLEMYSRNMVDYHLIMDMIPAISRIYFLNQLGDLALSAAQSALLLGIGLQHKSVDQLEKEIELPSGQLMGLFNRIIRKVVKLFNEVQEKAIEEQMVAAKDVVMEPTMKTLSDDLDEAAKEFQEKHKKEVGKLKSMDLSEYIIRGDDEEWNEVLNKAGPNASIISLKSDKKRKLEAKQEPKQSKKLKNRETKNKKDMKLKRKK

SEQ ID NO: 896284 - protein, 226 aa, Homo sapiens
MGKPAQPALSREELEALFLPYDLKRLEMYSRNMVDYHLIMDMIPAISRIYFLNQLGDLALSAAQSALLLGIGLQHKSVDQLEKEIELPSGQLMGLFNRIIRKVVKLFNEVQEKAIEEQMVAAKDVVMEPTMKTLSDDLDEAAKEFQEKHKKEVGKLKSMDLSEYIIRGDDEEWNEVLNKAGPNASIISLKSDKKRKLEAKQEPKQSKKLKNRETKNKKDMKLKRKK

SEQ ID NO: 896285 - protein, 416 aa, Homo sapiens
MHRKKVDNRIRILIENGVAERQRSLFVVVGDRGKDQVVILHHMLSKATVKARPSVLWCYKKELGFSSHRKKRMRQLQKKIKNGTLNIKQDDPFELFIAATNIRYCYYNETHKILGNTFGMCVLQDFEALTPNLLARTVETVEGGGLVVILLRTMNSLKQLYTVTMDVHSRYRTEAHQDVVGRFNERFILSLASCKKCLVIDDQLNILPISSHVATMEALPPQTPDESLGPSDLELRELKESLQDTQPVGVLVDCCKTLDQAKAVLKFIEGISEKTLRSTVALTAARGRGKSAALGLAIAGAVAFGYSNIFVTSPSPDNLHTLFEFVFKGFDALQYQEHLDYEIIQSLNPEFNKAVIRVNVFREHRQTIQYIHPADAVKLGQAELVVIDEAAAIPLPLVKSLLGPYLVFMAIHHQWL

SEQ ID NO: 896286 - protein, 121 aa, Homo sapiens
  misc_feature (14)..(14): Xaa can be any naturally occurring amino acid
  misc_feature (20)..(20): Xaa can be any naturally occurring amino acid
  misc_feature (26)..(26): Xaa can be any naturally occurring amino acid
  misc_feature (29)..(29): Xaa can be any naturally occurring amino acid
  misc_feature (31)..(32): Xaa can be any naturally occurring amino acid
  misc_feature (35)..(35): Xaa can be any naturally occurring amino acid
  misc_feature (38)..(38): Xaa can be any naturally occurring amino acid
  misc_feature (46)..(46): Xaa can be any naturally occurring amino acid
  misc_feature (54)..(54): Xaa can be any naturally occurring amino acid
  misc_feature (71)..(71): Xaa can be any naturally occurring amino acid
  misc_feature (81)..(81): Xaa can be any naturally occurring amino acid
  misc_feature (85)..(85): Xaa can be any naturally occurring amino acid
  misc_feature (87)..(87): Xaa can be any naturally occurring amino acid
RGPNQETPKQSQAXLQATAXHKSNKXKNXQXXKPXSKXAASTKLRXNLLLVHPXGKHNIFNLICNPLYWAXHCLKSQTQQXPRQXPXQSLPRRNFAPPGALLLLCCSSTWLKAESLPNGSL

SEQ ID NO: 896287 - protein, 81 aa, Homo sapiens
MGYGSRALQLLQMYYEGRFPCLEEKVLETPQEIHTVSSEVSIFRQTSCVLVLGRIILWVFRGINKNQSRALDPSLIFFCCF

SEQ ID NO: 896288 - protein, 841 aa, Homo sapiens
MHRKKVDNRIRILIENGVAERQRSLFVVVGDRGKDQVVILHHMLSKATVKARPSVLWCYKKELGFSSHRKKRMRQLQKKIKNGTLNIKQDDPFELFIAATNIRYCYYNETHKILGNTFGMCVLQDFEALTPNLLARTVETVEGGGLVVILLRTMNSLKQLYTVTMDVHSRYRTEAHQDVVGRFNERFILSLASCKKCLVIDDQLNILPISSHVATMEALPPQTPDESLGPSDLELRELKESLQDTQPVGVLVDCCKTLDQAKAVLKFIEGISEKTLRSTVALTAARGRGKSAALGLAIAGAVAFGYSNIFVTSPSPDNLHTLFEFVFKGFDALQYQEHLDYEIIQSLNPEFNKAVIRVNVFREHRQTIQYIHPADAVKLGQAELVVIDEAAAIPLPLVKSLLGPYLVFMASTINGYEGTGRSLSLKLIQQLRQQSAQSQVSTTAENKTTTTARLASARTLHEVSLQESIRYAPGDAVEKWLNDLLCLDCLNITRIVSGCPLPEACELYYVNRDTLFCYHKASEVFLQRLMALYVASHYKNSPNDLQMLSDAPAHHLFCLLPPVPPTQNALPEVLAVIQVCLEGEISRQSILNSLSRGKKASGDLIPWTVSEQFQDPDFGGLSGGRVVRIAVHPDYQGMGYGSRALQLLQMYYEGRFPCLEEKVLETPQEIHTVSSEAVSLLEEVITPRKDLPPLLLKLNERPAERLDYLGVSYGLTPRLLKFWKRAGFVPVYLRQTPNDLTGEHSCIMLKTLTDEDEADQGGWLAAFWKDFRRRFLALLSYQFSTFSPSLALNIIQNRNMGKPAQPALSREELEALFLPYDLKRLEQEELQSVPASMAARG

SEQ ID NO: 896289 - protein, 685 aa, Homo sapiens [sequence omitted]

SEQ ID NO: 896290 - protein, 685 aa, Homo sapiens [sequence omitted]

SEQ ID NO: 896291 - protein, 685 aa, Homo sapiens [sequence omitted]

SEQ ID NO: 896292 - protein, 685 aa, Homo sapiens [sequence omitted]

SEQ ID NO: 896293 - protein, 183 aa, Homo sapiens
PAQGRFLLLSVPKLLSSECMSGTDNNRSQHREGSSQDRQAQGDSTEMHGENETTQPHTRNSDSRGGRQLRNPNNLVETGTLPILRLAHFFLLNESDDDDRIRGLTKEQIDNLSTRHYEHNSIDSELGKICSVCISDYVTGNKLRQLPCMHEFHIHCIDRWLSENCTCPICRQPVLGSNIANNG

SEQ ID NO: 896294 - protein, 113 aa, Homo sapiens
MNQSRSRSDGGSEETLPQDHNHHENERRWQQERLHREEAYYQFINELNDEDYRLMRDHNLLGTPGKRWVKEETPFFHHLDGRISRKGELVFFFLASLYENIVYCFCEFKNFLV

SEQ ID NO: 896295 - protein, 142 aa, Homo sapiens
MNQSRSRSDGGSEETLPQDHNHHENERRWQQERLHREEAYYQFINELNDEDYRLMRDHNLLGTPGEITSEELQQRLDGVKEQLASQPDLRDGTNYRDSEVPRESSHEDSLLEWLNTFRRTGNATRSGQNGNQTWRAALPDTS

SEQ ID NO: 896296 - protein, 679 aa, Homo sapiens
MNQSRSRSDGGSEETLPQDHNHHENERRWQQERLHREEAYYQFINELNDEDYRLMRDHNLLGTPELQQRLDGVKEQLASQPDLRDGTNYRDSEVPRESSHEDSLLEWLNTFRRTGNATRSGQNGNQTWRAVSRTNPNNGEFRFSLEIHVNHENRGFEIHGEDYTDIPLSDSNRDHTANRQQRSTSPVARRTRSQTSVNFNGSSSNIPRTRLASRGQNPAEGSFSTLGRLRNGIGGAAGIPRANASRTNFSSHTNQSGGSELRQREGQRFGAAHVWENGARSNVTVRNTNQRLEPIRLRSTSNSRSRSPIQRQSGTVYHNSQRESRPVQQTTRRSVRRRGRTRVFLEQDRERERRGTAYTPFSNSRLVSRITVEEGEESSRSSTAVRRHPTITLDLQVRRIRPGENRDRDSIANRTRSRVGLAENTVTIESNSGGFRRTISRLERSGIRTYVSTITVPLRRISENELVEPSSVALRSILRQIMTGFGELSSLMEADSESELQRNGQHLPDMHSELSNLGTDNNRSQHREGSSQDRQAQGDSTEMHGENETTQPHTRNSDSRGGRQLRNPNNLVETGTLPILRLAHFFLLNESDDDDRIRGLTKEQIDNLSTRHYEHNSIDSELGKICSVCISDYVTGNKLRQLPCMHEFHIHCIDRWLSENCTCPICRQPVLGSNIANNG

SEQ ID NO: 896297 - protein, 198 aa, Homo sapiens [sequence omitted]

SEQ ID NO: 896298 - protein, 188 aa, Homo sapiens
ALLKRSEGGCVFPEDVAALAWAVSRLHFSRLSFPPWAFRGAFAAVPTTAAMISLTDTQKIGMGLTGFGVFFLFFGMILFFDKALLAIGNVLFVAGLAFVIGLERTFRFFFQKHKMKATGFFLGGVFVVLIGWPLIGMIFEIYGFFLLFRGFFPVVVGFIRRVPVLGSLLNLPGIRSFVDKVGESNNMV

SEQ ID NO: 896299 - protein, 90 aa, Homo sapiens
ALLKRSEGGCVFPEDVAALAWAVSRLHFSRLSFPPWAFRGAFAAVPTTAAMISLTDTQKIGMGLTGFGVFFLFFGMILFFDKALLAIGNE

SEQ ID NO: 896300 - protein, 188 aa, Homo sapiens; identical to SEQ ID NO: 896298

SEQ ID NO: 896301 - protein, 92 aa, Homo sapiens
ALLKRSEGGCVFPEDVAALAWAVSRLHFSRLSFPPWAFRGAFAAVPTTAAMISLTDTQKIGMGLTGFGVFFLFFGMILFFDKALLAIGNKLL

SEQ ID NO: 896302 - protein, 90 aa, Homo sapiens; identical to SEQ ID NO: 896299

SEQ ID NO: 896303 - protein, 92 aa, Homo sapiens
ALLKRSEGGCVFPEDVAALAWAVSRLHFSRLSFPPWAFRGAFAAVPTTAAMISLTDTQKIGMGLTGFGVFFLFFGMILFFDKALLAIGNVSF

SEQ ID NO: 896304 - protein, 152 aa, Homo sapiens
MDVQVRWSTIQVLAMISLTDTQKIGMGLTGFGVFFLFFGMILFFDKALLAIGNVLFVAGLAFVIGLERTFRFFFQKHKMKATGFFLGGVFVVLIGWPLIGMIFEIYGFFLLFRGFFPVVVGFIRRVPVLGSLLNLPGIRSFVDKVGESNNMV

SEQ ID NO: 896305 - protein, 101 aa, Homo sapiens
ALLKRSEGGCVFPEDVAALAWAVSRLHFSRLSFPPWAFRGAFAAVPTTAAMISLTDTQKIGMGLTGFGVFFLFFGMILFFDKALLAIGNKRNETSGTKLQL

SEQ ID NO: 896306 - protein, 170 aa, Homo sapiens
ALLKRSEGGCVFPEDVAALAWAVSRLHFSRLSFPPWAFRGAFAAVPTTAAMISLTDTQKIGMGLTGFGVFFLFFGMILFFDKALLAIGNVLFVAGLAFVIGLERTFRFFFQKHWPLIGMIFEIYGFFLLFRGFFPVVVGFIRRVPVLGSLLNLPGIRSFVDKVGESNNMV

SEQ ID NO: 896307 - protein, 78 aa, Homo sapiens
ALLKRSEGGCVFPEDVAALAWAVSRLHFSRLSFPPWAFRGAFAAVPTTAAMISLTDTQRASFLSLLALLEECQSLDPS

SEQ ID NO: 896308 - protein, 90 aa, Homo sapiens; identical to SEQ ID NO: 896299

SEQ ID NO: 896309 - protein, 188 aa, Homo sapiens; identical to SEQ ID NO: 896298

SEQ ID NO: 896310 - protein, 188 aa, Homo sapiens; identical to SEQ ID NO: 896298

SEQ ID NO: 896311 - protein, 188 aa, Homo sapiens; identical to SEQ ID NO: 896298

SEQ ID NO: 896312 - protein, 673 aa, Homo sapiens
MAEAPASPAPLSPLEVELDPEFEPQSRPRSCTWPLQRPELQASPAKPSGETAADSMIPEEEDDEDDEDGGGRAGSAMAIGGGGGSGTLGSGLLLEDSARVLAPGGQDPGSGPATAAGGLSGGTQALLQPQQPLPPPQPGAAGGSGQPRKCSSRRNAWGNLSYADLITRAIESSPDKRLTLSQIYEWMVRCVPYFKDKGDSNSSAGWKNSIRHNLSLHSRFMRVQNEGTGKSSWWIINPDGGKSGKAPRRRAVSMDNSNKYTKSRGRAAKKKAALQTAPESADDSPSQLSKWPGSPTSRSSDELDAWTDFRSRTNSNASTVSGRLSPIMASTELDEVQDDDAPLSPMLYSSSASLSPSVSKPCTVELPRLTDMAGTMNLNDGLTENLMDDLLDNITLPPSQPSPTGGLMQRSSSFPYTTKGSGLGSPTSSFNSTVFGPSSLNSLRQSPMQTIQENKPATFSSMSHYGNQTLQDLLTSDSLSHSDVMMTQSDPLMSQASTAVSAQNSRRNVMLRNDPMMSFAAQPNQGSLVNQNLLHHQHQTQGALGGSRALSNSVSNMGLSESSSLGSAKHQQQSPVSQSMQTLSDSLSGSSLYSTSANLPVMGHEKFPSDLDLDMFNGSLECDMESIIRSELMDADGLDFNFDSLISTQNVVGLNVGNFTGAKQASSQSWVPG

SEQ ID NO: 896313 - protein, 673 aa, Homo sapiens; identical to SEQ ID NO: 896312

SEQ ID NO: 896314 - protein, 673 aa, Homo sapiens; identical to SEQ ID NO: 896312

SEQ ID NO: 896315 - protein, 484 aa, Homo sapiens
MTVALQKGASGGGPCLKQNSIRHNLSLHSRFMRVQNEGTGKSSWWIINPDGGKSGKAPRRRAVSMDNSNKYTKSRGRAAKKKAALQTAPESADDSPSQLSKWPGSPTSRSSDELDAWTDFRSRTNSNASTVSGRLSPIMASTELDEVQDDDAPLSPMLYSSSASLSPSVSKPCTVELPRLTDMAGTMNLNDGLTENLMDDLLDNITLPPSQPSPTGGLMQRSSSFPYTTKGSGLGSPTSSFNSTVFGPSSLNSLRQSPMQTIQENKPATFSSMSHYGNQTLQDLLTSDSLSHSDVMMTQSDPLMSQASTAVSAQNSRRNVMLRNDPMMSFAAQPNQGSLVNQNLLHHQHQTQGALGGSRALSNSVSNMGLSESSSLGSAKHQQQSPVSQSMQTLSDSLSGSSLYSTSANLPVMGHEKFPSDLDLDMFNGSLECDMESIIRSELMDADGLDFNFDSLISTQNVVGLNVGNFTGAKQASSQSWVPG

SEQ ID NO: 896316 - protein, 235 aa, Homo sapiens
MAEAPASPAPLSPLEVELDPEFEPQSRPRSCTWPLQRPELQASPAKPSGETAADSMIPEEEDDEDDEDGGGRAGSAMAIGGGGGSGTLGSGLLLEDSARVLAPGGQDPGSGPATAAGGLSGGTQALLQPQQPLPPPQPGAAGGSGQPRKCSSRRNAWGNLSYADLITRAIESSPDKRLTLSQIYEWMVRCVPYFKDKGDSNSSAGWKTLKLTQDLQRKPFAKSALSKWTVIPFTA

SEQ ID NO: 896317 - protein, 37 aa, Homo sapiens
MIEDIYGRTHMYKLFSSIFNNKISQYFLMLCANNYAS

SEQ ID NO: 896318 - protein, 816 aa, Homo sapiens
MSRPQGLLWLPLLFTPVCVMLNSNVLLWLTALAIKFTLIDSQAQYPVVNTNYGKIRGLRTPLPNEILGPVEQYLGVPYASPPTGERRFQPPEPPSSWTGIRNTTQFAAVCPQHLDERSLLHDMLPIWFTANLDTLMTYVQDQNEDCLYLNIYVPTEDDIHDQNSKKPVMVYIHGGSYMEGTGNMIDGSILASYGNVIVITINYRLGILGFLSTGDQAAKGNYGLLDQIQALRWIEENVGAFGGDPKRVTIFGSGAGASCVSLLTLSHYSEGLFQKAIIQSGTALSSWAVNYQPAKYTRILADKVGCNMLDTTDMVECLRNKNYKELIQQTITPATYHIAFGPVIDGDVIPDDPQILMEQGEFLNYDIMLGVNQGEGLKFVDGIVDNEDGVTPNDFDFSVSNFVDNLYGYPEGKDTLRETIKFMYTDWADKENPETRRKTLVALFTDHQWVAPAVATADLHAQYGSPTYFYAFYHHCQSEMKPSWADSAHGDEVPYVFGIPMIGPTELFSCNFSKNDVMLSAVVMTYWTNFAKTGDPNQPVPQDTKFIHTKPNRFEEVAWSKYNPKDQLYLHIGLKPRVRDHYRATKVAFWLELVPHLHNLNEIFQYVSTTTKVPPPDMTSFPYGTRRSPAKIWPTTKRPAITPANNPKHSKDPHKTGPEDTTVLIETKRDYSTELSVTIAVGASLLFLNILAFAALYYKKDKRRHETHRRPSPQRNTTNDIAHIQNEEIMSLQMKQLEHDHECESLQAHDTLRLTCPPDYTLTLRRSPDDIPLMTPNTITMIPNTLTGMQPLHTFNTFSGGQNSTNLPHGHSTTRV

SEQ ID NO: 896319 - protein, 816 aa, Homo sapiens; identical to SEQ ID NO: 896318

SEQ ID NO: 896320 - protein, 816 aa, Homo sapiens; identical to SEQ ID NO: 896318

SEQ ID NO: 896321 - protein, 816 aa, Homo sapiens; identical to SEQ ID NO: 896318

SEQ ID NO: 896322 - protein, 540 aa, Homo sapiens
MSRPQGLLWLPLLFTPVCVMLNSNVLLWLTALAIKFTLIDSQAQYPVVNTNYGKIRGLRTPLPNEILGPVEQYLGVPYASPPTGERRFQPPEPPSSWTGIRNTTQFAAVCPQHLDERSLLHDMLPIWFTANLDTLMTYVQDQNEDCLYLNIYVPTEDDIHDQNSKKPVMVYIHGGSYMEGTGNMIDGSILASYGNVIVITINYRLGILGFLSTGDQAAKGNYGLLDQIQALRWIEENVGAFGGDPKRVTIFGSGAGASCVSLLTLSHYSEGLFQKAIIQSGTALSSWAVNYQPAKYTRILADKVGCNMLDTTDMVECLRNKNYKELIQQTITPATYHIAFGPVIDGDVIPDDPQILMEQGEFLNYDIMLGVNQGEGLKFVDGIVDNEDGVTPNDFDFSVSNFVDNLYGYPEGKDTLRETIKFMYTDWADKENPETRRKTLVALFTDHQWVAPAVATADLHAQYGSPTYFYAFYHHCQSEMKPSWADSAHGDEVPYVFGIPMIGPTELFSCNFSKNDVMLSAVVMTYWTNFAKTGSITTGV

SEQ ID NO: 896323 - protein, 210 aa, Homo sapiens
FRASAVALCGPLRRCCPWAPPCSQPTASESAHSSAPGARGRGSSPGPSCGPRGNNEDVSFSRPADLDLIQSTPFKPLALKTPPRVLTLSERPLDFLDLERPPTTPQNEEIRAVGRLKRERSMSENAVRQNGQLVRNDSLYGISNIDTTIEGTSDDLTVVDAASLRRQIIKLNRRLQLLEEENKERAKREMVMYSITVAFWLLNSWLWFRR

SEQ ID NO: 896324 - protein, 126 aa, Homo sapiens
MELIFPLLVAFCRLSSLLLVGHTSRSWMCWMKIADLCCVVGLLPPLLILIMTTSGYGISNIDTTIEGTSDDLTVVDAASLRRQIIKLNRRLQLLEEENKERAKREMVMYSITVAFWLLNSWLWFRR

SEQ ID NO: 896325 - protein, 127 aa, Homo sapiens
NIILFDIYLSCFCFYFITSLFPDSVLCLLPQKPALDLCCVVGLLPPLLILIMTTSGYGISNIDTTIEGTSDDLTVVDAASLRRQIIKLNRRLQLLEEENKERAKREMVMYSITVAFWLLNSWLWFRR

SEQ ID NO: 896326 - protein, 218 aa, Homo sapiens
MAEISRIQYEMEYTEGISQRMRVPEKLKVAPPNADLEQGFQEGVPNASVIMQVPERIVVAGNNEDVSFSRPADLDLIQSTPFKPLALKTPPRVLTLSERPLDFLDLERPPTTPQNEEIRAVGRLKRERSMSENAVRQNGQLVRNDSLYGISNIDTTIEGTSDDLTVVDAASLRRQIIKLNRRLQLLEEENKERAKREMVMYSITVAFWLLNSWLWFRR

SEQ ID NO: 896327 - protein, 218 aa, Homo sapiens; identical to SEQ ID NO: 896326

SEQ ID NO: 896328 - protein, 147 aa, Homo sapiens
MAEISRIQYEMEYTEGISQRMRVPEKLKVAPPNADLEQGFQEGVPNASVIMQVPERIVVAGNNEDVSFSRPADLDLIQSTPFKPLALKTPPRVLTLSERPLDFLDLERPPTTPQNEEIRAVGRLKRERSMSENAVRQNGQLVRNDSL

SEQ ID NO: 896329 - protein, 147 aa, Homo sapiens; identical to SEQ ID NO: 896328

SEQ ID NO: 896330 - protein, 156 aa, Homo sapiens
MAEISRIQYEMEYTEGISQRMRVPEKLKVAPPNADLEQGFQEGVPNASVIMQVPERIVVAGNNEDVSFSRPADLDLIQSTPFKPLALKTPPRVLTLSERPLDFLDLERPPTTPQNEEIRAVGRLKRERSMSENAVRQNGQLVRNDSLAQIRFCPKK

SEQ ID NO: 896331 - protein, 283 aa, Homo sapiens
FRASAVALCGPLRRCCPWAPPCSQPTASESAHSSAPGARGRGSSPGPSCGPRVSRAAFPSPTAAEMAEISRIQYEMEYTEGISQRMRVPEKLKVAPPNADLEQGFQEGVPNASVIMQVPERIVVAGNNEDVSFSRPADLDLIQSTPFKPLALKTPPRVLTLSERPLDFLDLERPPTTPQNEEIRAVGRLKRERSMSENAVRQNGQLVRNDSLYGISNIDTTIEGTSDDLTVVDAASLRRQIIKLNRRLQLLEEENKERAKREMVMYSITVAFWLLNSWLWFRR

SEQ ID NO: 896332 - protein, 218 aa, Homo sapiens; identical to SEQ ID NO: 896326

SEQ ID NO: 896333 - protein, 283 aa, Homo sapiens; identical to SEQ ID NO: 896331

SEQ ID NO: 896334 - protein, 212 aa, Homo sapiens
FRASAVALCGPLRRCCPWAPPCSQPTASESAHSSAPGARGRGSSPGPSCGPRVSRAAFPSPTAAEMAEISRIQYEMEYTEGISQRMRVPEKLKVAPPNADLEQGFQEGVPNASVIMQVPERIVVAGNNEDVSFSRPADLDLIQSTPFKPLALKTPPRVLTLSERPLDFLDLERPPTTPQNEEIRAVGRLKRERSMSENAVRQNGQLVRNDSL

SEQ ID NO: 896335 - protein, 156 aa, Homo sapiens; identical to SEQ ID NO: 896330

SEQ ID NO: 896336 - protein, 221 aa, Homo sapiens
FRASAVALCGPLRRCCPWAPPCSQPTASESAHSSAPGARGRGSSPGPSCGPRVSRAAFPSPTAAEMAEISRIQYEMEYTEGISQRMRVPEKLKVAPPNADLEQGFQEGVPNASVIMQVPERIVVAGNNEDVSFSRPADLDLIQSTPFKPLALKTPPRVLTLSERPLDFLDLERPPTTPQNEEIRAVGRLKRERSMSENAVRQNGQLVRNDSLAQIRFCPKK

SEQ ID NO: 896337 - protein, 126 aa, Homo sapiens; identical to SEQ ID NO: 896324

SEQ ID NO: 896338 - protein, 221 aa, Homo sapiens; identical to SEQ ID NO: 896336

SEQ ID NO: 896339 - protein, 200 aa, Homo sapiens
MAEISRIQYEMEYTEGISQRMRVPEKLKVAPPNADLEQGFQEGVPNASVIMQVPERIVVAGNNEDVSFSRPADLDLIQSTPFKPLLDLERPPTTPQNEEIRAVGRLKRERSMSENAVRQNGQLVRNDSLYGISNIDTTIEGTSDDLTVVDAASLRRQIIKLNRRLQLLEEENKERAKREMVMYSITVAFWLLNSWLWFRR

SEQ ID NO: 896340 - protein, 182 aa, Homo sapiens
MAEISRIQYEMEYTEGISQRMRVPEKLKVAPPNADLEQGFQEGVPNASVIMQVPERIVVAGNNEDVSFSRPADLDLIQSTPFKPLALKTPPRVLTLSERPLDFLDLERPPTTPQNEEIRAVGRLKRERSMSENAVRQNGQLVRNDSLDLCCVVGLLPPLLILIMTTSGMAFQILIQPFEERR

SEQ ID NO: 896341 - protein, 95 aa, Homo sapiens
RDSIFTYFHFLNYPHTTHHLSDEPYGISNIDTTIEGTSDDLTVVDAASLRRQIIKLNRRLQLLEEENKERAKREMVMYSITVAFWLLNSWLWFRR

SEQ ID NO: 896342 - protein, 889 aa, Homo sapiens
KSRGLSRSRSRSRGRSKDRDPNRNVEHRERSKFKSERNDLESSYVPVSAPPPNSSEQYSSGAQSIPSTVTVIAPAHHSENTTESWSNYYNNHSSSNSFGRNLPPKRRCRDYDERGFCVLGDLCQFDHGNDPLVVDEVALPSMIPFPPPPPGLPPPPPPGMLMPPMPGPGPGPGPGPGPGPGPGPGPGHSMRLPVPQGHGQPPPSVVLPIPRPPITQSSLINSRDQPGTSAVPNLASVGTRLPPPLPQNLLYTVSERQPMYSREHGAAASERLQLGTPPPLLAARLVPPRNLMGSSIGYHTSVSSPTPLVPDTYEPDGYNPEAPSITSSGRSQYRQFFSRTQTQRPNLIGLTSGDMDVNPRAANIVIQTEPPVPVSINSNITRVVLEPDSRKRAMSGLEGPLTKKPWLGKQGNNNQNKPGFLRKNQYTNTKLEVKKIPQELNNITKLNEHFSKFGTIVNIQVAFKGDPEAALIQYLTNEEARKAISSTEAVLNNRFIRVLWHRENNEQPTLQSSAQLLLQQQQTLSHLSQQHHHLPQHLHQQQVLVAQSAPSTVHGGIQKMMSKPQTSGAYVLNKVPVKHRLGHAGGNQSDASHLLNQSGGAGEDCQIFSTPGHPKMIYSSSNLKTPSKLCSGSKSHDVQEVLKKKQEAMKLQQDMRKKRQEVLEKQIECQKMLISKLEKNKNMKPEERANIMKTLKELGEKISQLKDELKTSSAVSTPSKVKTKTEAQKELLDTELDLHKRLSSGEDTTELRKKLSQLQVEAARLGILPVGRGKTMSSQGRGRGRGRGGRGRGSLNHMVVDHRPKALTVGGFIEEEKEDLLQHFSTANQGPKFKDRRLQISWHKPKVPSISTETEEEEVKEEETETSDLFLPDDDDEDEDEYESRSWRR

SEQ ID NO: 896343 - protein, 834 aa, Homo sapiens
KSRGLSRSRSRSRGRSKDRDPNRNVEHRERSKFKSERNDLESSYVPVSAPPPNSSEQYSSGAQSIPSTVTVIAPAHHSENTTESWSNYYNNHSSSNSFGRNLPPKRRCRDYDERGFCVLGDLCQFDHGNDPLVVDEVALPSMIPFPPPPPGLPPPPPPGMLMPPMPGPGPGPGPGPGPGPGPGPGPGHSMRLPVPQGHGQPPPSVVLPIPRPPITQSSLINSRDQPGTSAVPNLASVGTRLPPPLPQNLLYTVSEHTYEPDGYNPEAPSITSSGRSQYRQFFSRTQTQRPNLIGLTSGDMDVNPRAANIVIQTEPPVPVSINSNITRVVLEPDSRKRAMSGLEGPLTKKPWLGKQGNNNQNKPGFLRKNQYTNTKLEVKKIPQELNNITKLNEHFSKFGTIVNIQVAFKGDPEAALIQYLTNEEARKAISSTEAVLNNRFIRVLWHRENNEQPTLQSSAQLLLQQQQTLSHLSQQHHHLPQHLHQQQVLVAQSAPSTVHGGIQKMMSKPQTSGAYVLNKVPVKHRLGHAGGNQSDASHLLNQSGGAGEDCQIFSTPGHPKMIYSSSNLKTPSKLCSGSKSHDVQEVLKKKQEAMKLQQDMRKKRQEVLEKQIECQKMLISKLEKNKNMKPEERANIMKTLKELGEKISQLKDELKTSSAVSTPSKVKTKTEAQKELLDTELDLHKRLSSGEDTTELRKKLSQLQVEAARLGILPVGRGKTMSSQGRGRGRGRGGRGRGSLNHMVVDHRPKALTVGGFIEEEKEDLLQHFSTANQGPKFKDRRLQISWHKPKVPSISTETEEEEVKEEETETSDLFLPDDDDEDEDEYESRSWRR

SEQ ID NO: 896344 - protein, 693 aa, Homo sapiens
MIPFPPPPPGLPPPPPPGMLMPPMPGPGPGPGPGPGPGPGPGPGPGHSMRLPVPQGHGQPPPSVVLPIPRPPITQSSLINSRDQPGTSAVPNLASVGTRLPPPLPQNLLYTVSEHTYEPDGYNPEAPSITSSGRSQYRQFFSRTQTQRPNLIGLTSGDMDVNPRAANIVIQTEPPVPVSINSNITRVVLEPDSRKRAMSGLEGPLTKKPWLGKQGNNNQNKPGFLRKNQYTNTKLEVKKIPQELNNITKLNEHFSKFGTIVNIQVAFKGDPEAALIQYLTNEEARKAISSTEAVLNNRFIRVLWHRENNEQPTLQSSAQLLLQQQQTLSHLSQQHHHLPQHLHQQQVLVAQSAPSTVHGGIQKMMSKPQTSGAYVLNKVPVKHRLGHAGGNQSDASHLLNQSGGAGEDCQIFSTPGHPKMIYSSSNLKTPSKLCSGSKSHDVQEVLKKKQEAMKLQQDMRKKRQEVLEKQIECQKMLISKLEKNKNMKPEERANIMKTLKELGEKISQLKDELKTSSAVSTPSKVKTKTEAQKELLDTELDLHKRLSSGEDTTELRKKLSQLQVEAARLGILPVGRGKTMSSQGRGRGRGRGGRGRGSLNHMVVDHRPKALTVGGFIEEEKEDLLQHFSTANQGPKFKDRRLQISWHKPKVPSISTETEEEEVKEEETETSDLFLPDDDDEDEDEYESRSWRR

SEQ ID NO: 896345 - protein, 535 aa, Homo sapiens [sequence omitted]

SEQ ID NO: 896346 - protein, 735 aa, Homo sapiens
KSRGLSRSRSRSRGRSKDRDPNRNVEHRERSKFKSERNDLESSYVPVSAPPPNSSEQYSSGAQSIPSTVTVIAPAHHSENTTESWSNYYNNHSSSNSFGRNLPPKRRCRDYDERGFCVLGDLCQFDHGNDPLVVDEVALPSMIPFPPPPPGLPPPPPPGMLMPPMPGPGPGPGPGPGPGPGPGPGPGHSMRLPVPQGHGQPPPSVVLPIPRPPITQSSLINSRDQPGTSAVPNLASVGTRLPPPLPQNLLYTVSEHTYEPDGYNPEAPSITSSGRSQYRQFFSRTQTQRPNLIGLTSGDMDVNPRAANIVIQTEPPVPVSINSNITRVVLEPDSRKRAMSGLEGPLTKKPWLGKQGNNNQNKPGFLRKNQYTNTKLEVKKIPQELNNITKLNEHFSKFGTIVNIQMMSKPQTSGAYVLNKVPVKHRLGHAGGNQSDASHLLNQSGGAGEDCQIFSTPGHPKMIYSSSNLKTPSKLCSGSKSHDVQEVLKKKQEAMKLQQDMRKKRQEVLEKQIECQKMLISKLEKNKNMKPEERANIMKTLKELGEKISQLKDELKTSSAVSTPSKVKTKTEAQKELLDTELDLHKRLSSGEDTTELRKKLSQLQVEAARLGILPVGRGKTMSSQGRGRGRGRGGRGRGSLNHMVVDHRPKALTVGGFIEEEKEDLLQHFSTANQGPKFKDRRLQISWHKPKVPSISTETEEEEVKEEETETSDLFLPDDDDEDEDEYESRSWRR

SEQ ID NO: 896347 - protein, 330 aa, Homo sapiens [sequence omitted]

SEQ ID NO: 896348 - protein, 348 aa, Homo sapiens
SAVVCSSSSGYLRALLKEMMSKPQTSGAYVLNKVPVKHRLGHAGGNQSDASHLLNQSGGAGEDCQIFSTPGHPKMIYSSSNLKTPSKLCSGSKSHDVQEVLKKKQEAMKLQQDMRKKRQEVLEKQIECQKMLISKLEKNKNMKPEERANIMKTLKELGEKISQLKDELKTSSAVSTPSKVKTKTEAQKELLDTELDLHKRLSSGEDTTELRKKLSQLQVEAARLGILPVGRGKTMSSQGRGRGRGRGGRGRGSLNHMVVDHRPKALTVGGFIEEEKEDLLQHFSTANQGPKFKDRRLQISWHKPKVPSISTETEEEEVKEEETETSDLFLPDDDDEDEDEYESRSWRR

SEQ ID NO: 896349 - protein, 834 aa, Homo sapiens; identical to SEQ ID NO: 896343

SEQ ID NO: 896350 - protein, 1152 aa, Homo sapiens
KSRGLSRSRSRSRGRSKDRDPNRNVEHRERSKFKSERNDLESSYVPVSAPPPNSSEQYSSGAQSIPSTVTVIAPAHHSENTTESWSNYYNNHSSSNSFGRNLPPKRRCRDYDERGFCVLGDLCQFDHGNDPLVVDEVALPSMIPFPPPPPGLPPPPPPGMLMPPMPGPGPGPGPGPGPGPGPGPGPGHSMRLPVPQGHGQPPPSVVLPIPRPPITQSSLINSRDQPGTSAVPNLASVGTRLPPPLPQNLLYTVSEHTYEPDGYNPEAPSITSSGRSQYRQFFSRTQTQRPNLIGLTSGDMDVNPRAANIVIQTEPPVPVSINSNITRVVLEPDSRKRAMSGLEGPLTKKPWLGKQGNNNQNKPGFLRKNQYTNTKLEVKKIPQELNNITKLNEHFSKFGTIVNIQVAFKGDPEAALIQYLTNEEARKAISSTEAVLNNRFIRVLWHRENNEQPTLQSSAQLLLQQQQTLSHLSQQHHHLPQHLHQQQVLVAQSAPSTVHGGIQKMMSKPQTSGAYVLNKVPVKHRLGHAGGNQSDASHLLNQSGGAGEDCQIFSTPGHPKMIYSSSNLKTPSKLCSGSKSHDVQEVLKKKQEAMKLQQDMRKKRQEVLEKQIECQKMLISKLEKNKNMKPEERANIMKTLKELGEKISQLKDELKTSSAVSTPSKVKTKTEAQKELLDTELDLHKRLSSGEDTTELRKKLSQLQVEAARLGILPVGRGKTMSSQGRGRGRGRGGRGRGSLNHMVVDHRPKALTVGGFIEEEKEDLLQHFSMEFCSCCPGWSAMVRSRLTATSASLVQVILLPQPPKQLRLQERKMMAMNSKQPFGMHPVLQEPKFSSLHSGSEAMRRVCLPAPQLQGNIFGSFDESLLARAEALAAVDIVSHGKNHPFKPDATYHTMSSVPCTSTSSTVPISHPAALTSHPHHAVHQGLEGDLLEHISPTLSVSGLGAPEHSVMPAQIHPHHLGAMGHLHQAMGMSHPHTVAPHSAMPACLSDVESDPRELEAFAERFKQRRIKLGVTQADVGAALANLKIPGVGSLSQSTICRFESLTLSHNNMIALKPVLQAWLEEAEAAYREKNSKPELFNGSERKRKRTSIAAPEKRSLEAYFAIQPRPSSEKIAAIAEKLDLKKNVVRVWFCNQRQKQKRMKYSAVH

SEQ ID NO: 896351 - protein, 113 aa, Homo sapiens
MALSEPILPSFSTFASPCRERGLQERWPRAEPESGGTDDDLNSVLDFILSMGLDGLGAEAAPEPALRHIIEVDPDTKEMLKLLDFGSLSNASRFTQLYEDGMKFQEGLVGGPV

SEQ ID NO: 896352 - protein, 383 aa, Homo sapiens
ARPRPDQPGLGQPLTGVPVRVLPPRVPAMALSEPILPSFSTFASPCRERGLQERWPRAEPESGGTDDDLNSVLDFILSMGLDGLGAEAAPEPPPPPPPPAFYYPEPGAPPPYSAPAGGLVSELLRPELDAPLGPALHGRFLLAPPGRLVKAEPPEADGGGGYGCAPGLTRGPRGLKREGAPGPAASCMRGPGGRPPPPPDTPPLSPDGPARLPAPGPRASFPPPFGGPGFGAPGPGLHYAPPAPPAFGLFDDAAAAAAALGLAPPAARGLLTPPASPLELLEAKPKRGRRSWPRKRTATHTCSYAGCGKTYTKSSHLKAHLRTHTGEKPYHCNWDGCGWKFARSDELTRHYRKHTGHRPFQCHLCDRAFSRSDHLALHMKRHM

SEQ ID NO: 896353 - protein, 383 aa, Homo sapiens; identical to SEQ ID NO: 896352

SEQ ID NO: 896354 - protein, 185 aa, Homo sapiens
  misc_feature (12)..(12): Xaa can be any naturally occurring amino acid
KGLGLTPPSRVXGLPAPGPRASFPPPFGGPGFGAPGPGLHYAPPAPPAFGLFDDAAAAAAALGLAPPAARGLLTPPASPLELLEAKPKRGRRSWPRKRTATHTCSYAGCGKTYTKSSHLKAHLRTHTGEKPYHCNWDGCGWKFARSDELTRHYRKHTGHRPFQCHLCDRAFSRSDHLALHMKRHM

SEQ ID NO: 896355 - protein, 383 aa, Homo sapiens; identical to SEQ ID NO: 896352

SEQ ID NO: 896356 - protein, 293 aa, Homo sapiens
ARPRPDQPGLGQPLTGVPVRVLPPRVPAMALSEPILPSFSTFASPCRERGLQERWPRAEPESGGTDDDLNSVLDFILSMGLDGLGAEAAPEPPPPPPPPAFYYPEPGAPPPYSAPAGGLVSELLRPELDAPLGPALHGRFLLAPPGRLVKAEPPEADGGGGYGCAPGLTRGPRGLKREGAPGPAASCMRGPGGRPPPPPDTPPLSPDGPARLPAPGPRASFPPPFGGPGFGAPGPGLHYAPPAPPAFGLFDDAAAAAAALGLAPPAALGPANAPPLTPAATRAAARPTPRVRI

SEQ ID NO: 896357 - protein, 383 aa, Homo sapiens; identical to SEQ ID NO: 896352

SEQ ID NO: 896358 - protein, 383 aa, Homo sapiens; identical to SEQ ID NO: 896352

SEQ ID NO: 896359 - protein, 370 aa, Homo sapiens
ARPRPDQPGLGQPLTGVPVRVLPPRVPAMALSEPILPSFSTFASPCRERGLQERWPRAEPESGGTDDDLNSVLDFILSMGLDGLGAEAAPEPPPPPPPPAFYYPEPGAPPPYSAPAGGLVSELLRPELDAPLGPALHGRFLLAPPGRLVKAEPPEADGGGGYGCAPGLTRGPRGLKREGAPGPAASCMRGPGGRPPPPPDTPPLSPDGPARLPAPGPRASFPPPFGGPGFGAPGPGLHYAPPAPPAFGLFDDAAAAAAALGLAPPAARGLLTPPASPLELLEAKPKRGRRSWPRKRTATHTCSYAGCGKTYTKSSHLKAHLRTHTGEKPYHCNWDGCGWKFARSDELTRHLCDRAFSRSDHLALHMKRHM

SEQ ID NO: 896360 - protein, 70 aa, Homo sapiens
LGRALRLGTPLGTRLRTLGRECSLGNLERFRVLECWREGACLGPVGEPWLQRVSLDDDDDDATTPAPVCD

SEQ ID NO: 896361 - protein, 371 aa, Homo sapiens
ARPRPDQPGLGQPLTGVPVRVLPPRVPAMALSEPILPSFSTFASPCRERGLQERWPRAEPESGGTDDDLNSVLDFILSMGLDGLGAEAAPEPPPPPPPPAFYYPEPGAPPPYSAPAGGLVSELLRPELDAPLGPALHGRFLLAPPGRLVKAEPPEADGGGGYGCAPGLTRGPRGLKREGAPGPAASCMRGPGGRPPPPPDTPPLSPDGPARLPAPGPRASFPPPFGGPGFGAPGPGLHYAPPAPPAFGLFDDAAAAAAALGLAPPAARGLLTPPASPLELLEAKPKRGRRSWPRKRTATHTCSYAGCGKTYTKSSHLKAHLRTHTGGRHARARSAGGGTREERSDSQRAPENEFRTSLGAWLRGIWQVVHA

SEQ ID NO: 896362 - protein, 110 aa, Homo sapiens
HGDRGLRVVKGKQRPPSPAARSRPLPCRPQRWPRAEPESGGTDDDLNSVLDFILSMGLDGLGAEAAPEPPPPPPPPAFYYPEPGAPPPYSAPAGGLVSELLRPELDAPLG

SEQ ID NO: 896363 - protein, 99 aa, Homo sapiens
ADGGGGYGCAPGLTRGPRGLKREGAPGPAASCMRGPGGRPPPPPDTPPLSPDGPARLPAPGPRASFPPPFGGPGFGAPGPGLHYAPPAPPAFGLFDDAA

SEQ ID NO: 896364 - protein, 113 aa, Homo sapiens
MLPAVGSVDEEEDPAEEDCPELVPIETTQSEEEEKSGLGAKIPVTIITGYLGAGKTTLLNYILTEQHSKRVAVILNESGEGSALEKSLAVSQGGELYEEWLELRNGCLCCSVK

SEQ ID NO: 896365 - protein, 113 aa, Homo sapiens; identical to SEQ ID NO: 896364

SEQ ID NO: 896366 - protein, 180 aa, Homo sapiens; identical to SEQ ID NO: 875166

SEQ ID NO: 896367 - protein, 160 aa, Homo sapiens
MLPAVGSVDEEEDPAEEDCPELVPIETTQSEEEEKSGLGAKIPVTIITGYLGAGKTTLLNYILTEQHSKRVAVILNESGEGSALEKSLAVSQGGELYEEWLELRNGCLCCSVKDNGLRAIENLMQKKGKFDDILLETTGLADPGIITIVDSKYGLKVKYH

SEQ ID NO: 896368 - protein, 395 aa, Homo sapiens [sequence omitted]

SEQ ID NO: 896369 - protein, 375 aa, Homo sapiens
MLPAVGSVDEEEDPAEEDCPELVPIETTQSEEEEKSGLGAKIPVTIITGYLGAGKTTLLNYILTEQHSKRVAVILNESGEGSALEKSLAVSQGGELYEEWLELRNGCLCCSVKDNGLRAIENLMQKKGKFDDILLETTGLADPGIITIVDSKYGLKHLTEEKPDGLINEATRQVALADIILINKTDLVPEEDVKKLRTTLRSINGLGQILETQRSRVDLSNVLDLHAFDSLSGISLQKKLQHVPGTQPHLDQSIVTITFDVPGNAKEEHLNMFIQNLLWEKNVRNKDNHCMEVIRLKGLVSIKDKSQQVIVQGVHELYDLEETPVSWKDDTERTNRLVLIGRNLDKDILKQLFIATVTETEKQWTTHFKEDQVCT

SEQ ID NO: 896370 - protein, 160 aa, Homo sapiens
MLPAVGSVDEEEDPAEEDCPELVPIETTQSEEEEKSGLGAKIPVTIITGYLGAGKTTLLNYILTEQHSKRVAVILNESGEGSALEKSLAVSQGGELYEEWLELRNGCLCCSVKDNGLRAIENLMQKKGKFDDILLETTGLADPGIITIVDSKYGLKPFPI

SEQ ID NO: 896371 - protein, 346 aa, Homo sapiens
MLPAVGSVDEEEDPAEEDCPELVPIETTQSEEEEKSGLGAKIPVTIITGYLGAGKTTLLNYILTEQHSKRVAVILNESGEGSALEKSLAVSQGGELYEEWLELRNGCLCCSVKDNGLRAIENLMQKKGKFDDILLETTGLADPGIITIVDSKYGLKHLTEEKPDGLINEATRSINGLGQILETQRSRVDLSNVLDLHAFDSLSGISLQKKLQHVPGTQPHLDQSIVTITFDVPGNAKEEHLNMFIQNLLWEKNVRNKDNHCMEVIRLKGLVSIKDKSQQVIVQGVHELYDLEETPVSWKDDTERTNRLVLIGRNLDKDILKQLFIATVTETEKQWTTHFKEDQVCT

SEQ ID NO: 896372 - protein, 359 aa, Homo sapiens
MYFKRAPRAFPVLLTGAGKTTLLNYILTEQHSKRVAVILNESGEGSALEKSLAVSQGGELYEEWLELRNGCLCCSVKDNGLRAIENLMQKKGKFDDILLETTGLADPGAVASMIWVDAELGSDIYLDGIITIVDSKYGLKHLTEEKPDGLINEATRQVALADIILINKTDLVPEEDVKKLRTTLRSINGLGQILETQRSRVDLSNVLDLHAFDSLSGISLQKKLQHVPGTQPHLDQSIVTITFDVPGNAKEEHLNMFIQNLLWEKNVRNKDNHCMEVIRLKGLVSIKDKSQQVIVQGVHELYDLEETPVSWKDDTERTNRLVLIGRNLDKDILKQLFIATVTETEKQWTTHFKEDQVCT

SEQ ID NO: 896373 - protein, 138 aa, Homo sapiens
EEVRKRAIWMFKNEKSIVTITFDVPGNAKEEHLNMFIQNLLWEKNVRNKDNHCMEVIRLKGLVSIKDKSQQVIVQGVHELYDLEETPVSWKDDTERTNRLVLIGRNLDKDILKQLFIATVTETEKQWTTHFKEDQVCT

SEQ ID NO: 896374 - protein, 177 aa, Homo sapiens
MQIFVKTLTGKTITLEVEPSDTIENVKAKIQDKEGIPPDQQRLIFAGKQLEDGRTLSDYNIQKESTLHLVLRLRGGMQIFVKTLTGKTITLEVEPSDTIENVKAKIPVTIITGYLGAGKTTLLNYILTEQHSKRVAVILNESGEGSALEKSLAVSQGGELYEEWLELRNGCLCCSVK

SEQ ID NO: 896375 - protein, 104 aa, Homo sapiens
MFIQNLLWEKNVRNKDNHCMEVIRLKGLVSIKDKSQQVIVQGVHELYDLEETPVSWKDDTERTNRLVLIGRNLDKDILKQLFIATVTETEKQWTTHFKEDQVCT

SEQ ID NO: 896376 - protein, 160 aa, Homo sapiens; identical to SEQ ID NO: 896367

SEQ ID NO: 896377 - protein, 395 aa, Homo sapiens [sequence omitted]

SEQ ID NO: 896378 - protein, 395 aa, Homo sapiens [sequence omitted]

SEQ ID NO: 896379 - protein, 160 aa, Homo sapiens; identical to SEQ ID NO: 896367

SEQ ID NO: 896380 - protein, 312 aa, Homo sapiens
MLPAVGSVDEEEDPAEEDCPELVPIETTQSEEEEKSGLGAKIPVTIITGYLGAGKTTLLNYILTEQHSKRVAVILNESGEGSALEKSLAVSQGGELYEEWLELRNGCLCCSVKDNGLRAIENLMQKKGKFDDILLETTGLADPGIITIVDSKYGLKHLTEEKPDGLINEATSLQKKLQHVPGTQPHLDQSIVTITFDVPGNAKEEHLNMFIQNLLWEKNVRNKDNHCMEVIRLKGLVSIKDKSQQVIVQGVHELYDLEETPVSWKDDTERTNRLVLIGRNLDKDILKQLFIATVTETEKQWTTHFKEDQVCT

SEQ ID NO: 896381 - protein, 249 aa, Homo sapiens
MLPAVGSVDEEEDPAEEDCPELVPIETTQSEEEEKSGLGAKIPVTIITGYLGAGKTTLLNYILTEQHSKRVAVILNESGEGSALEKSLAVSQGGELYEEWLELRNGCLCCSVKDNGLRAIENLMQKKGKFDDILLETTGLADPGAVASMFWVDAELGSDIYLDGIITIVDSKYGLKHLTEEKPDGLINEATRQVALADIILINKTDLVPEEDVKKLRTTLRSINGLGQILETQRSRYFKKAIPINNKSF

SEQ ID NO: 896382 - protein, 1589 aa, Homo sapiens
RRSRRKRAASEERRMAFSKGFRIYHKLDPPPFSLIVETRHKEECLMFESGAVAVLSSAEKEAIKGTYSKVLDAYGLLGVLRLNLGDTMLHYLVLVTGCMSVGKIQESEVFRVTSTEFISLRIDSSDEDRISEVRKVLNSGNFYFAWSASGISLDLSLNAHRSMQEQTTDNRFFWNQSLHLHLKHYGVNCDDWLLRLMCGGVEIRTIYAAHKQAKACLISRLSCERAGTRFNVRGTNDDGHVANFVETEQVVYLDDSVSSFIQIRGSVPLFWEQPGLQVGSHRVRMSRGFEANAPAFDRHFRTLKNLYGRQIIVNLLGSKEGEHMLSKAFQSHLKASEHAADIQMVNFDYHQMVKGGKAEKLHSVLKPQVQKFLDYGFFYFNGSEVQRCQSGTVRTNCLDCLDRTNSVQAFLGLEMLAKQLEALGLAEKPQLVTRFQEVFRSMWSVNGDSISKIYAGTGALEGKAKLKDGARSVTRTIQNNFFDSSKQEAIDVLLLGNTLNSDLADKARALLTTGSLRVSEQTLQSASSKVLKSMCENFYKYSKPKKIRVCVGTWNVNGGKQFRSIAFKNQTLTDWLLDAPKLAGIQEFQDKRSKPTDIFAIGFEEMVELNAGNIVSASTTNQKLWAVELQKTISRDNKYVLLASEQLVGVCLFVFIRPQHAPFIRDVAVDTVKTGMGGATGNKGAVAIRMLFHTTSLCFVCSHFAAGQSQVKERNEDFIEIARKLSFPMGRMLFSHDYVFWCGDFNYRIDLPNEEVKELIRQQNWDSLIAGDQLINQKNAGQVFRGFLEGKVTFAPTYKYDLFSDDYDTSEKCRTPAWTDRVLWRRRKWPFDRSAEDLDLLNASFQDESKILYTWTPGTLLHYGRAELKTSDHRPVVALIDIDIFEVEAEERQNIYKEVIAVQGPPDGTVLVSIKSSLPENNFFDDALIDELLQQFASFGEVILIRFVEDKMWVTFLEGSSALNVLSLNGKELLNRTITIALKSPDWIKNLEEEMSLEKISIALPSSTSSTLLGEDAEVAADFDMEGDVDDYSAEVEELLPQHLQPSSSSGLGTSPSSSPRTSPCQSPTISEGPVPSLPIRPSRAPSRTPGPPSAQSSPIDAQPATPLPQKDPAQPLEPKRPPPPRPVAPPTRPAPPQRPPPPSGARSPAPTRKEFGGIGAPPSPGVARREMEAPKSPGTTRKDNIGRSQPSPQAGLAGPGPAGYSTARPTIPPRAGVISAPQSHARASAGRLTPESQSKTSETSKGSTFLPEPLKPQAAFPPQSSLPPPAQRLQEPLVPVAAPMPQSGPQPNLETPPQPPPRSRSSHSLPSEASSQPQVKTNGISDGKRESPLKIDPFEDLSFNLLAVSKAQLSVQTSPVPTPDPKRLIQLPSATQSNVNTLSSVSCMPTMPPIPARSQSQENMRSSPNPFITGLTRTNPFSDRTAAPGNPFRAKSEESEATSWFSKEEPVTISPFPSLQPLGHNKSRASSSLDGFKDSFDLQGQSTLKISNPKGWVTFEEEEDFGVKGKSKSACSDLLGNQPSSFSGSNLTLNDDWNKGTNVSFCVLPSRRPPPPPVPLLPPGTSPPVDPFTTLASKASPTLDFTER

SEQ ID NO: 896383 - protein, 1589 aa, Homo sapiens; identical to SEQ ID NO: 896382

SEQ ID NO: 896384 - protein, 1589 aa, Homo sapiens; identical to SEQ ID NO: 896382

SEQ ID NO: 896385 - protein, 1174 aa, Homo sapiens
AAAARPTGSRAGGRLQDQSLPPQRQRERAASEERRMAFSKGFRIYHKLDPPPFSLIVETRHKEECLMFESGAVAVLSSAEKEAIKGTYSKVLDAYGLLGVLRLNLGDTMLHYLVLVTGCMSVGKIQESEVFRVTSTEFISLRIDSSDEDRISEVRKVLNSGNFYFAWSASGISLDLSLNAHRSMQEQTTDNRFFWNQSLHLHLKHYGVNCDDWLLRLMCGGVEIRTIYAAHKQAKACLISRLSCERAGTRFNVRGTNDDGHVANFVETEQVVYLDDSVSSFIQIRGSVPLFWEQPGLQVGSHRVRMSRGFEANAPAFDRHFRTLKNLYGRQIIVNLLGSKEGEHMLSKAFQSHLKASEHAADIQMVNFDYHQMVKGGKAEKLHSVLKPQVQKFLDYGFFYFNGSEVQRCQSGTVRTNCLDCLDRTNSVQAFLGLEMLAKQLEALGLAEKPQLVTRFQEVFRSMWSVNGDSISKIYAGTGALEGKAKLKDGARSVTRTIQNNFFDSSKQEAIDVLLLGNTLNSDLADKARALLTTGSLRVSEQTLQSASSKVLKSMCENFYKYSKPKKIRVCVGTWNVNGGKQFRSIAFKNQTLTDWLLDAPKLAGIQEFQDKRSKPTDIFAIGFEEMVELNAGNIVSASTTNQKLWAVELQKTISRDNKYVLLASEQLVGVCLFVFIRPQHAPFIRDVAVDTVKTGMGGATGNKGAVAIRMLFHTTSLCFVCSHFAAGQSQVKERNEDFIEIARKLSFPMGRMLFSHDYVFWCGDFNYRIDLPNEEVKELIRQQNWDSLIAGDQLINQKNAGQVFRGFLEGKVTFAPTYKYDLFSDDYDTSEKCRTPAWTDRVLWRRRKWPFDRSAEDLDLLNASFQDESKILYTWTPGTLLHYGRAELKTSDHRPVVALIDIDIFEVEAEERQNIYKEVIAVQGPPDGTVLVSIKSSLPENNFFDDALIDELLQQFASFGEVILIRFVEDKMWVTFLEGSSALNVLSLNGKELLNRTITIALKSPDWIKNLEEEMSLEKISIALPSSTSSTLLGEDAEVAADFDMEGDVDDYSAEVEELLPQHLQPSSSSGLGTSPSSSPRTSPCQSPTISEGPVPSLPIRPSRAPSRTPGPPSAQSSPIDAQPATPRPARSPLPHARLPHRDLLRLQGLGVLHPLERNLEHPKALEQQGKII

SEQ ID NO: 896386 - protein, 1597 aa, Homo sapiens
RRSRRKRAASEERRMAFSKGFRIYHKLDPPPFSLIVETRHKEECLMFESGAVAVLSSAEKEAIKGTYSKVLDAYGLLGVLRLNLGDTMLHYLVLVTGCMSVGKIQESEVFRVTSTEFISLRIDSSDEDRISEVRKVLNSGNFYFAWSASGISLDLSLNAHRSMQEQTTDNRFFWNQSLHLHLKHYGVNCDDWLLRLMCGGVEIRTIYAAHKQAKACLISRLSCERAGTRFNVRGTNDDGHVANFVETEQVVYLDDSVSSFIQIRGSVPLFWEQPGLQVGSHRVRMSRGFEANAPAFDRHFRTLKNLYGRQIIVNLLGSKEGEHMLSKAFQSHLKASEHAADIQMVNFDYHQMVKGGKAEKLHSVLKPQVQKFLDYGFFYFNGSEVQRCQSGTVRTNCLDCLDRTNSVQAFLGLEMLAKQLEALGLAEKPQLVTRFQEVFRSMWSVNGDSISKIYAGTGALEGKAKLKDGARSVTRTIQNNFFDSSKQEAIDVLLLGNTLNSDLADKARALLTTGSLRVSEQTLQSASSKVLKSMCENFYKYSKPKKIRVCVGTWNVNGGKQFRSIAFKNQTLTDWLLDAPKLAGIQEFQDKRSKPTDIFAIGFEEMVELNAGNIVSASTTNQKLWAVELQKTISRDNKYVLLASEQLVGVCLFVFIRPQHAPFIRDVAVDTVKTGMGGATGNKGAVAIRMLFHTTSLCFVCSHFAAGQSQVKERNEDFIEIARKLSFPMGRMLFSHDYVFWCGDFNYRIDLPNEEVKELIRQQNWDSLIAGDQLINQKNAGQVFRGFLEGKVTFAPTYKYDLFSDDYDTSEKCRTPAWTDRVLWRRRKWPFDRSAEDLDLLNASFQDESKILYTWTPGTLLHYGRAELKTSDHRPVVALIDIDIFEVEAEERQNIYKEVIAVQGPPDGTVLVSIKSSLPENNFFDDALIDELLQQFASFGEVILIRFVEDKMWVTFLEGSSALNVLSLNGKELLNRTITIALKSPDWIKNLEEEMSLEKISIALPSSTSSTLLGEDAEVAADFDMEGDVDDYSAEVEELLPQHLQPSSSSGLGTSPSSSPRTSPCQSPTISEGPVPSLPIRPSRAPSRTPGPPSAQSSPIDAQPATPLPQKDPAQPLEPKRPPPPRPVAPPTRPAPPQRPPPPSGARSPAPTRKEFGGIGAPPSPGVARREMEAPKSPGTTRKDNIGRSQPSPQAGLAGPGPAGYSTARPTIPPRAGVISAPQSHARASAGRLTPESQSKTSETSKGSTFLPEPLKPQAAFPPQSSLPPPAQRLQEPLVPVAAPMPQSGPQPNLETPPQPPPRSRSSHSLPSEASSQPQQEQPSGKQVKTNGISDGKRESPLKIDPFEDLSFNLLAVSKAQLSVQTSPVPTPDPKRLIQLPSATQSNVNTLSSVSCMPTMPPIPARSQSQENMRSSPNPFITGLTRTNPFSDRTAAPGNPFRAKSEESEATSWFSKEEPVTISPFPSLQPLGHNKSRASSSLDGFKDSFDLQGQSTLKISNPKGWVTFEEEEDFGVKGKSKSACSDLLGNQPSSFSGSNLTLNDDWNKGTNVSFCVLPSRRPPPPPVPLLPPGTSPPVDPFTTLASKASPTLDFTER

SEQ ID NO: 896387 - protein, 1183 aa, Homo sapiens
AAAARPTGSRAGGRLQDQSLPPQRQRERAASEERRMAFSKGFRIYHKLDPPPFSLIVETRHKEECLMFESGAVAVLSSAEKEAIKGTYSKVLDAYGLLGVLRLNLGDTMLHYLVLVTGCMSVGKIQESEVFRVTSTEFISLRIDSSDEDRISEVRKVLNSGNFYFAWSASGISLDLSLNAHRSMQEQTTDNRFFWNQSLHLHLKHYGVNCDDWLLRLMCGGVEIRTIYAAHKQAKACLISRLSCERAGTRFNVRGTNDDGHVANFVETEQVVYLDDSVSSFIQIRGSVPLFWEQPGLQVGSHRVRMSRGFEANAPAFDRHFRTLKNLYGRQIIVNLLGSKEGEHMLSKAFQSHLKASEHAADIQMVNFDYHQMVKGGKAEKLHSVLKPQVQKFLDYGFFYFNGSEVQRCQSGTVRTNCLDCLDRTNSVQAFLGLEMLAKQLEALGLAEKPQLVTRFQEVFRSMWSVNGDSISKIYAGTGALEGKAKLKDGARSVTRTIQNNFFDSSKQEAIDVLLLGNTLNSDLADKARALLTTGSLRVSEQTLQSASSKVLKSMCENFYKYSKPKKIRVCVGTWNVNGGKQFRSIAFKNQTLTDWLLDAPKLAGIQEFQDKRSKPTDIFAIGFEEMVELNAGNIVSASTTNQKLWAVELQKTISRDNKYVLLASEQLVGVCLFVFIRPQHAPFIRDVAVDTVKTGMGGATGNKGAVAIRMLFHTTSLCFVCSHFAAGQSQVKERNEDFIEIARKLSFPMGRMLFSHDYVFWCGDFNYRIDLPNEEVKELIRQQNWDSLIAGDQLINQKNAGQVFRGFLEGKVTFAPTYKYDLFSDDYDTSEKCRTPAWTDRVLWRRRKWPFDRSAEDLDLLNASFQDESKILYTWTPGTLLHYGRAELKTSDHRPVVALIDIDIFEVEAEERQNIYKEVIAVQGPPDGTVLVSIKSSLPENNFFDDALIDELLQQFASFGEVILIRFVEDKMWVTFLEGSSALNVLSLNGKELLNRTITIALKSPDWIKNLEEEMSLEKISIALPSSTSSTLLGEDAEVAADFDMEGDVDDYSAEVEELLPQHLQPSSSSGLGTSPSSSPRTSPCQSPTISEGPVPSLPIRPSRAPSRTPGPPSAQSSPIDAQPATPLPQKDPAQPLEPKRPPPPRPVAPPTRPAPPQRPPPPSGDNLLFPFLLDVKFFTLF

SEQ ID NO: 896388 - protein, 1183 aa, Homo sapiens; identical to SEQ ID NO: 896387

SEQ ID NO: 896389 - protein, 1568 aa, Homo sapiens
AAAARPTGSRAGGRLQDQSLPPQRQRERAASEERRMAFSKGFRIYHKLDPPPFSLIVETRHKEECLMFESGAVAVLSSAEKEAIKGTYSKVLDAYGLLGVLRLNLGDTMLHYLVLVTGCMSVGKIQESEVFRVTSTEFISLRIDSSDEDRISEVRKVLNSGNFYFAWSASGISLDLSLNAHRSMQEQTTDNRFFWNQSLHLHLKHYGVNCDDWLLRLMCGGVEIRTIYAAHKQAKACLISRLSCERAGTRFNVRGTNDDGHVANFVETEQVVYLDDSVSSFIQIRGSVPLFWEQPGLQVGSHRVRMSRGFEANAPAFDRHFRTLKNLYGRQIIVNLLGSKEGEHMLSKAFQSHLKASEHAADIQMVNFDYHQMVKGGKAEKLHSVLKPQVQKFLDYGFFYFNGSEVQRCQSGTVRTNCLDCLDRTNSVQAFLGLEMLAKQLEALGLAEKPQLVTRFQEVFRSMWSVNGDSISKIYAGTGALEGKAKLKDGARSVTRTIQNNFFDSSKQEAIDVLLLGNTLNSDLADKARALLTTGSLRVSEQTLQSASSKVLKSMCENFYKYSKPKKIRVCVGTWNVNGGKQFRSIAFKNQTLTDWLLDAPKLAGIQEFQDKRSKPTDIFAIGFEEMVELNAGNIVSASTTNQKLWAVELQKTISRDNKYVLLASEQLVGVCLFVFIRPQHAPFIRDVAVDTVKTGMGGATGNKGAVAIRMLFHTTSLCFVCSHFAAGQSQVKERNEDFIEIARKLSFPMGRMLFSHDYVFWCGDFNYRIDLPNEEVKELIRQQNWDSLIAGDQLINQKNAGQVFRGFLEGKVTFAPTYKYDLFSDDYDTSEKCRTPAWTDRVLWRRRKWPFDRSAEDLDLLNASFQDESKILYTWTPGTLLHYGRAELKTSDHRPVVALIDIDIFEVEAEERQNIYKEVIAVQGPPDGTVLVSIKSSLPENNFFDDALIDELLQQFASFGEVILIRFVEDKMWVTFLEGSSALNVLSLNGKELLNRTITIALKSPDWIKNLEEEMSLEKISIALPSSTSSTLLGEDAEVAADFDMEGDVDDYSAEVEELLPQHLQPSSSSGLGTSPSSSPRTSPCQSPTISEGPVPSLPIRPSRAPSRTPGPPSAQSSPIDAQPATPLPQKDPAQPLEPKRPPPPRPVAPPTRPAPPQRPPPPSGRSQPSPQAGLAGPGPAGYSTARPTIPPRAGVISAPQSHARASAGRLTPESQSKTSETSKGSTFLPEPLKPQAAFPPQSSLPPPAQRLQEPLVPVAAPMPQSGPQPNLETPPQPPPRSRSSHSLPSEASSQPQVKTNGISDGKRESPLKIDPFEDLSFNLLAVSKAQLSVQTSPVPTPDPKRLIQLPSATQSNVNTLSSVSCMPTMPPIPARSQSQENMRSSPNPFITGLTRTNPFSDRTAAPGNPFRAKSEESEATSWFSKEEPVTISPFPSLQPLGHNKSRASSSLDGFKDSFDLQGQSTLKISNPKGWVTFEEEEDFGVKGKSKSACSDLLGNQPSSFSGSNLTLNDDWNKGTNVSFCVLPSRRPPPPPVPLLPPGTSPPVDPFTTLASKASPTLDFTER

SEQ ID NO: 896390 - protein, 300 aa, Homo sapiens
VVVVSVKHDPLPLLPEANGHRSTNSPTIVSPAIVSPTQDSRPNMSRPLITRSPASPLNNQGIPTPAQLTKSNAPVHIDVGGHMYTSSLATLTKYPESRIGRLFDGTEPIVLDSLKQHYFIDRDGQMFRYILNFLRTSKLLIPDDFKDYTLLYEEAKYFQLQPMLLEMERWKQDRETGRFSRPCECLVVRVAPDLGERITLSGDKSLIEEVFPEIGDVMCNSVNAGWNHDSTHVIRFPLNGYCHLNSVQVLERLQQRGFEIVGSCGGGVDSSQFSEYVLRRELRRTPRVPSVIRIKQEPLD

SEQ ID NO: 896391 - protein, 257 aa, Homo sapiens
MSRPLITRSPASPLNNQGIPTPAQLTKSNAPVHIDVGGHMYTSSLATLTKYPESRIGRLFDGTEPIVLDSLKQHYFIDRDGQMFRYILNFLRTSKLLIPDDFKDYTLLYEEAKYFQLQPMLLEMERWKQDRETGRFSRPCECLVVRVAPDLGERITLSGDKSLIEEVFPEIGDVMCNSVNAGWNHDSTHVIRFPLNGYCHLNSVQVLERLQQRGFEIVGSCGGGVDSSQFSEYVLRRELRRTPRVPSVIRIKQEPLD

SEQ ID NO: 896392 - protein, 257 aa, Homo sapiens; identical to SEQ ID NO: 896391

SEQ ID NO: 896393 - protein, 257 aa, Homo sapiens; identical to SEQ ID NO: 896391

SEQ ID NO: 896394 - protein, 257 aa, Homo sapiens; identical to SEQ ID NO: 896391

SEQ ID NO: 896395 - protein, 202 aa, Homo sapiens
MSRPLITRSPASPLNNQGIPTPAQLTKSNAPVHIDVGGHMYTSSLATLTKYPESRIGRLFDGTEPIVLDSLKQHYFIDRDGQMFRYILNFLRTSKLLIPDDFKDYTLLYEEAKYFQLQPMLLEMERWKQDREKIEKVVVSNRLVTSPCCIVTSTYGWTANMERIMKAQALRDNSTMGYMAAKKHLEINPDHSIIETLRQKAE

SEQ ID NO: 896396 - protein, 197 aa, Homo sapiens
AGAGPDFRLVCGVSGSGFPGGRQGQATEWRPLRPWNGAMEKLRRVLSGQDDEEQGLTAQVLDASSLSFNTRLKWFAICFVCGVFFSILGTGLLWLPGGIKLFAVFYTLGNLAALASTCFLMGPVKQLKKMFEATRLLATIVMLLCFIFTLCAALWWHKKGLAVLFCILQFLSMTWYSLSYIPYARDAVIKCCSSLLS

SEQ ID NO: 896397 - protein, 197 aa, Homo sapiens; identical to SEQ ID NO: 896396

SEQ ID NO: 896398 - protein, 144 aa, Homo sapiens
AGAGPDFRLVCGVSGSGFPGGRQGQATEWRPLRPWNGAMEKLRRVLSGQDDEEQGLTAQVLDASSLSFNTRLKWFAICFVCGVFFSILGTGLLWLPGGIKLFAVFYTLGNLAALASTCFLMGPVKQLKKMFEATRLLATIVMLV

SEQ ID NO: 896399 - protein, 146 aa, Homo sapiens
AGAGPDFRLVCGVSGSGFPGGRQGQATEWRPLRPWNGAMEKLRRVLSGQDDEEQGLTAQVLDASSLSFNTRLKWFAICFVCGVFFSILGTGLLWLPGGIKLFAVFYTLGNLAALASTCFLMGPVKQLKKMFEATRLLATIVMLVSK

SEQ ID NO: 896400 - protein, 67 aa, Homo sapiens
AGAGPDFRLVCGVSGSGFPGGRQGQATEWRPLRPWNGAMEKLRRVLSGQDDEEQGLTAQDSQINLLR

SEQ ID NO: 896401 - protein, 197 aa, Homo sapiens; identical to SEQ ID NO: 896396

SEQ ID NO: 896402 - protein, 79 aa, Homo sapiens
AGAGPDFRLVCGVSGSGFPGGRQGQATEWRPLRPWNGAMEKLRRVLSGQDDEEQGLTAQDSQINLLRSWMPHPLVSTPD

SEQ ID NO: 896403 - protein, 79 aa, Homo sapiens; identical to SEQ ID NO: 896402

SEQ ID NO: 896404 - protein, 175 aa, Homo sapiens
AGAGPDFRLVCGVSGSGFPGGRQGQATEWRPLRPWNGAMEKLRRVLSGQDDEEQGLTAQVLDASSLSFNTRLKWFAICFVCGVFFSILGTGLLWLPGGIKLFAVFYTLGNLAALASTCFLMGPVKQLKKMFEATRLLATIVMLLCFIFTLCAALWWHKKGLAVLFCILQFLSMTW

SEQ ID NO: 896405 - protein, 197 aa, Homo sapiens; identical to SEQ ID NO: 896396

SEQ ID NO: 896406 - protein, 197 aa, Homo sapiens; identical to SEQ ID NO: 896396

SEQ ID NO: 896407 - protein, 97 aa, Homo sapiens
AGAGPDFRLVCGVSGSGFPGGRQGQATEWRPLRPWNGAMEKLRRVLSGQDDEEQGLTAQINTRKMAIGGKNTYYYTNSRAVSLLREKLAIEKQRLNL

SEQ ID NO: 896408 - protein, 197 aa, Homo sapiens; identical to SEQ ID NO: 896396

SEQ ID NO: 896409 - protein, 79 aa, Homo sapiens; identical to SEQ ID NO: 896402

SEQ ID NO: 896410 - protein, 144 aa, Homo sapiens; identical to SEQ ID NO: 896398

SEQ ID NO: 896411 - protein, 183 aa, Homo sapiens
AGAGPDFRLVCGVSGSGFPGGRQGQATEWRPLRPWNGAMEKLRRVLSGQDDEEQGLTAQVLDASSLSFNTRLKWFAICFVCGVFFSILGTGLLWLPGGIKLFAVFYTLGNLAALASTCFLMGPVKQLKKMFEATRLLATIVMLLCFIFTLCAALWVSYVSPTGFQLTVCPPPQLTCHHTIILK

SEQ ID NO: 896412 - protein, 305 aa, Homo sapiens
MSLWVDKYRPCSLGRLDYHKEQAAQLRNLVQCGDFPHLLVYGPSGAGKKTRIMCILRELYGVGVEKLRIEHQTITTPSKKKIEISTIASNYHLEVNPSDAGNSDRVVIQEMLKTVAQSQQLETNSQRDFKVVLLTEVDKLTKDAQHALRRTMEKYMSTCRLILCCNSTSKVIPPIRSRCLAVRVPAPSIEDICHVLSTVCKKEGLNLPSQLAHRLAEKSCRNLRKALLMCEACRVQQYPFTADQEIPETDWEVYLRETANAIVSQQTPQRLLEVRGRLYELLTHCIPPEIIMKACKEESRSCDIF

SEQ ID NO: 896413 - protein, 356 aa, Homo sapiens
MSLWVDKYRPCSLGRLDYHKEQAAQLRNLVQCGDFPHLLVYGPSGAGKKTRIMCILRELYGVGVEKLRIEHQTITTPSKKKIEISTIASNYHLEVNPSDAGNSDRVVIQEMLKTVAQSQQLETNSQRDFKVVLLTEVDKLTKDAQHALRRTMEKYMSTCRLILCCNSTSKVIPPIRSRCLAVRVPAPSIEDICHVLSTVCKKEGLNLPSQLAHRLAEKSCRNLRKALLMCEACRVQQYPFTADQEIPETDWEVYLRETANAIVSQQTPQRLLEVRGRLYELLTHCIPPEIIMKGLLSELLHNCDGQLKGEVAQMAAYYEHRLQLGSKAIYHLEAFVAKFMALYKKFMEDGLEGMMF

SEQ ID NO: 896414 - protein, 1139 aa, Homo sapiens
MQTPEVPAERSPRRRSISGTSTSEKPNSMDTANTSPFKVPGFFSKRLKGSIKRTKSQSKLDRNTSFRLPSLRSTDDRSRGLPKLKESRSHESLLSPCSTVECLDLGRGEPVSVKPLHSSILGQDFCFEVTYLSGSKCFSCNSASERDKWMENLRRTVQPNKDNCRRAENVLRLWIIEAKDLAPKKKYFCELCLDDTLFARTTSKTKADNIFWGEHFEFFSLPPLHSITVHIYKDVEKKKKKDKNNYVGLVNIPTASVTGRQFVEKWYPVSTPTPNKGKTGGPSIRIKSRFQTITILPMEQYKEFAEFVTSNYTMLCSVLEPVISVRNKEELACALVHILQSTGRAKDFLTDLVMSEVDRCGEHDVLIFRENTIATKSIEEYLKLVGQQYLHDALGEFIKALYESDENCEVDPSKCSSSELIDHQSNLKMCCELAFCKIINSYCVFPRELKEVFASWKQQCLNRGKQDISERLISASLFLRFLCPAIMSPSLFNLMQEYPDDRTSRTLTLIAKVIQNLANFAKFGNKEEYMAFMNDFLEHEWGGMKRFLLEISNPDTISNTPGFDGYIDLGRELSVLHSLLWEVVSQLDKGENSFLQATVAKLGPLPRVLADITKSLTNPTPIQQQLRRFTEHNSSPNVSGSLSSGLQKIFEDPTDSDLHKLKSPSQDNTDSYFRGKTLLLVQQASSQSMTYSEKDERESSLPNGRSVSLMDLQDTHAAQVEHASVMLDVPIRLTGSQLSITQVASIKQLRETQSTPQSAPQVRRPLHPALNQPGGLQPLSFQNPVYHLNNPIPAMPKASIDSSLENLSTASSRSQSNSEDFKLSGPSNSSMEDFTKRSTQSEDFSRRHTVPDRHIPLALPRQNSTGQAQIRKVDQGGLGARAKAPPSLPHSASLRSTGSMSVVSAALVAEPVQNGSRSRQQSSSSRESPVPKVRAIQRQQTQQVQSPVDSATMSPVERTAAWVLNNGQYEEDVEETEQNLDEAKHAEKYEQEITKLKERLRVSSRRLEEYERRLLVQEQQMQKLLLEYKARLEDSEERLRRQQEEKDSQMKSIISRLMAVEEELKKDHAEMQAVIDAKQKIIDAQEKRIVSLDSANTRLMSALTQVKERYSMQVRNGISPTNPTKLSITENGEFKNSSC

SEQ ID NO: 896415 - protein, 1290 aa, Homo sapiens
MELSPSSGGAAEALSWPEMFPALESDSPLPPEDLDAVVPVSGAVAGGMLDRILLESVCQQQSWVRVYDVKGPPTHRLSCGQSPYTETTTWERKYCILTDSQLVLLNKEKEIPVEGGQEQQTDSTKGRCLRRTVSVPSEGQFPEYPPEGATKLEVPAERSPRRRSISGTSTSEKPNSMDTANTSPFKVPGFFSKRLKGSIKRTKSQSKLDRNTSFRLPSLRSTDDRSRGLPKLKESRSHESLLSPCSTVECLDLGRGEPVSVKPLHSSILGQDFCFEVTYLSGSKCFSCNSASERDKWMENLRRTVQPNKDNCRRAENVLRLWIIEAKDLAPKKKYFCELCLDDTLFARTTSKTKADNIFWGEHFEFFSLPPLHSITVHIYKDVEKKKKKDKNNYVGLVNIPTASVTGRQFVEKWYPVSTPTPNKGKTGGPSIRIKSRFQTITILPMEQYKEFAEFVTSNYTMLCSVLEPVISVRNKEELACALVHILQSTGRAKDFLTDLVMSEVDRCGEHDVLIFRENTIATKSIEEYLKLVGQQYLHDALGEFIKALYESDENCEVDPSKCSSSELIDHQSNLKMCCELAFCKIINSYCVFPRELKEVFASWKQQCLNRGKQDISERLISASLFLRFLCPAIMSPSLFNLMQEYPDDRTSRTLTLIAKVIQNLANFAKFGNKEEYMAFMNDFLEHEWGGMKRFLLEISNPDTISNTPGFDGYIDLGRELSVLHSLLWEVVSQLDKGENSFLQATVAKLGPLPRVLADITKSLTNPTPIQQQLRRFTEHNSSPNVSGSLSSGLQKIFEDPTDSDLHKLKSPSQDNTDSYFRGKTLLLVQQASSQSMTYSEKDERESSLPNGRSVSLMDLQDTHAAQVEHASVMLDVPIRLTGSQLSITQVASIKQLRETQSTPQSAPQVRRPLHPALNQPGGLQPLSFQNPVYHLNNPIPAMPKASIDSSLENLSTASSRSQSNSEDFKLSGPSNSSMEDFTKRSTQSEDFSRRHTVPDRHIPLALPRQNSTGQAQIRKVDQGGLGARAKAPPSLPHSASLRSTGSMSVVSAALVAEPVQNGSRSRQQSSSSRESPVPKVRAIQRQQTQQVQSPVDSATMSPVERTAAWVLNNGQYEEDVEETEQNLDEAKHAEKYEQEITKLKERLRVSSRRLEEYERRLLVQEQQMQKLLLEYKARLEDSEERLRRQQEEKDSQMKSIISRLMAVEEELKKDHAEMQAVIDAKQKIIDAQVINGDEIIQTGKTDRVPGFSQHQTDERADPSEGAVQHAGPQWHLPHQPHQAFHHGEW

SEQ ID NO: 896416 - protein, 973 aa, Homo sapiens
PALWEAEAGGSPEVQEFKNSLTNMVKHLFARTTSKTKADNIFWGEHFEFFSLPPLHSITVHIYKDVEKKKKKDKNNYVGLVNIPTASVTGRQFVEKWYPVSTPTPNKGKTGGPSIRIKSRFQTITILPMEQYKEFAEFVTSNYTMLCSVLEPVISVRNKEELACALVHILQSTGRAKDFLTDLVMSEVDRCGEHDVLIFRENTIATKSIEEYLKLVGQQYLHDALGEFIKALYESDENCEVDPSKCSSSELIDHQSNLKMCCELAFCKIINSYCVFPRELKEVFASWKQQCLNRGKQDISERLISASLFLRFLCPAIMSPSLFNLMQEYPDDRTSRTLTLIAKVIQNLANFAKFGNKEEYMAFMNDFLEHEWGGMKRFLLEISNPDTISNTPGFDGYIDLGRELSVLHSLLWEVVSQLDKGENSFLQATVAKLGPLPRVLADITKSLTNPTPIQQQLRRFTEHNSSPNVSGSLSSGLQKIFEDPTDSDLHKLKSPSQDNTDSYFRGKTLLLVQQASSQSMTYSEKDERESSLPNGRSVSLMDLQDTHAAQVEHASVMLDVPIRLTGSQLSITQVASIKQLRETQSTPQSAPQVRRPLHPALNQPGGLQPLSFQNPVYHLNNPIPAMPKASIDSSLENLSTASSRSQSNSEDFKLSGPSNSSMEDFTKRSTQSEDFSRRHTVPDRHIPLALPRQNSTGQAQIRKVDQGGLGARAKAPPSLPHSASLRSTGSMSVVSAALVAEPVQNGSRSRQQSSSSRESPVPKVRAIQRQQTQQVQSPVDSATMSPVERTAAWVLNNGQYEEDVEETEQNLDEAKHAEKYEQEITKLKERLRVSSRRLEEYERRLLVQEQQMQKLLLEYKARLEDSEERLRRQQEEKDSQMKSIISRLMAVEEELKKDHAEMQAVIDAKQKIIDAQVINGDEIIQTGKTDRVPGFSQHQTDERADPSEGAVQHAGPQWHLPHQPHQAFHHGEW

SEQ ID NO: 896417 - protein, 144 aa, Homo sapiens
RCPVNWFSCLSAALCSQENLVPEFSLCLFLSHFMLQGTGLHQPLSNRNCKRMSTPLVSGRSTYPGPCSLGAIGILVVIIRIHFLNIRPENVPPFTPEHEETLWLPGSLYVTQVENREGLPPMRSKSSCLVTVASDISAVLNYRS

SEQ ID NO: 896418 - protein, 186 aa, Homo sapiens
KAAPRRWEGEPPLPGSSASSPGRDPHTPEPGPTLGRGHAGSSSRPGSRPPTAGGLHRPSLGQWATGKEVRGVRAGCRSGPCPRCALSSSPSRRQGAEPRASPPRSRRLVPLPPRGTMELSPSSGGAAEALSWPEMFPALESDSPLPPEDLDAVVPVSGAVAGGMLDRILLESVCQQQSWVRVYGDR

SEQ ID NO: 896419 - protein, 225 aa, Homo sapiens
MELSPSSGGAAEALSWPEMFPALESDSPLPPEDLDAVVPVSGAVAGGMLDRILLESVCQQQSWVRVYDVKGPPTHRLSCGQSPYTETTTWERKYCILTDSQLVLLNKEKEIPVEGGQEQQTDSTKGRCLRRTVSVPSEGQFPEYPPEGATKLEVPAERSPRRRSISGTSTSEKPNSMDTANTSPFKVPGFFSKRLKGSIKRTKSQSKLDRNTSFRLPSLRSTDDR

SEQ ID NO: 896420 - protein, 222 aa, Homo sapiens
MSFSARTSLLLKTQDVARKWLTKRRENGGAADVAAVGRARPPSPHKGAHRPSGRGPLDRARRCRSLRQRARAAVIRVLAAAAGCARVADRGRGQRLIVRSAARRRRPPRPGWKLALLPPPCSPLAASAARCSSKMAAATGAVAASAASGQAEGKKITDLRVIDLKSELKRRNLDITGVKTVLISRLKQAIEEEGGDPDNIELTVSTDTPNKKPTKGKGCYEL

SEQ ID NO: 896421 - protein, 1168 aa, Homo sapiens
MSFSARTSLLLKTQDVARKWLTKRRENGGAADVAAVGRARPPSPHKGAHRPSGRGPLDRARRCRSLRQRARAAVIRVLAAAAGCARVADRGRGQRLIVRSAARRRRPPRPGWKLALLPPPCSPLAASAARCSSKMAAATGAVAASAASGQAEGKKITDLRVIDLKSELKRRNLDITGVKTVLISRLKQAIEEEGGDPDNIELTVSTDTPNKKPTKGKGKKHEADELSGDASVEDDAFIKDCELENQEAHEQDGNDELKDSEEFGENEEENVHSKELLSAEENKRAHELIEAEGIEDIEKEDIESQEIEAQEGEDDTFLTAQDGEEEENEKDIAGSGDGTQEVSKPLPSEGSLAEADHTAHEEMEAHTTVKEAEDDNISVTIQAEDAITLDFDGDDLLETGKNVKITDSEASKPKDGQDAIAQSPEKESKDYEMNANHKDGKKEDCVKGDPVEKEARESSKKAESGDKEKDTLKKGPSSTGASGQAKSSSKESKDSKTSSKDDKGSTSSTSGSSGSSTKNIWVSGLSSNTKAADLKNLFGKYGKVLSAKVVTNARSPGAKCYGIVTMSSSTEVSRCIAHLHRTELHGQLISVEKVKGDPSKKEMKKENDEKSSSRSSGDKKNTSDRSSKTQASVKKEEKRSSEKSEKKESKDTKKIEGKDEKNDNGASGQTSESIKKSEEKKRISSKSPGHMVILDQTKGDHCRPSRRGRYEKIHGRSKEKERASLDKKRDKDYRRKEILPFEKMKEQRLREHLVRFERLRRAMELRRRREIAERERRERERIRIIREREERERLQRERERLEIERQKLERERMERERLERERIRIEQERRKEAERIAREREELRRQQQQLRYEQEKRNSLKRPRDVDHRRDDPYWSENKKLSLDTDARFGHGSDYSRQQNRFNDFDHRERGRFPESSAVQSSSFERRDRFVGQSEGKKARPTARREDPSFERYPKNFSDSRRNEPPPPRNELRESDRREVRGERDERRTVIIHDRPDITHPRHPREAGPNPSRPTSWKSEGSMSTDKRETRVERPERSGREVSGHSVRGAPPGNRSSASGYGSREGDRGVITDRGGGSQHYPEERHVVERHGRDTSGPRKEWHGPPSQGPSYHDTRRMGDGRAGAGMITQHSSNASPINRIVQISGNSMPRGSGSGFKPFKGGPPRRF

SEQ ID NO: 896422 - protein, 1086 aa, Homo sapiens
MSFSARTSLLLKTQDVARKWLTKRRENGGAADVAAVGRARPPSPHKGAHRPSGRGPLDRARRCRSLRQRARAAVIRVLAAAAGCARVADRGRGQRLIVRSAARRRRPPRPGWKLALLPPPCSPLAASAARCSSKMAAATGAVAASAASGQAEGKKITDLRVIDLKSELKRRNLDITGVKTVLISRLKQAIEEEGGDPDNIELTVSTDTPNKKPTKGKGKKHEADELSGDASVEDDAFIKDGEEEENEKDIAGSGDGTQEVSKPLPSEGSLAEADHTAHEEMEAHTTVKEAEDDNISVTIQAEDAITLDFDGDDLLETGKNVKITDSEASKPKDGQDAIAQSPEKESKDYEMNANHKDGKKEDCVKGDPVEKEARESSKKAESGDKEKDTLKKGPSSTGASGQAKSSSKESKDSKTSSKDDKGSTSSTSGSSGSSTKNIWVSGLSSNTKAADLKNLFGKYGKVLSAKVVTNARSPGAKCYGIVTMSSSTEVSRCIAHLHRTELHGQLISVEKVKGDPSKKEMKKENDEKSSSRSSGDKKNTSDRSSKTQASVKKEEKRSSEKSEKKESKDTKKIEGKDEKNDNGASGQTSESIKKSEEKKRISSKSPGHMVILDQTKGDHCRPSRRGRYEKIHGRSKEKERASLDKKRDKDYRRKEILPFEKMKEQRLREHLVRFERLRRAMELRRRREIAERERRERERIRIIREREERERLQRERERLEIERQKLERERMERERLERERIRIEQERRKEAERIAREREELRRQQQQLRYEQEKRNSLKRPRDVDHRRDDPYWSENKKLSLDTDARFGHGSDYSRQQNRFNDFDHRERGRFPESSAVQSSSFERRDRFVGQSEGKKARPTARREDPSFERYPKNFSDSRRNEPPPPRNELRESDRREVRGERDERRTVIIHDRPDITHPRHPREAGPNPSRPTSWKSEGSMSTDKRETRVERPERSGREVSGHSVRGAPPGNRSSASGYGSREGDRGVITDRGGGSQHYPEERHVVERHGRDTSGPRKEWHGPPSQGPSYHDTRRMGDGRAGAGMITQHSSNASPINRIVQISGNSMPRGSGSGFKPFKGGPPRRF

SEQ ID NO: 896423 - protein, 1248 aa, Homo sapiens
MSFSARTSLLLKTQDVARKWLTKRRENGGAADVAAVGRARPPSPHKGAHRPSGRGPLDRARRCRSLRQRARAAVIRVLAAAAGCARVADRGRGQRLIVRSAARRRRPPRPGWKLALLPPPCSPLAASAARCSSKMAAATGAVAASAASGQAEGKKITDLRVIDLKSELKRRNLDITGVKTVLISRLKQAIEEEGGDPDNIELTVSTDTPNKKPTKGKGKKHEADELSGDASVEDDAFIKDCELENQEAHEQDGNDELKDSEEFGENEEENVHSKELLSAEENKRAHELIEAEGIEDIEKEDIESQEIEAQEGEDDTFLTAQDGEEEENEKDIAGSGDGTQEVSKPLPSEGSLAEADHTAHEEMEAHTTVKEAEDDNISVTIQAEDAITLDFDGDDLLETGKNVKITDSEASKPKDGQDAIAQSPEKESKDYEMNANHKDGKKEDCVKGDPVEKEARESSKKAESGDKEKDTLKKGPSSTGASGQAKSSSKESKDSKTSSKDDKGSTSSTSGSSGSSTKNIWVSGLSSNTKAADLKNLFGKYGKVLSAKVVTNARSPGAKCYGIVTMSSSTEVSRCIAHLHRTELHGQLISVEKVSFPNCLQSKSNLMASSQLIAVNSEQGVEFAVIFNFYVFVVFTLLIFFLIVSKFSAISTLLIITKMKPYVQIVFLVRTFQVKGDPSKKEMKKENDEKSSSRSSGDKKNTSDRSSKTQASVKKEEKRSSEKSEKKESKDTKKIEGKDEKNDNGASGQTSESIKKSEEKKRISSKSPGHMVILDQTKGDHCRPSRRGRYEKIHGRSKEKERASLDKKRDKDYRRKEILPFEKMKEQRLREHLVRFERLRRAMELRRRREIAERERRERERIRIIREREERERLQRERERLEIERQKLERERMERERLERERIRIEQERRKEAERIAREREELRRQQQQLRYEQEKRNSLKRPRDVDHRRDDPYWSENKKLSLDTDARFGHGSDYSRQQNRFNDFDHRERGRFPESSAVQSSSFERRDRFVGQSEGKKARPTARREDPSFERYPKNFSDSRRNEPPPPRNELRESDRREVRGERDERRTVIIHDRPDITHPRHPREAGPNPSRPTSWKSEGSMSTDKRETRVERPERSGREVSGHSVRGAPPGNRSSASGYGSREGDRGVITDRGGGSQHYPEERHVVERHGRDTSGPRKEWHGPPSQGPSYHDTRRMGDGRAGAGMITQHSSNASPINRIVQISGNSMPRGSGSGFKPFKGGPPRRF

SEQ ID NO: 896424 - protein, 377 aa, Homo sapiens
MSFSARTSLLLKTQDVARKWLTKRRENGGAADVAAVGRARPPSPHKGAHRPSGRGPLDRARRCRSLRQRARAAVIRVLAAAAGCARVADRGRGQRLIVRSAARRRRPPRPGWKLALLPPPCSPLAASAARCSSKMAAATGAVAASAASGQAEGKKITDLRVIDLKSELKRRNLDITGVKTVLISRLKQAIEEEGGDPDNIELTVSTDTPNKKPTKGKGKKHEADELSGDASVEDDAFIKDCELENQEAHEQDGNDELKDSEEFGENEEENVHSKELLSAEENKRAHELIEAEGIEDIEKEDIESQEIEAQEGEDDTFLTAQDGEEEENEKALQRNLKTARHHLKMTKEVQVVLVVAVEAQLKISGLVDFHLIPKLLI

SEQ ID NO: 896425 - protein, 957 aa, Homo sapiens
MPLRESGKPLKDFEEIVDASVEDDAFIKDCELENQEAHEQDGNDELKDSEEFGENEEENVHSKELLSAEENKRAHELIEAEGIEDIEKEDIESQEIEAQEGEDDTFLTAQDGEEEENEKDIAGSGDGTQEVSKPLPSEGSLAEADHTAHEEMEAHTTVKEAEDDNISVTIQAEDAITLDFDGDDLLETGKNVKITDSEASKPKDGQDAIAQSPEKESKDYEMNANHKDGKKEDCVKGDPVEKEARESSKKAESGDKEKDTLKKGPSSTGASGQAKSSSKESKDSKTSSKDDKGSTSSTSGSSGSSTKNIWVSGLSSNTKAADLKNLFGKYGKVLSAKVVTNARSPGAKCYGIVTMSSSTEVSRCIAHLHRTELHGQLISVEKVKGDPSKKEMKKENDEKSSSRSSGDKKNTSDRSSKTQASVKKEEKRSSEKSEKKESKDTKKIEGKDEKNDNGASGQTSESIKKSEEKKRISSKSPGHMVILDQTKGDHCRPSRRGRYEKIHGRSKEKERASLDKKRDKDYRRKEILPFEKMKEQRLREHLVRFERLRRAMELRRRREIAERERRERERIRIIREREERERLQRERERLEIERQKLERERMERERLERERIRIEQERRKEAERIAREREELRRQQQQLRYEQEKRNSLKRPRDVDHRRDDPYWSENKKLSLDTDARFGHGSDYSRQQNRFNDFDHRERGRFPESSAVQSSSFERRDRFVGQSEGKKARPTARREDPSFERYPKNFSDSRRNEPPPPRNELRESDRREVRGERDERRTVIIHDRPDITHPRHPREAGPNPSRPTSWKSEGSMSTDKRETRVERPERSGREVSGHSVRGAPPGNRSSASGYGSREGDRGVITDRGGGSQHYPEERHVVERHGRDTSGPRKEWHGPPSQGPSYHDTRRMGDGRAGAGMITQHSSNASPINRIVQISGNSMPRGSGSGFKPFKGGPPRRF

SEQ ID NO: 896426 - protein, 1168 aa, Homo sapiens; identical to SEQ ID NO: 896421

SEQ ID NO: 896427 - protein, 1168 aa, Homo sapiens; identical to SEQ ID NO: 896421

SEQ ID NO: 896428 - protein, 715 aa, Homo sapiens
MSFSARTSLLLKTQDVARKWLTKRRENGGAADVAAVGRARPPSPHKGAHRPSGRGPLDRARRCRSLRQRARAAVIRVLAAAAGCARVADRGRGQRLIVRSAARRRRPPRPGWKLALLPPPCSPLAASAARCSSKMAAATGAVAASAASGQAEGKKITDLRVIDLKSELKRRNLDITGVKTVLISRLKQAIEEEGGDPDNIELTVSTDTPNKKPTKGKGKKHEADELSGDASVEDDAFIKDCELENQEAHEQDGNDELKDSEEFGENEEENVHSKELLSAEENKRAHELIEAEGIEDIEKEDIESQEIEAQEGEDDTFLTAQDGEEEENEKDIAGSGDGTQEVSKPLPSEGSLAEADHTAHEEMEAHTTVKEAEDDNISVTIQAEDAITLDFDGDDLLETGKNVKITDSEASKPKDGQDAIAQSPEKESKDYEMNANHKDGKKEDCVKGDPVEKEARESSKKAESGDKEKDTLKKGPSSTGASGQAKSSSKESKDSKTSSKDDKGSTSSTSGSSGSSTKNIWVSGLSSNTKAADLKNLFGKYGKVLSAKVVTNARSPGAKCYGIVTMSSSTEVSRCIAHLHRTELHGQLISVEKVKGDPSKKEMKKENDEKSSSRSSGDKKNTSDRSSKTQASVKKEEKRSSEKSEKKESKDTKKIEGKDEKNDNGASGQTSESIKKSEEKKRISSKSPGHMVILDQTKGDHCRPSRRGRYEKVSL

SEQ ID NO: 896429 - protein, 1117 aa, Homo sapiens
MSFSARTSLLLKTQDVARKWLTKRRENGGAADVAAVGRARPPSPHKGAHRPSGRGPLDRARRCRSLRQRARAAVIRVLAAAAGCARVADRGRGQRLIVRSAARRRRPPRPGWKLALLPPPCSPLAASAARCSSKMAAATGAVAASAASGQAEGKKITDLRVIDLKSELKRRNLDITGVKTVLISRLKQAIEEEGGDPDNIELTVSTDTPNKKPTKGKGKKHEADELSGDASVEDDAFIKDCELENQEAHEQDGNDELKDSEEFGENEEENVHSKELLSAEENKRAHELIEAEGIEDIEKEDIESQEIEAQEGEDDTFLTAQDGEEEENEKDIAGSGDGTQEVSKPLPSEGSLAEADHTAHEEMEAHTTVKEAEDDNISVTIQAEDAITLDFDGDDLLETGKNVKITDSEASKPKDGQDAIAQSPEKESKDYEMNANHKDGKKEDCVKGDPVEKEARESSKKAESGDKEKDTLKKGPSSTGASGQAKSSSKESKDSKTSSKDDKGSTSSTSGSSGSSTKNIWVSGLSSNTKAADLKNLFGKYGKVLSAKVVTNARSPGAKCYGIVTMSSSTEVSRCIAHLHRTELHGQLISVEKVKGDPSKKEMKKENDEKSSSRSSGDKKNTSDRSSKTQASVKKEEKRSSEKSEKKESKDTKKIEGKDEKNDNGASGQTSESIKKSEEKKRISSKSPGHMVILDQTKGDHCRPSRRGRYEKIHGRSKEKERASLDKKRDKDYRRKEILPFEKMKEQRLREHLVRFERLRRAMELRSWFFILCCLKERRKEAERIAREREELRRQQQQLRYEQEKRNSLKRPRDVDHRRDDPYWSENKKLSLDTDARFGHGSDYSRQQNRFNDFDHRERGRFPESSAVQSSSFERRDRFVGQSEGKKARPTARREDPSFERYPKNFSDSRRNEPPPPRNELRESDRREVRGERDERRTVIIHDRPDITHPRHPREAGPNPSRPTSWKSEGSMSTDKRETRVERPERSGREVSGHSVRGAPPGNRSSASGYGSREGDRGVITDRGGGSQHYPEERHVVERHGRDTSGPRKEWHGPPSQGPSYHDTRRMGDGRAGAGMITQHSSNASPINRIVQISGNSMPRGSGSGFKPFKGGPPRRF

SEQ ID NO: 896430 - protein, 1133 aa, Homo sapiens
MSFSARTSLLLKTQDVARKWLTKRRENGGAADVAAVGRARPPSPHKGAHRPSGRGPLDRARRCRSLRQRARAAVIRVLAAAAGCARVADRGRGQRLIVRSAARRRRPPRPGWKLALLPPPCSPLAASAARCSSKMAAATGAVAASAASGQAEGKKITDLRVIDLKSELKRRNLDITGVKTVLISRLKQAIEEEGGDPDNIELTVSTDTPNKKPTKGKGKKHEADELSGDASVEDDAFIKDCELENQEAHEQDGNDELKDSEEFGENEEENVHSKELLSAEENKRAHELIEAEGIEDIEKEDIESQEIEAQEGEDDTFLTAQDGEEEENEKDIAGSGDGTQEVSKPLPSEGSLAEADHTAHEEMEAHTTVKEAEDDNISVTIQAEDAITLDFDGDDLLETGKNVKITDSEASKPKDGQDAIAQSPEKESKDYEMNANHKDGKKEDCVKGDPVEKEARESSKKAESGDKEKDTLKKGPSSTGASGQAKSSSKESKDSKTSSKDDKGSTSSTSGSSGSSTKNIWVSGLSSNTKAADLKNLFGKYGKVLSAKVVTNARSPGAKCYGIVTMSSSTEVSRCIAHLHRTELHGQLISVEKVKGDPSKKEMKKENDEKSSSRSSGDKKNTSDRSSKTQASVKKEEKRSSEKSEKKESKDTKKIEGKDEKNDNGASGQTSESIKKSEEKKRISSKSPGHMVILDQTKGDHCRPSRRGRYEKIHGRSKEKERASLDKKRDKDYRRKEILPFEKMKEQRLREHLVRFERLRRAMELRRRREIAERERRERERIRIIREREERERLQRERERLEIERQKLERERMERERLERERIRIEQERRKEAERIAREREELRRQQQQLRYEQEKRNSLKRPRDVDHRRDDPYWSENKKLSLDTDARFGHGSDYSRQQNRFNDFDHRERGRFPESSAVQSSSFERRDRFVGQSEGKKARPTARREDPSFERYPKNFSDSRRNEPPPPRNELRESDRREVRGERDERRTVIIHDRPDITHPRHPREAGPNPSRPTSWKSEGSMSTDKRETRVERPERSGREVSGHSVRGAPPGNRSSASGYGSREGDRGVITDRGGGSQHYPEERHVVERHGRDTSGPRKEWHGPPSQGPSYHDTRRMGDGRAGAGMITQHSS

SEQ ID NO: 896431 - protein, 799 aa, Homo sapiens
MSFSARTSLLLKTQDVARKWLTKRRENGGAADVAAVGRARPPSPHKGAHRPSGRGPLDRARRCRSLRQRARAAVIRVLAAAAGCARVADRGRGQRLIVRSAARRRRPPRPGWKLALLPPPCSPLAASAARCSSKMAAATGAVAASAASGQAEGKKITDLRVIDLKSELKRRNLDITGVKTVLISRLKQAIEEEGGDPDNIELTVSTDTPNKKPTKGKGKKHEADELSGDASVEDDAFIKDCELENQEAHEQDGNDELKDSEEFGENEEENVHSKELLSAEENKRAHELIEAEGIEDIEKEDIESQEIEAQEGEDDTFLTAQDGEEEENEKDIAGSGDGTQEVSKPLPSEGSLAEADHTAHEEMEAHTTVKEAEDDNISVTIQAEDAITLDFDGDDLLETGKNVKITDSEASKPKDGQDAIAQSPEKESKDYEMNANHKDGKKEDCVKGDPVEKEARESSKKAESGDKEKDTLKKGPSSTGASGQAKSSSKESKDSKTSSKDDKGSTSSTSGSSGSSTKNIWVSGLSSNTKAADLKNLFGKYGKVLSAKVVTNARSPGAKCYGIVTMSSSTEVSRCIAHLHRTELHGQLISVEKVKGDPSKKEMKKENDEKSSSRSSGDKKNTSDRSSKTQASVKKEEKRSSEKSEKKESKDTKKIEGKDEKNDNGASGQTSESIKKSEEKKRISSKSPGHMVILDQTKGDHCRPSRRGRYEKIHGRSKEKERASLDKKRDKDYRRKEILPFEKMKEQRLREHLVRFERLRRAMELRRNVVRKLNGLLEKERNSEGNNSSFVMNKKKGIP

SEQ ID NO: 896432 - protein, 764 aa, Homo sapiens
MSFSARTSLLLKTQDVARKWLTKRRENGGAADVAAVGRARPPSPHKGAHRPSGRGPLDRARRCRSLRQRARAAVIRVLAAAAGCARVADRGRGQRLIVRSAARRRRPPRPGWKLALLPPPCSPLAASAARCSSKMAAATGAVAASAASGQAEGKKITDLRVIDLKSELKRRNLDITGVKTVLISRLKQAIEEEGGDPDNIELTVSTDTPNKKPTKGKGKKHEADELSGDASVEDDAFIKDCELENQEAHEQDGNDELKDSEEFGENEEENVHSKELLSAEENKRAHELIEAEGIEDIEKEDIESQEIEAQEGEDDTFLTAQDGEEEENEKDIAGSGDGTQEVSKPLPSEGSLAEADHTAHEEMEAHTTVKEAEDDNISVTIQAEDAITLDFDGDDLLETGKNVKITDSEASKPKDGQDAIAQSPEKESKDYEMNANHKDGKKEDCVKGDPVEKEARESSKKAESGDKEKDTLKKGPSSTGASGQAKSSSKESKDSKTSSKDDKGSTSSTSGSSGSSTKNIWVSGLSSNTKAADLKNLFGKYGKVLSAKVVTNARSPGAKCYGIVTMSSSTEVSRCIAHLHRTELHGQLISVEKVKGDPSKKEMKKENDEKSSSRSSGDKKNTSDRSSKTQASVKKEEKRSSEKSEKKESKDTKKIEGKDEKNDNGASGQTSESIKKSEEKKRISSKSPGHMVILDQTKGDHCRPSRRGRYEKIHGRSKEKERASLDKKRDKDYRRKEILPFEKMKEQNDEKSSSRSSGDKKKYE

SEQ ID NO: 896433 - protein, 703 aa, Homo sapiens
MSFSARTSLLLKTQDVARKWLTKRRENGGAADVAAVGRARPPSPHKGAHRPSGRGPLDRARRCRSLRQRARAAVIRVLAAAAGCARVADRGRGQRLIVRSAARRRRPPRPGWKLALLPPPCSPLAASAARCSSKMAAATGAVAASAASGQAEGKKITDLRVIDLKSELKRRNLDITGVKTVLISRLKQAIEEEGGDPDNIELTVSTDTPNKKPTKGKGKKHEADELSGDASVEDDAFIKDCELENQEAHEQDGNDELKDSEEFGENEEENVHSKELLSAEENKRAHELIEAEGIEDIEKEDIESQEIEAQEGEDDTFLTAQDGEEEENEKDIAGSGDGTQEVSKPLPSEGSLAEADHTAHEEMEAHTTVKEAEDDNISVTIQAEDAITLDFDGDDLLETGKNVKITDSEASKPKDGQDAIAQSPEKESKDYEMNANHKDGKKEDCVKGDPVEKEARESSKKAESGDKEKDTLKKGPSSTGASGQAKSSSKESKDSKTSSKDDKGSTSSTSGSSGSSTKNIWVSGLSSNTKAADLKNLFGKYGKVLSAKVVTNARSPGAKCYGIVTMSSSTEVSRCIAHLHRTELHGQLISVEKVKGDPSKKEMKKENDEKSSSRSSGDKKNTSDRSSKTQASVKKEEKRSSEKSEKKESKDTKKIEGKDEKNDNGASGQTSESIKKSEEKKRIIQEVIPRGPSKGRGGEQAAD

SEQ ID NO: 896434 - protein, 171 aa, Homo sapiens
MPTTNRESSILACRTELRSWKSEGSMSTDKRETRVERPERSGREVSGHSVRGAPPGNRSSASGYGSREGDRGVITDRGGGSQHYPEERHVVERHGRDTSGPRKEWHGPPSQGPSYHDTRRMGDGRAGAGMITQHSSNASPINRIVQISGNSMPRGSGSGFKPFKGGPPRRF

SEQ ID NO: 896435 - protein, 628 aa, Homo sapiens
MSFSARTSLLLKTQDVARKWLTKRRENGGAADVAAVGRARPPSPHKGAHRPSGRGPLDRARRCRSLRQRARAAVIRVLAAAAGCARVADRGRGQRLIVRSAARRRRPPRPGWKLALLPPPCSPLAASAARCSSKMAAATGAVAASAASGQAEGKKITDLRVIDLKSELKRRNLDITGVKTVLISRLKQAIEEEGGDPDNIELTVSTDTPNKKPTKGKGKKHEADELSGDASVEDDAFIKDCELENQEAHEQDGNDELKDSEEFGENEEENVHSKELLSAEENKRAHELIEAEGIEDIEKEDIESQEIEAQEGEDDTFLTAQDGEEEENEKDIAGSGDGTQEVSKPLPSEGSLAEADHTAHEEMEAHTTVKEAEDDNISVTIQAEDAITLDFDGDDLLETGKNVKITDSEASKPKDGQDAIAQSPEKESKDYEMNANHKDGKKEDCVKGDPVEKEARESSKKAESGDKEKDTLKKGPSSTGASGQAKSSSKESKDSKTSSKDDKGSTSSTSGSSGSSTKNIWVSGLSSNTKAADLKNLFGKYGKVLSAKVVTNARSPGAKCYGIVTMSSSTEVSRCIAHLHRTELHGQLISVEKVKGDPSKKEMKKENDEKSSSRSSGDKKNTSDRSSK

SEQ ID NO: 896436 - protein, 503 aa, Homo sapiens
MSFSARTSLLLKTQDVARKWLTKRRENGGAADVAAVGRARPPSPHKGAHRPSGRGPLDRARRCRSLRQRARAAVIRVLAAAAGCARVADRGRGQRLIVRSAARRRRPPRPGWKLALLPPPCSPLAASAARCSSKMAAATGAVAASAASGQAEGKKITDLRVIDLKSELKRRNLDITGVKTVLISRLKQAIEEEGGDPDNIELTVSTDTPNKKPTKGKGKKHEADELSGDASVEDDAFIKDCELENQEAHEQDGNDELKDSEEFGENEEENVHSKELLSAEENKRAHELIEAEGIEDIEKEDIESQEIEAQEGEDDTFLTAQDGEEEENEKDIAGSGDGTQEVSKPLPSEGSLAEADHTAHEEMEAHTTVKEAEDDNISVTIQAEDAITLDFDGDDLLETGKNVKITDSEASKPKDGQDAIAQSPEKESKDYEMNANHKDGKKEDCVKGDPVEKEARESSKKAESGDKEKDTLKKGPSSTGASGQAKRFVFLCQFFTILNSSIQ

SEQ ID NO: 896437 - protein, 290 aa, Homo sapiens
MELRRRREIAERERRERERIRIIREREERERLQRERERLEIERQKLERERMERERLERERIRIEQERRKEAERIAREREELRRQQQQLRYEQEKRNSLKRPRDVDHRRDDPYWSENKKLSLDTDARFGHGSDYSRQQNRFNDFDHRERGRFPESSAVQSSSFERRDRFVGQSEGKKARPTARREDPSFERYPKNFSDSRRNEPPPPRNELRESDRREVRGERDERRTVIIHDRPDITHPRHPREAGPNPSRPTSWKSEGSMSTDKRETRVEGPKIWERSSRAVWEGPPRE

SEQ ID NO: 896438 - protein, 1092 aa, Homo sapiens
MSFSARTSLLLKTQDVARKWLTKRRENGGAADVAAVGRARPPSPHKGAHRPSGRGPLDRARRCRSLRQRARAAVIRVLAAAAGCARVADRGRGQRLIVRSAARRRRPPRPGWKLALLPPPCSPLAASAARCSSKMAAATGAVAASAASGQAEGKKITDLRVIDLKSELKRRNLDITGVKTVLISRLKQAIEEEGGDPDNIELTVSTDTPNKKPTKGKGKKHEADELSGDASVEDDAFIKDCELENQEAHEQDGNDELKDSEEFGENEEENVHSKELLSAEENKRAHELIEAEGIEDIEKEDIESQEIEAQEGEDDTFLTAQDGEEEENEKDSEASKPKDGQDAIAQSPEKESKDYEMNANHKDGKKEDCVKGDPVEKEARESSKKAESGDKEKDTLKKGPSSTGASGQAKSSSKESKDSKTSSKDDKGSTSSTSGSSGSSTKNIWVSGLSSNTKAADLKNLFGKYGKVLSAKVVTNARSPGAKCYGIVTMSSSTEVSRCIAHLHRTELHGQLISVEKVKGDPSKKEMKKENDEKSSSRSSGDKKNTSDRSSKTQASVKKEEKRSSEKSEKKESKDTKKIEGKDEKNDNGASGQTSESIKKSEEKKRISSKSPGHMVILDQTKGDHCRPSRRGRYEKIHGRSKEKERASLDKKRDKDYRRKEILPFEKMKEQRLREHLVRFERLRRAMELRRRREIAERERRERERIRIIREREERERLQRERERLEIERQKLERERMERERLERERIRIEQERRKEAERIAREREELRRQQQQLRYEQEKRNSLKRPRDVDHRRDDPYWSENKKLSLDTDARFGHGSDYSRQQNRFNDFDHRERGRFPESSAVQSSSFERRDRFVGQSEGKKARPTARREDPSFERYPKNFSDSRRNEPPPPRNELRESDRREVRGERDERRTVIIHDRPDITHPRHPREAGPNPSRPTSWKSEGSMSTDKRETRVERPERSGREVSGHSVRGAPPGNRSSASGYGSREGDRGVITDRGGGSQHYPEERHVVERHGRDTSGPRKEWHGPPSQGPSYHDTRRMGDGRAGAGMITQHSSNASPINRIVQISGNSMPRGSGSGFKPFKGGPPRRF

SEQ ID NO: 896439 - protein, 1102 aa, Homo sapiens
MSFSARTSLLLKTQDVARKWLTKRRENGGAADVAAVGRARPPSPHKGAHRPSGRGPLDRARRCRSLRQRARAAVIRVLAAAAGCARVADRGRGQRLIVRSAARRRRPPRPGWKLALLPPPCSPLAASAARCSSKMAAATGAVAASAASGQAEGKKITDLRVIDLKSELKRRNLDITGVKTVLISRLKQAIEEEGGDPDNIELTVSTDTPNKKPTKGKGKKHEADELSGDASVEDDAFIKEIEAQEGEDDTFLTAQDGEEEENEKDIAGSGDGTQEVSKPLPSEGSLAEADHTAHEEMEAHTTVKEAEDDNISVTIQAEDAITLDFDGDDLLETGKNVKITDSEASKPKDGQDAIAQSPEKESKDYEMNANHKDGKKEDCVKGDPVEKEARESSKKAESGDKEKDTLKKGPSSTGASGQAKSSSKESKDSKTSSKDDKGSTSSTSGSSGSSTKNIWVSGLSSNTKAADLKNLFGKYGKVLSAKVVTNARSPGAKCYGIVTMSSSTEVSRCIAHLHRTELHGQLISVEKVKGDPSKKEMKKENDEKSSSRSSGDKKNTSDRSSKTQASVKKEEKRSSEKSEKKESKDTKKIEGKDEKNDNGASGQTSESIKKSEEKKRISSKSPGHMVILDQTKGDHCRPSRRGRYEKIHGRSKEKERASLDKKRDKDYRRKEILPFEKMKEQRLREHLVRFERLRRAMELRRRREIAERERRERERIRIIREREERERLQRERERLEIERQKLERERMERERLERERIRIEQERRKEAERIAREREELRRQQQQLRYEQEKRNSLKRPRDVDHRRDDPYWSENKKLSLDTDARFGHGSDYSRQQNRFNDFDHRERGRFPESSAVQSSSFERRDRFVGQSEGKKARPTARREDPSFERYPKNFSDSRRNEPPPPRNELRESDRREVRGERDERRTVIIHDRPDITHPRHPREAGPNPSRPTSWKSEGSMSTDKRETRVERPERSGREVSGHSVRGAPPGNRSSASGYGSREGDRGVITDRGGGSQHYPEERHVVERHGRDTSGPRKEWHGPPSQGPSYHDTRRMGDGRAGAGMITQHSSNASPINRIVQISGNSMPRGSGSGFKPFKGGPPRRF

SEQ ID NO: 896440 - protein, 1118 aa, Homo sapiens
MSFSARTSLLLKTQDVARKWLTKRRENGGAADVAAVGRARPPSPHKGAHRPSGRGPLDRARRCRSLRQRARAAVIRVLAAAAGCARVADRGRGQRLIVRSAARRRRPPRPGWKLALLPPPCSPLAASAARCSSKMAAATGAVAASAASGQAEGKKITDLRVIDLKSELKRRNLDITGVKTVLISRLKQAIEEEGGDPDNIELTVSTDTPNKKPTKGKGKKHEADELSGDASVEDDAFIKDCELENQEAHEQDGNDELKDSEEFGENEEENVHSKELLSAEENKRAHELIEAEGIEDIEKEDIESQEIEAQEGEDDTFLTAQDGEEEENEKDIAGSGDGTQEVSKPLPSEGSLAEADHTAHEEMEAHTTVKEAEDDNISVTIQAEDAITLDFDGDDLLETGKNVKITDSEASKPKDGQDAIAQSPEKESKDYEMNANHKDGKKEDCVKGDPVEKEARESSKKAESGDKEKDTLKKGPSSTGASGQAKSSSKESKDSKTSSKDDKGSTSSTSGSSGSSTKNIWVSGLSSNTKAADLKNLFGKYGKVKGDPSKKEMKKENDEKSSSRSSGDKKNTSDRSSKTQASVKKEEKRSSEKSEKKESKDTKKIEGKDEKNDNGASGQTSESIKKSEEKKRISSKSPGHMVILDQTKGDHCRPSRRGRYEKIHGRSKEKERASLDKKRDKDYRRKEILPFEKMKEQRLREHLVRFERLRRAMELRRRREIAERERRERERIRIIREREERERLQRERERLEIERQKLERERMERERLERERIRIEQERRKEAERIAREREELRRQQQQLRYEQEKRNSLKRPRDVDHRRDDPYWSENKKLSLDTDARFGHGSDYSRQQNRFNDFDHRERGRFPESSAVQSSSFERRDRFVGQSEGKKARPTARREDPSFERYPKNFSDSRRNEPPPPRNELRESDRREVRGERDERRTVIIHDRPDITHPRHPREAGPNPSRPTSWKSEGSMSTDKRETRVERPERSGREVSGHSVRGAPPGNRSSASGYGSREGDRGVITDRGGGSQHYPEERHVVERHGRDTSGPRKEWHGPPSQGPSYHDTRRMGDGRAGAGMITQHSSNASPINRIVQISGNSMPRGSGSGFKPFKGGPPRRF

SEQ ID NO: 896441 - protein, 1084 aa, Homo sapiens
MSFSARTSLLLKTQDVARKWLTKRRENGGAADVAAVGRARPPSPHKGAHRPSGRGPLDRARRCRSLRQRARAAVIRVLAAAAGCARVADRGRGQRLIVRSAARRRRPPRPGWKLALLPPPCSPLAASAARCSSKMAAATGAVAASAASGQAEGKKITDLRVIDLKSELKRRNLDITGVKTVLISRLKQAIEEEGGDPDNIELTVSTDTPNKKPTKGKGKKHEADELSGDASVEDDAFIKEIEAQEGEDDTFLTAQDGEEEENEKEGSLAEADHTAHEEMEAHTTVKEAEDDNISVTIQAEDAITLDFDGDDLLETGKNVKITDSEASKPKDGQDAIAQSPEKESKDYEMNANHKDGKKEDCVKGDPVEKEARESSKKAESGDKEKDTLKKGPSSTGASGQAKSSSKESKDSKTSSKDDKGSTSSTSGSSGSSTKNIWVSGLSSNTKAADLKNLFGKYGKVLSAKVVTNARSPGAKCYGIVTMSSSTEVSRCIAHLHRTELHGQLISVEKVKGDPSKKEMKKENDEKSSSRSSGDKKNTSDRSSKTQASVKKEEKRSSEKSEKKESKDTKKIEGKDEKNDNGASGQTSESIKKSEEKKRISSKSPGHMVILDQTKGDHCRPSRRGRYEKIHGRSKEKERASLDKKRDKDYRRKEILPFEKMKEQRLREHLVRFERLRRAMELRRRREIAERERRERERIRIIREREERERLQRERERLEIERQKLERERMERERLERERIRIEQERRKEAERIAREREELRRQQQQLRYEQEKRNSLKRPRDVDHRRDDPYWSENKKLSLDTDARFGHGSDYSRQQNRFNDFDHRERGRFPESSAVQSSSFERRDRFVGQSEGKKARPTARREDPSFERYPKNFSDSRRNEPPPPRNELRESDRREVRGERDERRTVIIHDRPDITHPRHPREAGPNPSRPTSWKSEGSMSTDKRETRVERPERSGREVSGHSVRGAPPGNRSSASGYGSREGDRGVITDRGGGSQHYPEERHVVERHGRDTSGPRKEWHGPPSQGPSYHDTRRMGDGRAGAGMITQHSSNASPINRIVQISGNSMPRGSGSGFKPFKGGPPRRF

SEQ ID NO: 896442 - protein, 603 aa, Homo sapiens
MSSSTEVSRCIAHLHRTELHGQLISVEKVKGDPSKKEMKKENDEKSSSRSSGDKKNTSDRSSKTQASVKKEEKRSSEKSEKKESKDTKKIEGKDEKNDNGASGQTSESIKKSEEKKRISSKSPGHMVILDQTKGDHCRPSRRGRYEKIHGRSKEKERASLDKKRDKDYRRKEILPFEKMKEQRLREHLVRFERLRRAMELRRRREIAERERRERERIRIIREREERERLQRERERLEIERQKLERERMERERLERERIRIEQERRKEAERIAREREELRRQQQQLRYEQEKRNSLKRPRDVDHRRDDPYWSENKKLSLDTDARFGHGSDYSRQQNRFNDFDHRERGRFPESSAVQSSSFERRDRFVGQSEGKKARPTARREDPSFERYPKNFSDSRRNEPPPPRNELRESDRREVRGERDERRTVIIHDRPDITHPRHPREAGPNPSRPTSWKSEGSMSTDKRETRVERPERSGREVSGHSVRGAPPGNRSSASGYGSREGDRGVITDRGGGSQHYPEERHVVERHGRDTSGPRKEWHGPPSQGPSYHDTRRMGDGRAGAGMITQHSSNASPINRIVQISGNSMPRGSGSGFKPFKGGPPRRF

SEQ ID NO: 896443 - protein, 1141 aa, Homo sapiens
MSFSARTSLLLKTQDVARKWLTKRRENGGAADVAAVGRARPPSPHKGAHRPSGRGPLDRARRCRSLRQRARAAVIRVLAAAAGCARVADRGRGQRLIVRSAARRRRPPRPGWKLALLPPPCSPLAASAARCSSKMAAATGAVAASAASGQAEGKKITDLRVIDLKSELKRRNLDITGVKTVLISRLKQAIEEEGGDPDNIELTVSTDTPNKKPTKGKGKKHEADELSGDASVEDDAFIKDCELENQEAHEQDGNDELKDSEEFGENEEENVHSKELLSAEENKRAHELIEAEGIEDIEKEDIESQEIEAQEGEDDTFLTAQDGEEEENEKDIAGSGDGTQEVSKPLPSEGSLAEADHTAHEEMEAHTTVKEAEDDNISVTIQAEDAITLDFDGDDLLETGKNVKITDSEASKPKDGQDAIAQSPEKESKDYEMNANHKDGKKEDCVKGDPVEKEARESSKKAESGDKEKDTLKKGPSSTGASGQAKSSSKESKDSKTSSKDDKGSTSSTSGSSGSSTKNIWVSGLSSNTKAADLKNLFGKYGKVLSAKVVTNARSPGAKCYGIVTMSSSTEVSRCIAHLHRTELHGQLISVEKVKGDPSKKEMKKENDEKSSSRSSGDKKNTSDRSSKTQASVKKEEKRSSEKSEKKESKDTKKIEGSKSPGHMVILDQTKGDHCRPSRRGRYEKIHGRSKEKERASLDKKRDKDYRRKEILPFEKMKEQRLREHLVRFERLRRAMELRRRREIAERERRERERIRIIREREERERLQRERERLEIERQKLERERMERERLERERIRIEQERRKEAERIAREREELRRQQQQLRYEQEKRNSLKRPRDVDHRRDDPYWSENKKLSLDTDARFGHGSDYSRQQNRFNDFDHRERGRFPESSAVQSSSFERRDRFVGQSEGKKARPTARREDPSFERYPKNFSDSRRNEPPPPRNELRESDRREVRGERDERRTVIIHDRPDITHPRHPREAGPNPSRPTSWKSEGSMSTDKRETRVERPERSGREVSGHSVRGAPPGNRSSASGYGSREGDRGVITDRGGGSQHYPEERHVVERHGRDTSGPRKEWHGPPSQGPSYHDTRRMGDGRAGAGMITQHSSNASPINRIVQISGNSMPRGSGSGFKPFKGGPPRRF

SEQ ID NO: 896444 - protein, 604 aa, Homo sapiens
MSFSARTSLLLKTQDVARKWLTKRRENGGAADVAAVGRARPPSPHKGAHRPSGRGPLDRARRCRSLRQRARAAVIRVLAAAAGCARVADRGRGQRLIVRSAARRRRPPRPGWKLALLPPPCSPLAASAARCSSKMAAATGAVAASAASGQAEGKKITDLRVIDLKSELKRRNLDITGVKTVLISRLKQAIEEEGGDPDNIELTVSTDTPNKKPTKGKGKKHEADELSGDASVEDDAFIKDCELENQEAHEQDGNDELKDSEEFGENEEENVHSKELLSAEENKRAHELIEAEGIEDIEKEDIESQEIEAQEGEDDTFLTAQDGEEEENEKDIAGSGDGTQEVSKPLPSEGSLAEADHTAHEEMEAHTTVKEAEDDNISVTIQAEDAITLDFDGDDLLETGKNVKITDSEASKPKDGQDAIAQSPEKESKDYEMNANHKDGKKEDCVKGDPVEKEARESSKKAESGDKEKDTLKKGPSSTGASGQAKSSSKESKDSKTSSKDDKGSTSSTSGSSGSSTKNIWVSGLSSNTKAADLKNLFGKYGKVLSAKVVTNARSPGAKCYGIVTMSSSTEVSRCIAHLHRTELHGQLISVEKVSFPNCLSKQV

SEQ ID NO: 896445 - protein, 503 aa, Homo sapiens
DLAGITGPRLTCKKKKRISSKSPGHMVILDQTKGDHCRPSRRGRYEKIHGRSKEKERASLDKKRDKDYRRKEILPFEKMKEQRLREHLVRFERLRRAMELRRRREIAERERRERERIRIIREREERERLQRERERLEIERQKLERERMERERLERERIRIEQERRKEAERIAREREELRRQQQQLRYEQEKRNSLKRPRDVDHRRDDPYWSENKKLSLDTDARFGHGSDYSRQQNRFNDFDHRERGRFPESSAVQSSSFERRDRFVGQSEGKKARPTARREDPSFERYPKNFSDSRRNEPPPPRNELRESDRREVRGERDERRTVIIHDRPDITHPRHPREAGPNPSRPTSWKSEGSMSTDKRETRVERPERSGREVSGHSVRGAPPGNRSSASGYGSREGDRGVITDRGGGSQHYPEERHVVERHGRDTSGPRKEWHGPPSQGPSYHDTRRMGDGRAGAGMITQHSSNASPINRIVQISGNSMPRGSGSGFKPFKGGPPRRF

SEQ ID NO: 896446 - protein, 406 aa, Homo sapiens
MELRRRREIAERERRERERIRIIREREERERLQRERERLEIERQKLERERMERERLERERIRIEQERRKEAERIAREREELRRQQQQLRYEQEKRNSLKRPRDVDHRRDDPYWSENKKLSLDTDARFGHGSDYSRQQNRFNDFDHRERGRFPESSAVQSSSFERRDRFVGQSEGKKARPTARREDPSFERYPKNFSDSRRNEPPPPRNELRESDRREVRGERDERRTVIIHDRPDITHPRHPREAGPNPSRPTSWKSEGSMSTDKRETRVERPERSGREVSGHSVRGAPPGNRSSASGYGSREGDRGVITDRGGGSQHYPEERHVVERHGRDTSGPRKEWHGPPSQGPSYHDTRRMGDGRAGAGMITQHSSNASPINRIVQISGNSMPRGSGSGFKPFKGGPPRRF

SEQ ID NO: 896447 - protein, 194 aa, Homo sapiens
AVLDDPFTVLWRIATYEMIEVVKTQASVKKEEKRSSEKSEKKESKDTKKIEGKDEKNDNGASGQTSESIKKSEEKKRISSKSPGHMVILDQTKGDHCRPSRRGRYEKIHGRSKEKERASLDKKRDKDYRRKEILPFEKMKEQRLREHLVRFERLRRAMELRRNVVRKLNGLLEKERNSEGNNSSFVMNKKKGIP

SEQ ID NO: 896448 - protein, 628 aa, Homo sapiens; identical to SEQ ID NO: 896435

SEQ ID NO: 896449 - protein, 605 aa, Homo sapiens
MSFSARTSLLLKTQDVARKWLTKRRENGGAADVAAVGRARPPSPHKGAHRPSGRGPLDRARRCRSLRQRARAAVIRVLAAAAGCARVADRGRGQRLIVRSAARRRRPPRPGWKLALLPPPCSPLAASAARCSSKMAAATGAVAASAASGQAEGKKITDLRVIDLKSELKRRNLDITGVKTVLISRLKQAIEEEGGDPDNIELTVSTDTPNKKPTKGKGKKHEADELSGDASVEDDAFIKDCELENQEAHEQDGNDELKDSEEFGENEEENVHSKELLSAEENKRAHELIEAEGIEDIEKEDIESQEIEAQEGEDDTFLTAQDGEEEENEKDIAGSGDGTQEVSKPLPSEGSLAEADHTAHEEMEAHTTVKEAEDDNISVTIQAEDAITLDFDGDDLLETGKNVKITDSEASKPKDGQDAIAQSPEKESKDYEMNANHKDGKKEDCVKGDPVEKEARESSKKAESGDKEKDTLKKGPSSTGASGQAKSSSKESKDSKTSSKDDKGSTSSTSGSSGSSTKNIWVSGLSSNTKAADLKNLFGKYGKVLSAKVVTNARSPGAKCYGIVTMSSSTEVSRCIAHLHRTELHGQLISVEKKVIPLRKKCQRP

SEQ ID NO: 896450 - protein, 183 aa, Homo sapiens
MANEAYPCPCDIGHRLEYGGLGREVQVEHIKAYVTKSPVDAGKAVIVIQDIFGWQLPNTRYIADMISGNGYTTIVPDFFVGQEPWDPSGDWSIFPEWLKTRNAQKIDREISAILKYLKQQCHAQKIGIVGFCWGGTAVHHLMMKYSEFRAGVSVYGKSALCIFTPCRREGWKSDNNHKPPHPV

SEQ ID NO: 896451 - protein, 245 aa, Homo sapiens
MANEAYPCPCDIGHRLEYGGLGREVQVEHIKAYVTKSPVDAGKAVIVIQDIFGWQLPNTRYIADMISGNGYTTIVPDFFVGQEPWDPSGDWSIFPEWLKTRNAQKIDREISAILKYLKQQCHAQKIGIVGFCWGGTAVHHLMMKYSEFRAGVSVYGIVKDSEDIYNLKNPTLFIFAENDVVIPLKDVSLLTQKLKEHCKVEYQIKTFSGQTHGFVHRKREDCSPADKPYIDEARRNLIEWLNKYM

SEQ ID NO: 896452 - protein, 245 aa, Homo sapiens; identical to SEQ ID NO: 896451

SEQ ID NO: 896453 - protein, 227 aa, Homo sapiens
MANEAYPCPCDIGHRLEYGGLGREVQVEHIKAYVTKSPVDAGKAVIVIQDIFGWQLPNTRYIADMISGNGYTTIVPDFFVGQEPWDPSGDWSIFPEWLKTRNAQKIDREISAILKYLKQQCHAQMKYSEFRAGVSVYGIVKDSEDIYNLKNPTLFIFAENDVVIPLKDVSLLTQKLKEHCKVEYQIKTFSGQTHGFVHRKREDCSPADKPYIDEARRNLIEWLNKYM

SEQ ID NO: 896454 - protein, 245 aa, Homo sapiens; identical to SEQ ID NO: 896451

SEQ ID NO: 896455 - protein, 245 aa, Homo sapiens; identical to SEQ ID NO: 896451

SEQ ID NO: 896456 - protein, 191 aa, Homo sapiens
MANEAYPCPCDIGHRLEYGGLGREVQVEHIKAYVTKSPVDAGKAVIVIQDIFGWQLPNTRYIADMISGNGYTTIVPDFFVGQEPWDPSGDWSIFPEWLKTRNAQKIDREISAILKYLKQQCHAQKIGIVGFCWGGTAVHHLMMKYSEFRAGVSVYGIVKDSEDIYNLKNPTLFIFAENDVVIPLKDPCSWL

SEQ ID NO: 896457 - protein, 115 aa, Homo sapiens
DGVLLCCPELECNGMILAHCNLHLPGSSHSPASATQESEEENHLNLEAEVAVSRGCATALQPGQQRETLSQKKKNLQLFKDQLTGQVWPFLVFEHIIESDKCCKAMKNMNYKRVD

SEQ ID NO: 896458 - protein, 105 aa, Homo sapiens
GSELQEDSNSLKSGVKNAAIQPPFQGKPEMKWAVGFFLFFLSFFGDKVSLQPGQQRETLSQKKKNLQLFKDQLTGQVWPFLVFEHIIESDKCCKAMKNMNYKRVD

SEQ ID NO: 896459 - protein, 68 aa, Homo sapiens
TQAHTSPGPAPLNSRVCSDYGKEGLCRVHGCFAMHFKDIVEITPYANLRSFWPFSTEEPFHHAVKYSL

SEQ ID NO: 896460 - protein, 268 aa, Homo sapiens
MAVFADLDLRAGSDLKALRGLVETAAHLGYSVVAINHIVDFKEKKQEIEKPVAVSELFTTLPIVQGKSRPIKILTRLTIIVSDPSHCNVLRATSSRARLYDVVAVFPKTEKLFHIACTHLDVDLVCITVTEKLPFYFKRPPINVAIDRGLAFELVYSPAIKDSTMRRYTISSALNLMQICKGKNVIISSAAERPLEIRGPYDVANLGLLFGLSESDAKAAVSTNCRAALLHGETRKTAFGIISTVKKPRPSEGDEDCLPASKKAKCEG

SEQ ID NO: 896461 - protein, 268 aa, Homo sapiens; identical to SEQ ID NO: 896460

SEQ ID NO: 896462 - protein, 268 aa, Homo sapiens; identical to SEQ ID NO: 896460

SEQ ID NO: 896463 - protein, 268 aa, Homo sapiens; identical to SEQ ID NO: 896460

SEQ ID NO: 896464 - protein, 322 aa, Homo sapiens
MAVFADLDLRAGSDLKALRGLVETAAHLGYSVVAINHIVDFKEKKQEIEKPVAVSELFTTLPIVQGKSRPIKILTRLTIIVSDPSHCNVLRATSSRARLYDVVAVFPKTEKLFHIACTHLDVDLVCITVTEKLPFYFKRPPINVAIDRGLAFELVYSPAIKDSTMRRYTISSALNLMQICKGKNVIISSAAERPLEIRGPYDVANLGLLFGLSESDAKAAVSTNCRAALLHGETRKTAFGIISTVKKPRPSEGDEDCLPASKKAKWSHSVTQAGVQWHNLGSLQPLPLGLKPSSHLSLPRTRIQQRQLLISHQRDHTPKNRL

SEQ ID NO: 896465 - protein, 265 aa, Homo sapiens
MAVFADLDLRAGSDLKALRGLVETAAHLGYSVVAINHIVDFKEKKQEIEKPVAVSELFTTLPIVQGKSRPIKILTRLTIIVSDPSHCNVLRATSSRARLYDVVAVFPKTEKLFHIACTHLDVDLVCITVTEKLPFYFKRPPINVAIDRGLAFELVYSPAIKDSTMRRYTISSALNLMQICKGKNVIISSAAERPLEIRGPYDVANLGLLFGLSESDAKAAVSTNCRAALLHGETRKTAFGIISTVKKPRPSEGDEDCLPASKKAK

SEQ ID NO: 896466 - protein, 220 aa, Homo sapiens
MAVFADLDLRAGSDLKALRGLVETAAHLGYSVVAINHIVDFKEKKQEIEKPVAVSELFTTLPIVQGKSRPIKILTRLTIIVSDPSHCNVLRATSSRARLYDVVAVFPKTEKLFHIACTHLDVDLVCITVTEKLPFYFKRPPINVAIDRGLAFELVYSPAIKDSTMRRYTISSALNLMQICKGKVWFYNFRMFFASGSLLLVVHWNCQTDSFSLKQNVLIA

SEQ ID NO: 896467 - protein, 322 aa, Homo sapiens; identical to SEQ ID NO: 896464

SEQ ID NO: 896468 - protein, 220 aa, Homo sapiens; identical to SEQ ID NO: 896466

SEQ ID NO: 896469 - protein, 138 aa, Homo sapiens
MAVFADLDLRAGSDLKALRGLVETAAHLGYSVVAINHIVDFKEKKQEIEKPVAVSELFTTLPIVQGKSRPIKILTRLTIIVSDPSHCNVLRATSSRARLYDVVAVFPKTEKLFHIACTHLDVDLVCITVTEKLPFYCL

SEQ ID NO: 896470 - protein, 131 aa, Homo sapiens
FSLFPVKAIDRGLAFELVYSPAIKDSTMRRYTISSALNLMQICKGKNVIISSAAERPLEIRGPYDVANLGLLFGLSESDAKAAVSTNCRAALLHGETRKTAFGIISTVKKPRPSEGDEDCLPASKKAKCEG

SEQ ID NO: 896471 - protein, 160 aa, Homo sapiens
MAVFADLDLRAGSDLKALRGLVETAAHRELPRLRAWPTSCHPDHRATLRIGYSVVAINHIVDFKEKKQEIEKPVAVSELFTTLPIVQGKSRPIKILTRLTIIVSDPSHCNVLRATSSRARLYDVVAVFPKTEKLFHIACTHLDVDLVCITVTEKLPFYCL

SEQ ID NO: 896472 - protein, 220 aa, Homo sapiens; identical to SEQ ID NO: 896466

SEQ ID NO: 896473 - protein, 505 aa, Homo sapiens
MSAEEMVQIRLEDRCYPVSKRKLIEQSNYFRALYRSGMREALSQEAGGPEVQQLRGLSAPGLRLVLDFINAGGAREGWLLGPRGEKGGGVDEDEEMDEVSLLSELVEAASFLQVTSLLQLLLSQVRLNNCLEMYRLAQVYGLPDLQEACLRFMVVHFHEVLCKPQFHLLGSPPQAPGDVSLKQRLREARMTGTPVLVALGDFLGGPLAPHPYQGEPPSMLRYEEMTERWFPLANNLPPDLVNVRGYGSAILDNYLFIVGGYRITSQEISAAHSYNPSTNEWLQVASMNQKRSNFKLVAVNSKLYAIGGQAVSNVECYNPEQDAWNFVAPLPNPLAEFSACECKGKIYVIGGYTTRDRNMNILQYCPSSDMWTLFETCDVHIRKQQMVSVEETIYIVGGCLHELGPNRRSSQSEDMLTVQSYNTVTRQWLYLKENTSKSGLNLTCALHNDGIYIMSRDVTLSTSLEHRVFLKYNIFSDSWEAFRRFPAFGHNLLVSSLYLPNKAET

SEQ ID NO: 896474 - protein, 487 aa, Homo sapiens
SGGAGAPRAGGEAAGTRALRLPQLRVRSRGARARSFPGLSAPGLRLVLDFINAGGAREGWLLGPRGEKGGGVDEDEEMDEVSLLSELVEAASFLQVTSLLQLLLSQVRLNNCLEMYRLAQVYGLPDLQEACLRFMVVHFHEVLCKPQFHLLGSPPQAPGDVSLKQRLREARMTGTPVLVALGDFLGGPLAPHPYQGEPPSMLRYEEMTERWFPLANNLPPDLVNVRGYGSAILDNYLFIVGGYRITSQEISAAHSYNPSTNEWLQVASMNQKRSNFKLVAVNSKLYAIGGQAVSNVECYNPEQDAWNFVAPLPNPLAEFSACECKGKIYVIGGYTTRDRNMNILQYCPSSDMWTLFETCDVHIRKQQMVSVEETIYIVGGCLHELGPNRRSSQSEDMLTVQSYNTVTRQWLYLKENTSKSGLNLTCALHNDGIYIMSRDVTLSTSLEHRVFLKYNIFSDSWEAFRRFPAFGHNLLVSSLYLPNKAET

SEQ ID NO: 896475 - protein, 540 aa, Homo sapiens
MSAEEMVQIRLEDRCYPVSKRKLIEQSNYFRALYRSGMREALSQEAGGPEVQQLRGLSAPGLRLVLDFINAGGAREGWLLGPRGEKGGGVDEDEEMDEVSLLSELVEAASFLQVTSLLQLLLSQVRLNNCLEMYRLAQVYGLPDLQEACLRFMVVHFHEVLCKPQFHLLGSPPQAPGDVSLKQRLREARMTGTPVLVALGDFLGGPLAPHPYQGEPPSMLRYEEMTERWFPLANNLPPDLVNVRGYGSAILDNYLFIVGGYRITSQEISAAHSYNPSTNEWLQVASMNQKRSNFKLVAVNSKLYAIGGQAVSNVECYNPEQDAWNFVAPLPNPLAEFSACECKGKIYVIGGYTTRDSLLEILCCYLSCFLGSAIKNNLLAAQPGFCIKYVDRNMNILQYCPSSDMWTLFETCDVHIRKQQMVSVEETIYIVGGCLHELGPNRRSSQSEDMLTVQSYNTVTRQWLYLKENTSKSGLNLTCALHNDGIYIMSRDVTLSTSLEHRVFLKYNIFSDSWEAFRRFPAFGHNLLVSSLYLPNKAET

SEQ ID NO: 896476 - protein, 147 aa, Homo sapiens [sequence omitted]

SEQ ID NO: 896477 - protein, 147 aa, Homo sapiens [sequence omitted]

SEQ ID NO: 896478 - protein, 505 aa, Homo sapiens; identical to SEQ ID NO: 896473

SEQ ID NO: 896479 - protein, 357 aa, Homo sapiens
MSAEEMVQIRLEDRCYPVSKRKLIEQSNYFRALYRSGMREALSQEAGGPEVQQLRGLSAPGLRLVLDFINAGGAREGWLLGPRGEKGGGVDEDEEMDEVSLLSELVEAASFLQVTSLLQLLLSQVRLNNCLEMYRLAQVYGLPDLQEACLRFMVVHFHEVLCKPQFHLLGSPPQAPGDVSLKQRLREARMTGTPVLVALGDFLGGPLAPHPYQGEPPSMLRYEEMTERWFPLANNLPPDLVNVRGYGSAILDNYLFIVGGYRITSQEISAAHSYNPSTNEWLQVASMNQKRSNFKLVAVNSKLYAIGGQAVSNVECYNPEQDAWNFVAPLPNPLAEFSACECKGKIYVIGGYTTRGK

SEQ ID NO: 896480 - protein, 580 aa, Homo sapiens
PLVINTLKRFNLYPEVILASWYRIYTKIMDLIGIQTKICWTVTRGEGLSPIESCEGLGDPACFYVAVIFILNGLMMALFFIYGTYLSGSRLGGLVTVLCFFFNHGECTRVMWTPPLRESFSYPFLVLQMLLVTHILRATKLYRGSLIALCISNVFFMLPWQFAQFVLLTQIASLFAVYVVGYIDICKLRKIIYIHMISLALCFVLMFGNSMLLTSYYASSLVIIWGILAMKPHFLKINVSELSLWVIQGCFWLFGTVILKYLTSKIFGIADDAHIGNLLTSKFFSYKDFDTLLYTCAAEFDFMEKETPLRYTKTLLLPVVLVVFVAIVRKIISDMWGVLAKQQTHVRKHQFDHGELVYHALQLLAYTALGILIMRLKLFLTPHMCVMASLICSRQLFGWLFCKVHPVAIVFAILAAMSIQGSANLQTQWNIVGEFSNLPQEELIEWIKYSTKPDAVFAGAMPTMASVKLSALRPIVNHPHYEDAGLRARTKIVYSMYSRKAAEEVKRELIKLKVNYYILEESWCVRRSKPGCSMPEIWDVEDPANAGKTPLCNLLVKDSKPHFTTVFQNSVYKVLEVVKE

SEQ ID NO: 896481 - protein, 549 aa, Homo sapiens
PLVINTLKRFNLYPEVILASWYRIYTKIMDLIGIQTKICWTVTRGEGLSPIESCEGLGDPACFYVAVIFILNGLMMALFFIYGTYLSGSRLGGLVTVLCFFFNHGECTRVMWTPPLRESFSYPFLVLQMLLVTHILRATKLYRGSLIALCISNVFFMLPWQFAQFVLLTQIASLFAVYVVGYIDICKLRKIIYIHMGILAMKPHFLKINVSELSLWVIQGCFWLFGTVILKYLTSKIFGIADDAHIGNLLTSKFFSYKDFDTLLYTCAAEFDFMEKETPLRYTKTLLLPVVLVVFVAIVRKLVICGGSYLNTDTCNNHHFDLGELVYHALQLLAYTALGILIMRLKLFLTPHMCVMASLICSRQLFGWLFCKVHPVAIVFAILAAMSIQGSANLQTQWNIVGEFSNLPQEELIEWIKYSTKPDAVFAGAMPTMASVKLSALRPIVNHPHYEDAGLRARTKIVYSMYSRKAAEEVKRELIKLKVNYYILEESWCVRRSKPGCSMPEIWDVEDPANAGKTPLCNLLVKDSKPHFTTVFQNSVYKVLEVVKE

SEQ ID NO: 896482 - protein, 351 aa, Homo sapiens [sequence omitted]

SEQ ID NO: 896483 - protein, 515 aa, Homo sapiens
MGSLSSRVLRQPRPALAQQAQGARAGGSARRPDTGDDAAGHGFCYCAGSHKRKRSSGSFCYCHPDSETDEDEEEGDEQQRLLNTPRRKKLKSTSKYIYQTLFLNGENSDIKICALGEEWSLHKIYLCQSGYFSSMFSGSWKESSMNIIELEIPDQNIDVEALQVAFGSLYRDDVLIKPSRVVAILAAACLLQLDGLIQQCGETMKETVNVKTVCGYYTSAGTYGLDSVKKKCLEWLLNNLMTHQNVELFKELSINVMKQLIGSSNLFVMQVEMDIYTALKKWMFLQLVPSWNGSLKQLLTETDVWFSKQRKDFEGMAFLETEQGKPFVSVFRHLRLQYIISDLASARIIEQDAVVPSEWLSSVYKQQWFAMLRAEQDSEVGPQEINKEELEGNSMRCGRKLAKDGEYCWRWTGFNFGFDLLVTYTNRYIIFKRNTLNQPCSGSVSLQPRRSIAFRLRLASFDSSGKLICSRTTGYQILTLEKDQEQVVMNLDSRLLIFPLYICCNFLYISPEKKN

SEQ ID NO: 896484 - protein, 121 aa, Homo sapiens
IGHEGAFARIIEQDAVVSERGKNEWLSSVYKQQWFAMLRAEQDSEVGPQEINKEELEGNSMRCGRKLAKDGEYCWRWTGFNFGFDLLVTYTNRYIIFKRNTLNQPCSGSVSLQPRRSIAFR

SEQ ID NO: 896485 - protein, 515 aa, Homo sapiens; identical to SEQ ID NO: 896483

SEQ ID NO: 896486 - protein, 515 aa, Homo sapiens; identical to SEQ ID NO: 896483

SEQ ID NO: 896487 - protein, 515 aa, Homo sapiens; identical to SEQ ID NO: 896483

SEQ ID NO: 896488 - protein, 555 aa, Homo sapiens
MGSLSSRVLRQPRPALAQQAQGARAGGSARRPDTGDDAAGHGFCYCAGSHKRKRSSGSFCYCHPDSETDEDEEEGDEQQRLLNTPRRKKLKSTSKYIYQTLFLNGENSDIKICALGEEWSLHKIYLCQSGYFSSMFSGSWKESSMNIIELEIPDQNIDVEVLLLLPSLVVHMEVPGAIQRQRNTLVKNIYSCNPSTLGGQALQVAFGSLYRDDVLIKPSRVVAILAAACLLQLDGLIQQCGETMKETVNVKTVCGYYTSAGTYGLDSVKKKCLEWLLNNLMTHQNVELFKELSINVMKQLIGSSNLFVMQVEMDIYTALKKWMFLQLVPSWNGSLKQLLTETDVWFSKQRKDFEGMAFLETEQGKPFVSVFRHLRLQYIISDLASARIIEQDAVVPSEWLSSVYKQQWFAMLRAEQDSEVGPQEINKEELEGNSMRCGRKLAKDGEYCWRWTGFNFGFDLLVTYTNRYIIFKRNTLNQPCSGSVSLQPRRSIAFRLRLASFDSSGKLICSRTTGYQILTLEKDQEQVVMNLDSRLLIFPLYICCNFLYISPEKKN

SEQ ID NO: 896489 - protein, 200 aa, Homo sapiens [sequence omitted]

SEQ ID NO: 896490 - protein, 610 aa, Homo sapiens
MPALPAGGGSEDQDEKDVPWKLSVLNHLGLGKPPWLPIVGAWLRTGQPGMWSLGHGATFLQALGPFSVGSKHDTFPNFGSQTTRAAWLRIVPMAWAQSLGGARSAYAQPSLVSTSRFSTPTPRRMRREEEEEELEEEVDELQTTNVSDLGLEHSDPWSSRAAQMALITEQERSVAGRPSGWGGRGHGQEAPRELGPELPQISSLKKGKGDTCSFPTTELQMRTPAPLPWNCRGLCLAGPVEQPVWKDRSEIWTHQIPEDRWHPWPPPTEGLELFTSPALRQIGAVRRVGLCPGADLEGRGETKGELSFIPRSFSAPLTDIQGQEGAPKHNQWPEEWEGLRHHILQIRMGWNPPGSSSSLQGPVSAHSNHGHGRKGWEPQCPSLSPGNQLYAGGLNLWEVKRSPFWVDSKSQGDGRPWARNHMEVTLRPQLSLGDQQNLAPLTTGQWFFTLDVPTFSAPALHRPSEKVKPGYLGIFPARRSPRPSLCSQPGSISLQLPFFILSFREGRRNIGKHLVQWEARGWRRCYIPLPINILNVGEGPENGTQEPAGMPIPHTPPSCSNPAIHSPGGTGAPGRRRRLSTVHPNTYPPTHLPDPLGWHPLLRFPLTPWL

SEQ ID NO: 896491 - protein, 443 aa, Homo sapiens
MTATAQPPSKAQAVHISAPSAAASTPVPSAPIDPQAQLEADKRAVYRHPLFPLLTLLFEKCEQATQGSECITSASFDVDIENFVHQQEQEHKPFFSDDPELDNLMVKAIQVLRIHLLELEKVNELCKDFCNRYITCLKTKMHSDNLLRNDLGGPYSPNQPSINLHSQDLLQNSPNSMSGVSNNPQGIVVPASALQQGNIAMTTVNSQVVSGGALYQPVTMVTSQGQVVTQAIPQGAIQIQNTQVNLDLTSLLDNEDKKSKNKRGVLPKHATNIMRSWLFQHLMHPYPTEDEKRQIAAQTNLTLLQVNNWFINARRRILQPMLDASNPDPAPKAKKIKSQHRPTQRFWPNSIAAGVLQQQGGAPGTNPDGSINLDNLQSLSSDSATMAMQQAMMAAHDDSLDGTEEEDEDEMEEEEEEELEEEVDELQTTNVSDLGLEHSDSLE

SEQ ID NO: 896492 - protein, 152 aa, Homo sapiens
MRLPLSHSPEHVEMALLSNILAAYSFVSENPERAALYFVSGVCIGLVLTLAALVIRISCHTDCRRRPGKKFLQDRESSSDSSDSEDGSEDTVSDLSVRRHRRFERTLNKNVFTSAEELERAQRLEERERIIREIWMNGQPEVPGTRSLNRYY

SEQ ID NO: 896493 - protein, 227 aa, Homo sapiens
MTFVKNKPVLNFDLNKKKAKQVLEPLLADANIIRDELFLPETSLLLTPHLSPEEKKESGHVDSAKHLQEVPSGCPMRLPLSHSPEHVEMALLSNILAAYSFVSENPERAALYFVSGVCIGLVLTLAALVIRISCHTDCRRRPGKKFLQDRESSSDSSDSEDGSEDTVSDLSVRRHRRFERTLNKNVFTSAEELERAQRLEERERIIREIWMNGQPEVPGTRSLNRYY

SEQ ID NO: 896494 - protein, 56 aa, Homo sapiens
MSAIQNLHSFDPFADGKYFVYLSPGLTYLESSLVPSMLTVMVSGFGVRLLAFKSQF

SEQ ID NO: 896495 - protein, 152 aa, Homo sapiens; identical to SEQ ID NO: 896492

SEQ ID NO: 896496 - protein, 152 aa, Homo sapiens; identical to SEQ ID NO: 896492

SEQ ID NO: 896497 - protein, 152 aa, Homo sapiens; identical to SEQ ID NO: 896492

SEQ ID NO: 896498 - protein, 152 aa, Homo sapiens; identical to SEQ ID NO: 896492

SEQ ID NO: 896499 - protein, 152 aa, Homo sapiens; identical to SEQ ID NO: 896492

SEQ ID NO: 896500 - protein, 152 aa, Homo sapiens; identical to SEQ ID NO: 896492

SEQ ID NO: 896501 - protein, 152 aa, Homo sapiens; identical to SEQ ID NO: 896492

SEQ ID NO: 896502 - protein, 152 aa, Homo sapiens; identical to SEQ ID NO: 896492

SEQ ID NO: 896503 - protein, 152 aa, Homo sapiens; identical to SEQ ID NO: 896492

SEQ ID NO: 896504 - protein, 152 aa, Homo sapiens; identical to SEQ ID NO: 896492

SEQ ID NO: 896505 - protein, 152 aa, Homo sapiens; identical to SEQ ID NO: 896492

SEQ ID NO: 896506 - protein, 140 aa, Homo sapiens [sequence omitted]

SEQ ID NO: 896507 - protein, 134 aa, Homo sapiens
MRLPLSHSPEHVEMALLSNILAAYSFVSVLTLAALVIRISCHTDCRRRPGKKFLQDRESSSDSSDSEDGSEDTVSDLSVRRHRRFERTLNKNVFTSAEELERAQRLEERERIIREIWMNGQPEVPGTRSLNRYY

SEQ ID NO: 896508 - protein, 152 aa, Homo sapiens; identical to SEQ ID NO: 896492

SEQ ID NO: 896509 - protein, 722 aa, Homo sapiens
MSAESGPGTRLRNLPVMGDGLETSQMSTTQAQAQPQPANAASTNPPPPETSNPNKPKRQTNQLQYLLRVVLKTLWKHQFAWPFQQPVDAVKLNLPDYYKIIKTPMDMGTIKKRLENNYYWNAQECIQDFNTMFTNCYIYNKPGDDIVLMAEALEKLFLQKINELPTEETEIMIVQAKGRGRGRKETGTAKPGVSTVPNTTQASTPPQTQTPQPNPPPVQATPHPFPAVTPDLIVQTPVMTVVPPQPLQTPPPVPPQPQPPPAPAPQPVQSHPPIIAATPQPVKTKKGVKRKADTTTPTTIDPIHEPPSLPPEPKTTKLGQRRESSRPVKPPKKDVPDSQQHPAPEKSSKVSEQLKCCSGILKEMFAKKHAAYAWPFYKPVDVEALGLHDYCDIIKHPMDMSTIKSKLEAREYRDAQEFGADVRLMFSNCYKYNPPDHEVVAMARKLQDVFEMRFAKMPDEPEEPVVAVSSPAVPPPTKVVAPPSSSDSSSDSSSDSDSSTDDSEEERAQRLAELQEQLKAVHEQLAALSQPQQNKPKKKEKDKKEKKKEKHKRKEEVEENKKSKAKEPPPKKTKKNNSSNSNVSKKEPAPMKSKPPPTYESEEEDKCKPMSYEEKRQLSLDINKLPGEKLGRVVHIIQSREPSLKNSNPDEIEIDFETLKPSTLRELERYVTSCLRKKRKPQAEKVDVIAGSSKMKGFSSSESESSSESSSSDSEDSETGPA

SEQ ID NO: 896510 - protein, 109 aa, Homo sapiens
MGAGSFLDINKLPGEKLGRVVHIIQSREPSLKNSNPDEIEIDFETLKPSTLRELERYVTSCLRKKRKPQAEKVDVIAGSSKMKGFSSSESESSSESSSSDSEDSETGPA

SEQ ID NO: 896511 - protein, 175 aa, Homo sapiens [sequence omitted]

SEQ ID NO: 896512 - protein, 172 aa, Homo sapiens
GGGGGGSGRRGVRGAPGPGKSRPGAGAASAAVPVRGPLGGLGRGAHVGRGRRALLLAPRSFCLGRGSAPPPPSLHLPGGPRSAAEKGAGPLRREVAAAARRSEARPQGGSGALEASLARLTHPLSAWQPLAGRFVLLGPCSPASLQRPILFAVLCGGGDCGDLGWGCGGVVI

SEQ ID NO: 896513 - protein, 722 aa, Homo sapiens; identical to SEQ ID NO: 896509

SEQ ID NO: 896514 - protein, 752 aa, Homo sapiens
RRRRRRKRPPRGPRRARPGVPGEECDGITSMSAESGPGTRLRNLPVMGDGLETSQMSTTQAQAQPQPANAASTNPPPPETSNPNKPKRQTNQLQYLLRVVLKTLWKHQFAWPFQQPVDAVKLNLPDYYKIIKTPMDMGTIKKRLENNYYWNAQECIQDFNTMFTNCYIYNKPGDDIVLMAEALEKLFLQKINELPTEETEIMIVQAKGRGRGRKETGTAKPGVSTVPNTTQASTPPQTQTPQPNPPPVQATPHPFPAVTPDLIVQTPVMTVVPPQPLQTPPPVPPQPQPPPAPAPQPVQSHPPIIAATPQPVKTKKGVKRKADTTTPTTIDPIHEPPSLPPEPKTTKLGQRRESSRPVKPPKKDVPDSQQHPAPEKSSKVSEQLKCCSGILKEMFAKKHAAYAWPFYKPVDVEALGLHDYCDIIKHPMDMSTIKSKLEAREYRDAQEFGADVRLMFSNCYKYNPPDHEVVAMARKLQDVFEMRFAKMPDEPEEPVVAVSSPAVPPPTKVVAPPSSSDSSSDSSSDSDSSTDDSEEERAQRLAELQEQLKAVHEQLAALSQPQQNKPKKKEKDKKEKKKEKHKRKEEVEENKKSKAKEPPPKKTKKNNSSNSNVSKKEPAPMKSKPPPTYESEEEDKCKPMSYEEKRQLSLDINKLPGEKLGRVVHIIQSREPSLKNSNPDEIEIDFETLKPSTLRELERYVTSCLRKKRKPQAEKVDVIAGSSKMKGFSSSESESSSESSSSDSEDSETGPA

SEQ ID NO: 896515 - protein, 722 aa, Homo sapiens; identical to SEQ ID NO: 896509

SEQ ID NO: 896516 - protein, 775 aa, Homo sapiens
RRRRRRKRPPRGPRRARPGVPGEECDGITSMSAESGPGTRLRNLPVMGDGLETSQMSTTQAQAQPQPANAASTNPPPPETSNPNKPKRQTNQLQYLLRVVLKTLWKHQFAWPFQQPVDAVKLNLPEGMVTLGRRDTEVETSCDGVNEKDYYKIIKTPMDMGTIKKRLENNYYWNAQECIQDFNTMFTNCYIYNKPGDDIVLMAEALEKLFLQKINELPTEETEIMIVQAKGRGRGRKETGTAKPGVSTVPNTTQASTPPQTQTPQPNPPPVQATPHPFPAVTPDLIVQTPVMTVVPPQPLQTPPPVPPQPQPPPAPAPQPVQSHPPIIAATPQPVKTKKGVKRKADTTTPTTIDPIHEPPSLPPEPKTTKLGQRRESSRPVKPPKKDVPDSQQHPAPEKSSKVSEQLKCCSGILKEMFAKKHAAYAWPFYKPVDVEALGLHDYCDIIKHPMDMSTIKSKLEAREYRDAQEFGADVRLMFSNCYKYNPPDHEVVAMARKLQDVFEMRFAKMPDEPEEPVVAVSSPAVPPPTKVVAPPSSSDSSSDSSSDSDSSTDDSEEERAQRLAELQEQLKAVHEQLAALSQPQQNKPKKKEKDKKEKKKEKHKRKEEVEENKKSKAKEPPPKKTKKNNSSNSNVSKKEPAPMKSKPPPTYESEEEDKCKPMSYEEKRQLSLDINKLPGEKLGRVVHIIQSREPSLKNSNPDEIEIDFETLKPSTLRELERYVTSCLRKKRKPQAEKVDVIAGSSKMKGFSSSESESSSESSSSDSEDSETGPA

SEQ ID NO: 896517 - protein, 765 aa, Homo sapiens
MSAESGPGTRLRNLPVMGDGLETSQMSTTQAQAQPQPANAASTNPPPPETSNPNKPKRQTNQLQYLLRVVLKTLWKHQFAWPFQQPVDAVKLNLPDYYKIIKTPMDMGTIKKRLENNYYWNAQECIQDFNTMFTNCYIYNKFQTTDVIKINPFKYERLWRETLYRTQLLTSAGVVGKNAQKRWEPGDDIVLMAEALEKLFLQKINELPTEETEIMIVQAKGRGRGRKETGTAKPGVSTVPNTTQASTPPQTQTPQPNPPPVQATPHPFPAVTPDLIVQTPVMTVVPPQPLQTPPPVPPQPQPPPAPAPQPVQSHPPIIAATPQPVKTKKGVKRKADTTTPTTIDPIHEPPSLPPEPKTTKLGQRRESSRPVKPPKKDVPDSQQHPAPEKSSKVSEQLKCCSGILKEMFAKKHAAYAWPFYKPVDVEALGLHDYCDIIKHPMDMSTIKSKLEAREYRDAQEFGADVRLMFSNCYKYNPPDHEVVAMARKLQDVFEMRFAKMPDEPEEPVVAVSSPAVPPPTKVVAPPSSSDSSSDSSSDSDSSTDDSEEERAQRLAELQEQLKAVHEQLAALSQPQQNKPKKKEKDKKEKKKEKHKRKEEVEENKKSKAKEPPPKKTKKNNSSNSNVSKKEPAPMKSKPPPTYESEEEDKCKPMSYEEKRQLSLDINKLPGEKLGRVVHIIQSREPSLKNSNPDEIEIDFETLKPSTLRELERYVTSCLRKKRKPQAEKVDVIAGSSKMKGFSSSESESSSESSSSDSEDSETGPA

SEQ ID NO: 896518 - protein, 591 aa, Homo sapiens
MFTNCYIYNKPGDDIVLMAEALEKLFLQKINELPTEETEIMIVQAKGRGRGRKETGTAKPGVSTVPNTTQASTPPQTQTPQPNPPPVQATPHPFPAVTPDLIVQTPVMTVVPPQPLQTPPPVPPQPQPPPAPAPQPVQSHPPIIAATPQPVKTKKGVKRKADTTTPTTIDPIHEPPSLPPEPKTTKLGQRRESSRPVKPPKKDVPDSQQHPAPEKSSKVSEQLKCCSGILKEMFAKKHAAYAWPFYKPVDVEALGLHDYCDIIKHPMDMSTIKSKLEAREYRDAQEFGADVRLMFSNCYKYNPPDHEVVAMARKLQDVFEMRFAKMPDEPEEPVVAVSSPAVPPPTKVVAPPSSSDSSSDSSSDSDSSTDDSEEERAQRLAELQEQLKAVHEQLAALSQPQQNKPKKKEKDKKEKKKEKHKRKEEVEENKKSKAKEPPPKKTKKNNSSNSNVSKKEPAPMKSKPPPTYESEEEDKCKPMSYEEKRQLSLDINKLPGEKLGRVVHIIQSREPSLKNSNPDEIEIDFETLKPSTLRELERYVTSCLRKKRKPQAEKVDVIAGSSKMKGFSSSESESSSESSSSDSEDSETGPA

SEQ ID NO: 896519 - protein, 574 aa, Homo sapiens
MAEALEKLFLQKINELPTEETEIMIVQAKGRGRGRKETGTAKPGVSTVPNTTQASTPPQTQTPQPNPPPVQATPHPFPAVTPDLIVQTPVMTVVPPQPLQTPPPVPPQPQPPPAPAPQPVQSHPPIIAATPQPVKTKKGVKRKADTTTPTTIDPIHEPPSLPPEPKTTKLGQRRESSRPVKPPKKDVPDSQQHPAPEKSSKVSEQLKCCSGILKEMFAKKHAAYAWPFYKPVDVEALGLHDYCDIIKHPMDMSTIKSKLEAREYRDAQEFGADVRLMFSNCYKYNPPDHEVVAMARKLQDVFEMRFAKMPDEPEEPVVAVSSPAVPPPTKVVAPPSSSDSSSDSSSDSDSSTDDSEEERAQRLAELQEQLKAVHEQLAALSQPQQNKPKKKEKDKKEKKKEKHKRKEEVEENKKSKAKEPPPKKTKKNNSSNSNVSKKEPAPMKSKPPPTYESEEEDKCKPMSYEEKRQLSLDINKLPGEKLGRVVHIIQSREPSLKNSNPDEIEIDFETLKPSTLRELERYVTSCLRKKRKPQAEKVDVIAGSSKMKGFSSSESESSSESSSSDSEDSETGPA

SEQ ID NO: 896520 - protein, 748 aa, Homo sapiens
MSAESGPGTRLRNLPVMGDGLETSQMSTTQAQAQPQPANAASTNPPPPETSNPNKPKRQTNQLQYLLRVVLKTLWKHQFAWPFQQPVDAVKLNLPDYYKIIKTPMDMGTIKKRLENNYYWNAQECIQDFNTMFTNCYIYNKPGDDIVLMAEALEKLFLQKINELPTEETEIMIVQAKGRGRGRKETGTAKPGVSTVPNTTQASTPPQTQTPQPNPPPVQATPHPFPAVTPDLIVQTPVMTVVPPQPLQTPPPVPPQPQPPPAPAPQPVQSHPPIIAATPQPVKTKKGVKRKADTTTPTTIDPIHEPPSLPPEPKTTKLGQRRESSRPVKPPKKDVPDSQQHPAPEKSSKVSEQLKCCSGILKEMFAKKHAAYAWPFYKPVDVEALGLHDYCDIIKHPMDMSTIKSKLEAREYRDAQEFGADVRLMFSNCYKYNPPDHEVVAMARKLQDVFEMRFAKMPDEPEEPVVAVSSPAVPPPTKVVAPPSSSDSSSDSSSDSDSSTDDSEEERAQRLAELQEQRSSSDSDSSTDDSEEERPSGWLSSRSLKAVHEQLAALSQPQQNKPKKKEKDKKEKKKEKHKRKEEVEENKKSKAKEPPPKKTKKNNSSNSNVSKKEPAPMKSKPPPTYESEEEDKCKPMSYEEKRQLSLDINKLPGEKLGRVVHIIQSREPSLKNSNPDEIEIDFETLKPSTLRELERYVTSCLRKKRKPQAEKVDVIAGSSKMKGFSSSESESSSESSSSDSEDSETGPA

SEQ ID NO: 896521 - protein, 582 aa, Homo sapiens
MSAESGPGTRLRNLPVMGDGLETSQMSTTQAQAQPQPANAASTNPPPPETSNPNKPKRQTNQLQYLLRVVLKTLWKHQFAWPFQQPVDAVKLNLPDYYKIIKTPMDMGTIKKRLENNYYWNAQECIQDFNTMFTNCYIYNKPGDDIVLMAEALEKLFLQKINELPTEETEIMIVQAKGRGRGRKETGTAKPGVSTVPNTTQASTPPQTQTPQPNPPPVQATPHPFPAVTPDLIVQTPVMTVVPPQPLQTPPPVPPQPQPPPAPAPQPVQSHPPIIAATPQPVKTKKGVKRKADTTTPTTIDPIHEPPSLPPEPKTTKLGQRRESSRPVKPPKKDVPDSQQHPAPEKSSSSDSSSDSDSSTDDSEEERAQRLAELQEQLKAVHEQLAALSQPQQNKPKKKEKDKKEKKKEKHKRKEEVEENKKSKAKEPPPKKTKKNNSSNSNVSKKEPAPMKSKPPPTYESEEEDKCKPMSYEEKRQLSLDINKLPGEKLGRVVHIIQSREPSLKNSNPDEIEIDFETLKPSTLRELERYVTSCLRKKRKPQAEKVDVIAGSSKMKGFSSSESESSSESSSSDSEDSETGPA

SEQ ID NO: 896522 - protein, 547 aa, Homo sapiens
MSAESGPGTRLRNLPVMGDGLETSQMSTTQAQAQPQPANAASTNPPPPETSNPNKPKRQTNQLQYLLRVVLKTLWKHQFAWPFQQPVDAVKLNLPDYYKIIKTPMDMGTIKKRLENNYYWNAQECIQDFNTMFTNCYIYNKPGDDIVLMAEALEKLFLQKINELPTEETEIMIVQAKGRGRGRKETGTAKPGVSTVPNTTQASTPPQTQTPQPNPPPVQATPHPFPAVTPDLIVQTPVMTVVPPQPLQTPPPVPPQPQPPPAPAPQPVQSHPPIIAATPQPVKTKKGVKRKADTTTPTTIDPIHEPPSLPPEPKTTKLGQRRESSRPVKPPKKDVPDSQQHPAPEKSSSLQPSLSPSRTNQRKRRKTRRKRKKKSTKGKRKWKRIKKAKPRNLLLKRRRKIISSNSNVSKKEPAPMKSKPPPTYESEEEDKCKPMSYEEKRQLSLDINKLPGEKLGRVVHIIQSREPSLKNSNPDEIEIDFETLKPSTLRELERYVTSCLRKKRKPQAEKVDVIAGSSKMKGFSSSESESSSESSSSDSEDSETGPA

SEQ ID NO: 896523 - protein, 382 aa, Homo sapiens
MLAGPVPALRLRTGVMACPPTRVLTKLRAKKPTCSSRHPFRLLPATSPWSHGQTQLTGTCLVFQSKLEAREYRDAQEFGADVRLMFSNCYKYNPPDHEVVAMARKLQDVFEMRFAKMPDEPEEPVVAVSSPAVPPPTKVVAPPSSSDSSSDSSSDSDSSTDDSEEERAQRLAELQEQLKAVHEQLAALSQPQQNKPKKKEKDKKEKKKEKHKRKEEVEENKKSKAKEPPPKKTKKNNSSNSNVSKKEPAPMKSKPPPTYESEEEDKCKPMSYEEKRQLSLDINKLPGEKLGRVVHIIQSREPSLKNSNPDEIEIDFETLKPSTLRELERYVTSCLRKKRKPQAEKVDVIAGSSKMKGFSSSESESSSESSSSDSEDSETGPA

SEQ ID NO: 896524 - protein, 412 aa, Homo sapiens
RDVPEGRDKVGRLSLHIRTFLDLLVQEEAQALERWLRGFFPPTRRNSAPPAVCCGTCSETWCLAIVATDACAAPSPSLRKSKTSPLALGAQLPQSKLEAREYRDAQEFGADVRLMFSNCYKYNPPDHEVVAMARKLQDVFEMRFAKMPDEPEEPVVAVSSPAVPPPTKVVAPPSSSDSSSDSSSDSDSSTDDSEEERAQRLAELQEQLKAVHEQLAALSQPQQNKPKKKEKDKKEKKKEKHKRKEEVEENKKSKAKEPPPKKTKKNNSSNSNVSKKEPAPMKSKPPPTYESEEEDKCKPMSYEEKRQLSLDINKLPGEKLGRVVHIIQSREPSLKNSNPDEIEIDFETLKPSTLRELERYVTSCLRKKRKPQAEKVDVIAGSSKMKGFSSSESESSSESSSSDSEDSETGPA

SEQ ID NO: 896525 - protein, 621 aa, Homo sapiens
PSQELRAASVVQPQPLVVVKEEKIHSPIIRSEPFSPSLRPEPPKHPESIKAPVHLPQRPEMKPVDVGRPVIRPPEQNAPPPGAPDKDKQKQEPKTPVAPKKDLKIKNMGSWASLVQKHPTTPSSTAKSSSDSFEQFRRAAREKEEREKALKAQAEHAEKEKERLRQERMRSREDEDALEQARRAHEEARRRQEQQQQQRQEQQQQQQQQAAAVAAAATPQAQSSQPQSMLDQQRELARKREQERRRREAMAATIDMNFQSDLLSIFEENLFLSAPRWLLTLIFWQNIDFSIVLGAVVEVGSAAGDASGPGPPACYARGRPDGQLRIAEPVCLTASRTDVPPPTTPHRTSAQHTPCYEQVPAGPKPCIPTCGAEALLSAKCLHSIHRTSSDSSSDSDSSTDDSEEERAQRLAELQEQLKAVHEQLAALSQPQQNKPKKKEKDKKEKKKEKHKRKEEVEENKKSKAKEPPPKKTKKNNSSNSNVSKKEPAPMKSKPPPTYESEEEDKCKPMSYEEKRQLSLDINKLPGEKLGRVVHIIQSREPSLKNSNPDEIEIDFETLKPSTLRELERYVTSCLRKKRKPQAEKVDVIAGSSKMKGFSSSESESSSESSSSDSEDSETGPA

SEQ ID NO: 896526 - protein, 281 aa, Homo sapiens
MSFPHQDVFEMRFAKMPDEPEEPVVAVSSPAVPPPTKVVAPPSSSDSSSDSSSDSDSSTDDSEEERAQRLAELQEQLKAVHEQLAALSQPQQNKPKKKEKDKKEKKKEKHKRKEEVEENKKSKAKEPPPKKTKKNNSSNSNVSKKEPAPMKSKPPPTYESEEEDKCKPMSYEEKRQLSLDINKLPGEKLGRVVHIIQSREPSLKNSNPDEIEIDFETLKPSTLRELERYVTSCLRKKRKPQAEKVDVIAGSSKMKGFSSSESESSSESSSSDSEDSETGPA

SEQ ID NO: 896527 - protein, 308 aa, Homo sapiens
  misc_feature (4)..(4): Xaa can be any naturally occurring amino acid
  misc_feature (13)..(13): Xaa can be any naturally occurring amino acid
  misc_feature (32)..(32): Xaa can be any naturally occurring amino acid
KEKXKKEKKKEKXKRKEEVEENKKSKAKEPLXKKTKKNNSSNSNVSKKEPVVAVSSPAVPPPTKVVAPPSSSDSSSDSSSDSDSSTDDSEEERAQRLAELQEQLKAVHEQLAALSQPQQNKPKKKEKDKKEKKKEKHKRKEEVEENKKSKAKEPPPKKTKKNNSSNSNVSKKEPAPMKSKPPPTYESEEEDKCKPMSYEEKRQLSLDINKLPGEKLGRVVHIIQSREPSLKNSNPDEIEIDFETLKPSTLRELERYVTSCLRKKRKPQAEKVDVIAGSSKMKGFSSSESESSSESSSSDSEDSETGPA

SEQ ID NO: 896528 - protein, 233 aa, Homo sapiens
MFFGADAWVLGDRKVVSALSVCLACLVYLKAVHEQLAALSQPQQNKPKKKEKDKKEKKKEKHKRKEEVEENKKSKAKEPPPKKTKKNNSSNSNVSKKEPAPMKSKPPPTYESEEEDKCKPMSYEEKRQLSLDINKLPGEKLGRVVHIIQSREPSLKNSNPDEIEIDFETLKPSTLRELERYVTSCLRKKRKPQAEKVDVIAGSSKMKGFSSSESESSSESSSSDSEDSETGPA

SEQ ID NO: 896529 - protein, 720 aa, Homo sapiens
MSAESGPGTRLRNLPVMGDGLETSQMSTTQAQAQPQPANAASTNPPPPETSNPNKPKRQTNQLQYLLRVVLKTLWKHQFAWPFQQPVDAVKLNLPDYYKIIKTPMDMGTIKKRLENNYYWNAQECIQDFNTMFTNCYIYNKPGDDIVLMAEALEKLFLQKINELPTEETEIMIVQAKGRGRGRKETGTAKPGVSTVPNTTQASTPPQTQTPQPNPPPVQATPHPFPAVTPDLIVQTPVMTVVPPQPLQTPPPVPPQPQPPPAPAPQPVQSHPPIIAATPQPVKTKKGVKRKADTTTPTTIDPIHEPPSLPPEPKTTKLGQRRESSRPVKPPKKDVPDSQQHPAPEKSSKVSEQLKCCSGILKEMFAKKHAAYAWPFYKPVDVEALGLHDYCDIIKHPMDMSTIKSKLEAREYRDAQEFGADVRLMFSNCYKYNPPDHEVVAMARKLQDVFEMRFAKMPDEPEEPVVAVSSPAVPPPTKVVAPPSSSDSSSDSSSDSDSSTDDSEEERAQRLAELQEQLKAVHEQLAALSQPQQNKPKKKEKDKKEKKKEKHKRKEEVEENKKSKAKEPPPKKTKKNNSSNSNVSKKEPAPMKSKPPPTYESEEEDKCKPMSYEEKRQLSLDINKLPGEKLGRVVHIIQSREPSLKNSNPDEIEIDFETLKPSTLRELERYVTSCLRKKRKPQAEKVDVIAGSSKMKGFSSSESESSSESSSSDSEDSETG

SEQ ID NO: 896530 - protein, 776 aa, Homo sapiens
MSAESGPGTRLRNLPVMGDGLETSQMSTTQAQAQPQPANAASTNPPPPETSNPNKPKRQTNQLQYLLRVVLKTLWKHQFAWPFQQPVDAVKLNLPDYYKIIKTPMDMGTIKKRLENNYYWNAQECIQDFNTMFTNCYIYNKPGDDIVLMAEALEKLFLQKINELPTEETEIMIVQAKGRGRGRKETGTAKPGVSTVPNTTQASTPPQTQTPQPNPPPVQATPHPFPAVTPDLIVQTPVMTVVPPQPLQTPPPVPPQPQPPPAPAPQPVQSHPPIIAATPQPVKTKKGVKRKADTTTPTTIDPIHEPPSLPPEPKTTKLGQRRESSRPVKPPKKDVPDSQQHPAPEKSSKVSEQLKCCSGILKEMFAKKHAAYAWPFYKPVDVEALGLHDYCDIIKHPMDMSTIKSKLEAREYRDAQEFGADVRLMFSNCYKYNPPDHEVVAMARKLQDVFEMRFAKMPDEPEEPVVAVSSPAVPPPTKVVAPPSSSDSSSDSSSDSDSSTDDSEEERAQRLAELQEQLKAVHEQLAALSQPQQNKPKKKEKDKKEKKKEKHKRKEEVEENKKSKAKEPPPKKTKKNNSSNSNVSKKEPAPMKSKPPPTYESEEEDKCKPMSYEEKRQLSLDINKLPGEKLGRVVHIIQSREPSLKNSNPDEIEIDFETLKPSTLRELERYVTSCLRKKRKPQAEKVDVIAGSSKMKGFSSSESESSSESSSSDSEDSETEMAPKSKKKGHPGREQKKHHHHHHQQMQQAPAPVPQQPPPPPQQPPPPPPPQQQQQP

SEQ ID NO: 896531 - protein, 722 aa, Homo sapiens; identical to SEQ ID NO: 896509

SEQ ID NO: 896532 - protein, 766 aa, Homo sapiens
MSAESGPGTRLRNLPVMGDGLETSQMSTTQAQAQPQPANAASTNPPPPETSNPNKPKRQTNQLQYLLRVVLKTLWKHQFAWPFQQPVDAVKLNLPDYYKIIKTPMDMGTIKKRLENNYYWNAQECIQDFNTMFTNCYIYNKPGDDIVLMAEALEKLFLQKINELPTEETEIMIVQAKGRGRGRKETGTAKPGVSTVPNTTQASTPPQTQTPQPNPPPVQATPHPFPAVTPDLIVQTPVMTVVPPQPLQTPPPVPPQPQPPPAPAPQPVQSHPPIIAATPQPVKTKKGVKRKADTTTPTTIDPIHEPPSLPPEPKTTKLGQRRESSRPVKPPKKDVPDSQQHPAPEKSSKVSEQLKCCSGILKEMFAKKHAAYAWPFYKPVDVEALGLHDYCDIIKHPMDMSTIKSKLEAREYRDAQEFGADVRLMFSNCYKYNPPDHEVVAMARKLQDVFEMRFAKMPDEPEEPVVAVSSPAVPPPTKVVAPPSSSDSSSDSSSDSDSSTDDSEEERAQRLAELQEQLKAVHEQLAALSQPQQNKPKKKEKDKKEKKKEKHKRKEEVEENKKSKAKEPPPKKTKKNNSSNSNVSKKEPAPMKSKPPPTYESEEEDKCKPMSYEEKRQLSLDINKLPGEKLGRVVHIIQSREPSLKNSNPDEIEIDFETLKPSTLRELERYVTSCLRKKRKPQGVLGPPGHGVPSVGTLRVTFPSLLSPLFLRPPPFFFPIIISVFLTQKPPKGCDIALTPRLSVPFYISDWWCLGPLCTLLPAAVF

SEQ ID NO: 896533 - protein, 639 aa, Homo sapiens
MSAESGPGTRLRNLPVMGDGLETSQMSTTQAQAQPQPANAASTNPPPPETSNPNKPKRQTNQLQYLLRVVLKTLWKHQFAWPFQQPVDAVKLNLPDYYKIIKTPMDMGTIKKRLENNYYWNAQECIQDFNTMFTNCYIYNKPGDDIVLMAEALEKLFLQKINELPTEETEIMIVQAKGRGRGRKETGTAKPGVSTVPNTTQASTPPQTQTPQPNPPPVQATPHPFPAVTPDLIVQTPVMTVVPPQPLQTPPPVPPQPQPPPAPAPQPVQSHPPIIAATPQPVKTKKGVKRKADTTTPTTIDPIHEPPSLPPEPKTTKLGQRRESSRPVKPPKKDVPDSQQHPAPEKSSKVSEQLKCCSGILKEMFAKKHAAYAWPFYKPVDVEALGLHDYCDIIKHPMDMSTIKSKLEAREYRDAQEFGADVRLMFSNCYKYNPPDHEVVAMARKLQDVFEMRFAKMPDEPEEPVVAVSSPAVPPPTKVVAPPSSSDSSSDSSSDSDSSTDDSEEERAQRLAELQEQLKAVHEQLAALSQPQQNKPKKKEKDKKEKKKEKHKRKEEVEENKKSKAKEPPPKKTKKNRSNGTQAGGGWRGWVLLSQLCPRPPCIPHPLPQQHAVQWASPTTSSDSSYCLGCGLPLSCDSS

SEQ ID NO: 896534 - protein, 568 aa, Homo sapiens
MSAESGPGTRLRNLPVMGDGLETSQMSTTQAQAQPQPANAASTNPPPPETSNPNKPKRQTNQLQYLLRVVLKTLWKHQFAWPFQQPVDAVKLNLPDYYKIIKTPMDMGTIKKRLENNYYWNAQECIQDFNTMFTNCYIYNKPGDDIVLMAEALEKLFLQKINELPTEETEIMIVQAKGRGRGRKETGTAKPGVSTVPNTTQASTPPQTQTPQPNPPPVQATPHPFPAVTPDLIVQTPVMTVVPPQPLQTPPPVPPQPQPPPAPAPQPVQSHPPIIAATPQPVKTKKGVKRKADTTTPTTIDPIHEPPSLPPEPKTTKLGQRRESSRPVKPPKKDVPDSQQHPAPEKSSKVSEQLKCCSGILKEMFAKKHAAYAWPFYKPVDVEALGLHDYCDIIKHPMDMSTIKSKLEAREYRDAQEFGADVRLMFSNCYKYNPPDHEVVAMARKLQDVFEMRFAKMPDEPEEPVVAVSSPAVPPPTKVVAPPSSSDSSSDSSSDSDSSTDDSEEERAQRLAELQEQLKAVHEQLAALSQPQQNKPKKKEKDKKEKKKEKLAAANLHPQKARDIHRKE

SEQ ID NO: 896535 - protein, 271 aa, Homo sapiens
PSQELRAASVVQPQPLVVVKEEKIHSPIIRSEPFSPSLRPEPPKHPESIKAPVHLPQRPEMKPVDVGRPVIRPPEQNAPPPGAPDKDKQKQEPKTPVAPKKDLKIKNMGSWASLVQKHPTTPSSTAKSSSDSFEQFRRAAREKEEREKALKAQAEHAEKEKERLRQERMRSREDEDALEQARRAHEEARRRQEQQQQQRQEQQQQQQQQAAAVAAAATPQAQSSQPQSMLDQQRELARKREQERRRREAMAATIDMNFQSDLLSIFEENLF

SEQ ID NO: 896536 - protein, 271 aa, Homo sapiens; identical to SEQ ID NO: 896535

SEQ ID NO: 896537 - protein, 271 aa, Homo sapiens; identical to SEQ ID NO: 896535

SEQ ID NO: 896538 - protein, 271 aa, Homo sapiens; identical to SEQ ID NO: 896535

SEQ ID NO: 896539 - protein, 271 aa, Homo sapiens; identical to SEQ ID NO: 896535

SEQ ID NO: 896540 - protein, 271 aa, Homo sapiens; identical to SEQ ID NO: 896535

SEQ ID NO: 896541 - protein, 271 aa, Homo sapiens; identical to SEQ ID NO: 896535

SEQ ID NO: 896542 - protein, 55 aa, Homo sapiens
MGDGLETSQMSTTQAQAQPQPANAASTNPPPPETSRREPHQWRSGHHHLHLIAIP

SEQ ID NO: 896543 - protein, 627 aa, Homo sapiens
MARGSVSDEEMMELREAFAKVDTDGNGYISFNELNDLFKAACLPLPGYRVREITENLMATGDLDQDGRISFDEFIKIFHGLKSTDVAKTFRKAINKKEGICAIGGTSEQSSVGTQHSYSEEEKYAFVNWINKALENDPDCRHVIPMNPNTNDLFNAVGDGIVLCKMINLSVPDTIDERTINKKKLTPFTIQENLNLALNSASAIGCHVVNIGAEDLKEGKPYLVLGLLWQVIKIGLFADIELSRNEALIALLREGESLEDLMKLSPEELLLRWANYHLENAGCNKIGNFSTDIKDSKAYYHLLEQVAPKGDEEGVPAVVIDMSGLREKDDIQRAECMLQQAERLGCRQFVTATDVVRGNPKLNLAFIANLFNRYPALHKPENQDIDWGALEGETREERTFRNWMNSLGVNPRVNHLYSDLSDALVIFQLYEKIKVPVDWNRVNKPPYPKLGGNMKKLENCNYAVELGKNQAKFSLVGIGGQDLNEGNRTLTLALIWQLMRRYTLNILEEIGGGQKVNDDIIVNWVNETLREAEKSSSISSFKDPKISTSLPVLDLIDAIQPGSINYDLLKTENLNDDEKLNNAKYAISMARKIGARVYALPEDLVEVNPKMVMTVFACLMGKGMKRV

SEQ ID NO: 896544 - protein, 215 aa, Homo sapiens
MARGSVSDEEMMELREAFAKVDTDGNGYISFNELNDLFKAACLPLPGYRVREITENLMATGDLDQDGRISFDEFIKIFHGLKSTDVAKTFRKAINKKEGICAIGGTSEQSSVGTQHSYSEEEKYAFVNWINKALENDPDCRHVIPMNPNTNDLFNAVGDGIVLCKMINLSVPDTIDERTINKKKLTPFTIQQKSDWFESAPASVPVSLGVRPEGE

SEQ ID NO: 896545 - protein, 241 aa, Homo sapiens
MSGLREKDDIQRAECMLQQAERLGCRQFVTATDVVRGNPKLNLAFIANLFNRYPALHKPENQDIDWGALEGETREERTFRNWMNSLGVNPRVNHLYSDLSDALVIFQLYEKIKVPVDWNRVNKPPYPKLGGNMKKLENCNYAVELGKNQAKFSLVGIGGQDLNEGNRTLTLALIWQLMRRYTLNILEEIGGGQKVNDDIIVNWVNETLREAEKSSSISSFKDRIEVCGLDSVPHRSFFSLS

SEQ ID NO: 896546 - protein, 216 aa, Homo sapiens
RLGARPGGDDSKAYYHLLEQVAPKGDEEGVPAVVIDMSGLREKDDIQRAECMLQQAERLGCRQFVTATDVVRGNPKLNLAFIANLFNRYPALHKPENQDIDWGALEGETREERTFRNWMNSLGVNPRVNHLYSDLSDALVIFQLYEKIKVPVDWNRVNKPPYPKLGGNMKKLENCNYAVELGKNQAKFSLVGIGGQDLNEGNRTLTLALIWQLMRR

SEQ ID NO: 896547 - protein, 627 aa, Homo sapiens; identical to SEQ ID NO: 896543

SEQ ID NO: 896548 - protein, 627 aa, Homo sapiens; identical to SEQ ID NO: 896543

SEQ ID NO: 896549 - protein, 627 aa, Homo sapiens; identical to SEQ ID NO: 896543

SEQ ID NO: 896550 - protein, 627 aa, Homo sapiens; identical to SEQ ID NO: 896543

SEQ ID NO: 896551 - protein, 627 aa, Homo sapiens; identical to SEQ ID NO: 896543

SEQ ID NO: 896552 - protein, 627 aa, Homo sapiens; identical to SEQ ID NO: 896543

SEQ ID NO: 896553 - protein, 627 aa, Homo sapiens; identical to SEQ ID NO: 896543

SEQ ID NO: 896554 - protein, 627 aa, Homo sapiens; identical to SEQ ID NO: 896543

SEQ ID NO: 896555 - protein, 451 aa, Homo sapiens
MARGSVSDEEMMELREAFAKVDTDGNGYISFNELNDLFKAACLPLPGYRVREITENLMATGDLDQDGRISFDEFIKIFHGLKSTDVAKTFRKAINKKEGICAIGGTSEQSSVGTQHSYSEEEKYAFVNWINKALENDPDCRHVIPMNPNTNDLFNAVGDGIVLCKMINLSVPDTIDERTINKKKLTPFTIQENLNLALNSASAIGCHVVNIGAEDLKEGKPYLVLGLLWQVIKIGLFADIELSRNEALIALLREGESLEDLMKLSPEELLLRWANYHLENAGCNKIGNFSTDIKDSKAYYHLLEQVAPKGDEEGVPAVVIDMSGLREKDDIQRAECMLQQAERLGCRQFVTATDVVRGNPKLNLAFIANLFNRYPALHKPENQDIDWGALEGETREERTFRNWMNSLGVNPRVNHLYSDLSDALVIFQLYEKIKVPVDWNRVNKPPFSHWP

SEQ ID NO: 896556 - protein, 627 aa, Homo sapiens; identical to SEQ ID NO: 896543

SEQ ID NO: 896557 - protein, 619 aa, Homo sapiens
MIDDSQTHASAKVDTDGNGYISFNELNDLFKAACLPLPGYRVREITENLMATGDLDQDGRISFDEFIKIFHGLKSTDVAKTFRKAINKKEGICAIGGTSEQSSVGTQHSYSEEEKYAFVNWINKALENDPDCRHVIPMNPNTNDLFNAVGDGIVLCKMINLSVPDTIDERTINKKKLTPFTIQENLNLALNSASAIGCHVVNIGAEDLKEGKPYLVLGLLWQVIKIGLFADIELSRNEALIALLREGESLEDLMKLSPEELLLRWANYHLENAGCNKIGNFSTDIKDSKAYYHLLEQVAPKGDEEGVPAVVIDMSGLREKDDIQRAECMLQQAERLGCRQFVTATDVVRGNPKLNLAFIANLFNRYPALHKPENQDIDWGALEGETREERTFRNWMNSLGVNPRVNHLYSDLSDALVIFQLYEKIKVPVDWNRVNKPPYPKLGGNMKKLENCNYAVELGKNQAKFSLVGIGGQDLNEGNRTLTLALIWQLMRRYTLNILEEIGGGQKVNDDIIVNWVNETLREAEKSSSISSFKDPKISTSLPVLDLIDAIQPGSINYDLLKTENLNDDEKLNNAKYAISMARKIGARVYALPEDLVEVNPKMVMTVFACLMGKGMKRV

SEQ ID NO: 896558 - protein, 627 aa, Homo sapiens; identical to SEQ ID NO: 896543

SEQ ID NO: 896559 - protein, 478 aa, Homo sapiens
MFCVSASSQSKMEKYRPHQSHANQNGPSTYGAGLIEWTTAGVENLNLALNSASAIGCHVVNIGAEDLKEGKPYLVLGLLWQVIKIGLFADIELSRNEALIALLREGESLEDLMKLSPEELLLRWANYHLENAGCNKIGNFSTDIKDSKAYYHLLEQVAPKGDEEGVPAVVIDMSGLREKDDIQRAECMLQQAERLGCRQFVTATDVVRGNPKLNLAFIANLFNRYPALHKPENQDIDWGALEGETREERTFRNWMNSLGVNPRVNHLYSDLSDALVIFQLYEKIKVPVDWNRVNKPPYPKLGGNMKKLENCNYAVELGKNQAKFSLVGIGGQDLNEGNRTLTLALIWQLMRRYTLNILEEIGGGQKVNDDIIVNWVNETLREAEKSSSISSFKDPKISTSLPVLDLIDAIQPGSINYDLLKTENLNDDEKLNNAKYAISMARKIGARVYALPEDLVEVNPKMVMTVFACLMGKGMKRV

SEQ ID NO: 896560 - protein, 627 aa, Homo sapiens; identical to SEQ ID NO: 896543

SEQ ID NO: 896561 - protein, 306 aa, Homo sapiens
MSGLREKDDIQRAECMLQQAERLGCRQFVTATDVVRGNPKLNLAFIANLFNRYPALHKPENQDIDWGALEGETREERTFRNWMNSLGVNPRVNHLYSDLSDALVIFQLYEKIKVPVDWNRVNKPPYPKLGGNMKKLENCNYAVELGKNQAKFSLVGIGGQDLNEGNRTLTLALIWQLMRRYTLNILEEIGGGQKVNDDIIVNWVNETLREAEKSSSISSFKDPKISTSLPVLDLIDAIQPGSINYDLLKTENLNDDEKLNNAKYAISMARKIGARVYALPEDLVEVNPKMVMTVFACLMGKGMKRV

SEQ ID NO: 896562 - protein, 487 aa, Homo sapiens
MFCVSASSQSKMEKYRPHQSHANQNGPSTYGAGLIEWTTAGVENLNLALNSASAIGCHVVNIGAEDLKEGKPYLVLGLLWQVIKIGLFADIELSRNEALIALLREGESLEDLMKLSPEELLLRWANYHLENAGCNKIGNFSTDIKLTDFYSNIKDSKAYYHLLEQVAPKGDEEGVPAVVIDMSGLREKDDIQRAECMLQQAERLGCRQFVTATDVVRGNPKLNLAFIANLFNRYPALHKPENQDIDWGALEGETREERTFRNWMNSLGVNPRVNHLYSDLSDALVIFQLYEKIKVPVDWNRVNKPPYPKLGGNMKKLENCNYAVELGKNQAKFSLVGIGGQDLNEGNRTLTLALIWQLMRRYTLNILEEIGGGQKVNDDIIVNWVNETLREAEKSSSISSFKDPKISTSLPVLDLIDAIQPGSINYDLLKTENLNDDEKLNNAKYAISMARKIGARVYALPEDLVEVNPKMVMTVFACLMGKGMKRV

SEQ ID NO: 896563 - protein, 342 aa, Homo sapiens
RLGARPGGDDSKAYYHLLEQVAPKGDEEGVPAVVIDMSGLREKDDIQRAECMLQQAERLGCRQFVTATDVVRGNPKLNLAFIANLFNRYPALHKPENQDIDWGALEGETREERTFRNWMNSLGVNPRVNHLYSDLSDALVIFQLYEKIKVPVDWNRVNKPPYPKLGGNMKKLENCNYAVELGKNQAKFSLVGIGGQDLNEGNRTLTLALIWQLMRRYTLNILEEIGGGQKVNDDIIVNWVNETLREAEKSSSISSFKDPKISTSLPVLDLIDAIQPGSINYDLLKTENLNDDEKLNNAKYAISMARKIGARVYALPEDLVEVNPKMVMTVFACLMGKGMKRV

SEQ ID NO: 896564 - protein, 370 aa, Homo sapiens
MTACLPFPPHIGSSRVAEGPAAAATTTTTAATSVLTSDSKAYYHLLEQVAPKGDEEGVPAVVIDMSGLREKDDIQRAECMLQQAERLGCRQFVTATDVVRGNPKLNLAFIANLFNRYPALHKPENQDIDWGALEGETREERTFRNWMNSLGVNPRVNHLYSDLSDALVIFQLYEKIKVPVDWNRVNKPPYPKLGGNMKKLENCNYAVELGKNQAKFSLVGIGGQDLNEGNRTLTLALIWQLMRRYTLNILEEIGGGQKVNDDIIVNWVNETLREAEKSSSISSFKDPKISTSLPVLDLIDAIQPGSINYDLLKTENLNDDEKLNNAKYAISMARKIGARVYALPEDLVEVNPKMVMTVFACLMGKGMKRV

SEQ ID NO: 896565 - protein, 547 aa, Homo sapiens
MARGSVSDEEMMELREAFAKVDTDGNGYISFNELNDLFKAACLPLPGYRVREITENLMATGDLDQDGRISFDEFIKIFHGLKSTDVAKTFRKAINKKEGICAIGGTSEQSSVGTQHSYSEEEKYAFVNWINKALENDPDCRHVIPMNPNTNDLFNAVGDGIVLCKMINLSVPDTIDERTINKKKLTPFTIQENLNLALNSASAIGCHVVNIGAEDLKEGKPYLVLGLLWQVIKIGLFADIELSRNEALIALLREGESLEDLMKLSPEELLLRWANYHLENAGCNKIGNFSTDIKDSKAYYHLLEQVAPKGDEEGVPAVVIDMSGLREKDDIQRAECMLQQAERLGCRQFVTATDVVRGNPKLNLAFIANLFNRYPALHKPENQDIDWGALEGETREERTFRNWMNSLGVNPRVNHLYSDLSDALVIFQLYEKIKVPVDWNRVNKPPYPKLGGNMKKLENCNYAVELGKNQAKFSLVGIGGQDLNEGNRTLTLALIWQLMRRYQLNISKEIVVADSNDDLFVTGDMNYEERKSLLSVQTQYKRGGLTH

SEQ ID NO: 896566 - protein, 165 aa, Homo sapiens
MARGSVSDEEMMELREAFAKVDTDGNGYISFNELNDLFKAACLPLPGYRVREITENLMATGDLDQDGRISFDEFIKIFHGLKSTDVAKTFRKAINKKEGICAIGGTSEQSSVGTQHSYSEEEKYAFVNWINKALENDPDCRHVIPMNPNTNDLFNAVGDGIVLCK

SEQ ID NO: 896567 - protein, 149 aa, Homo sapiens
MMTKHKKCFIIVGVLITTNIITLIVKLTRDSQSLCPYDWIGFQNKCYYFSKEEGDWNSSKYNCSTQHADLTIIDNIEETNFLRRYKCSSDHWIGLKMAKNRTGQWVDGATFTKSFGMRGSEGCAYLSDDGAATARCYTERKWICRKRIH

SEQ ID NO: 896568 - protein, 149 aa, Homo sapiens
MMTKHKKCFIIVGVLITTNIITLIVKLTRDSQSLCPYDWIGFQNKCYYFSKEEGDWNSSKYNCSTQHADLTIIDNIEEMNFLRRYKCSSDHWIGLKMAKNRTGQWVDGATFTKSFGMRGSEGCAYLSDDGAATARCYTERKWICRKRIH

SEQ ID NO: 896569 - protein, 149 aa, Homo sapiens; identical to SEQ ID NO: 896567

SEQ ID NO: 896570 - protein, 149 aa, Homo sapiens; identical to SEQ ID NO: 896568

SEQ ID NO: 896571 - protein, 149 aa, Homo sapiens; identical to SEQ ID NO: 896567

SEQ ID NO: 896572 - protein, 745 aa, Homo sapiens
MPFPVTTQGSQQTQPPQKHYGITSPISLAAPKETDCVLTQKLIETLKPFGVFEEEEELQRRILILGKLNNLVKEWIREISESKNLPQSVIENVGGKIFTFGSYRLGVHTKGADIDALCVAPRHVDRSDFFTSFYDKLKLQEEVKDLRAVEEAFVPVIKLCFDGIEIDILFARLALQTIPEDLDLRDDSLLKNLDIRCIRSLNGCRVTDEILHLVPNIDNFRLTLRAIKLWAKRHNIYSNILGFLGGVSWAMLVARTCQLYPNAIASTLVHKFFLVFSKWEWPNPVLLKQPEECNLNLPVWDPRVNPSDRYHLMPIITPAYPQQNSTYNVSVSTRMVMVEEFKQGLAITDEILLSKAEWSKLFEAPNFFQKYKHYIVLLASAPTEKQRLEWVGLVESKIRILVGSLEKNEFITLAHVNPQSFPAPKENPDKEEFRTMWVIGLVFKKTENSENLSVDLTYDIQSFTDTVYRQAINSKMFEVDMKIAAMHVKRKQLHQLLPNHVLQKKKKHSTEGVKLTALNDSSLDLSMDSDNSMSVPSPTSATKTSPLNSSGSSQGRNSPAPAVTAASVTNIQATEVSVPQVNSSESSGGTSSESIPQTATQPAISPPPKPTVSRVVSSTRLVNPPPRSSGNAATSGNAATKIPTPIVGVKRTSSPHKEESPKKTKTEEDETSEDANCLALSGHDKTEAKEQLDTETSTTQSETIQTAASLLASQKTSSTDLSDIPALPANPIPVIKNSIKLRLNR

SEQ ID NO: 896573 - protein, 190 aa, Homo sapiens
SGALLMTNREGGEALKASGERIRDEVFDPGVDGHGHYRTSLIACPHDSDRLPRLRTVSAASSCMLVSDKVELGPVVFTTETDAFPVTTQGSQQTQPPQKHYGITSPISLAAPKETDCVLTQKLIETLKPFGVFEEEEELQRRILILGKLNNLVKEWIREISESKVLILMRCVLHQDMLIEVTFSPHSMIS

SEQ ID NO: 896574 - protein, 745 aa, Homo sapiens; identical to SEQ ID NO: 896572

SEQ ID NO: 896575 - protein, 745 aa, Homo sapiens; identical to SEQ ID NO: 896572

SEQ ID NO: 896576 - protein, 745 aa, Homo sapiens; identical to SEQ ID NO: 896572

SEQ ID NO: 896577 - protein, 724 aa, Homo sapiens
MPFPVTTQGSQQTQPPQKHYGITSPISLAAPKETDCVLTQKLIETLKPFGVFEEEEELQRRILILGKLNNLVKEWIREISESKNLPQSVIENVGGKIFTFGSYRLGVHTKGADIDALCVAPRHVDRSDFFTSFYDKLKLQEEVKDLRAVEEAFVPVIKLCFDGIEIDILFARLALQTIPEDLDLRDDSLLKNLDIRCIRSLNGCRVTDEILHLVPNIDNFRLTLRAIKLWAKRHNIYSNILGFLGGVSWAMLVARTCQLYPNAIASTLVHKFFLVFSKWEWPNPVLLKQPEECNLNLPVWDPRVNPSDRYHLMPIITPAYPQQNSTYNVSVSTRMVMVEEFKQGLAITDEILLSKAEWSKLFEAPNFFQKYKHYIVLLASAPTEKQRLEWVGLVESKIRILVGSLEKNEFITLAHVNPQSFPAPKENPDKEEFRTMWVIGLVFKKTENSENLSVDLTYDIQSFTDTVYRQAINSKMFEVDMKIAAMHVKRKQLHQLLPNHVLQKKKKHSTEGVKLTALNDSSLDLSMDSDNSMSVPSPTSATKTSPLNSSGSSQGRNSPAPAVTAASVTNIQATEVSVPQVNSSESSGGTSSESIPQTATQPAISPPPKPTVSRVVSSTRLVNPPPRSSGNAATSGNAATKIPTPIVGVKRTSSPHKEESPKKTKTEEEQLDTETSTTQSETIQTAASLLASQKTSSTDLSDIPALPANPIPVIKNSIKLRLNR

SEQ ID NO: 896578 - protein, 699 aa, Homo sapiens
MPFPVTTQGSQQTQPPQKHYGITSPISLAAPKETDCVLTQKLIETLKPFGVFEEEEELQRRILILGKLNNLVKEWIREISESKNLPQSVIENVGGKIFTFGSYRLGVHTKGADIDALCVAPRHVDRSDFFTSFYDKLKLQEEVKDLRAVEEAFVPVIKLCFDGIEIDILFARLALQTIPEDLDLRDDSLLKNLDIRCIRSLNGCRVTDEILHLVPNIDNFRLTLRAIKLWAKRHNIYSNILGFLGGVSWAMLVARTCQLYPNAIASTLVHKFFLVFSKWEWPNPVLLKQPEECNLNLPVWDPRVNPSDRYHLMPIITPAYPQQNSTYNVSVSTRMVMVEEFKQGLAITDEILLSKAEWSKLFEAPNFFQKYKHYIVLLASAPTEKQRLEWVGLVESKIRILVGSLEKNEFITLAHVNPQSFPAPKENPDKEEFRTMWVIGLVFKKTENSENLSVDLTYDIQSFTDTVYRQAINSKMFEVDMKIAAMHVKRKQLHQLLPNHVLQKKKKHSTEGVKLTALNDSSLDLSMDSDNSMSVPSPTSATKTSPLNSSGSSQGRNSPAPAVTAASVTNIQATEVSVPQVNSSESSGGTSSESIPQTATQPAISPPPKPTVSRVVSSTRLVNPPPRSSGNAATSGNAATKIPTPIVGVKRTSSPHKEESPKKTKTEEKTSSTDLSDIPALPANPIPVIKNSIKLRLNR

SEQ ID NO: 896579 - protein, 390 aa, Homo sapiens [sequence omitted]

SEQ ID NO: 896580 - protein, 712 aa, Homo sapiens
MPFPVTTQGSQQTQPPQKHYGITSPISLAAPKETDCVLTQKLIETLKPFGVFEEEEELQRRILILGKLNNLVKEWIREISESKNLPQSVIENVGGKIFTFGSYRLGVHTKGADIDALCVAPRHVDRSDFFTSFYDKLKLQEEVKDLRAVEEAFVPVIKLCFDGIEIDILFARLALQTIPEDLDLRDDSLLKNLDIRCIRSLNGCRVTDEILHLVPNIDNFRLTLRAIKLWAKRHNIYSNILGFLGGVSWAMLVARTCQLYPNAIASTLVHKFFLVFSKWEWPNPVLLKQPEECNLNLPVWDPRVNPSDRYHLYAYNYTSIPTTEWSKLFEAPNFFQKYKHYIVLLASAPTEKQRLEWVGLVESKIRILVGSLEKNEFITLAHVNPQSFPAPKENPDKEEFRTMWVIGLVFKKTENSENLSVDLTYDIQSFTDTVYRQAINSKMFEVDMKIAAMHVKRKQLHQLLPNHVLQKKKKHSTEGVKLTALNDSSLDLSMDSDNSMSVPSPTSATKTSPLNSSGSSQGRNSPAPAVTAASVTNIQATEVSVPQVNSSESSGGTSSESIPQTATQPAISPPPKPTVSRVVSSTRLVNPPPRSSGNAATSGNAATKIPTPIVGVKRTSSPHKEESPKKTKTEEDETSEDANCLALSGHDKTEAKEQLDTETSTTQSETIQTAASLLASQKTSSTDLSDIPALPANPIPVIKNSIKLRLNR

SEQ ID NO: 896581 - protein, 745 aa, Homo sapiens; identical to SEQ ID NO: 896572

SEQ ID NO: 896582 - protein, 749 aa, Homo sapiens
VSNFVYSPVTTQGSQQTQPPQKHYGITSPISLAAPKETDCVLTQKLIETLKPFGVFEEEEELQRRILILGKLNNLVKEWIREISESKNLPQSVIENVGGKIFTFGSYRLGVHTKGADIDALCVAPRHVDRSDFFTSFYDKLKLQEEVKDLRAVEEAFVPVIKLCFDGIEIDILFARLALQTIPEDLDLRDDSLLKNLDIRCIRSLNGCRVTDEILHLVPNIDNFRLTLRAIKLWAKRHNIYSNILGFLGGVSWAMLVARTCQLYPNAIASTLVHKFFLVFSKWEWPNPVLLKQPEECNLNLPVWDPRVNPSDRYHLMPIITPAYPQQNSTYNVSVSTRMVMVEEFKQGLAITDEILLSKAEWSKLFEAPNFFQKYKHYIVLLASAPTEKQRLEWVGLVESKIRILVGSLEKNEFITLAHVNPQSFPAPKENPDKEEFRTMWVIGLVFKKTENSENLSVDLTYDIQSFTDTVYRQAINSKMFEVDMKIAAMHVKRKQLHQLLPNHVLQKKKKHSTEGVKLTALNDSSLDLSMDSDNSMSVPSPTSATKTSPLNSSGSSQGRNSPAPAVTAASVTNIQATEVSVPQVNSSESSGGTSSESIPQTATQPAISPPPKPTVSRVVSSTRLVNPPPRSSGNAATSGNAATKIPTPIVGVKRTSSPHKEESPKKTKTEEDETSEDANCLALSGHDKTEAKEQLDTETSTTQSETIQTAASLLASQKTSSTDLSDIPALPANPIPVIKNSIKLRLNR

SEQ ID NO: 896583 - protein, 757 aa, Homo sapiens
MPLRSSLGDRARLKNPVTTQGSQQTQPPQKHYGITSPISLAAPKETDCVLTQKLIETLKPFGVFEEEEELQRRILILGKLNNLVKEWIREISESKNLPQSVIENVGGKIFTFGSYRLGVHTKGADIDALCVAPRHVDRSDFFTSFYDKLKLQEEVKDLRAVEEAFVPVIKLCFDGIEIDILFARLALQTIPEDLDLRDDSLLKNLDIRCIRSLNGCRVTDEILHLVPNIDNFRLTLRAIKLWAKRHNIYSNILGFLGGVSWAMLVARTCQLYPNAIASTLVHKFFLVFSKWEWPNPVLLKQPEECNLNLPVWDPRVNPSDRYHLMPIITPAYPQQNSTYNVSVSTRMVMVEEFKQGLAITDEILLSKAEWSKLFEAPNFFQKYKHYIVLLASAPTEKQRLEWVGLVESKIRILVGSLEKNEFITLAHVNPQSFPAPKENPDKEEFRTMWVIGLVFKKTENSENLSVDLTYDIQSFTDTVYRQAINSKMFEVDMKIAAMHVKRKQLHQLLPNHVLQKKKKHSTEGVKLTALNDSSLDLSMDSDNSMSVPSPTSATKTSPLNSSGSSQGRNSPAPAVTAASVTNIQATEVSVPQVNSSESSGGTSSESIPQTATQPAISPPPKPTVSRVVSSTRLVNPPPRSSGNAATSGNAATKIPTPIVGVKRTSSPHKEESPKKTKTEEDETSEDANCLALSGHDKTEAKEQLDTETSTTQSETIQTAASLLASQKTSSTDLSDIPALPANPIPVIKNSIKLRLNR

SEQ ID NO: 896584 - protein, 827 aa, Homo sapiens
  misc_feature (53)..(53): Xaa can be any naturally occurring amino acid
SGALLMTNREGGEALKASGERIRDEVFDPEVLMVMATTAHLSSPALTIRIDCXDCGQCQPRSQCMLVSDKVELGPVVFTTETEPFPVTTQGSQQTQPPQKHYGITSPISLAAPKETDCVLTQKLIETLKPFGVFEEEEELQRRILILGKLNNLVKEWIREISESKNLPQSVIENVGGKIFTFGSYRLGVHTKGADIDALCVAPRHVDRSDFFTSFYDKLKLQEEVKDLRAVEEAFVPVIKLCFDGIEIDILFARLALQTIPEDLDLRDDSLLKNLDIRCIRSLNGCRVTDEILHLVPNIDNFRLTLRAIKLWAKRHNIYSNILGFLGGVSWAMLVARTCQLYPNAIASTLVHKFFLVFSKWEWPNPVLLKQPEECNLNLPVWDPRVNPSDRYHLMPIITPAYPQQNSTYNVSVSTRMVMVEEFKQGLAITDEILLSKAEWSKLFEAPNFFQKYKHYIVLLASAPTEKQRLEWVGLVESKIRILVGSLEKNEFITLAHVNPQSFPAPKENPDKEEFRTMWVIGLVFKKTENSENLSVDLTYDIQSFTDTVYRQAINSKMFEVDMKIAAMHVKRKQLHQLLPNHVLQKKKKHSTEGVKLTALNDSSLDLSMDSDNSMSVPSPTSATKTSPLNSSGSSQGRNSPAPAVTAASVTNIQATEVSVPQVNSSESSGGTSSESIPQTATQPAISPPPKPTVSRVVSSTRLVNPPPRSSGNAATSGNAATKIPTPIVGVKRTSSPHKEESPKKTKTEEDETSEDANCLALSGHDKTEAKEQLDTETSTTQSETIQTAASLLASQKTSSTDLSDIPALPANPIPVIKNSIKLRLNR

SEQ ID NO: 896585 - protein, 750 aa, Homo sapiens
PLVPIDSGLSLLSGPGSPVSPQKHYGITSPISLAAPKETDCVLTQKLIETLKPFGVFEEEEELQRRILILGKLNNLVKEWIREISESKNLPQSVIENVGGKIFTFGSYRLGVHTKGADIDALCVAPRHVDRSDFFTSFYDKLKLQEEVKDLRAVEEAFVPVIKLCFDGIEIDILFARLALQTIPEDLDLRDDSLLKNLDIRCIRSLNGCRVTDEILHLVPNIDNFRLTLRAIKLWAKRHNIYSNILGFLGGVSWAMLVARTCQLYPNAIASTLVHKFFLVFSKWEWPNPVLLKQPEECNLNLPVWDPRVNPSDRYHLMPIITPAYPQQNSTYNVSVSTRMVMVEEFKQGLAITDEILLSKAEWSKLFEAPNFFQKYKHYIVLLASAPTEKQRLEWVGLVESKIRILVGSLEKNEFITLAHVNPQSFPAPKENPDKEEFRTMWVIGLVFKKTENSENLSVDLTYDIQSFTDTVYRQAINSKMFEVDMKIAAMHVKRKQLHQLLPNHVLQKKKKHSTEGVKLTALNDSSLDLSMDSDNSMSVPSPTSATKTSPLNSSGSSQGRNSPAPAVTAASVTNIQATEVSVPQVNSSESSGGTSSESIPQTATQPAISPPPKPTVSRVVSSTRLVNPPPRSSGNAATSGNAATKIPTPIVGVKRTSSPHKEESPKKTKTEEDETSEDANCLALSGHDKTEAKEQLDTETSTTQSETIQTAASLLASQKTSSTDLSDIPALPANPIPVIKNSIKLRLNR

SEQ ID NO: 896586 - protein, 680 aa, Homo sapiens
MPFPVTTQGSQQTQPPQKHYGITSPISLAAPKETDCVLTQKLIETLKPFGVFEEEEELQRRILILGKLNNLVKEWIREISESKNLPQSVIENVGGKIFTFGSYRLGVHTKGADIDALCVAPRHVDRSDFFTSFYDKLKLQEEVKDLRAVEEAFVPVIKLCFDGIEIDILFARLALQTIPEDLDLRDDSLLKNLDIRCIRSLNGCRVTDEILHLVPNIDNFRLTLRAIKLWAKRHNIYSNILGFLGGVSWAMLVARTCQLYPNAIASTLVHKFFLVFSKWEWPNPVLLKQPEECNLNLPVWDPRVNPSDRYHLMPIITPAYPQQNSTYNVSVSTRMVMVEEFKQGLAITDEILLSKAEWSKLFEAPNFFQKYKHYIVLLASAPTEKQRLEWVGLVESKIRILVGSLEKNEFITLAHVNPQSFPAPKENPDKEEFRTMWVIGLVFKKTENSENLSVDLTYDIQSFTDTVYRQAINSKMFEVDMKIAAMHVKRKQLHQLLPNHVLQKKKKHSTEGVKLTALNDSSLDLSMDSDNSMSVPSPTSATKTSPLNSSGSSQGRNSPAPAVTAASVTNIQATEVSVPQVNSSESSGGTSSESIPQTATQPAISPPPKPTVSRVVSSTRLVNPPPRSSGNAATSGNAATKIPTPIVGVKRTSSPHKEESPKKTKTEEMKQVKMLTVCFE

SEQ ID NO: 896587 - protein, 555 aa, Homo sapiens
MPFPVTTQGSQQTQPPQKHYGITSPISLAAPKETDCVLTQKLIETLKPFGVFEEEEELQRRILILGKLNNLVKEWIREISESKNLPQSVIENVGGKIFTFGSYRLGVHTKGADIDALCVAPRHVDRSDFFTSFYDKLKLQEEVKDLRAVEEAFVPVIKLCFDGIEIDILFARLALQTIPEDLDLRDDSLLKNLDIRCIRSLNGCRVTDEILHLVPNIDNFRLTLRAIKLWAKRHNIYSNILGFLGGVSWAMLVARTCQLYPNAIASTLVHKFFLVFSKWEWPNPVLLKQPEECNLNLPVWDPRVNPSDRYHLMPIITPAYPQQNSTYNVSVSTRMVMVEEFKQGLAITDEILLSKAEWSKLFEAPNFFQKYKHYIVLLASAPTEKQRLEWVGLVESKIRILVGSLEKNEFITLAHVNPQSFPAPKENPDKEEFRTMWVIGLVFKKTENSENLSVDLTYDIQSFTDTVYRQAINSKMFEVDMKIAAMHVKRKQLHQLLPNHVLQKKKKHSTEGVKLTALNDSSLDLSMDSDNSMSVPSPTSATKTSPLNSSGSSQG

SEQ ID NO: 896588 - protein, 580 aa, Homo sapiens
MPFPVTTQGSQQTQPPQKHYGITSPISLAAPKETDCVLTQKLIETLKPFGVFEEEEELQRRILILGKLNNLVKEWIREISESKNLPQSVIENVGGKIFTFGSYRLGVHTKGADIDALCVAPRHVDRSDFFTSFYDKLKLQEEVKDLRAVEEAFVPVIKLCFDGIEIDILFARLALQTIPEDLDLRDDSLLKNLDIRCIRSLNGCRVTDEILHLVPNIDNFRLTLRAIKLWAKRHNIYSNILGFLGGVSWAMLVARTCQLYPNAIASTLVHKFFLVFSKWEWPNPVLLKQPEECNLNLPVWDPRVNPSDRYHLMPIITPAYPQQNSTYNVSVSTRMVMVEEFKQGLAITDEILLSKAEWSKLFEAPNFFQKYKHYIVLLASAPTEKQRLEWVGLVESKIRILVGSLEKNEFITLAHVNPQSFPAPKENPDKEEFRTMWVIGLVFKKTENSENLSVDLTYDIQSFTDTVYRQAINSKMFEVDMKIAAMHVKRKQLHQLLPNHVLQKKKKHSTEGVKLTALNDSSLDLSMDSDNSMSVPSPTSATKTSPLNSSGSSQGRNSPAPAVTAASVLLVFFKSYFVNR

SEQ ID NO: 896589 - protein, 285 aa, Homo sapiens
MPFPVTTQGSQQTQPPQKHYGITSPISLAAPKETDCVLTQKLIETLKPFGVFEEEEELQRRILILGKLNNLVKEWIREISESKNLPQSVIENVGGKIFTFGSYRLGVHTKGADIDALCVAPRHVDRSDFFTSFYDKLKLQEEVKDLRAVEEAFVPVIKLCFDGIEIDILFARLALQTIPEDLDLRDDSLLKNLDIRCIRSLNGCRVTDEILHLVPNIDNFRLTLRAIKLWAKRHNIYSNILGFLGGVSWAMLVARTCQLYPNAIASTLVHKFFLVFSKWYVFRLY

SEQ ID NO: 896590 - protein, 285 aa, Homo sapiens; identical to SEQ ID NO: 896589

SEQ ID NO: 896591 - protein, 317 aa, Homo sapiens
MPFPVTTQGSQQTQPPQKHYGITSPISLAAPKETDCVLTQKLIETLKPFGVFEEEEELQRRILILGKLNNLVKEWIREISESKNLPQSVIENVGGKIFTFGSYRLGVHTKGADIDALCVAPRHVDRSDFFTSFYDKLKLQEEVKDLRAVEEAFVPVIKLCFDGIEIDILFARLALQTIPEDLDLRDDSLLKNLDIRCIRSLNGCRVTDEILHLVPNIDNFRLTLRAIKLWAKRHNIYSNILGFLGGVSWAMLVARTCQLYPNAIASTLVHKFFLVFSKWEWPNPVLLKQPEECNLNLPVWDPRVSVLFFPLPIHTVQ

SEQ ID NO: 896592 - protein, 390 aa, Homo sapiens [sequence omitted]

SEQ ID NO: 896593 - protein, 149 aa, Homo sapiens
GDLEDPAISPPPKPTVSRVVSSTRLVNPPPRSSGNAATSGNAATKIPTPIVGVKRTSSPHKEESPKKTKTEEDETSEDANCLALSGHDKTEAKEQLDTETSTTQSETIQTAASLLASQKTSSTDLSDIPALPANPIPVIKNSIKLRLNR

SEQ ID NO: 896594 - protein, 285 aa, Homo sapiens; identical to SEQ ID NO: 896589

SEQ ID NO: 896595 - protein, 238 aa, Homo sapiens
MPFPVTTQGSQQTQPPQKHYGITSPISLAAPKETDCVLTQKLIETLKPFGVFEEEEELQRRILILGKLNNLVKEWIREISESKNLPQSVIENVGGKIFTFGSYRLGVHTKGADIDALCVAPRHVDRSDFFTSFYDKLKLQEEVKDLRAVEEAFVPVIKLCFDGIEIDILFARLALQTIPEDLDLRDDSLLKNLDIRCIRSLNGMRKPTSFCVLQFLSDISCFYTSFVLKLFIAILLTQ

SEQ ID NO: 896596 - protein, 185 aa, Homo sapiens
MPFPVTTQGSQQTQPPQKHYGITSPISLAAPKETDCVLTQKLIETLKPFGVFEEEEELQRRILILGKLNNLVKEWIREISESKNLPQSVIENVGGKIFTFGSYRLGVHTKGADIDALCVAPRHVDRSDFFTSFYDKLKLQEEVKDLRAVEEAFVPVIKLCFDGIEIDMLSADLACRPFLKIGSTR

SEQ ID NO: 896597 - protein, 112 aa, Homo sapiens
MPFPVTTQGSQQTQPPQKHYGITSPISLAAPKETDCVLTQKLIETLKPFGVFEEEEELQRRILILGKLNNLVKEWIREISESKNLPQSVIENVGGKIFTFGSYRLGVHTKGC

SEQ ID NO: 896598 - protein, 361 aa, Homo sapiens; identical to SEQ ID NO: 749354

SEQ ID NO: 896599 - protein, 252 aa, Homo sapiens
MGQAGGPWDRENFNEWVPLFPQGSAKELSPAALEKRRRRKQERDRKKRKRKELRAKEKARKAEEATEAQEVVEATPEGACTEPREPPGLIFNKVEVSEDEPASKAQRRKEKRQRVKGNLTPLTGRNYRQLLERLQARQSRLDELRGQDEGKAQELEAKMKWTNLLYKAEGVKIRDDERLLQEALKRKEKRRAQRQRRWEKRTAGVVEKMQQRQDRRRQNLRRKKAARAERRLLRARKKGRILPQDLERAGLV

SEQ ID NO: 896600 - protein, 244 aa, Homo sapiens
  misc_feature (4)..(4): Xaa can be any naturally occurring amino acid
WAFXAEPRTFLTPRITPRDTHSKQQPGKRTKKQERDRKKRKRKELRAKEKARKAEEATEAQEVVEATPEGACTEPREPPGLIFNKVEVSEDEPASKAQRRKEKRQRVKGNLTPLTGRNYRQLLERLQARQSRLDELRGQDEGKAQELEAKMKWTNLLYKAEGVKIRDDERLLQEALKRKEKRRAQRQRRWEKRTAGVVEKMQQRQDRRRQNLRRKKAARAERRLLRARKKGRILPQDLERAGLV

SEQ ID NO: 896601 - protein, 263 aa, Homo sapiens
MASLLAKDAYLQSLAKKICSHSAPEQQARTRAGKTQGSETAGPPKKKRKKTQKKFRKREEKAAEHKAKSLGEKSPAASGARRPEAAKEEAAWASSSAGNPADGLATEPESVFALDVLRQRLHEKIQEARGQGSAKELSPAALEKRRRRKQERDRKKRKRKELRAKEKARKAEEATEAQEVVEATPEGACTEPREPPGLIFNKVEVSEDEPASKAQRRKEKRQRVKGNLTLTEDYGSGEAEDRNRWKWRQRGSANGGNNGPPKG

SEQ ID NO: 896602 - protein, 238 aa, Homo sapiens
MHILKGSPNVIPRAHGQKNTRRDGTGLYPMRGPFKNLALLPFSLPLLGGGGSGSGEKVSVSKMAAAWPSGPSAPEAVTARLVGVLWFVSVTTGPWGAVATSAGGEESLKCEDLKVGQYICKDPKINDATQEPVNCTNYTAHVSCFPAPNITCKDSSGNETHFTGNEVGFFKPISCRNVNGYSYKVAVALSLFLGWLGADRFYLGYPALGLLKFCTVGFCGIGSLIDFILISMQVSFSI

SEQ ID NO: 896603 - protein, 248 aa, Homo sapiens
MHILKGSPNVIPRAHGQKNTRRDGTGLYPMRGPFKNLALLPFSLPLLGGGGSGSGEKVSVSKMAAAWPSGPSAPEAVTARLVGVLWFVSVTTGPWGAVATSAGGEESLKCEDLKVGQYICKDPKINDATQEPVNCTNYTAHVSCFPAPNITCKDSSGNETHFTGNEVGFFKPISCRNVNGYSYKVAVALSLFLGWLGADRFYLGYPALGKETVTREVKGFTESRGFPLFCDIFVVIIFVLWIGKLSRD

SEQ ID NO: 896604 - protein, 269 aa, Homo sapiens
MHILKGSPNVIPRAHGQKNTRRDGTGLYPMRGPFKNLALLPFSLPLLGGGGSGSGEKVSVSKMAAAWPSGPSAPEAVTARLVGVLWFVSVTTGPWGAVATSAGGEESLKCEDLKVGQYICKDPKINDATQEPVNCTNYTAHVSCFPAPNITCKDSSGNETHFTGNEVGFFKPISCRNVNGYSYKVAVALSLFLGWLGADRFYLGYPALGLLKFCTVGFCGIGSLIDFILISMQIVGPSDGSSYIIDYYGTRLTRLSITNETFRKTQLYP

SEQ ID NO: 896605 - protein, 269 aa, Homo sapiens; identical to SEQ ID NO: 896604

SEQ ID NO: 896606 - protein, 269 aa, Homo sapiens; identical to SEQ ID NO: 896604

SEQ ID NO: 896607 - protein, 294 aa, Homo sapiens
MHILKGSPNVIPRAHGQKNTRRDGTGLYPMRGPFKNLALLPFSLPLLGGGGSGSGEKVSVSKMAAAWPSGPSAPEAVTARLVGVLWFVSVTTGPWGAVATSAGGEESLKCEDLKVGQYICKDPKINDATQEPVNCTNYTAHVSCFPAPNITCKDSSGNETHFTGNEVGFFKPISCRNVNGYSYKVAVALSLFLGWLGADRFYLGYPALGLLKFCTVGFCGIGSLIDFILISMQRQSLALLPRLECSGSILAHCNVCLPGSSDSRASASPVAGTTGTHHHARVTCIFSRDGVSPF

SEQ ID NO: 896608 - protein, 274 aa, Homo sapiens
MHILKGSPNVIPRAHGQKNTRRDGTGLYPMRGPFKNLALLPFSLPLLGGGGSGSGEKVSVSKMAAAWPSGPSAPEAVTARLVGVLWFVSVTTGPWGAVATSAGGEESLKCEDLKVGQYICKDPKINDATQEPVNCTNYTAHVSCFPAPNITCKDSSGNETHFTGNEVGFFKPISCRNVNGYSYKVAVALSLFLGWLGADRFYLGYPALGLLKFCTVGFCGIGSLIDFILISMQRQGLALLPRLECSGVIITHCSLEFLGSNNLPASAPIQYGIF

SEQ ID NO: 896609 - protein, 131 aa, Homo sapiens
MHILKGSPNVIPRAHGQKNTRRDGTGLYPMRGPFKNLALLPFSLPLLGGGGSGSGEKVSVSKMAAAWPSGPSAPEAVTARLVGVLWFVSVTTGPWGAVATSAGGEESLKCEDLKVGQYICKDPFPVFQHPT

SEQ ID NO: 896610 - protein, 179 aa, Homo sapiens
ADEHEFMDSGLALLLDEVDEPMVEAVVRGHLSTAIKLRLYFLSQLLSQLHSPLVKAVDVPDDALNEDLVLIHGDQGSKHEWCELGEHNRVGWAISFKDLMWQQPLKVLWTLARSLELLSGLLRRFSPHQGLCLGQEVGQEDLVMQTLPYGVLGLDRDEEVTGYHLGALILCNREILYIM

SEQ ID NO: 896611 - protein, 131 aa, Homo sapiens; identical to SEQ ID NO: 896609

SEQ ID NO: 896612 - protein, 148 aa, Homo sapiens
MHILKGSPNVIPRAHGQKNTRRDGTGLYPMRGPFKNLALLPFSLPLLGGGGSGSGEKVSVSKMAAAWPSGPSAPEAVTARLVGVLWFVSVTTGPWGAVATSAGGEESLKCEDLKVGQYICKDPPLWRTPPHGGEVELGSQFPVFQHPT

SEQ ID NO: 896613 - protein, 308 aa, Homo sapiens
MHILKGSPNVIPRAHGQKNTRRDGTGLYPMRGPFKNLALLPFSLPLLGGGGSGSGEKVSVSKMAAAWPSGPSAPEAVTARLVGVLWFVSVTTGPWGAVATSAGGEESLKCEDLKVGQYICKDPPPHGGEGLTLSPWLEYIGTDLSSLQPPPPGFSQFSCLSLLSSWDYMACATHPVSCFPAPNITCKDSSGNETHFTGNEVGFFKPISCRNVNGYSYKVAVALSLFLGWLGADRFYLGYPALGLLKFCTVGFCGIGSLIDFILISMQRQGLALLPRLECSGVIITHCSLEFLGSNNLPASAPIQYGIF

SEQ ID NO: 896614 - protein, 176 aa, Homo sapiens
RFAKCEDLKAGQYPLWRTPPHGGEVELGSQKINDATQEPVNCTNYTAHVSCFPAPNITCKDSSGNETHFTGNEVGFFKPISCRNVNGYSYKVAVALSLFLGWLGADRFYLGYPALGLLKFCTVGFCGIGSLIDFILISMQIVGPSDGSSYIIDYYGTRLTRLSITNETFRKTQLYP

SEQ ID NO: 896615 - protein, 216 aa, Homo sapiens
MHILKGSPNVIPRAHGQKNTRRDGTGLYPMRGPFKNLALLPFSLPLLGGGGSGSGEKVSVSKMAAAWPSGPSAPEAVTARLVGVLWFVSVTTGPWGAVATSAGGEESLKCEDLKVGQYICKDPKINDATQEPVNCTNYTAHVSCFPAPNITCKDSSGNETHFTGNEVGFFKPISCRNVNGYSYKVAVALSLFLGWLGADRFYLGYPALDCWTFRWK

SEQ ID NO: 896616 - protein, 1124 aa, Homo sapiens
MGENEDEKQAQAGQVFENFVQASTCKGTLQAFNILTRHLDLDPLDHRNFYSKLKSKVTTWKAKALWYKLDKRGSHKEYKRGKSCTNTKCLIVGGGPCGLRTAIELAYLGAKVVVVEKRDSFSRNNVLHLWPFTIHDLRGLGAKKFYGKFCAGSIDHISIRQLQLILFKVALMLGVEIHVNVEFVKVLEPPEDQENQKIGWRAEFLPTDHSLSEFEFDVIIGADGRRNTLEGFRRKEFRGKLAIAITANFINRNSTAEAKVEEISGVAFIFNQKFFQDLKEETGIDLENIVYYKDCTHYFVMTAKKQSLLDKGVIINDYIDTEMLLCAENVNQDNLLSYAREAADFATNYQLPSLDFAMNHYGQPDVAMFDFTCMYASENAALVRERQAHQLLVALVGDSLLEPFWPMGTGCARGFLAAFDTAWMVKSWNQGTPPLELLAERESLYRLLPQTTPENINKNFEQYTLDPGTRYPNLNSHCVRPHQVKHLYITKELEHYPLERLGSVRRSVNLSRKESDIRPSKLLTWCQQQTEGYQHVNVTDLTTSWRSGLALCAIIHRFRPELINFDSLNEDDAVENNQLAFDVAEREFGIPPVTTGKEMASAQEPDKLSMVMYLSKFYELFRGTPLRPVDSWRKNYGENADLSLAKSSISNNYLNLTFPRKRTPRVDGQTGENDMNKRRRKGFTNLDEPSNFSSRSLGSNQECGSSKEGGNQNKVKSMANQLLAKFEESTRNPSLMKQERRVSGIGKPVLCSSSGPPVHSCCPKPEEATPSPSPPLKRQFPSVVVTGHVLRELKQVSAGSECLSRPWRARAKSDLQLGGTENFATLPSTRPRAQALSGVLWRLQQVEEKILQKRAQNLANREFHTKNIKEKAAHLASMFGHGDFPQNKLLSKGLSHTHPPSPPSRLPSPDPAASSSPSTVDSASPARKEKKSPSGFHFHPSHLRTVHPQLTVGKVSSGIGAAAEVLVNLYMNDHRPKAQATSPDLESMRKSFPLNLGGSDTCYFCKKRVYVMERLSAEGHFFHRECFRCSICATTLRLAAYTFDCDEGKFYCKPHFIHCKTNSKQRKRRAELKQQREEEATWQEQEAPRRDTPTESSCAVAAIGTLEGSPPVHFSLPVLHPLLG

SEQ ID NO: 896617 - protein, 199 aa, Homo sapiens
MGENEDEKQAQAGQVFENFVQASTCKGTLQAFNILTRHLDLDPLDHRNFYSKLKSKVTTWKAKALWYKLDKRGSHKEYKRGKSCTNTKCLIVGGGPCGLRTAIELAYLGAKVVVVEKRDSFSRNNVLHLWPFTIHDLRGLGAKKFYGKFCAGSIDHISIRQLQLILFKVALMLGVEIHVNVEFVKVLEPPEDQENQSTV

SEQ ID NO: 896618 - protein, 158 aa, Homo sapiens
MGENEDEKQAQAGQVFENFVQASTCKGTLQAFNILTRHLDLDPLDHRNFYSKLKSKVTTWKAKALWYKLDKRGSHKEYKRGKSCTNTKFPANDPKAGTQGKCMPFFRAGFVCPSPPYKSLAREQINALTSFLDASFVYSSEPSLASRLRKLSSPLGLM

SEQ ID NO: 896619 - protein, 1181 aa, Homo sapiens
MGENEDEKQAQAGQVFENFVQASTCKGTLQAFNILTRHLDLDPLDHRNFYSKLKSKVTTWKAKALWYKLDKRGSHKEYKRGKSCTNTKCLIVGGGPCGLRTAIELAYLGAKVVVVEKRDSFSRNNVLHLWPFTIHDLRGLGAKKFYGKFCAGSIDHISIRQLQLILFKVALMLGVEIHVNVEFVKVLEPPEDQENQKIGWRAEFLPTDHSLSEFEFDVIIGADGRRNTLEGFRRKEFRGKLAIAITANFINRNSTAEAKVEEISGVAFIFNQKFFQDLKEETGIDLENIVYYKDCTHYFVMTAKKQSLLDKGVIINDYIDTEMLLCAENVNQDNLLSYAREAADFATNYQLPSLDFAMNHYGQPDVAMFDFTCMYASENAALVRERQAHQLLVALVGDSLLEPFWPMGTGCARGFLAAFDTAWMVKSWNQGTPPLELLAERESLYRLLPQTTPENINKNFEQYTLDPGTRYPNLNSHCVRPHQVKHLYITKELEHYPLERLGSVRRSVNLSRKESDIRPSKLLTWCQQQTEGYQHVNVTDLTTSWRSGLALCAIIHRFRPELINFDSLNEDDAVENNQLAFDVAEREFGIPPVTTGKEMASAQEPDKLSMVMYLSKFYELFRGTPLRPVDSWRKNYGENADLSLAKSSISNNYLNLTFPRKRTPRVDGQTGENDMNKRRRKGFTNLDEPSNFSSRSLGSNQECGSSKEGGNQNKVKSMANQLLAKFEESTRNPSLMKQERRVSGIGKPVLCSSSGPPVHSCCPKPEEATPSPSPPLKRQFPSVVVTGHVLRELKQVSAGSECLSRPWRARAKSDLQLGGTENFATLPSTRPRAQALSGVLWRLQQVEEKILQKRAQNLANREFHTKNIKEKAAHLASMFGHGDFPQNKLLSKGLSHTHPPSPPSRLPSPDPAASSSPSTVDSASPARKLTVGKVSSGIGAAAEVLVNLYMNDHRPKAQATSPDLESMRKSFPLNLGGSDTCYFCKKRVYVMERLSAEGHFFHRECFRCSICATTLRLAAYTFDCDEGKFYCKPHFIHCKTNSKQRKRRAELKQQREEEATWQEQEAPRRDTPTESSCAVAAIGTLEGSPPGISTSFFRKVLGWPLRLPRDLCNWMQGLLQAAGLHIRDNAYNYCYMYELLSLGLPLLWAFSEVLAAMYRESEGSLESICNWVLRCFPVKLR

SEQ ID NO: 896620 - protein, 1162 aa, Homo sapiens
MGENEDEKQAQAGQVFENFVQASTCKGTLQAFNILTRHLDLDPLDHRNFYSKLKSKVTTWKAKALWYKLDKRGSHKEYKRGKSCTNTKCLIVGGGPCGLRTAIELAYLGAKVVVVEKRDSFSRNNVLHLWPFTIHDLRGLGAKKFYGKFCAGSIDHISIRQLQLILFKVALMLGVEIHVNVEFVKVLEPPEDQENQKIGWRAEFLPTDHSLSEFEFDVIIGADGRRNTLEGFRRKEFRGKLAIAITANFINRNSTAEAKVEEISGVAFIFNQKFFQDLKEETGIDLENIVYYKDCTHYFVMTAKKQSLLDKGVIINDYIDTEMLLCAENVNQDNLLSYAREAADFATNYQLPSLDFAMNHYGQPDVAMFDFTCMYASENAALVRERQAHQLLVALVGDSLLEPFWPMGTGCARGFLAAFDTAWMVKSWNQGTPPLELLAERESLYRLLPQTTPENINKNFEQYTLDPGTRYPNLNSHCVRPHQVKHLYITKELEHYPLERLGSVRRCQQQTEGYQHVNVTDLTTSWRSGLALCAIIHRFRPELINFDSLNEDDAVENNQLAFDVAEREFGIPPVTTGKEMASAQEPDKLSMVMYLSKFYELFRGTPLRPVDSWRKNYGENADLSLAKSSISNNYLNLTFPRKRTPRVDGQTGENDMNKRRRKGFTNLDEPSNFSSRSLGSNQECGSSKEGGNQNKVKSMANQLLAKFEESTRNPSLMKQERRVSGIGKPVLCSSSGPPVHSCCPKPEEATPSPSPPLKRQFPSVVVTGHVLRELKQVSAGSECLSRPWRARAKSDLQLGGTENFATLPSTRPRAQALSGVLWRLQQVEEKILQKRAQNLANREFHTKNIKEKAAHLASMFGHGDFPQNKLLSKGLSHTHPPSPPSRLPSPDPAASSSPSTVDSASPARKLTVGKVSSGIGAAAEVLVNLYMNDHRPKAQATSPDLESMRKSFPLNLGGSDTCYFCKKRVYVMERLSAEGHFFHRECFRCSICATTLRLAAYTFDCDEGKFYCKPHFIHCKTNSKQRKRRAELKQQREEEATWQEQEAPRRDTPTESSCAVAAIGTLEGSPPGISTSFFRKVLGWPLRLPRDLCNWMQGLLQAAGLHIRDNAYNYCYMYELLSLGLPLLWAFSEVLAAMYRESEGSLESICNWVLRCFPVKLR

SEQ ID NO: 896621 - protein, 1181 aa, Homo sapiens; identical to SEQ ID NO: 896619

SEQ ID NO: 896622 - protein, 1181 aa, Homo sapiens; identical to SEQ ID NO: 896619

SEQ ID NO: 896623 - protein, 1115 aa, Homo sapiens
MGENEDEKQAQAGQVFENFVQASTCKGTLQAFNILTRHLDLDPLDHRNFYSKLKSKVTTWKAKALWYKLDKRGSHKEYKRGKSCTNTKCLIVGGGPCGLRTAIELAYLGAKVVVVEKRDSFSRNNVLHLWPFTIHDLRGLGAKKFYGKFCAGSIDHISIRQLQLILFKVALMLGVEIHVNVEFVKVLEPPEDQENQKIGWRAEFLPTDHSLSEFEFDVIIGADGRRNTLEGFRRKEFRGKLAIAITANFINRNSTAEAKVEEISGVAFIFNQKFFQDLKEETGIDLENIVYYKDCTHYFVMTAKKQSLLDKGVIINDYIDTEMLLCAENVNQDNLLSYAREAADFATNYQLPSLDFAMNHYGQPDVAMFDFTCMYASENAALVRERQAHQLLVALVGDSLLEPFWPMGTGCARGFLAAFDTAWMVKSWNQGTPPLELLAERESLYRLLPQTTPENINKNFEQYTLDPGTRYPNLNSHCVRPHQVKHLYITKELEHYPLERLGSVRRSVNLSRKESDIRPSKLLTWCQQQTEGYQHVNVTDLTTSWRSGLALCAIIHRFRPELINFDSLNEDDAVENNQLAFDVAEREFGIPPVTTGKEMASAQEPDKLSMVMYLSKFYELFRGTPLRPVDSWRKNYGENADLSLAKSSISNNYLNLTFPRKRTPRVDGQTGENDMNKRRRKGFTNLDEPSNFSSRSLGSNQECGSSKEGGNQNKVKSMANQLLAKFEESTRNPSLMKQERRVSGIGKPVLCSSSGPPVHSCCPKPEEATPSPSPPLKRQFPSVVVTGHVLRELKQVSAGSECLSRPWRARAKSDLQLGGTENFATLPSTRPRAQALSGVLWRLQQVEEKILQKRAQNLANREFHTKNIKEKAAHLASMFGHGDFPQNKLLSKGLSHTHPPSPPSRLPSPDPAASSSPSTVDSASPARKLTVGKVSSGIGAAAEVLVNLYMNDHRPKAQATSPDLESMRKSFPLNLGGSDTCYFCKKRVYVMERLSAEGHFFHRECFRCSICATTLRLAAYTFDCDEGKFYCKPHFIHCKTNSKQRKRRAELKQQREEEATWQEQEAPRRDTPTESSCAVAAIGTLEGSPPGTQMPLVSSRILFTTRKHNYFRRRE

SEQ ID NO: 896624 - protein, 955 aa, Homo sapiens
MGENEDEKQAQAGQVFENFVQASTCKGTLQAFNILTRHLDLDPLDHRNFYSKLKSKVTTWKAKALWYKLDKRGSHKEYKRGKSCTNTKCLIVGGGPCGLRTAIELAYLGAKVVVVEKRDSFSRNNVLHLWPFTIHDLRGLGAKKFYGKFCAGSIDHISIRQLQLILFKVALMLGVEIHVNVEFVKVLEPPEDQENQKIGWRAEFLPTDHSLSEFEFDVIIGADGRRNTLEGFRRKEFRGKLAIAITANFINRNSTAEAKVEEISGVAFIFNQKFFQDLKEETGIDLENIVYYKDCTHYFVMTAKKQSLLDKGVIINDYIDTEMLLCAENVNQDNLLSYAREAADFATNYQLPSLDFAMNHYGQPDVAMFDFTCMYASENAALVRERQAHQLLVALVGDSLLEPFWPMGTGCARGFLAAFDTAWMVKSWNQGTPPLELLAERESLYRLLPQTTPENINKNFEQYTLDPGTRYPNLNSHCVRPHQVKHLYITKELEHYPLERLGSVRRSVNLSRKESDIRPSKLLTWCQQQTEGYQHVNVTDLTTSWRSGLALCAIIHRFRPELINFDSLNEDDAVENNQLAFDVAEREFGIPPVTTGKEMASAQEPDKLSMVMYLSKFYELFRGTPLRPVDSWRKNYGENADLSLAKSSISNNYLNLTFPRKRTPRVDGQTGENDMNKRRRKGFTNLDEPSNFSSRSLGSNQECGSSKEGGNQNKVKSMANQLLAKFEESTRNPSLMKQESMRKSFPLNLGGSDTCYFCKKRVYVMERLSAEGHFFHRECFRCSICATTLRLAAYTFDCDEGKFYCKPHFIHCKTNSKQRKRRAELKQQREEEATWQEQEAPRRDTPTESSCAVAAIGTLEGSPPGISTSFFRKVLGWPLRLPRDLCNWMQGLLQAAGLHIRDNAYNYCYMYELLSLGLPLLWAFSEVLAAMYRESEGSLESICNWVLRCFPVKLR

SEQ ID NO: 896625 - protein, 751 aa, Homo sapiens
TQQVLGTLLEENMLPLPSCHTPDQAPKQQSSGSCTRASGPLPWPLALGPLVLVPSHGGNEKGAPGQTVWRFLQSLTACALLLAESDIRPSKLLTWCQQQTEGYQHVNVTDLTTSWRSGLALCAIIHRFRPELINFDSLNEDDAVENNQLAFDVAEREFGIPPVTTGKEMASAQEPDKLSMVMYLSKFYELFRGTPLRPVDSWRKNYGENADLSLAKSSISNNYLNLTFPRKRTPRVDGQTGENDMNKRRRKGFTNLDEPSNFSSRSLGSNQECGSSKEGGNQNKVKSMANQLLAKFEESTRNPSLMKQERRVSGIGKPVLCSSSGPPVHSCCPKPEEATPSPSPPLKRQFPSVVVTGHVLRELKQVSAGSECLSRPWRARAKSDLQLGGTENFATLPSTRPRAQALSGVLWRLQQVEEKILQKRAQNLANREFHTKNIKEKAAHLASMFGHGDFPQNKLLSKGLSHTHPPSPPSRLPSPDPAASSSPSTVDSASPARKLTVGKVSSGIGAAAEVLVNLYMNDHRPKAQATSPDLESMRKSFPLNLGGSDTCYFCKKRVYVMERLSAEGHFFHRECFRCSICATTLRLAAYTFDCDEGKFYCKPHFIHCKTNSKQRKRRAELKQQREEEATWQEQEAPRRDTPTESSCAVAAIGTLEGSPPGISTSFFRKVLGWPLRLPRDLCNWMQGLLQAAGLHIRDNAYNYCYMYELLSLGLPLLWAFSEVLAAMYRESEGSLESICNWVLRCFPVKLR

SEQ ID NO: 896626 - protein, 648 aa, Homo sapiens
MEFCHVGQPGLELSSSDLPASASQNCWDYSNFDSLNEDDAVENNQLAFDVAEREFGIPPVTTGKEMASAQEPDKLSMVMYLSKFYELFRGTPLRPVDSWRKNYGENADLSLAKSSISNNYLNLTFPRKRTPRVDGQTGENDMNKRRRKGFTNLDEPSNFSSRSLGSNQECGSSKEGGNQNKVKSMANQLLAKFEESTRNPSLMKQERRVSGIGKPVLCSSSGPPVHSCCPKPEEATPSPSPPLKRQFPSVVVTGHVLRELKQVSAGSECLSRPWRARAKSDLQLGGTENFATLPSTRPRAQALSGVLWRLQQVEEKILQKRAQNLANREFHTKNIKEKAAHLASMFGHGDFPQNKLLSKGLSHTHPPSPPSRLPSPDPAASSSPSTVDSASPARKLTVGKVSSGIGAAAEVLVNLYMNDHRPKAQATSPDLESMRKSFPLNLGGSDTCYFCKKRVYVMERLSAEGHFFHRECFRCSICATTLRLAAYTFDCDEGKFYCKPHFIHCKTNSKQRKRRAELKQQREEEATWQEQEAPRRDTPTESSCAVAAIGTLEGSPPGISTSFFRKVLGWPLRLPRDLCNWMQGLLQAAGLHIRDNAYNYCYMYELLSLGLPLLWAFSEVLAAMYRESEGSLESICNWVLRCFPVKLR

SEQ ID NO: 896627 - protein, 516 aa, Homo sapiens
PQVCFLISRFQDPTISVPFQPLQPSNFSSRSLGSNQECGSSKEGGNQNKVKSMANQLLAKFEESTRNPSLMKQERRVSGIGKPVLCSSSGPPVHSCCPKPEEATPSPSPPLKRQFPSVVVTGHVLRELKQVSAGSECLSRPWRARAKSDLQLGGTENFATLPSTRPRAQALSGVLWRLQQVEEKILQKRAQNLANREFHTKNIKEKAAHLASMFGHGDFPQNKLLSKGLSHTHPPSPPSRLPSPDPAASSSPSTVDSASPARKLTVGKVSSGIGAAAEVLVNLYMNDHRPKAQATSPDLESMRKSFPLNLGGSDTCYFCKKRVYVMERLSAEGHFFHRECFRCSICATTLRLAAYTFDCDEGKFYCKPHFIHCKTNSKQRKRRAELKQQREEEATWQEQEAPRRDTPTESSCAVAAIGTLEGSPPGISTSFFRKVLGWPLRLPRDLCNWMQGLLQAAGLHIRDNAYNYCYMYELLSLGLPLLWAFSEVLAAMYRESEGSLESICNWVLRCFPVKLR

SEQ ID NO: 896628 - protein, 332 aa, Homo sapiens
PIKWRGQQLLLRVTGILQCPNLCKMPEVSCKASLSPVEENSERKLIYLKCMLIPLFLKEKKSPSGFHFHPSHLRTVHPQLTVGKVSSGIGAAAEVLVNLYMNDHRPKAQATSPDLESMRKSFPLNLGGSDTCYFCKKRVYVMERLSAEGHFFHRECFRCSICATTLRLAAYTFDCDEGKFYCKPHFIHCKTNSKQRKRRAELKQQREEEATWQEQEAPRRDTPTESSCAVAAIGTLEGSPPGISTSFFRKVLGWPLRLPRDLCNWMQGLLQAAGLHIRDNAYNYCYMYELLSLGLPLLWAFSEVLAAMYRESEGSLESICNWVLRCFPVKLR

SEQ ID NO: 896629 - protein, 1181 aa, Homo sapiens; identical to SEQ ID NO: 896619

SEQ ID NO: 896630 - protein, 1103 aa, Homo sapiens
MGENEDEKQAQAGQVFENFVQASTCKGTLQAFNILTRHLDLDPLDHRNFYSKLKSKVTTWKAKALWYKLDKRGSHKEYKRGKSCTNTKCLIVGGGPCGLRTAIELAYLGAKVVVVEKRDSFSRNNVLHLWPFTIHDLRGLGAKKFYGKFCAGSIDHISIRQLQLILFKVALMLGVEIHVNVEFVKVLEPPEDQENQKIGWRAEFLPTDHSLSEFEFDVIIGADGRRNTLEGFRRKEFRGKLAIAITANFINRNSTAEAKVEEISGVAFIFNQKFFQDLKEETGIDLENIVYYKDCTHYFVMTAKKQSLLDKGVIINDYIDTEMLLCAENVNQDNLLSYAREAADFATNYQLPSLDFAMNHYGQPDVAMFDFTCMYASENAALVRERQAHQLLVALVGDSLLEPFWPMGTGCARGFLAAFDTAWMVKSWNQGTPPLELLAERESLYRLLPQTTPENINKNFEQYTLDPGTRYPNLNSHCVRPHQVKHLYITKELEHYPLERLGSVRRSVNLSRKESDIRPSKLLTWCQQQTEGYQHVNVTDLTTSWRSGLALCAIIHRFRPELINFDSLNEDDAVENNQLAFDVAEREFGIPPVTTGKEMASAQEPDKLSMVMYLSKFYELFRGTPLRPVDSWRKNYGENADLSLAKSSISNNYLNLTFPRKRTPRVDGQTGENDMNKRRRKGFTNLDEPSNFSSRSLGSNQECGSSKEGGNQNKVKSMANQLLAKFEESTRNPSLMKQERRVSGIGKPVLCSSSGPPVHSCCPKPEEATPSPSPPLKRQFPSVVVTGHVLRELKQVSAGSECLSRPWRARAKSDLQLGGTENFATLPSTRPRAQALSGVLWRLQQVEEKILQKRAQNLANREFHTKNIKEKAAHLASMFGHGDFPQNKLLSKGLSHTHPPSPPSRLPSPDPAASSSPSTVDSASPARKLTVGKVSSGIGAAAEVLVNLYMNDHRPKAQATSPDLESMRKSFPLNLGGSDTCYFCKKRVYVMERLSAEGHFFHRECFRCSICATTLRLAAYTFDCDEGKFYCKPHFIHCKTNSKQRKRRAELKQQREEEATWQEQEAPRRDTPTESSCAVAAIGTLEGSPPVHFSLPVLHPLLG

SEQ ID NO: 896631 - protein, 1181 aa, Homo sapiens; identical to SEQ ID NO: 896619

SEQ ID NO: 896632 - protein, 1181 aa, Homo sapiens; identical to SEQ ID NO: 896619

SEQ ID NO: 896633 - protein, 1103 aa, Homo sapiens; identical to SEQ ID NO: 896630

SEQ ID NO: 896634 - protein, 713 aa, Homo sapiens
MGENEDEKQAQAGQVFENFVQASTCKGTLQAFNILTRHLDLDPLDHRNFYSKLKSKVTTWKAKALWYKLDKRGSHKEYKRGKSCTNTKCLIVGGGPCGLRTAIELAYLGAKVVVVEKRDSFSRNNVLHLWPFTIHDLRGLGAKKFYGKFCAGSIDHISIRQLQLILFKVALMLGVEIHVNVEFVKVLEPPEDQENQKIGWRAEFLPTDHSLSEFEFDVIIGADGRRNTLEGFRRKEFRGKLAIAITANFINRNSTAEAKVEEISGVAFIFNQKFFQDLKEETGIDLENIVYYKDCTHYFVMTAKKQSLLDKGVIINDYIDTEMLLCAENVNQDNLLSYAREAADFATNYQLPSLDFAMNHYGQPDVAMFDFTCMYASENAALVRERQAHQLLVALVGDSLLEPFWPMGTGCARGFLAAFDTAWMVKSWNQGTPPLELLAERESLYRLLPQTTPENINKNFEQYTLDPGTRYPNLNSHCVRPHQVKHLYITKELEHYPLERLGSVRRSVNLSRKESDIRPSKLLTWCQQQTEGYQHVNVTDLTTSWRSGLALCAIIHRFRPELINFDSLNEDDAVENNQLAFDVAEREFGIPPVTTGKEMASAQEPDKLSMVMYLSKFYELFRGTPLRPVDSWRKNYGENADLSLAKSSISNNYLNLTFPRKRTPRVDGQTGENDMNKRRRKGFTNLDEVCVHSVALNRGSFPDNQWPQAASLW

SEQ ID NO: 896635 - protein, 340 aa, Homo sapiens
MGENEDEKQAQAGQVFENFVQASTCKGTLQAFNILTRHLDLDPLDHRNFYSKLKSKVTTWKAKALWYKLDKRGSHKEYKRGKSCTNTKCLIVGGGPCGLRTAIELAYLGAKVVVVEKRDSFSRNNVLHLWPFTIHDLRGLGAKKFYGKFCAGSIDHISIRQLQLILFKVALMLGVEIHVNVEFVKVLEPPEDQENQKIGWRAEFLPTDHSLSEFEFDVIIGADGRRNTLEGFRRKEFRGKLAIAITANFINRNSTAEAKVEEISGVAFIFNQKFFQDLKEETGIDLENIVYYKDCTHYFVMTAKKQSLLDKGVIINVRTSWLRFPDFATWAGDISRCEGR

SEQ ID NO: 896636 - protein, 163 aa, Homo sapiens
MGENEDEKQAQAGQVFENFVQASTCKGTLQAFNILTRHLDLDPLDHRNFYSKLKSKVTTWKAKALWYKLDKRGSHKEYKRGKSCTNTKCLIVGGGPCGLRTAIELAYLGAKVVVVEKRDSFSRNNVLHLWPFTIHDLRGLGAKKFYGKFCAGSIDHISEWSLW

SEQ ID NO: 896637 - protein, 1181 aa, Homo sapiens; identical to SEQ ID NO: 896619

SEQ ID NO: 896638 - protein, 950 aa, Homo sapiens
MGENEDEKQAQAGQVFENFVQASTCKGTLQAFNILTRHLDLDPLDHRNFYSKLKSKVTTWKAKALWYKLDKRGSHKEYKRGKSCTNTKCLIVGGGPCGLRTAIELAYLGAKVVVVEKRDSFSRNNVLHLWPFTIHDLRGLGAKKFYGKFCAGSIDHISIRQLQLILFKVALMLGVEIHVNVEFVKVLEPPEDQENQKIGWRAEFLPTDHSLSEFEFDVIIGADGRRNTLEGFRRKEFRGKLAIAITANFINRNSTAEAKVEEISGVAFIFNQKFFQDLKEETGIDLENIVYYKDCTHYFVMTAKKQSLLDKGVIINDYIDTEMLLCAENVNQDNLLSYAREAADFATNYQLPSLDFAMNHYGQPDVAMFDFTCMYASENAALVRERQAHQLLVALVGDSLLEPFWPMGTGCARGFLAAFDTAWMVKSWNQGTPPLELLAERESLYRLLPQTTPENINKNFEQYTLDPGTRYPNLNSHCVRPHQVKHLYITKELEHYPLERLGSVRRSVNLSRKESDIRPSKLLTWCQQQTEGYQHVNVTDLTTSWRSGLALCAIIHRFRPELINFDSLNEDDAVENNQLAFDVAEREFGIPPVTTGKEMASAQEPDKLSMVMYLSKFYELFRGTPLRPVDSWRKNYGENADLSLAKSSISNNYLNLTFPRKRTPRVDGQTGENDMNKRRRKGFTNLDEPSNFSSRSLGSNQECGSSKEGGNQNKVKSMANQLLAKFEESTRNPSLMKQERRVSGIGKPVLCSSSGPPVHSCCPKPEEATPSPSPPLKRQFPSVVVTGHVLRELKQVSAGSECLSRPWRARAKSDLQLGGTENFATLPSTRPRAQALSGVLWRLQQVEEKILQKRAQNLANREFHTKNIKEKAAHLASMFGHGDFPQNKLLSKGLSHTHPPSPPSRLPSPDPAASSSPSTVDSASPARKVVVLNNLLSLFPACSQMFSCST

SEQ ID NO: 896639 - protein, 199 aa, Homo sapiens; identical to SEQ ID NO: 896617

SEQ ID NO: 896640 - protein, 91 aa, Homo sapiens
VMLEVTKSLSPLSPLQCLIVGGGPCGLRTAIELAYLGAKVVVVEKRDSFSRNNVLHLWPFTIHDLRGLGAKKFYGKFCAGSIDHISEWSLW

SEQ ID NO: 896641 - protein, 399 aa, Homo sapiens
MAEPSPEDPPPTLKPETQPPEKRRRTIEDFNKFCSFVLAYAGYIPPSKEESDWPASGSSSPLRGESAADSDGWDSAPSDLRTIQTFVKKAKSSKRRAAQAGPTQPGPPRSTFSRLQAPDSATLLEKMKLKDSLFDLDGPKVASPLSPTSLTHTSRPPAALTPVPLSQGDLSHPPRKKDRKNRKLGPGAGAGFGVLRRPRPTPGDGEKRSRIKKSKKRKLKKAERGDRLPPPGPPQAPPSDTDSEEEEEEEEEEEEEEMATVVGGEAPVPVLPTPPEAPRPPATVHPEGVPPADSESKEVGSTETSQDGDASSSEGEMRVMDEDIMVESGDDSWDLITCYCRKPFAGRPMIECSLCGTWIHLSCAKIKKTNVPDFFYCQKCKELRPEARRLGGPPKSGEP

SEQ ID NO: 896642 - protein, 439 aa, Homo sapiens
GSWSPRRSPGEGSGLVRLRQPVAFWESKFRRFMRSLFRCSRTDYKTLDPPPTLKPETQPPEKRRRTIEDFNKFCSFVLAYAGYIPPSKEESDWPASGSSSPLRGESAADSDGWDSAPSDLRTIQTFVKKAKSSKRRAAQAGPTQPGPPRSTFSRLQAPDSATLLEKMKLKDSLFDLDGPKVASPLSPTSLTHTSRPPAALTPVPLSQGDLSHPPRKKDRKNRKLGPGAGAGFGVLRRPRPTPGDGEKRSRIKKSKKRKLKKAERGDRLPPPGPPQAPPSDTDSEEEEEEEEEEEEEEMATVVGGEAPVPVLPTPPEAPRPPATVHPEGVPPADSESKEVGSTETSQDGDASSSEGEMRVMDEDIMVESGDDSWDLITCYCRKPFAGRPMIECSLCGTWIHLSCAKIKKTNVPDFFYCQKCKELRPEARRLGGPPKSGEP

SEQ ID NO: 896643 - protein, 142 aa, Homo sapiens
MATVVGGEAPVPVLPTPPEAPRPPATVHPEGVPPADSESKEVGSTETSQDGDASSSEGEMRVMDEDIMVESGDDSWDLITCYCRKPFAGRPMIECSLCGTWIHLSCAKIKKTNVPDFFYCQKCKELRPEARRLGGPPKSGEP

SEQ ID NO: 896644 - protein, 399 aa, Homo sapiens; identical to SEQ ID NO: 896641

SEQ ID NO: 896645 - protein, 198 aa, Homo sapiens
GRSNIRRSRIKKSKKRKLKKAERGDRLPPPGPPQAPPSDTDSEEEEEEEEEEEEEEMATVVGGEAPVPVLPTPPEAPRPPATVHPEGVPPADSESKEVGSTETSQDGDASSSEGEMRVMDEDIMVESGDDSWDLITCYCRKPFAGRPMIECSLCGTWIHLSCAKIKKTNVPDFFYCQKCKELRPEARRLGGPPKSGEP

SEQ ID NO: 896646 - protein, 410 aa, Homo sapiens
MLEAMAEPSPEDPPPTLKPETQPPEKRRRTIEDFNKFCSFVLAYAGYIPPSKEESDWPASGSSSPLRGESAADSDGWDSAPSDLRTIQTFVKKAKSSKRRAAQAGPTQPGPPRSTFSRLQAPDSATLLEKMKLKDSLFDLDGPKVASPLSPTSLTHTSRPPAALTPVPLSQGDLSHPPRKKDRKNRKLGPGAGAGFGVLRRPRPTPGDGEKRSRIKKSKKRKLKKAERGDRLPPPGPPQAPPSDTDSEEEEEEEEEEEEEEMATVVGGEAPVPVLPTPPEAPRPPATVHPEGVPPADSESKEVGSTETSQDGDASSSEGEMRVMDEDIMVESGDDSWDLITCYCRKPFAGRPMIECSLCGTWIHLSCAKIKKTNVPDFFYCQKCKELRPEGATQRALNAPHNEPHNEPVP

SEQ ID NO: 896647 - protein, 329 aa, Homo sapiens
MLEAMAEPSPEDPPPTLKPETQPPEKRRRTIEDFNKFCSFVLAYAGYIPPSKEESDWPASGSSSPLRGESAADSDGWDSAPSDLRTIQTFVKKAKSSKRRAAQAGPTQPGPPRSTFSRLQAPDSATLLEKMKLKDSLFDLDGPKVASPLSPTSLTHTSRPPAALTPVPLSQGDLSHPPRKKDRKNRKLGPGAGAGFGVLRRPRPTPGDGEKRSRIKKSKKRKLKKAERGDRLPPPGPPQAPPSDTDSEEEEEEEEEEEEEEMATVVGGEAPVPVLPTPPEAPRPPATVHPEGVPPADSESKEVGSTETSQDGDRSMSESFRAGSLDDDT

SEQ ID NO: 896648 - protein, 121 aa, Homo sapiens
  misc_feature (121)..(121): Xaa can be any naturally occurring amino acid
MAEPSPEDPPPTLKPETQPPEKRRRTIEDFNKFCSFVLAYAGYIPPSKEESDWPASGSSSPLRGESAADSDGWDSAPSDLRTIQTFVKKAKSSKRRAAQAGPTQPGPPRSTFSRLQAPEQX

SEQ ID NO: 896649 - protein, 399 aa, Homo sapiens; identical to SEQ ID NO: 896641

SEQ ID NO: 896650 - protein, 273 aa, Homo sapiens
MKLKDSLFDLDGPKVASPLSPTSLTHTSRPPAALTPVPLSQGDLSHPPRKKDRKNRKLGPGAGAGFGVLRRPRPTPGDGEKRSRIKKSKKRKLKKAERGDRLPPPGPPQAPPSDTDSEEEEEEEEEEEEEEMATVVGGEAPVPVLPTPPEAPRPPATVHPEGVPPADSESKEVGSTETSQDGDASSSEGEMRVMDEDIMVESGDDSWDLITCYCRKPFAGRPMIECSLCGTWIHLSCAKIKKTNVPDFFYCQKCKELRPEARRLGGPPKSGEP

SEQ ID NO: 896651 - protein, 399 aa, Homo sapiens; identical to SEQ ID NO: 896641

SEQ ID NO: 896652 - protein, 399 aa, Homo sapiens; identical to SEQ ID NO: 896641

SEQ ID NO: 896653 - protein, 84 aa, Homo sapiens
SWVSLDEHIMVESGDDSWDLITCYCRKPFAGRPMIECSLCGTWIHLSCAKIKKTNVPDFFYCQKCKELRPEARRLGGPPKSGEP

SEQ ID NO: 896654 - protein, 109 aa, Homo sapiens
MASEDNRVPSPPPTGDDGGGGGREETPTEGGALSLKPGLPIRGIRMKFAVLTGLVEVGEVSNRDIVETVFNLVVHEYFISIYSFQWVGEQDLKAGAMWFTHTDGDFFRV

SEQ ID NO: 896655 - protein, 2863 aa, Homo sapiens
MASEDNRVPSPPPTGDDGGGGGREETPTEGGALSLKPGLPIRGIRMKFAVLTGLVEVGEVSNRDIVETVFNLLVGGQFDLEMNFIIQEGESINCMVDLLEKCDITCQAEVWSMFTAILKKSIRNLQVCTEVGLVEKVLGKIEKVDNMIADLLVDMLGVLASYNLTVRELKLFFSKLQGDKGRWPPHAGKLLSVLKHMPQKYGPDAFFNFPGKSAAAIALPPIAKWPYQNGFTFHTWLRMDPVNNINVDKDKPYLYCFRTSKGLGYSAHFVGGCLIVTSIKSKGKGFQHCVKFDFKPQKWYMVTIVHIYNRWKNSELRCYVNGELASYGEITWFVNTSDTFDKCFLGSSETADANRVFCGQMTAVYLFSEALNAAQIFAIYQLGLGYKGTFKFKAESDLFLAEHHKLLLYDGKLSSAIAFTYNPRATDAQLCLESSPKDNPSIFVHSPHALMLQDVKAVLTHSIQSAMHSIGGVQVLFPLFAQLDYRQYLSDEIDLTICSTLLAFIMELLKNSIAMQEQMLACKGFLVIGYSLEKSSKSHVSRAVLELCLAFSKYLSNLQNGMPLLKQLCDHVLLNPAIWIHTPAKVQLMLYTYLSTEFIGTVNIYNTIRRVGTVLLIMHTLKYYYWAVNPQDRSGITPKGLDGPRPNQKEMLSLRAFLLMFIKQLVMKDSGVKEDELQAILNYLLTMHEDDNLMDVLQLLVALMSEHPNSMIPAFDQRNGLRVIYKLLASKSEGIRVQALKAMGYFLKHLAPKRKAEVMLGHGLFSLLAERLMLQTNLITMTTYNVLFEILIEQIGTQVIHKQHPDPDSSVKIQNPQILKVIATLLRNSPQCPESMEVRRAFLSDMIKLFNNSRENRRSLLQCSVWQEWMLSLCYFNPKNSDEQKITEMVYAIFRILLYHAVKYEWGGWRVWVDTLSITHSKVTFEIHKENLANIFREQQGKVDEEIGLCSSTSVQAASGIRRDINVSVGSQQPDTKDSPVCPHFTTNGNENSSIEKTSSLESASNIELQTTNTSYEEMKAEQENQELPDEGTLEETLTNETRNADDLEVSSDIIEAVAISSNSFITTGKDSMTVSEVTASISSPSEEDGSEMPEFLDKSIVEEEEDDDYVELKVEGSPTEEANLPTELQDNSLSPAASEAGEKLDMFGNDDKLIFQEGKPVTEKQTDTETQDSKDSGIQTMTASGSSAMSPETTVSQIAVESDLGQMLEEGKKATNLTRETKLINDCHGSVSEASSEQKIAKLDVSNVATDTERLELKASPNVEAPQPHRHVLEISRQHEQPGQGIAPDAVNGQRRDSRSTVFRIPEFNWSQMHQRLLTDLLFSIETDIQMWRSHSTKTVMDFVNSSDNVIFVHNTIHLISQVMDNMVMACGGILPLLSAATSATHELENIEPTQGLSIEASVTFLQRLISLVDVLIFASSLGFTEIEAEKSMSSGGILRQCLRLVCAVAVRNCLECQQHSQLKTRGDKALKPMHSLIPLGKSAAKSPVDIVTGGISPVRDLDRLLQDMDINRLRAVVFRDIEDSKQAQFLALAVVYFISVLMVSKYRDILEPQNERHSQSCTETGSENENVSLSEITPAAFSTLTTASVEESESTSSARRRDSGIGEETATGLGSHVEVTPHTAPPGVSAGPDAISEVLSTLSLEVNKSPETKNDRGNDLDTKATPSVSVSKNVNVKDILRSLVNIPADGVTVDPALLPPACLGALGDLSVEQPVQFRSFDRSVIVAAKKSAVSPSTFNTSIPTNAVSVVSSVDSAQASDMGGESPGSRSSNAKLPSVPTVDSVSQDPVSNMSITERLEHALEKAAPLLREIFVDFAPFLSRTLLGSHGQELLIEGTSLVCMKSSSSVVELVMLLCSQEWQNSIQKNAGLAFIELVNEGRLLSQTMKDHLVRVANEAEFILSRQRAEDIHRHAEFESLCAQYSADKREDEKMCDHLIRAAKYRDHVTATQLIQKIINILTDKHGAWGNSAVSRPLEFWRLDYWEDDLRRRRRFVRNPLGSTHPEATLKTAVEHVCIFKLRENSKATDEDILAKGKQSIRSQALGNQNSENEILLEGDDDTLSSVDEKDLENLAGPVSLSTPAQLVAPSVVVKGTLSVTSSELYFEVDEEDPNFKKIDPKILAYTEGLHGKWLFTEIRSIFSRRYLLQNTALEIFMANRVAVMFNFPDPATVKKVVNYLPRVGVGTSFGLPQTRRISLASPRQLFKASNMTQRWQHREISNFEYLMFLNTIAGRSYNDLNQYPVFPWVITNYESEELDLTLPTNFRDLSKPIGALNPKRAAFFAERYESWEDDQVPKFHYGTHYSTASFVLAWLLRIEPFTTYFLNLQGGKFDHADRTFSSISRAWRNSQRDTSDIKELIPEFYYLPEMFVNFNNYNLGVMDDGTVVSDVELPPWAKTSEEFVHINRLALESEFVSCQLHQWIDLIFGYKQQGPEAVRALNVFYYLTYEGAVNLNSITDPVLREAVEAQIRSFGQTPSQLLIEPHPPRGSAMQVSPLMFTDKAQQDVIMVLKFPSNSPVTHVAANTQPGLATPAVITVTANRLFAVNKWHNLPAHQGAVQDQPYQLPVEIDPLIASNTGMHRRQITDLLDQSIQVHSQCFVITSDNRYILVCGFWDKSFRVYSTDTGRLIQVVFGHWDVVTCLARSESYIGGNCYILSGSRDATLLLWYWNGKCSGIGDNPGSETAAPRAILTGHDYEVTCAAVCAELGLVLSGSQEGPCLIHSMNGDLLRTLEGPENCLKPKLIQASREGHCVIFYENGLFCTFSVNGKLQATMETDDNIRAIQLSRDGQYLLTGGDRGVVVVRQVSDLKQLFAYPGCDAGIRAMALSYDQRCIISGMASGSIVLFYNDFNRWHHEYQTRY

SEQ ID NO: 896656 - protein, 2687 aa, Homo sapiens
MASEDNRVPSPPPTGDDGGGGGREETPTEGGALSLKPGLPIRGIRMKFAVLTGLVEVGEVSNRDIVETVFNLLVGGQFDLEMNFIIQEGESINCMVDLLEKCDITCQAEVWSMFTAILKKSIRNLQVCTEVGLVEKVLGKIEKVDNMIADLLVDMLGVLASYNLTVRELKLFFSKLQGDKGRWPPHAGKLLSVLKHMPQKYGPDAFFNFPGKSAAAIALPPIAKWPYQNGFTFHTWLRMDPVNNINVDKDKPYLYCFRTSKGLGYSAHFVGGCLIVTSIKSKGKGFQHCVKFDFKPQKWYMVTIVHIYNRWKNSELRCYVNGELASYGEITWFVNTSDTFDKCFLGSSETADANRVFCGQMTAVYLFSEALNAAQIFAIYQLGLGYKGTFKFKAESDLFLAEHHKLLLYDGKLSSAIAFTYNPRATDAQLCLESSPKDNPSIFVHSPHALMLQDVKAVLTHSIQSAMHSIGGVQVLFPLFAQLDYRQYLSDEIDLTICSTLLAFIMELLKNSIAMQEQMLACKGFLVIGYSLEKSSKSHVSRAVLELCLAFSKYLSNLQNGMPLLKQLCDHVLLNPAIWIHTPAKVQLMLYTYLSTEFIGTVNIYNTIRRVGTVLLIMHTLKYYYWAVNPQDRSGITPKGLDGPRPNQKEMLSLRAFLLMFIKQLVMKDSGVKEDELQAILNYLLTMHEDDNLMDVLQLLVALMSEHPNSMIPAFDQRNGLRVIYKLLASKSEGIRVQALKAMGYFLKHLAPKRKAEVMLGHGLFSLLAERLMLQTNLITMTTYNVLFEILIEQIGTQVIHKQHPDPDSSVKIQNPQILKVIATLLRNSPQCPESMEVRRAFLSDMIKLFNNSRENRRSLLQCSVWQEWMLSLCYFNPKNSDEQKITEMVYAIFRILLYHAVKYEWGGWRVWVDTLSITHSKVTFEIHKENLANIFREQQGKVDEEIGLCSSTSVQAASGIRRDINVSVGSQQPDTKDSPVCPHFTTNGNENSSIEKTSSLESASNIELQTTNTSYEEMKAEQENQELPDEGTLEETLTNETRNADDLEVSSDIIEAVAISSNSFITTGKDSMTVSEVTASISSPSEEDGSEMPEFLDKSIVEEEEDDDYVELKVEGSPTEEANLPTELQDNSLSPAASEAGEKLDMFGNDDKLIFQEGKPVTEKQTDTETQDSKDSGIQTMTASGSSAMSPETTVSQIAVESDLGQMLEEGKKATNLTRETKLINDCHGSVSEASSEQKIAKLDVSNVATDTERLELKASPNVEAPQPHRHVLEISRQHEQPGQGIAPDAVNGQRRDSRSTVFRIPEFNWSQMHQRLLTDLLFSIETDIQMWRSHSTKTVMDFVNSSDNVIFVHNTIHLISQVMDNMVMACGGILPLLSAATSATHELENIEPTQGLSIEASVTFLQRLISLVDVLIFASSLGFTEIEAEKSMSSGGILRQCLRLVCAVAVRNCLECQQHSQLKTRGDKALKPMHSLIPLGKSAAKSPVDIVTGGISPVRDLDRLLQDMDINRLRAVVFRDIEDSKQAQFLALAVVYFISVLMVSKYRDILEPQNERHSQSCTETGSENENVSLSEITPAAFSTLTTASVEESESTSSARRRDSGIGEETATGLGSHVEVTPHTAPPGVSAGPDAISEVLSTLSLEVNKSPETKNDRGNDLDTKATPSVSVSKNVNVKDILRSLVNIPADGVTVDPALLPPACLGALGDLSVEQPVQFRSFDRSVIVAAKKSAVSPSTFNTSIPTNAVSVVSSVDSAQASDMGGESPGSRSSNAKLPSVPTVDSVSQDPVSNMSITERLEHALEKAAPLLREIFVDFAPFLSRTLLGSHGQELLIEGTSLVCMKSSSSVVELVMLLCSQEWQNSIQKNAGLAFIELVNEGRLLSQTMKDHLVRVANEAEFILSRQRAEDIHRHAEFESLCAQYSADKREDEKMCDHLIRAAKYRDHVTATQLIQKIINILTDKHGAWGNSAVSRPLEFWRLDYWEDDLRRRRRFVRNPLGSTHPEATLKTAVEHATDEDILAKGKQSIRSQALGNQNSENEILLEGDDDTLSSVDEKDLENLAGPVSLSTPAQLVAPSVVVKGTLSVTSSELYFEVDEEDPNFKKIDPKILAYTEGLHGKWLFTEIRSIFSRRYLLQNTALEIFMANRVAVMFNFPDPATVKKVVNYLPRVGVGTSFGLPQTRRISLASPRQLFKASNMTQRWQHREISNFEYLMFLNTIAGRSYNDLNQYPVFPWVITNYESEELDLTLPTNFRDLSKPIGALNPKRAAFFAERYESWEDDQVPKFHYGYSLLNCKFCSCMAAKNKPHPPRGSAMQVSPLMFTDKAQQDVIMVLKFPSNSPVTHVAANTQPGLATPAVITVTANRLFAVNKWHNLPAHQGAVQDQPYQLPVEIDPLIASNTGMHRRQITDLLDQSIQVHSQCFVITSDNRYILVCGFWDKSFRVYSTDTGRLIQVVFGHWDVVTCLARSESYIGGNCYILSGSRDATLLLWYWNGKCSGIGDNPGSETAAPRAILTGHDYEVTCAAVCAELGLVLSGSQEGPCLIHSMNGDLLRTLEGPENCLKPKLIQASREGHCVIFYENGLFCTFSVNGKLQATMETDDNIRAIQLSRDGQYLLTGGDRGVVVVRQVSDLKQLFAYPGCDAGIRAMALSYDQRCIISGMASGSIVLFYNDFNRWHHEYQTRY

SEQ ID NO: 896657 - protein, 2687 aa, Homo sapiens; identical to SEQ ID NO: 896656

SEQ ID NO: 896658 - protein, 2687 aa, Homo sapiens; identical to SEQ ID NO: 896656

SEQ ID NO: 896659 - protein, 2762 aa, Homo sapiens
MASEDNRVPSPPPTGDDGGGGGREETPTEGGALSLKPGLPIRGIRMKFAVLTGLVEVGEVSNRDIVETVFNLLVGGQFDLEMNFIIQEGESINCMVDLLEKCDITCQAEVWSMFTAILKKSIRNLQVCTEVGLVEKVLGKIEKVDNMIADLLVDMLGVLASYNLTVRELKLFFSKLQGDKGRWPPHAGKLLSVLKHMPQKYGPDAFFNFPGKSAAAIALPPIAKWPYQNGFTFHTWLRMDPVNNINVDKDKPYLYCFRTSKGLGYSAHFVGGCLIVTSIKSKGKGFQHCVKFDFKPQKWYMVTIVHIYNRWKNSELRCYVNGELASYGEITWFVNTSDTFDKCFLGSSETADANRVFCGQMTAVYLFSEALNAAQIFAIYQLGLGYKGTFKFKAESDLFLAEHHKLLLYDGKLSSAIAFTYNPRATDAQLCLESSPKDNPSIFVHSPHALMLQDVKAVLTHSIQSAMHSIGGVQVLFPLFAQLDYRQYLSDEIDLTICSTLLAFIMELLKNSIAMQEQMLACKGFLVIGYSLEKSSKSHVSRAVLELCLAFSKYLSNLQNGMPLLKQLCDHVLLNPAIWIHTPAKVQLMLYTYLSTEFIGTVNIYNTIRRVGTVLLIMHTLKYYYWAVNPQDRSGITPKGLDGPRPNQKEMLSLRAFLLMFIKQLVMKDSGVKEDELQAILNYLLTMHEDDNLMDVLQLLVALMSEHPNSMIPAFDQRNGLRVIYKLLASKSEGIRVQALKAMGYFLKHLAPKRKAEVMLGHGLFSLLAERLMLQTNLITMTTYNVLFEILIEQIGTQVIHKQHPDPDSSVKIQNPQILKVIATLLRNSPQCPESMEVRRAFLSDMIKLFNNSRENRRSLLQCSVWQEWMLSLCYFNPKNSDEQKITEMVYAIFRILLYHAVKYEWGGWRVWVDTLSITHSKVTFEIHKENLANIFREQQGKVDEEIGLCSSTSVQAASGIRRDINVSVGSQQPDTKDSPVCPHFTTNGNENSSIEKTSSLESASNIELQTTNTSYEEMKAEQENQELPDEGTLEETLTNETRNADDLEVSSDIIEAVAISSNSFITTGKDSMTVSEVTASISSPSEEDGSEMPEFLDKSIVEEEEDDDYVELKVEGSPTEEANLPTELQDNSLSPAASEAGEKLDMFGNDDKLIFQEGKPVTEKQTDTETQDSKDSGIQTMTASGSSAMSPETTVSQIAVESDLGQMLEEGKKATNLTRETKLINDCHGSVSEASSEQKIAKLDVSNVATDTERLELKASPNVEAPQPHRHVLEISRQHEQPGQGIAPDAVNGQRRDSRSTVFRIPEFNWSQMHQRLLTDLLFSIETDIQMWRSHSTKTVMDFVNSSDNVIFVHNTIHLISQVMDNMVMACGGILPLLSAATSATHELENIEPTQGLSIEASVTFLQRLISLVDVLIFASSLGFTEIEAEKSMSSGGILRQCLRLVCAVAVRNCLECQQHSQLKTRGDKALKPMHSLIPLGKSAAKSPVDIVTGGISPVRDLDRLLQDMDINRLRAVVFRDIEDSKQAQFLALAVVYFISVLMVSKYRDILEPQNERHSQSCTETGSENENVSLSEITPAAFSTLTTASVEESESTSSARRRDSGIGEETATGLGSHVEVTPHTAPPGVSAGPDAISEVLSTLSLEVNKSPETKNDRGNDLDTKATPSVSVSKNVNVKDILRSLVNIPADGVTVDPALLPPACLGALGDLSVEQPVQFRSFDRSVIVAAKKSAVSPSTFNTSIPTNAVSVVSSVDSAQASDMGGESPGSRSSNAKLPSVPTVDSVSQDPVSNMSITERLEHALEKAAPLLREIFVDFAPFLSRTLLGSHGQELLIEGTSLVCMKSSSSVVELVMLLCSQEWQNSIQKNAGLAFIELVNEGRLLSQTMKDHLVRVANEAEFILSRQRAEDIHRHAEFESLCAQYSADKREDEKMCDHLIRAAKYRDHVTATQLIQKIINILTDKHGAWGNSAVSRPLEFWRLDYWEDDLRRRRRFVRNPLGSTHPEATLKTAVEHATDEDILAKGKQSIRSQALGNQNSENEILLEGDDDTLSSVDEKDLENLAGPVSLSTPAQLVAPSVVVKGTLSVTSSELYFEVDEEDPNFKKIDPKILAYTEGLHGKWLFTEIRSIFSRRYLLQNTALEIFMANRVAVMFNFPDPATVKKVVNYLPRVGVGTSFGLPQTRRISLASPRQLFKASNMTQRWQHREISNFEYLMFLNTIAGRSYNDLNQYPVFPWVITNYESEELDLTLPTNFRDLSKPIGALNPKRAAFFAERYESWEDDQVPKFHYGTHYSTASFVLAWLLRIEPFTTYFLNLQGGKFDHADRTFSSISRAWRNSQRDTSDIKELIPEFYYLPEMFVNFNNYNLGVMDDGTVVSDVELPPWAKTSEEFVHINRLALESEFVSCQLHQWIDLIFGYKQQGPEAVRALNVFYYLTYEGAVNLNSITDPVLREAVEAQIRSFGQTPSQLLIEPHPPRGSAMQVSPLMFTDKAQQDVIMVLKFPSNSPVTHVAANTQPGLATPAVITVTANRLFAVNKWHNLPAHQGAVQDQPYQLPVEIDPLIASNTGMHRRQITDLLDQSIQVHSQCFVITSDNRYILVCGFWDKSFRVYSTDTGRLIQVVFGHWDVVTCLARSESYIGGNCYILSGSRDATLLLWYWNGKCSGIGDNPGSETAAPRAILTGHDYEVTCAAVCAELGLVLSGSQEGPCLIHSMNGDLLRTLEGPENCLKPKLIQASREGHCVIFYENGLFCTFSVNGPSS

SEQ ID NO: 896660 - protein, 845 aa, Homo sapiens
RARHPKIIVELVMLLCSQEWQNSIQKNAGLAFIELVNEGRLLSQTMKDHLVRVANEAEFILSRQRAEDIHRHAEFESLCAQYSADKREDEKMCDHLIRAAKYRDHVTATQLIQKIINILTDKHGAWGNSAVSRPLEFWRLDYWEDDLRRRRRFVRNPLGSTHPEATLKTAVEHATDEDILAKGKQSIRSQALGNQNSENEILLEGDDDTLSSVDEKDLENLAGPVSLSTPAQLVAPSVVVKGTLSVTSSELYFEVDEEDPNFKKIDPKILAYTEGLHGKWLFTEIRSIFSRRYLLQNTALEIFMANRVAVMFNFPDPATVKKVVNYLPRVGVGTSFGLPQTRRISLASPRQLFKASNMTQRWQHREISNFEYLMFLNTIAGRSYNDLNQYPVFPWVITNYESEELDLTLPTNFRDLSKPIGALNPKRAAFFAERYESWEDDQVPKFHYGYSLLNCKFCSCMAAKNKPHPPRGSAMQVSPLMFTDKAQQDVIMVLKFPSNSPVTHVAANTQPGLATPAVITVTANRLFAVNKWHNLPAHQGAVQDQPYQLPVEIDPLIASNTGMHRRQITDLLDQSIQVHSQCFVITSDNRYILVCGFWDKSFRVYSTDTGRLIQVVFGHWDVVTCLARSESYIGGNCYILSGSRDATLLLWYWNGKCSGIGDNPGSETAAPRAILTGHDYEVTCAAVCAELGLVLSGSQEGPCLIHSMNGDLLRTLEGPENCLKPKLIQASREGHCVIFYENGLFCTFSVNGKLQATMETDDNIRAIQLSRDGQYLLTGGDRGVVVVRQVSDLKQLFAYPGCDAGIRAMALSYDQRCIISGMASGSIVLFYNDFNRWHHEYQTRY

SEQ ID NO: 896661 - protein, 578 aa, Homo sapiens
MILAYTEGLHGKWLFTEIRSIFSRRYLLQNTALEIFMANRVAVMFNFPDPATVKKVVNYLPRVGVGTSFGLPQTRRISLASPRQLFKASNMTQRWQHREISNFEYLMFLNTIAGRSYNDLNQYPVFPWVITNYESEELDLTLPTNFRDLSKPIGALNPKRAAFFAERYESWEDDQVPKFHYGYSLLNCKFCSCMAAKNKPHPPRGSAMQVSPLMFTDKAQQDVIMVLKFPSNSPVTHVAANTQPGLATPAVITVTANRLFAVNKWHNLPAHQGAVQDQPYQLPVEIDPLIASNTGMHRRQITDLLDQSIQVHSQCFVITSDNRYILVCGFWDKSFRVYSTDTGRLIQVVFGHWDVVTCLARSESYIGGNCYILSGSRDATLLLWYWNGKCSGIGDNPGSETAAPRAILTGHDYEVTCAAVCAELGLVLSGSQEGPCLIHSMNGDLLRTLEGPENCLKPKLIQASREGHCVIFYENGLFCTFSVNGKLQATMETDDNIRAIQLSRDGQYLLTGGDRGVVVVRQVSDLKQLFAYPGCDAGIRAMALSYDQRCIISGMASGSIVLFYNDFNRWHHEYQTRY

SEQ ID NO: 896662 - protein, 2790 aa, Homo sapiens
MASEDNRVPSPPPTGDDGGGGGREETPTEGGALSLKPGLPIRGIRMKFAVLTGLVEVGEVSNRDIVETVFNLLVGGQFDLEMNFIIQEGESINCMVDLLEKCDITCQAEVWSMFTAILKKSIRNLQVCTEVGLVEKVLGKIEKVDNMIADLLVDMLGVLASYNLTVRELKLFFSKLQGDKGRWPPHAGKLLSVLKHMPQKYGPDAFFNFPGKSAAAIALPPIAKWPYQNGFTFHTWLRMDPVNNINVDKDKPYLYCFRTSKGLGYSAHFVGGCLIVTSIKSKGKGFQHCVKFDFKPQKWYMVTIVHIYNRWKNSELRCYVNGELASYGEITWFVNTSDTFDKCFLGSSETADANRVFCGQMTAVYLFSEALNAAQIFAIYQLGLGYKGTFKFKAESDLFLAEHHKLLLYDGKLSSAIAFTYNPRATDAQLCLESSPKDNPSIFVHSPHALMLQDVKAVLTHSIQSAMHSIGGVQVLFPLFAQLDYRQYLSDEIDLTICSTLLAFIMELLKNSIAMQEQMLACKGFLVIGYSLEKSSKSHVSRAVLELCLAFSKYLSNLQNGMPLLKQLCDHVLLNPAIWIHTPAKVQLMLYTYLSTEFIGTVNIYNTIRRVGTVLLIMHTLKYYYWAVNPQDRSGITPKGLDGPRPNQKEMLSLRAFLLMFIKQLVMKDSGVKEDELQAILNYLLTMHEDDNLMDVLQLLVALMSEHPNSMIPAFDQRNGLRVIYKLLASKSEGIRVQALKAMGYFLKHLAPKRKAEVMLGHGLFSLLAERLMLQTNLITMTTYNVLFEILIEQIGTQVIHKQHPDPDSSVKIQNPQILKVIATLLRNSPQCPESMEVRRAFLSDMIKLFNNSRENRRSLLQCSVWQEWMLSLCYFNPKNSDEQKITEMVYAIFRILLYHAVKYEWGGWRVWVDTLSITHSKVTFEIHKENLANIFREQQGKVDEEIGLCSSTSVQAASGIRRDINVSVGSQQPDTKDSPVCPHFTTNGNENSSIEKTSSLESASNIELQTTNTSYEEMKAEQENQELPDEGTLEETLTNETRNADDLEVSSDIIEAVAISSNSFITTGKDSMTVSEVTASISSPSEEDGSEMPEFLDKSIVEEEEDDDYVELKVEGSPTEEANLPTELQDNSLSPAASEAGEKLDMFGNDDKLIFQEGKPVTEKQTDTETQDSKDSGIQTMTASGSSAMSPETTVSQIAVESDLGQMLEEGKKATNLTRETKLINDCHGSVSEASSEQKIAKLDVSNVATDTERLELKASPNVEAPQPHRHVLEISRQHEQPGQGIAPDAVNGQRRDSRSTVFRIPEFNWSQMHQRLLTDLLFSIETDIQMWRSHSTKTVMDFVNSSDNVIFVHNTIHLISQVMDNMVMACGGILPLLSAATSATHELENIEPTQGLSIEASVTFLQRLISLVDVLIFASSLGFTEIEAEKSMSSGGILRQCLRLVCAVAVRNCLECQQHSQLKTRGDKALKPMHSLIPLGKSAAKSPVDIVTGGISPVRDLDRLLQDMDINRLRAVVFRDIEDSKQAQFLALAVVYFISVLMVSKYRDILEPQNERHSQSCTETGSENENVSLSEITPAAFSTLTTASVEESESTSSARRRDSGIGEETATGLGSHVEVTPHTAPPGVSAGPDAISEVLSTLSLEVNKSPETKNDRGNDLDTKATPSVSVSKNVNVKDILRSLVNIPADGVTVDPALLPPACLGALGDLSVEQPVQFRSFDRSVIVAAKKSAVSPSTFNTSIPTNAVSVVSSVDSAQASDMGGESPGSRSSNAKLPSVPTVDSVSQDPVSNMSITERLEHALEKAAPLLREIFVDFAPFLSRTLLGSHGQELLIEGTSLVCMKSSSSVVELVMLLCSQEWQNSIQKNAGLAFIELVNEGRLLSQTMKDHLVRVANEAEFILSRQRAEDIHRHAEFESLCAQYSADKREDEKMCDHLIRAAKYRDHVTATQLIQKIINILTDKHGAWGNSAVSRPLEFWRLDYWEDDLRRRRRFVRNPLGSTHPEATLKTAVEHATDEDILAKGKQSIRSQALGNQNSENEILLEGDDDTLSSVDEKDLENLAGPVSLSTPAQLVAPSVVVKGTLSVTSSELYFEVDEEDPNFKKIDPKILAYTEGLHGKWLFTEIRSIFSRRYLLQNTALEIFMANRVAVMFNFPDPATVKKVVNYLPRVGVGTSFGLPQTRRISLASPRQLFKASNMTQRWQHREISNFEYLMFLNTIAGRSYNDLNQYPVFPWVITNYESEELDLTLPTNFRDLSKPIGALNPKRAAFFAERYESWEDDQVPKFHYGTHYSTASFVLAWLLRIEPFTTYFLNLQGGKFDHADRTFSSISRAWRNSQRDTSDIKELIPEFYYLPEMFVNFNNYNLGVMDDGTVVSDVELPPWAKTSEEFVHINRLALESEFVSCQLHQWIDLIFGYKQQGPEAVRALNVFYYLTYEGAVNLNSITDPVLREAVEAQIRSFGQTPSQLLIEPHPPRGSAMQVSPLMFTDKAQQDVIMVLKFPSNSPVTHVAANTQPGLATPAVITVTANRLFAVNKWHNLPAHQGAVQDQPYQLPVEIDPLIASNTGMHRRQITDLLDQSIQVHSQCFVITSDNRYILVCGFWDKSFRVYSTDTGRLIQVVFGHWDVVTCLARSESYIGGNCYILSGSRDATLLLWYWNGKCSGIGDNPGSETAAPRAILTGHDYEVTCAAVCAELGLVLSGSQEGPCLIHSMNGDLLRTLEGPENCLKPKLIQASREGHCVIFYENGLFCTFSVNGKLQATMETDDNIRVHHFWHGFRKHCAILQRL

SEQ ID NO: 896663 - protein, 2687 aa, Homo sapiens; identical to SEQ ID NO: 896656

SEQ ID NO: 896664 - protein, 2687 aa, Homo sapiens; identical to SEQ ID NO: 896656

SEQ ID NO: 896665 - protein, 405 aa, Homo sapiens
RRSRGSLAVEAQIRSFGQTPSQLLIEPHPPRGSAMQVSPLMFTDKAQQDVIMVLKFPSNSPVTHVAANTQPGLATPAVITVTANRLFAVNKWHNLPAHQGAVQDQPYQLPVEIDPLIASNTGMHRRQITDLLDQSIQVHSQCFVITSDNRYILVCGFWDKSFRVYSTDTGRLIQVVFGHWDVVTCLARSESYIGGNCYILSGSRDATLLLWYWNGKCSGIGDNPGSETAAPRAILTGHDYEVTCAAVCAELGLVLSGSQEGPCLIHSMNGDLLRTLEGPENCLKPKLIQASREGHCVIFYENGLFCTFSVNGKLQATMETDDNIRAIQLSRDGQYLLTGGDRGVVVVRQVSDLKQLFAYPGCDAGIRAMALSYDQRCIISGMASGSIVLFYNDFNRWHHEYQTRY

SEQ ID NO: 896666 - protein, 402 aa, Homo sapiens
MGTCAVEAQIRSFGQTPSQLLIEPHPPRGSAMQVSPLMFTDKAQQDVIMVLKFPSNSPVTHVAANTQPGLATPAVITVTANRLFAVNKWHNLPAHQGAVQDQPYQLPVEIDPLIASNTGMHRRQITDLLDQSIQVHSQCFVITSDNRYILVCGFWDKSFRVYSTDTGRLIQVVFGHWDVVTCLARSESYIGGNCYILSGSRDATLLLWYWNGKCSGIGDNPGSETAAPRAILTGHDYEVTCAAVCAELGLVLSGSQEGPCLIHSMNGDLLRTLEGPENCLKPKLIQASREGHCVIFYENGLFCTFSVNGKLQATMETDDNIRAIQLSRDGQYLLTGGDRGVVVVRQVSDLKQLFAYPGCDAGIRAMALSYDQRCIISGMASGSIVLFYNDFNRWHHEYQTRY

SEQ ID NO: 896667 - protein, 318 aa, Homo sapiens
AKPLFNYKITHQGAVQDQPYQLPVEIDPLIASNTGMHRRQITDLLDQSIQVHSQCFVITSDNRYILVCGFWDKSFRVYSTDTGRLIQVVFGHWDVVTCLARSESYIGGNCYILSGSRDATLLLWYWNGKCSGIGDNPGSETAAPRAILTGHDYEVTCAAVCAELGLVLSGSQEGPCLIHSMNGDLLRTLEGPENCLKPKLIQASREGHCVIFYENGLFCTFSVNGKLQATMETDDNIRAIQLSRDGQYLLTGGDRGVVVVRQVSDLKQLFAYPGCDAGIRAMALSYDQRCIISGMASGSIVLFYNDFNRWHHEYQTRY

SEQ ID NO: 896668 - protein, 24 aa, Homo sapiens
MASGSIVLFYNDFNRWHHEYQTRY

SEQ ID NO: 896669 - protein, 191 aa, Homo sapiens
MVKKLVMAQKRGETRALCLGVTMVVCAVITYYILVTTVLPLYQKSVWTQESKCHLIETNIRDQEELKGKKVPQYPCLWVNVSAAGRWAVLYHTEDTRDQNQQCSYIPGSVDNYQTARADVEKVRAKFQEQQVFYCFSAPRGNETSVLFQRLYGPQALLFSLFWPTFLLTGGLLIIAMVKSNQYLSILAAQK

SEQ ID NO: 896670 - protein, 191 aa, Homo sapiens; identical to SEQ ID NO: 896669

SEQ ID NO: 896671 - protein, 166 aa, Homo sapiens
MVKKLVMAQKRGETRALCLGVTMVVCAVITYYILVTTVLPLYQKSVWTQESKCHLIETNIRDQEELKGKKVPQYPCLWVNVSAAGRWAVLYHTEDTRDQNQQCSYIPGSVDNYQTARADVEKVRAKFQEQPGGPASPLCPDKWYGMDGWLSSGPPGCTGTGALTIR

SEQ ID NO: 896672 - protein, 345 aa, Homo sapiens
MQLEIQVALNFIISYLYNKLPRRRVNIFGEELERLLKKKYEGHWYPEKPYKGSGFRCIHIGEKVDPVIEQASKESGLDIDDVRGNLPQDLSVWIDPFEVSYQIGEKGPVKVLYVDDNNENGCELDKEIKNSFNPEAQVFMPISDPASSVSSSPSPPFGHSAAVSPTFMPRSTQPLTFTTATFAATKFGSTKMKNSGRSNKVARTSPINLGLNVNDLLKQKAISSSMHSLYGLGLGSQQQPQQQQQPAQPPPPPPPPQQQQQQKTSALSPNAKEFIFPNMQGQGSSTNGMFPGDSPLNLSPLQYSNAFDVFAAYGGLNEKSFVDGLNFSLNNMQYSNQQFQPVMAN

SEQ ID NO: 896673 - protein, 356 aa, Homo sapiens
DAWVDPRVRAAMQLEIQVALNFIISYLYNKLPRRRVNIFGEELERLLKKKYEGHWYPEKPYKGSGFRCIHIGEKVDPVIEQASKESGLDIDDVRGNLPQDLSVWIDPFEVSYQIGEKGPVKVLYVDDNNENGCELDKEIKNSFNPEAQVFMPISDPASSVSSSPSPPFGHSAAVSPTFMPRSTQPLTFTTATFAATKFGSTKMKNSGRSNKVARTSPINLGLNVNDLLKQKAISSSMHSLYGLGLGSQQQPQQQQQPAQPPPPPPPPQQQQQQKTSALSPNAKEFIFPNMQGQGSSTNGMFPGDSPLNLSPLQYSNAFDVFAAYGGLNEKSFVDGLNFSLNNMQYSNQQFQPVMAN

SEQ ID NO: 896674 - protein, 293 aa, Homo sapiens
RVPHWMLRQEFEISLGNIASKESGLDIDDVRGNLPQDLSVWIDPFEVSYQIGEKGPVKVLYVDDNNENGCELDKEIKNSFNPEAQVFMPISDPASSVSSSPSPPFGHSAAVSPTFMPRSTQPLTFTTATFAATKFGSTKMKNSGRSNKVARTSPINLGLNVNDLLKQKAISSSMHSLYGLGLGSQQQPQQQQQPAQPPPPPPPPQQQQQQKTSALSPNAKEFIFPNMQGQGSSTNGMFPGDSPLNLSPLQYSNAFDVFAAYGGLNEKSFVDGLNFSLNNMQYSNQQFQPVMAN

SEQ ID NO: 896675 - protein, 327 aa, Homo sapiens
MQLEIQVALNFIISYLYNKLPRRRVNIFGEELERLLKKKYEGHWYPEKPYKGSGFRCIHIGEKVDPVIEQASKESGLDIDDVRGNLPQDLSVWIDPFEVSYQIGEKGPVKVLYVDDNNENGCELDKEIKNSFNPEAQVFMPISDPASSVSSSPSPPFGHSAAVSPTFMPRSTQPLTFTTATFAATKFGSTKMKNSGRSNKVARTSPINLGLNVNDLLKQKAISSSMHSLYGLGLGSQQQPQQQQQPAQPPPPPPPPQQQQQQGQGSSTNGMFPGDSPLNLSPLQYSNAFDVFAAYGGLNEKSFVDGLNFSLNNMQYSNQQFQPVMAN

SEQ ID NO: 896676 - protein, 322 aa, Homo sapiens
MQLEIQVALNFIISYLYNKLPRRRVNIFGEELERLLKKKYEGHWYPEKPYKGSGFRCIHIGEKVDPVIEQASKESGLDIDDVRGNLPQDLSVWIDPFEVSYQIGEKGPVKVLYVDDNNENGCELDKEIKNSFNPEAQVFMPISDPASSVSSSPSPPFGHSAAVSPTFMPRSTQPLTFTTATFAATKFGSTKMKNSGRSNKVARTSPINLGLNVNDLLKQKAISSSMHSPPPPPQQQQQQKTSALSPNAKEFIFPNMQGQGSSTNGMFPGDSPLNLSPLQYSNAFDVFAAYGGLNEKSFVDGLNFSLNNMQYSNQQFQPVMAN

SEQ ID NO: 896677 - protein, 216 aa, Homo sapiens
MQLEIQVALNFIISYLYNKLPRRRVNIFGEELERLLKKKYEGHWYPEKPYKGSGFRCIHIGEKVDPVIEQASKESGLDIDDVRGNLPQDLSVWIDPFEVSYQIGEKGPVKVLYVDDNNENGCELDKEIKNSFNPEAQVFMPISDPASSVSSSPSPPFGHSAAVSPTFMPRSTQPLTFTTATFAATKFGSTKMKNSGRSNKVARTSPINLGLNVNDL

SEQ ID NO: 896678 - protein, 202 aa, Homo sapiens
MPPRSSPRRRVNIFGEELERLLKKKYEGHWYPEKPYKGSGFRCIHIGEKVDPVIEQASKESGLDIDDVRGNLPQDLSVWIDPFEVSYQIGEKGPVKVLYVDDNNENGCELDKEIKNSFNPEAQVFMPISDPASSVSSSPSPPFGHSAAVSPTFMPRSTQPLTFTTATFAATKFGSTKMKNSGRSNKVARTSPINLGLNVNDL

SEQ ID NO: 896679 - protein, 603 aa, Homo sapiens
MNKLRQSFRRKKDVYVPEASRPHQWQTDEEGVRTGKCSFPVKYLGHVEVDESRGMHICEDAVKRLKAERKFFKGFFGKTGKKAVKAVLWVSADGLRVVDEKTKDLIVDQTIEKVSFCAPDRNFDRAFSYICRDGTTRRWICHCFMAVKDTGERLSHAVGCAFAACLERKQKREKECGVTATFDASRTTFTREGSFRVTTATEQAEREEIMKQMQDAKKAETDKIVVGSSVAPGNTAPSPSSPTSPTSDATTSLEMNNPHAIPRRHAPIEQLARQGSFRGFPALSQKMSPFKRQLSLRINELPSTMQRKTDFPIKNAVPEVEGEAESISSLCSQITNAFSTPEDPFSSAPMTKPVTVVAPQSPTFQGTEWGQSSGAASPGLFQAGHRRTPSEADRWLEEVSKSVRAQQPQASAAPLQPVLQPPPPTAISQPASPFQGNAFLTSQPVPVGVVPALQPAFVPAQSYPVANGMPYPAPNVPVVGITPSQMVANVFGTAGHPQAAHPHQSPSLVRQQTFPHYEASSATTSPFFKPPAQHLNGSAAFNGVDDGRLASADRHTEVPTGTCPVDPFEAQWAALENKSKQRTNPSPTNPFSSDLQKTFEIEL

SEQ ID NO: 896680 - protein, 651 aa, Homo sapiens
MNKLRQSFRRKKDVYVPEASRPHQWQTDEEGVRTGKCSFPVKYLGHVEVDESRGMHICEDAVKRLKAERKFFKGFFGKTGKKAVKAVLWVSADGLRVVDEKTKDLIVDQTIEKVSFCAPDRNFDRAFSYICRDGTTRRWICHCFMAVKDTGERLSHAVGCAFAACLERKQKREKECGVTATFDASRTTFTREGSFRVTTATEQAEREEIMKQMQDAKKAETDKIVVGSSVAPGNTAPSPSSPTSPTSDATTSLEMNNPHAIPRRHAPIEQLARQGSFRGFPALSQKMSPFKRQLSLRINELPSTMQRKTDFPIKNAVPEVEGEAESISSLCSQITNAFSTPEDPFSSAPMTKPVTVVAPQSPTFQANGTDSAFHVLAKPAHTALAPVAMPVRETNPWAHAPDAANKEIAATCSGTEWGQSSGAASPGLFQAGHRRTPSEADRWLEEVSKSVRAQQPQASAAPLQPVLQPPPPTAISQPASPFQGNAFLTSQPVPVGVVPALQPAFVPAQSYPVANGMPYPAPNVPVVGITPSQMVANVFGTAGHPQAAHPHQSPSLVRQQTFPHYEASSATTSPFFKPPAQHLNGSAAFNGVDDGRLASADRHTEVPTGTCPVDPFEAQWAALENKSKQRTNPSPTNPFSSDLQKTFEIEL

SEQ ID NO: 896681 - protein, 135 aa, Homo sapiens
MPYPAPNVPVVGITPSQMVANVFGTAGHPQAAHPHQSPSLVRQQTFPHYEASSATTSPFFKPPAQHLNGSAAFNGVDDGRLASADRHTEVPTGTCPVDPFEAQWAALENKSKQRTNPSPTNPFSSDLQKTFEIEL

SEQ ID NO: 896682 - protein, 640 aa, Homo sapiens
MNKLRQSFRRKKDVYVPEASRPHQWQTDEEGVRTGKCSFPVKYLGHVEVDESRGMHICEDAVKRLKATGKKAVKAVLWVSADGLRVVDEKTKDLIVDQTIEKVSFCAPDRNFDRAFSYICRDGTTRRWICHCFMAVKDTGERLSHAVGCAFAACLERKQKREKECGVTATFDASRTTFTREGSFRVTTATEQAEREEIMKQMQDAKKAETDKIVVGSSVAPGNTAPSPSSPTSPTSDATTSLEMNNPHAIPRRHAPIEQLARQGSFRGFPALSQKMSPFKRQLSLRINELPSTMQRKTDFPIKNAVPEVEGEAESISSLCSQITNAFSTPEDPFSSAPMTKPVTVVAPQSPTFQANGTDSAFHVLAKPAHTALAPVAMPVRETNPWAHAPDAANKEIAATCSGTEWGQSSGAASPGLFQAGHRRTPSEADRWLEEVSKSVRAQQPQASAAPLQPVLQPPPPTAISQPASPFQGNAFLTSQPVPVGVVPALQPAFVPAQSYPVANGMPYPAPNVPVVGITPSQMVANVFGTAGHPQAAHPHQSPSLVRQQTFPHYEASSATTSPFFKPPAQHLNGSAAFNGVDDGRLASADRHTEVPTGTCPVDPFEAQWAALENKSKQRTNPSPTNPFSSDLQKTFEIEL

SEQ ID NO: 896683 - protein, 592 aa, Homo sapiens
MNKLRQSFRRKKDVYVPEASRPHQWQTDEEGVRTGKCSFPVKYLGHVEVDESRGMHICEDAVKRLKATGKKAVKAVLWVSADGLRVVDEKTKDLIVDQTIEKVSFCAPDRNFDRAFSYICRDGTTRRWICHCFMAVKDTGERLSHAVGCAFAACLERKQKREKECGVTATFDASRTTFTREGSFRVTTATEQAEREEIMKQMQDAKKAETDKIVVGSSVAPGNTAPSPSSPTSPTSDATTSLEMNNPHAIPRRHAPIEQLARQGSFRGFPALSQKMSPFKRQLSLRINELPSTMQRKTDFPIKNAVPEVEGEAESISSLCSQITNAFSTPEDPFSSAPMTKPVTVVAPQSPTFQGTEWGQSSGAASPGLFQAGHRRTPSEADRWLEEVSKSVRAQQPQASAAPLQPVLQPPPPTAISQPASPFQGNAFLTSQPVPVGVVPALQPAFVPAQSYPVANGMPYPAPNVPVVGITPSQMVANVFGTAGHPQAAHPHQSPSLVRQQTFPHYEASSATTSPFFKPPAQHLNGSAAFNGVDDGRLASADRHTEVPTGTCPVDPFEAQWAALENKSKQRTNPSPTNPFSSDLQKTFEIEL

SEQ ID NO: 896684 - protein, 154 aa, Homo sapiens
MNKLRQSFRRKKDVYVPEASRPHQWQTDEEGVRTGKCSFPVKYLGHVEVDESRGMHICEDAVKRLKATGKKAVKAVLWVSADGLRVVDEKTKDLIVDQTIEKVSFCAPDRNFDRAFSYICRDGTTGGESGRLRRQGQVKVSAIGGFTLVHQRVW

SEQ ID NO: 896685 - protein, 603 aa, Homo sapiens; identical to SEQ ID NO: 896679

SEQ ID NO: 896686 - protein, 603 aa, Homo sapiens; identical to SEQ ID NO: 896679

SEQ ID NO: 896687 - protein, 494 aa, Homo sapiens
MNKLRQSFRRKKDVYVPEASRPHQWQTDEEGVRTGKCSFPVKYLGHVEVDESRGMHICEDAVKRLKATGKKAVKAVLWVSADGLRVVDEKTKDLIVDQTIEKVSFCAPDRNFDRAFSYICRDGTTRRWICHCFMAVKDTGERLSHAVGCAFAACLERKQKREKECGVTATFDASRTTFTREGSFRVTTATEQAEREEIMKQMQDAKKVPEVEGEAESISSLCSQITNAFSTPEDPFSSAPMTKPVTVVAPQSPTFQGTEWGQSSGAASPGLFQAGHRRTPSEADRWLEEVSKSVRAQQPQASAAPLQPVLQPPPPTAISQPASPFQGNAFLTSQPVPVGVVPALQPAFVPAQSYPVANGMPYPAPNVPVVGITPSQMVANVFGTAGHPQAAHPHQSPSLVRQQTFPHYEASSATTSPFFKPPAQHLNGSAAFNGVDDGRLASADRHTEVPTGTCPVDPFEAQWAALENKSKQRTNPSPTNPFSSDLQKTFEIEL

SEQ ID NO: 896688 - protein, 636 aa, Homo sapiens
MNKLRQSFRRKKDVYVPEASRPHQWQTDEEGVRTGKCSFPVKYLGHVEVDESRGMHICEDAVKRLKAERKFFKGFFGKTGKKAVKAVLWVSADGLRVVDEKTKDLIVDQTIEKVSFCAPDRNFDRAFSYICRDGTTRRWICHCFMAVKDTGERLSHAVGCAFAACLERKQKREKECGVTATFDASRTTFTREGSFRVTTATEQAEREEIMKQMQDAKKAETDKIVVGSSVAPGNTAPSPSSPTSPTSDATTSLEMNNPHAIPRRHAPIEQLARQGSFRGFPALSQKMSPFKRQLSLRINELPSTMQRKTDFPIKNAAQITNAFSTPEDPFSSAPMTKPVTVVAPQSPTFQANGTDSAFHVLAKPAHTALAPVAMPVRETNPWAHAPDAANKEIAATCSGTEWGQSSGAASPGLFQAGHRRTPSEADRWLEEVSKSVRAQQPQASAAPLQPVLQPPPPTAISQPASPFQGNAFLTSQPVPVGVVPALQPAFVPAQSYPVANGMPYPAPNVPVVGITPSQMVANVFGTAGHPQAAHPHQSPSLVRQQTFPHYEASSATTSPFFKPPAQHLNGSAAFNGVDDGRLASADRHTEVPTGTCPVDPFEAQWAALENKSKQRTNPSPTNPFSSDLQKTFEIEL

SEQ ID NO: 896689 - protein, 494 aa, Homo sapiens; identical to SEQ ID NO: 896687

SEQ ID NO: 896690 - protein, 361 aa, Homo sapiens
MAVKDTGERLSHAVGCAFAACLERKQKREKECGVTATFDASRTTFTREGSFRVTTATEQAEREEIMKQMQDAKKVPEVEGEAESISSLCSQITNAFSTPEDPFSSAPMTKPVTVVAPQSPTFQGTEWGQSSGAASPGLFQAGHRRTPSEADRWLEEVSKSVRAQQPQASAAPLQPVLQPPPPTAISQPASPFQGNAFLTSQPVPVGVVPALQPAFVPAQSYPVANGMPYPAPNVPVVGITPSQMVANVFGTAGHPQAAHPHQSPSLVRQQTFPHYEASSATTSPFFKPPAQHLNGSAAFNGVDDGRLASADRHTEVPTGTCPVDPFEAQWAALENKSKQRTNPSPTNPFSSDLQKTFEIEL

SEQ ID NO: 896691 - protein, 434 aa, Homo sapiens
IIFFFRLSLLGLKRRESSQRRRDGVVGERAVPDLIVDQTIEKVSFCAPDRNFDRAFSYICRDGTTRRWICHCFMAVKDTGERLSHAVGCAFAACLERKQKREKECGVTATFDASRTTFTREGSFRVTTATEQAEREEIMKQMQDAKKVPEVEGEAESISSLCSQITNAFSTPEDPFSSAPMTKPVTVVAPQSPTFQGTEWGQSSGAASPGLFQAGHRRTPSEADRWLEEVSKSVRAQQPQASAAPLQPVLQPPPPTAISQPASPFQGNAFLTSQPVPVGVVPALQPAFVPAQSYPVANGMPYPAPNVPVVGITPSQMVANVFGTAGHPQAAHPHQSPSLVRQQTFPHYEASSATTSPFFKPPAQHLNGSAAFNGVDDGRLASADRHTEVPTGTCPVDPFEAQWAALENKSKQRTNPSPTNPFSSDLQKTFEIEL

SEQ ID NO: 896692 - protein, 254 aa, Homo sapiens [sequence omitted]

SEQ ID NO: 896693 - protein, 603 aa, Homo sapiens; identical to SEQ ID NO: 896679

SEQ ID NO: 896694 - protein, 603 aa, Homo sapiens; identical to SEQ ID NO: 896679

SEQ ID NO: 896695 - protein, 548 aa, Homo sapiens
MNKLRQSFRRKKDVYVPEASRPHQWQTDEEGVRTGKCSFPVKYLGHVEVDESRGMHICEDAVKRLKAERKFFKGFFGKTGKKAVKAVLWVSADGLRVVDEKTKDLIVDQTIEKVSFCAPDRNFDRAFSYICRDGTTRRWICHCFMAVKDTGERLSHAVGCAFAACLERKQKREKECGVTATFDASRTTFTREGSFRVTTATEQAEREEIMKQMQDAKKAETDKIVVGSSVAPGNTAPSPSSPTSPTSDATTSLEMNNPHAIPRRHAPIEQLARQGSFRGFPALSQKMSPFKRQLSLRINELPSTMQRKTDFPIKNAVPEVEGEAESISSLCSQITNAFSTPEDPFSSAPMTKPVTVVAPQSPTFQANGTDSAFHVLAKPAHTALAPVAMPVRETNPWAHAPDAANKEIAATCSGTEWGQSSGAASPGLFQAGHRRTPSEADRWLEEVSKSVRAQQPQASAAPLQPVLQPPPPTAISQPASPFQGNAFLTSQPVPVGVVPALQPAFVPAQSYPVANGMPYPAPNVPVVGFVCSNCHFIFTLLDMGTVWV

SEQ ID NO: 896696 - protein, 393 aa, Homo sapiens
MNKLRQSFRRKKDVYVPEASRPHQWQTDEEGVRTGKCSFPVKYLGHVEVDESRGMHICEDAVKRLKAERKFFKGFFGKTGKKAVKAVLWVSADGLRVVDEKTKDLIVDQTIEKVSFCAPDRNFDRAFSYICRDGTTRRWICHCFMAVKDTGERLSHAVGCAFAACLERKQKREKECGVTATFDASRTTFTREGSFRVTTATEQAEREEIMKQMQDAKKAETDKIVVGSSVAPGNTAPSPSSPTSPTSDATTSLEMNNPHAIPRRHAPIEQLARQGSFRGFPALSQKMSPFKRQLSLRINELPSTMQRKTDFPIKNAVPEVEGEAESISSLCSQITNAFSTPEDPFSSAPMTKPVTVVAPQSPTFQGWCPLTCSAVLFTTSTFSTLLTNCKLAS

SEQ ID NO: 896697 - protein, 1383 aa, Homo sapiens
MGWYFRLQQAPPHSAGRCRRVPGARYFPEPPPPAPGPRTSADTTMDRASELLFYVNGRKVIEKNVDPETMLLPYLRKKLRLTGTKYGCGGGGCGACTVMISRYNPITKRIRHHPANACLIPICSLYGAAVTTVEGIGSTHTRIHPVQERIAKCHGTQCGFCTPGMVMSIYTLLRNHPEPTLDQLTDALGGNLCRCTGYRPIIDACKTFCKTSGCCQSKENGVCCLDQGINGLPEFEEGSKTSPKLFAEEEFLPLDPTQELIFPPELMIMAEKQSQRTRVFGSERMMWFSPVTLKELLEFKFKYPQAPVIMGNTSVGPEVKFKGVFHPVIISPDRIEELSVVNHAYNGLTLGAGLSLAQVKDILADVVQKLPEEKTQMYHALLKHLGTLAGSQIRNMASLGGHIISRHPDSDLNPILAVGNCTLNLLSKEGKRQIPLNEQFLSKCPNADLKPQEILVSVNIPYSRKWEFVSAFRQAQRQENALAIVNSGMRVFFGEGDGIIRELCISYGGVGPATICAKNSCQKLIGRHWNEQMLDIACRLILNEVSLLGSAPGGKVEFKRTLIISFLFKFYLEVSQILKKMDPVHYPSLADKYESALEDLHSKHHCSTLKYQNIGPKQHPEDPIGHPIMHLSGVKHATGEAIYCDDMPLVDQELFLTFVTSSRAHAKIVSIDLSEALSMPGVVDIMTAEHLSDVNSFCFFTEAEKFLATDKVFCVGQLVCAVLADSEVQAKRAAKRVKIVYQDLEPLILTIEESIQHNSSFKPERKLEYGNVDEAFKVVDQILEGEIHMGGQEHFYMETQSMLVVPKGEDQEMDVYVSTQFPKYIQDIVASTLKLPANKVMCHVRRVGGAFGGKVLKTGIIAAVTAFAANKHGRAVRCVLERGEDMLITGGRHPYLGKYKAGFMNDGRILALDMEHYSNAGASLDESLFVIEMGLLKMDNAYKFPNLRCRGWACRTNLPSNTAFRGFGFPQAALITESCITEVAAKCGLSPEKVRIINMYKEIDQTPYKQEINAKNLIQCWRECMAMSSYSLRKVAVEKFNAENYWKKKGLAMVPLKFPVGLGSRAAGQAAALVHIYLDGSVLVTHGGIEMGQGVHTKMIQVVSRELRMPMSNVHLRGTSTETVPNANISGGSVVADLNGLAVKDACQTLLKRLEPIISKNPKGTWKDWLAQTAFDESINLSAVGYFRGYESDMNWEKGEGQPFEYFVYGAACSEVEIDCLTGDHKNIRTDIVMDVGCSINPAIDIGQIEGAFIQGMGLYTIEELNYSPQGILHTRGPDQYKIPAICDMPTELHIALLPPSQNSNTLYSSKGLGESGVFLGCSVFFAIHDAVSAARQERGLHGPLTLNSPLTPEKIRMACEDKFTKMIPRDEPGSYVPWNVPI

SEQ ID NO: 896698 - protein, 154 aa, Homo sapiens
VRARAEFGTSINPAIDIGQIEGAFIQGMGLYTIEELNYSPQGILHTRGPDQYKIPAICDMPTELHIALLPPSQNSNTLYSSKGLGESGVFLGCSVFFAIHDAVSAARQERGLHGPLTLNSPLTPEKIRMACEDKFTKMIPRDEPGSYVPWNVPI

SEQ ID NO: 896699 - protein, 1383 aa, Homo sapiens; identical to SEQ ID NO: 896697

SEQ ID NO: 896700 - protein, 1358 aa, Homo sapiens
MGWYFRLQQAPPHSAGRCRRVPGARYFPEPPPPAPGPRTSADTTMDRASELLFYVNGRKVIEKNVDPETMLLPYLRKKLRLTGTKYGCGGGGCGACTVMISRYNPITKRIRHHPANACLIPICSLYGAAVTTVEGIGSTHTRIHPVQERIAKCHGTQCGFCTPGMVMSIYTLLRNHPEPTLDQLTDALGGNLCRCTGYRPIIDACKTFCKTSGCCQSKENGVCCLDQGINGLPEFEEGSKTSPKLFAEEEFLPLDPTQELIFPPELMIMAEKQSQRTRVFGSERMMWFSPVTLKELLEFKFKYPQAPVIMGNTSVGPEVKFKGVFHPVIISPDRIEELSVVNHAYNGLTLGAGLSLAQVKDILADVVQKLPEEKTQMYHALLKHLGTLAGSQIRNMASLGGHIISRHPDSDLNPILAVGNCTLNLLSKEGKRQIPLNEQFLSKCPNADLKPQEILVSVNIPYSRKWEFVSAFRQAQRQENALAIVNSGMRVFFGEGDGIIRELCISYGGVGPATICAKNSCQKLIGRHWNEQMLDIACRLILNEVSLLGSAPGGKVEFKRTLIISFLFKFYLEVSQILKKMDPVHYPSLADKYESALEDLHSKHHCSTLKYQNIGPKQHPEDPIGHPIMHLSGVKHATGEAIYCDDMPLVDQELFLTFVTSSRAHAKIVSIDLSEALSMPGVVDIMTAEHLSDVNSFCFFTEAEKFLATDKVFCVGQLVCAVLADSEVQAKRAAKRVKIVYQDLEPLILTIEESIQHNSSFKPERKLEYGNVDEAFKVVDQILEGEIHMGGQEHFYMETQSMLVVPKGEDQEMDVYVSTQFPKYIQDIVASTLKLPANKVMCHVRRVGGAFGGKVLKTGIIAAVTAFAANKHGRAVRCVLERGEDMLITGGRHPYLGKYKAGFMNDGRILALDMEHYSNAGASLDESLFVIEMGLLKMDNAYKFPNLRCRGWACRTNLPSNTAFRGFGFPQAALITESCITEVAAKCGLSPEKVRIINMYKEIDQTPYKQEINAKNLIQCWRECMAMSSYSLRKVAVEKFNAENYWKKKGLAMVPLKFPVGLGSRAAGQAAALVHIYLDGSVLVTHGGIEMGQGVHTKMIQVVSRELRMPMSNVHLRGTSTETVPNANISGGSVVADLNGLAVKLAQTAFDESINLSAVGYFRGYESDMNWEKGEGQPFEYFVYGAACSEVEIDCLTGDHKNIRTDIVMDVGCSINPAIDIGQIEGAFIQGMGLYTIEELNYSPQGILHTRGPDQYKIPAICDMPTELHIALLPPSQNSNTLYSSKGLGESGVFLGCSVFFAIHDAVSAARQERGLHGPLTLNSPLTPEKIRMACEDKFTKMIPRDEPGSYVPWNVPI

SEQ ID NO: 896701 - protein, 1046 aa, Homo sapiens
MGWYFRLQQAPPHSAGRCRRVPGARYFPEPPPPAPGPRTSADTTMDRASELLFYVNGRKVIEKNVDPETMLLPYLRKKLRLTGTKYGCGGGGCGACTVMISRYNPITKRIRHHPANACLIPICSLYGAAVTTVEGIGSTHTRIHPVQERIAKCHGTQCGFCTPGMVMSIYTLLRNHPEPTLDQLTDALGGNLCRCTGYRPIIDACKTFCKTSGCCQSKENGVCCLDQGINGLPEFEEGSKTSPKLFAEEEFLPLDPTQELIFPPELMIMAEKQSQRTRVFGSERMMWFSPVTLKELLEFKFKYPQAPVIMGNTSVGPEVKFKGVFHPVIISPDRIEELSVVNHAYNGLTLGAGLSLAQVKDILADVVQKLPEEKTQMYHALLKHLGTLAGSQIRNMASLGGHIISRHPDSDLNPILAVGNCTLNLLSKEGKRQIPLNEQFLSKCPNADLKPQEILVSVNIPYSRKWEFVSAFRQAQRQENALAIVNSGMRVFFGEGDGIIRELCISYGGVGPATICAKNSCQKLIGRHWNEQMLDIACRLILNEVSLLGSAPGGKVEFKRTLIISFLFKFYLEVSQILKKMDPVHYPSLADKYESALEDLHSKHHCSTLKYQNIGPKQHPEDPIGHPIMHLSGVKHATGEAIYCDDMPLVDQELFLTFVTSSRAHAKIVSIDLSEALSMPGVVDIMTAEHLSDVNSFCFFTEAEKFLATDKVFCVGQLVCAVLADSEVQAKRAAKRVKIVYQDLEPLILTIEESIQHNSSFKPERKLEYGNVDEAFKVVDQILEGEIHMGGQEHFYMETQSMLVVPKGEDQEMDVYVSTQFPKYIQDIVASTLKLPANKVMCHVRRVGGAFGGKVLKTGIIAAVTAFAANKHGRAVRCVLERGEDMLITGGRHPYLGKYKAGFMNDGRILALDMEHYSNAGASLDESLFVIEMGLLKMDNAYKFPNLRCRGWACRTNLPSNTAFRGFGFPQAALITESCITEVAAKCGLSPEKVRIINMYKEIDQTPYKQEINAKNLIQCWRECMAMSSYSLRKVAVEKFKWSAVN

SEQ ID NO: 896702 - protein, 1369 aa, Homo sapiens
MGWYFRLQQAPPHSAGRCRRVPGARYFPEPPPPAPGPRTSADTTMDRASELLFYVNGRKVIEKNVDPETMLLPYLRKKLRLTGTKYGCGGGGCGACTVMISRYNPITKRIRHHPANACLIPICSLYGAAVTTVEGIGSTHTRIHPVQERIAKCHGTQCGFCTPGMVMSIYTLLRNHPEPTLDQLTDALGGNLCRCTGYRPIIDACKTFCKTSGCCQSKENGVCCLDQGINGLPEFEEGSKTSPKLFAEEEFLPLDPTQELIFPPELMIMAEKQSQRTRVFGSERMMWFSPVTLKELLEFKFKYPQAPVIMGNTSVGPEVKFKGVFHPVIISPDRIEELSVVNHAYNGLTLGAGLSLAQVKDILADVVQKLPEEKTQMYHALLKHLGTLAGSQIRNMASLGGHIISRHPDSDLNPILAVGNCTLNLLSKEGKRQIPLNEQFLSKCPNADLKPQEILVSVNIPYSRKWEFVSAFRQAQRQENALAIVNSGMRVFFGEGDGIIRELCISYGGVGPATICAKNSCQKLIGRHWNEQMLDIACRLILNEVSLLGSAPGGKVEFKRTLIISFLFKFYLEVSQILKKMDPVHYPSLADKYESALEDLHSKHHCSTLKYQNIGPKQHPEDPIGHPIMHLSGVKHATGEAIYCDDMPLVDQELFLTFVTSSRAHAKIVSIDLSEALSMPGVVDIMTAEHLSDVNSFCFFTEAEKFLATDKVFCVGQLVCAVLADSEVQAKRAAKRVKIVYQDLEPLILTIEESIQHNSSFKPERKLEYGNVDEAFKVVDQILEGEIHMGGQEHFYMETQSMLVVPKGEDQEMDVYVSTQFPKYIQDIVASTLKLPANKVMCHVRRVGGAFGGKVLKTGIIAAVTAFAANKHGRAVRCVLERGEDMLITGGRHPYLGKYKAGFMNDGRILALDMEHYSNAGASLDESLFVIEMGLLKMDNAYKFPNLRCRGWACRTNLPSNTAFRGFGFPQAALITESCITEVAAKCGLSPEKVRIINMYKEIDQTPYKQEINAKNLIQCWRECMAMSSYSLRKVAVEKFNAENYWKKKGLAMVPLKFPVGLGSRAAGQAAALVHIYLDGSVLVTHGGIEMGQGVHTKMIQLRGTSTETVPNANISGGSVVADLNGLAVKDACQTLLKRLEPIISKNPKGTWKDWLAQTAFDESINLSAVGYFRGYESDMNWEKGEGQPFEYFVYGAACSEVEIDCLTGDHKNIRTDIVMDVGCSINPAIDIGQIEGAFIQGMGLYTIEELNYSPQGILHTRGPDQYKIPAICDMPTELHIALLPPSQNSNTLYSSKGLGESGVFLGCSVFFAIHDAVSAARQERGLHGPLTLNSPLTPEKIRMACEDKFTKMIPRDEPGSYVPWNVPI

SEQ ID NO: 896703 - protein, 838 aa, Homo sapiens
TKQKFIGRKMADGRQDLDSGILNFSSRSVTKTLLSLPELVTLIISFLFKFYLEVSQILKKMDPVHYPSLADKYESALEDLHSKHHCSTLKYQNIGPKQHPEDPIGHPIMHLSGVKHATGEAIYCDDMPLVDQELFLTFVTSSRAHAKIVSIDLSEALSMPGVVDIMTAEHLSDVNSFCFFTEAEKFLATDKVFCVGQLVCAVLADSEVQAKRAAKRVKIVYQDLEPLILTIEESIQHNSSFKPERKLEYGNVDEAFKVVDQILEGEIHMGGQEHFYMETQSMLVVPKGEDQEMDVYVSTQFPKYIQDIVASTLKLPANKVMCHVRRVGGAFGGKVLKTGIIAAVTAFAANKHGRAVRCVLERGEDMLITGGRHPYLGKYKAGFMNDGRILALDMEHYSNAGASLDESLFVIEMGLLKMDNAYKFPNLRCRGWACRTNLPSNTAFRGFGFPQAALITESCITEVAAKCGLSPEKVRIINMYKEIDQTPYKQEINAKNLIQCWRECMAMSSYSLRKVAVEKFNAENYWKKKGLAMVPLKFPVGLGSRAAGQAAALVHIYLDGSVLVTHGGIEMGQGVHTKMIQVVSRELRMPMSNVHLRGTSTETVPNANISGGSVVADLNGLAVKLAQTAFDESINLSAVGYFRGYESDMNWEKGEGQPFEYFVYGAACSEVEIDCLTGDHKNIRTDIVMDVGCSINPAIDIGQIEGAFIQGMGLYTIEELNYSPQGILHTRGPDQYKIPAICDMPTELHIALLPPSQNSNTLYSSKGLGESGVFLGCSVFFAIHDAVSAARQERGLHGPLTLNSPLTPEKIRMACEDKFTKMIPRDEPGSYVPWNVPI

SEQ ID NO: 896704 - protein, 1383 aa, Homo sapiens; identical to SEQ ID NO: 896697

SEQ ID NO: 896705 - protein, 247 aa, Homo sapiens
HERHERHEDACQTLLKRLEPIISKNPKGTWKDWLAQTAFDESINLSAVGYFRGYESDMNWEKGEGQPFEYFVYGAACSEVEIDCLTGDHKNIRTDIVMDVGCSINPAIDIGQIEGAFIQGMGLYTIEELNYSPQGILHTRGPDQYKIPAICDMPTELHIALLPPSQNSNTLYSSKGLGESGVFLGCSVFFAIHDAVSAARQERGLHGPLTLNSPLTPEKIRMACEDKFTKMIPRDEPGSYVPWNVPI

SEQ ID NO: 896706 - protein, 1358 aa, Homo sapiens; identical to SEQ ID NO: 896700

SEQ ID NO: 896707 - protein, 1001 aa, Homo sapiens
MGWYFRLQQAPPHSAGRCRRVPGARYFPEPPPPAPGPRTSADTTMDRASELLFYVNGRKVIEKNVDPETMLLPYLRKKLRLTGTKYGCGGGGCGACTVMISRYNPITKRIRHHPANACLIPICSLYGAAVTTVEGIGSTHTRIHPVQERIAKCHGTQCGFCTPGMVMSIYTLLRNHPEPTLDQLTDALGGNLCRCTGYRPIIDACKTFCKTSGCCQSKENGVCCLDQGINGLPEFEEGSKTSPKLFAEEEFLPLDPTQELIFPPELMIMAEKQSQRTRVFGSERMMWFSPVTLKELLEFKFKYPQAPVIMGNTSVGPEVKFKGVFHPVIISPDRIEELSVVNHAYNGLTLGAGLSLAQVKDILADVVQKLPEEKTQMYHALLKHLGTLAGSQIRNMASLGGHIISRHPDSDLNPILAVGNCTLNLLSKEGKRQIPLNEQFLSKCPNADLKPQEILVSVNIPYSRKWEFVSAFRQAQRQENALAIVNSGMRVFFGEGDGIIRELCISYGGVGPATICAKNSCQKLIGRHWNEQMLDIACRLILNEVSLLGSAPGGKVEFKRTLIISFLFKFYLEVSQILKKMDPVHYPSLADKYESALEDLHSKHHCSTLKYQNIGPKQHPEDPIGHPIMHLSGVKHATGEAIYCDDMPLVDQELFLTFVTSSRAHAKIVSIDLSEALSMPGVVDIMTAEHLSDVNSFCFFTEAEKFLATDKVFCVGQLVCAVLADSEVQAKRAAKRVKIVYQDLEPLILTIEESIQHNSSFKPERKLEYGNVDEAFKVVDQILEGEIHMGGQEHFYMETQSMLVVPKGEDQEMDVYVSTQFPKYIQDIVASTLKLPANKVMCHVRRVGGAFGGKVLKTGIIAAVTAFAANKHGRAVRCVLERGEDMLITGGRHPYLGKYKAGFMNDGRILALDMEHYSNAGASLDESLFVIEMGLLKMDNAYKFPNLRCRGWACRTNLPSYKQEINAKNLIQCWRECMAMSSYSLRKVAVEKFKFRVFRYP

SEQ ID NO: 896708 - protein, 1370 aa, Homo sapiens
MGWYFRLQQAPPHSAGRCRRVPGARYFPEPPPPAPGPRTSADTTMDRASELLFYVNGRKVIEKNVDPETMLLPYLRKKLRLTGTKYGCGGGGCGACTVMISRYNPITKRIRHHPANACLIPICSLYGAAVTTVEGIGSTHTRIHPVQERIAKCHGTQCGFCTPGMVMSIYTLLRNHPEPTLDQLTDALGGNLCRCTGYRPIIDACKTFCKTSGCCQSKENGVCCLDQGINGLPEFEEGSKTSPKLFAEEEFLPLDPTQELIFPPELMIMAEKQSQRTRVFGSERMMWFSPVTLKELLEFKFKYPQAPVIMGNTSVGPEVKFKGVFHPVIISPDRIEELSVVNHAYNGLTLGAGLSLAQVKDILADVVQKLPEEKTQMYHALLKHLGTLAGSQIRNMASLGGHIISRHPDSDLNPILAVGNCTLNLLSKEGKRQIPLNEQFLSKCPNADLKPQEILVSVNIPYSRKWEFVSAFRQAQRQENALAIVNSGMRVFFGEGDGIIRELCISYGGVGPATICAKNSCQKLIGRHWNEQMLDIACRLILNEVSLLGSAPGGKVEFKRTLIISFLFKFYLEVSQILKKMDPVHYPSLADKYESALEDLHSKHHCSTLKYQNIGPKQHPEDPIGHPIMHLSGVKHATGEAIYCDDMPLVDQELFLTFVTSSRAHAKIVSIDLSEALSMPGVVDIMTAEHLSDVNSFCFFTEAEKFLATDKVFCVGQLVCAVLADSEVQAKRAAKRVKIVYQDLEPLILTIEESIQHNSSFKPERKLEYGNVDEAFKVVDQILEGEIHMGGQEHFYMETQSMLVVPKGEDQEMDVYVSTQFPKYIQDIVASTLKLPANKVMCHVRRVGGAFGGKVLKTGIIAAVTAFAANKHGRAVRCVLERGEDMLITGGRHPYLGKYKAGFMNDGRILALDMEHYSNAGASLDESLFVIEMGLLKMDNAYKFPNLRCRGWACRTNLPSNTAFRGFGFPQAALITESCITEVAAKCGLSPEKVRIINMYKEIDQTPYKQEINAKNLIQCWRECMAMSSYSLRKVAVEKFNAENYWKKKGLAMVPLKFPVGLGSRAAGQAAALVHIYLDGSVLVTHGGIEMGQGVHTKMIQVVSRELRMPMSNVHLRGTSTETVPNANISGGSVVADLNGLAVKLAQTAFDESINLSAVGYFRGYESDMNWEKGEGQPFEYFVYGAACSEVEIDCLTGDHKNIRTDIVMDVGCSINPAIDIGQIEGAFIQGMGLYTIEELNYSPQGILHTRGPDQYKIPAICDMPTELHIALLPPSQNSNTLYSSKGLGESGVFLGCSVFFAIHDAVSAARQERGLHGPLTLNSPLTPEKIRMACEDKFTKMGAHGKPVRRTQEQVLLIQLHKIQPMLVA

SEQ ID NO: 896709 - protein, 72 aa, Homo sapiens
NAKNLIQCWRECMAMSSYSLRKVAVEKFNAENYWKKKGLAMVPLKFPVGLGSRAAGQVSSPNAHEDAAWKQP

SEQ ID NO: 896710 - protein, 239 aa, Homo sapiens
MASEELACKLERRLRREEAEESGPQLAPLGAPAPEPKPEPEPPARAPTASADAELSAQLSRRLDINEGAARPRRCRVFNPYTEFPEFSRRLIKDLESMFKLYDAGRDGFIDLMELKLMMEKLGAPQTHLGLKSMIKEVDEDFDGKLSFREFLLIFHKAAAGELQEDSGLMALAKLSEIDVALEGVKGAKNFFEAKVQALSSASKFEAELKAEQDERKREEEERRLRQAAFQKLKANFNT

SEQ ID NO: 896711 - protein, 239 aa, Homo sapiens; identical to SEQ ID NO: 896710

SEQ ID NO: 896712 - protein, 254 aa, Homo sapiens
RERFQSGYFWGTRKAPSERSRRFFPLRFSPELTGAARSELIRGSLPGPGGRSASRPEPRGEEAGRGLRDAQTPRHRRPPPTRLAVAEPWRLLKAAAPPRPPRPPVRPQTLPTAGSPPPRRSVVEPRACEERAARQLPASRPASPRSRVLRSAAMASEELACKLERRLRREEAEESGPQLAPLGAPAPEPKPEPEPPARAPTASADAELSAQLSRRLDINEGAARPRRCRVFNPYTEFPEFSRRLIKDLESMFKL

SEQ ID NO: 896713 - protein, 124 aa, Homo sapiens
MASEELACKLERRLRREEAEESGPQLAPLGAPAPEPKPEPEPPARAPTASADAELSAQLSRRLDINEGAARPRRCRVFNPYTEFPEFSRRLIKDLESMFKLIPPVPPSSPCSVYVFPAQPFPHS

SEQ ID NO: 896714 - protein, 239 aa, Homo sapiens; identical to SEQ ID NO: 896710

SEQ ID NO: 896715 - protein, 265 aa, Homo sapiens
MASEELACKLERRLRREEAEESGPQLAPLGAPAPEPKPEPEPPARAPTASADAELSAQLSRRLDINEGAARPRRCRVFNPYTEFPEFSRRLIKDLESMFKLICNGDVMDVLPVPESRVTKTPVKPKKYDAGRDGFIDLMELKLMMEKLGAPQTHLGLKSMIKEVDEDFDGKLSFREFLLIFHKAAAGELQEDSGLMALAKLSEIDVALEGVKGAKNFFEAKVQALSSASKFEAELKAEQDERKREEEERRLRQAAFQKLKANFNT

SEQ ID NO: 896716 - protein, 127 aa, Homo sapiens
MELKLMMEKLGAPQTHLGLKSMIKEVDEDFDGKLSFREFLLIFHKAAAGELQEDSGLMALAKLSEIDVALEGVKGAKNFFEAKVQALSSASKFEAELKAEQDERKREEEERRLRQAAFQKLKANFNT

SEQ ID NO: 896717 - protein, 151 aa, Homo sapiens
MASEELACKLERRLRREEAEESGPQLAPLGAPAPEPKPEPEPPARAPTASADAELSAQLSRRLDINEGAARPRRCRVFNPYTEFPEFSRRLIKDLESMFKLYDAGRDGFIDLMELKLMMEKMRTSMASSASGSSCSFSTRPRQGSCRRTVG

SEQ ID NO: 896718 - protein, 154 aa, Homo sapiens
LKGWKCMRRRNKNMCVWTGAAALAEPTVPILMDRLLAADPGTVLLGLEPWTLGFGSEREKSFMGCLLPAFLGAAAGELQEDSGLMALAKLSEIDVALEGVKGAKNFFEAKVQALSSASKFEAELKAEQDERKREEEERRLRQAAFQKLKANFNT

SEQ ID NO: 896719 - protein, 239 aa, Homo sapiens; identical to SEQ ID NO: 896710

SEQ ID NO: 896720 - protein, 192 aa, Homo sapiens
MASEELACKLERRLRREEAEESGPQLAPLGAPAPEPKPEPEPPARAPTASADAELSAQLSRRLDINEGAARPRRCRVFNPYTEFPEFSRRLIKDLESMFKLYDAGRDGFIDLMELKLMMEKLGAPQTHLGQLPCQPSFLPVSKPLQEGPGVGQMPAHLCLLPLLLCPSYSQNLYLLSNLHFVLVPLPFPIKE

SEQ ID NO: 896721 - protein, 198 aa, Homo sapiens
MASEELACKLERRLRREEAEESGPQLAPLGAPAPEPKPEPEPPARAPTASADAELSAQLSRRLDINEGAARPRRCRVFNPYTEFPEFSRRLIKDLESMFKLYDAGRDGFIDLMELKLMMEKLGAPQTHLGLKSMIKEVDEDFDGKLSFREFLLIFHKAAAGELQEDSGLMALAKLSEIDVALEGVKGAKNFFEAKVGA

SEQ ID NO: 896722 - protein, 278 aa, Homo sapiens
GSTWGPGRGRGCGCSHFPRLQPAQAAAAAAGEPRPRKAMKVKKGGGGAGTATESAPGPSGQSVAPIPQPPAESESGSESEPDAGPGPRPGPLQRKQPIGPEDVLGLQRITGDYLCSPEENIYKIDFVRFKIRDMDSGTVLFEIKKPPVSERLPINRRDLDPNAGRFVRYQFTPAFLRLRQVGATVEFTVGDKPVNNFRMIERHYFRNQLLKSFDFHFGFCIPSSKNTCEHIYDFPPLSEELISEMIRHPYETQSDSFYFVDDRLVMHNKADYSYSGTP

SEQ ID NO: 896723 - protein, 278 aa, Homo sapiens; identical to SEQ ID NO: 896722

SEQ ID NO: 896724 - protein, 258 aa, Homo sapiens
GSTWGPGRGRGCGCSHFPRLQPAQAAAAAAGEPRPRKAMKVKKGGGGAGTATESAPGPSGQSVAPIPQPPAESESGSESEPDAGPGPRPGPLQRKQPIGPEDVLGLQRITGDYLCSPEENIYKIDFVRFKIRDMDSGTVLFEIKKPPVSERLPINRRDLDPNAGRFVRYQFTPAFLRLRQVGATVEFTVGDKPVNNFRMIERHYFRNQLLKSFDFHFGFCIPSSKNTCEHIYDFPPLSEELSARAGSSGSGEVGASRD

SEQ ID NO: 896725 - protein, 145 aa, Homo sapiens
MDSGTVLFEIKKPPVSERLPINRRDLDPNAGRFVRYQFTPAFLRLRQVGATVEFTVGDKPVNNFRMIERHYFRNQLLKSFDFHFGFCIPSSKNTCEHIYDFPPLSEELISEMIRHPYETQSDSFYFVDDRLVMHNKADYSYSGTP

SEQ ID NO: 896726 - protein, 442 aa, Homo sapiens
GSTWGPGRGRGCGCSHFPRLQPAQAAAAAAGEPRPRKAMKVKKGGGGAGTATESAPGPSGQSVAPIPQPPAESESGSESEPDAGPGPRPGPLQRKQPIGPEDVLGLQRITGDYLCSPEENIYKIDFVRFKIRDMDSGTVLFEIKKPPVSGEWAGWAIDGEADRSCGVGCPGNPWATEESTELGLGPQHSQESAGRGALSFPSHMFLRLDILRGQPYPFGPCQPALCRALWELQSYGSQASASCGPGKHSGDWEHADLEPLGGYYLANGLSPQCAPEFLGEFKKKSDRWGPKGRTLGGQGPSLKPTEPQLGYIAERLPINRRDLDPNAGRFVRYQFTPAFLRLRQVGATVEFTVGDKPVNNFRMIERHYFRNQLLKSFDFHFGFCIPSSKNTCEHIYDFPPLSEELISEMIRHPYETQSDSFYFVDDRLVMHNKADYSYSGTP

SEQ ID NO: 896727 - protein, 278 aa, Homo sapiens; identical to SEQ ID NO: 896722

SEQ ID NO: 896728 - protein, 268 aa, Homo sapiens
GSTWGPGRGRGCGCSHFPRLQPAQAAAAAAGEPRPRKAMKVKKGGGGAGTATESAPGPSGQSVAPIPQPPAESESGSESEPDAGPGPRPGPLQRKQPIGPEDVLGLQRITGDYLCSPEENIYKIDFVRFKIRDMDSGTVLFEIKKPPVSGEWAGWAIDGEADRSCGVGCPGNPWATEESTELGLGPQHSQESAGRGALSFPSHMFLRLDILRGQPYPFGPCQPALCRALWELQSYGSQASASCGPGKHSGDWEHADLEPLGGTIWPMV

SEQ ID NO: 896729 - protein, 441 aa, Homo sapiens
MVHIKKGELTQEEKELLEVIGKGTVQEAGTLLSSKNVRVNCLDENGMTPLMHAAYKGKLDMCKLLLRHGADVNCHQHEHGYTALMFAALSGNKDITWVMLEAGAETDVVNSVGRTAAQMAAFVGQHDCVTIINNFFPRERLDYYTKPQGLDKEPKLPPKLAGPLHKIITTTNLHPVKIVMLVNENPLLTEEAALNKCYRVMDLICEKCMKQRDMNEVLAMKMHYISCIFQKCINFLKDGENKLDTLIKSLLKGRASDGFPVYQEKIIRESIRKFPYCEATLLQQLVRSIAPVEIGSDPTAFSVLTQAITGQVGFVDVEFCTTCGEKGASKRCSVCKMVIYCDQTCQKTHWFTHKKICKNLKDIYEKQQLEAAKEKRQEENHGKLDVNSNCVNEEQPEAEVGISQKDSNPEDSGEGKKESLESEAELEGLQDAPAGPQVSEE

SEQ ID NO: 896730 - protein, 341 aa, Homo sapiens
MVHIKKGELTQEEKELLEVIGKGTVQEAGTLLSSKNVRVNCLDENGMTPLMHAAYKGKLDMCKLLLRHGADVNCHQHEHGYTALMFAALSGNKDITWVMLEAGAETDVVNSVGRTAAQMAAFVGQHDCVTIINNFFPRERLDYYTKPQGLDKEPKLPPKLAGPLHKIITTTNLHPVKIVMLVNENPLLTEEAALNKCYRVMDLICEKCMKQRDMNEVLAMKMHYISCIFQKCINFLKDGENKLDTLIKSLLKGRASDGFPVYQEKIIRESIRKFPYCEATLLQQLVRSIAPVEIGSDPTAFSVLTQAITGQVGFVDVEFCTTCGEKGASKRCSVCKMCREL

SEQ ID NO: 896731 - protein, 292 aa, Homo sapiens
MVHIKKGELTQEEKELLEVIGKGTVQEAGTLLSSKNVRVNCLDENGMTPLMHAAYKGKLDMCKLLLRHGADVNCHQHEHGYTALMFAALSGNKDITWVMLEAGAETDVVNSVGRTAAQMAAFVGQHDCVTIINNFFPRERLDYYTKPQGLDKEPKLPPKLAGPLHKIITTTNLHPVKIVMLVNENPLLTEEAALNKCYRVMDLICEKCMKQRDMNEVLAMKMHYISCIFQKCINFLKDGENKLDTLIKRVLIPLHSPSLPKPSLARWVLWMWNFALPVEKREQVKDVQFAKW

SEQ ID NO: 896732 - protein, 441 aa, Homo sapiens; identical to SEQ ID NO: 896729

SEQ ID NO: 896733 - protein, 441 aa, Homo sapiens; identical to SEQ ID NO: 896729

SEQ ID NO: 896734 - protein, 335 aa, Homo sapiens
MGASSSSALARLGLPARPWPRWLGVAALGLAAVALGTVAWRRAWPRRRRRLQQVGTVAKLWIYPVKSCKGVPVSEAECTAMGLRSGNLRDRFWLVIKEDGHMVTARQEPRLVLISIIYENNCLIFRAPDMDQLVLPSKQPSSNKLHNCRIFGLDIKGRDCGNEAAKWFTNFLKTEAYRLVQFETNMKGRTSRKLLPTLDQNFQVAYPDYCPLLIMTDASLVDLNTRMEKKMKMENFRPNIVVTGCDAFEEDTWDELLIGSVEVKKVMACPRCILTTVDPDTGVIDRKQPLDTLKSYRLCDPSERELYKLSPLFGIYYSVEKIGSLRVGDPVYRMV

SEQ ID NO: 896735 - protein, 335 aa, Homo sapiens; identical to SEQ ID NO: 896734

SEQ ID NO: 896736 - protein, 247 aa, Homo sapiens
MPRFWLVIKEDGHMVTARQEPRLVLISIIYENNCLIFRAPDMDQLVLPSKQPSSNKLHNCRIFGLDIKGRDCGNEAAKWFTNFLKTEAYRLVQFETNMKGRTSRKLLPTLDQNFQVAYPDYCPLLIMTDASLVDLNTRMEKKMKMENFRPNIVVTGCDAFEEDTWDELLIGSVEVKKVMACPRCILTTVDPDTGVIDRKQPLDTLKSYRLCDPSERELYKLSPLFGIYYSVEKIGSLRVGDPVYRMV

SEQ ID NO: 896737 - protein, 150 aa, Homo sapiens
MKGRTSRKLLPTLDQNFQVAYPDYCPLLIMTDASLVDLNTRMEKKMKMENFRPNIVVTGCDAFEEDTWDELLIGSVEVKKVMACPRCILTTVDPDTGVIDRKQPLDTLKSYRLCDPSERELYKLSPLFGIYYSVEKIGSLRVGDPVYRMV

SEQ ID NO: 896738 - protein, 335 aa, Homo sapiens; identical to SEQ ID NO: 896734

SEQ ID NO: 896739 - protein, 257 aa, Homo sapiens
MGASSSSALARLGLPARPWPRWLGVAALGLAAVALGTVAWRRAWPRRRRRLQQVGTVAKLWIYPVKSCKGVPVSEAECTAMGLRSGNLRDRFWLVIKEDGHMVTARQEPRLVLISIIYENNCLIFRAPDMDQLVLPSKQPSSNKLHNCRIFGLDIKGRDCGNEAAKWFTNFLKTEAYRLVQFETNMKGRTSRKLLPTLDQNFQVAYPDYCPLLIMTDASLVDLNTRMEKKMKMENFRPNIVVTGCDAFEEASATRRD

SEQ ID NO: 896740 - protein, 268 aa, Homo sapiens
GSGRNSVVLRARLPAAAQRQPAGQFWLVIKEDGHMVTARQEPRLVLISIIYENNCLIFRAPDMDQLVLPSKQPSSNKLHNCRIFGLDIKGRDCGNEAAKWFTNFLKTEAYRLVQFETNMKGRTSRKLLPTLDQNFQVAYPDYCPLLIMTDASLVDLNTRMEKKMKMENFRPNIVVTGCDAFEEDTWDELLIGSVEVKKVMACPRCILTTVDPDTGVIDRKQPLDTLKSYRLCDPSERELYKLSPLFGIYYSVEKIGSLRVGDPVYRMV

SEQ ID NO: 896741 - protein, 335 aa, Homo sapiens; identical to SEQ ID NO: 896734

SEQ ID NO: 896742 - protein, 394 aa, Homo sapiens
GAGCERTASAGRVRGAVGRRLFSGCLADEASQKMSKQQPTQFINPETPGYVGFANLPNQVHRKSVKKGFEFTLMVVGESGLGKSTLINSLFLTDLYPERVIPGAAEKIERTVQIEASTVEIEERGVKLRLTVVDTPGYGDAINCRDCFKTIISYIDEQFERYLHDESGLNRRHIIDNRVHCCFYFISPFGHGLKPLDVAFMKAIHNKVNIVPVIAKADTLTLKERERLKKRILDEIEEHNIKIYHLPDAESDEDEDFKEQTRLLKASIPFSVVGSNQLIEAKGKKVRGRLYPWGVVEVENPEHNDFLKLRTMLITHMQDLQEVTQDLHYENFRSERLKRGGRKVENEDMNKDQILLEKEAELRRMQEMIARMQAQMQMQMQGGDGDEGALGHHV

SEQ ID NO: 896743 - protein, 370 aa, Homo sapiens
GAGCERTASAGRVRGAVGRRLFSGCLADEASQKMSKQQPTQFINPETPGYVGFANLPNQVHRKSVKKGFEFTLMVVGESGLGKSTLINSLFLTDLYPERVIPGAAEKIERTVQIEASTVEIEERGVKLRLTVVDTPGYGDAINCRDCFKTIISYIDEQFERYLHDESGLNRRHIIDNRVHCCFYFISPFGHGLKPLDVAFMKAIHNKVNIVPVIAKADTLTLKERERLKKRILDEIEEHNIKIYHLPDAESDEDEDFKEQTRLLKASIPFSVVGSNQLIEAKGKKVRGRLYPWGVVEVENPEHNDFLKLRTMLITHMQDLQEVTQDLHYENFRSERLKRGGRSSHCAPFSVLCHPEPQCSSSSMCSAQPS

SEQ ID NO: 896744 - protein, 385 aa, Homo sapiens
GRAVSGPRALGGSAARSVGAYSRAVWRQQPTQFINPETPGYVGFANLPNQVHRKSVKKGFEFTLMVVGESGLGKSTLINSLFLTDLYPERVIPGAAEKIERTVQIEASTVEIEERGVKLRLTVVDTPGYGDAINCRDCFKTIISYIDEQFERYLHDESGLNRRHIIDNRVHCCFYFISPFGHGLKPLDVAFMKAIHNKVNIVPVIAKADTLTLKERERLKKRILDEIEEHNIKIYHLPDAESDEDEDFKEQTRLLKASIPFSVVGSNQLIEAKGKKVRGRLYPWGVVEVENPEHNDFLKLRTMLITHMQDLQEVTQDLHYENFRSERLKRGGRKVENEDMNKDQILLEKEAELRRMQEMIARMQAQMQMQMQGGDGDEGALGHHV

SEQ ID NO: 896745 - protein, 258 aa, Homo sapiens
VDGDSRSCRDCFKTIISYIDEQFERYLHDESGLNRRHIIDNRVHCCFYFISPFGHGLKPLDVAFMKAIHNKVNIVPVIAKADTLTLKERERLKKRILDEIEEHNIKIYHLPDAESDEDEDFKEQTRLLKASIPFSVVGSNQLIEAKGKKVRGRLYPWGVVEVENPEHNDFLKLRTMLITHMQDLQEVTQDLHYENFRSERLKRGGRKVENEDMNKDQILLEKEAELRRMQEMIARMQAQMQMQMQGGDGDEGALGHHV

SEQ ID NO: 896746 - protein, 432 aa, Homo sapiens
GAGCERTASAGRVRGAVGRRLFSGCLADEASQKMSKQQPTQFINPETPGYVGFANLPNQVHRKSVKKGFEFTLMVVGESGLGKSTLINSLFLTDLYPERVIPGAAEKIERTVQIEASTVEIEERGVKLRLTVVDTPGYGDAINCRDCFKTIISYIDEQFERYLHDESGLNRRHIIDNRVHCCFYFISPFGHGLKPLDVAFMKAIHNKVNIVPVIAKADTLTLKERERLKKRILDEIEEHNIKIYHLPDAESDEDEDFKEQTRLLKASIPFILWLDANQLIEAKGKKVRGRLYPWGVVEVENPEHNDFLKLRTMLITHMQDLQEVTQDLHYENFRSERLKRGGRKVENEDMNKDQILLEKEAELRRMQEMIARMQAQMQMQMQGGDGDGGLSGTTCKVMCPYQEVRENTFLVKKKHFRCMISCVFILGGAIHF

SEQ ID NO: 896747 - protein, 194 aa, Homo sapiens
MKAIHNKVNIVPVIAKADTLTLKERERLKKRILDEIEEHNIKIYHLPDAESDEDEDFKEQTRLLKASIPSPVVGSNQLIEAKGKKVRGRLYPWGVVEVENPEHNDFLKLRTMLITHMQDLQEVTQDLHYENFRSERLKRGGRKVENEDMNKDQILLEKEAELRRMQEMIARMQAQMQMQMQGGDGDEGALGHHV

SEQ ID NO: 896748 - protein, 742 aa, Homo sapiens
MVQSMTLLENQLVEKLWVLKVLQHLSTSEVNCTIMMKAQAASGICTHLNDPDPSGQLLFRSSEILWNLLEKSSKEEVIQQLSNLECLLALKEVFKNLFMRGFSHYDRQLRNDILVITTIIAQNPEAPMIECGFTKDLILFATFNEVKSQNLLVKGLKLSNSYEDFELKKLLFNVIVILCKDLPTVQLLIDGKVILALFTYVKKPEKQKIIDWSAAQHEELQLHAIATLSSVAPLLIEEYMSCQGNARVLAFLEWCESEDPFFSHGNSFHGTGGRGNKFAQMRYSLRLLRAMVYLEDETVNKDLCEKGTIQQMIGIFKNIISKPNEKEEAIVLEIQSDILLILSGLCENHIQRKEIFGTEGVDIVLHVMKTDPRKLQSGLGYNVLLFSTLDSIWCCILGCYPSEDYFLEKEGIFLLLDLLALNQKKFCNLILGIMVEFCDNPKTAAHVNAWQGKKDQTAASLLIKLWRKEEKELGVKRDKNGKIIDTKKPLFTSFQEEQKIIPLPANCPSIAVMDVSENIRAKIYAILGKLDFENLPGLSAEDFVTLCIIHRYLDFKIGEIWNEIYEEIKLEKLRPVTTDKKALEAITTASENIGKMVASLQSDIIESQACQDMQNEQKVYAKIQATHKQRELANKSWEDFLARTSNAKTLKKAKRLQEKAIEASRYHKRPQNAIFHQTHIKGLNTMVPSGGVVTVESTPARLVGGPLVDTDIALKKLPIRGGALQRVKAVKIVDAPKKSIPT

SEQ ID NO: 896749 - protein, 707 aa, Homo sapiens
MVQSMTLLENQLVEKLWVLKVLQHLSTSEVNCTIMMKAQAASGICTHLNDPDPSGQLLFRSSEILWNLLEKSSKEEVIQQLSNLECLLALKEVFKNLFMRGFSHYDRQLRNDILVITTIIAQNPEAPMIECGFTKDLILFATFNEVKSQNLLVKGLKLSNSYEDFELKKLLFNVIVILCKDLPTVQLLIDGKVILALFTYVKKPEKQKIIDWSAAQHEELQLHAIATLSSVAPLLIEEYMSCQGNARVLAFLEWCESEDPFFSHGNSFHGTGGRGNKFAQMRYSLRLLRAMVYLEDETVNKDLCEKGTIQQMIGIFKNIISKPNEKEEAIVLEIQSDILLILSGLCENHIQRKEIFGTEGVDIVLHVMKTDPRKLQSGLGYNVLLFSTLDSIWCCILGCYPSEDYFLEKEGIFLLLDLLALNQKKFCNLILGIMVEFCDNPKTAAHVNAWQGKKDQTAASLLIKLWRKEEKELGVKRDKNGKIIDTKKPLFTSFQEEQKIIPLPANCPSIAVMDVSENIRAKIYAILGKLDFENLPGLSAEDFVTLCIIHRYLDFKIGEIWNEIYEEIKLEKLRPVTTDKKALEAITTASENIGKMVASLQSDIIESQACQDMQNEQKVYAKIQATHKQRELANKSWEDFLARTSNAKTLKVPSGGVVTVESTPARLVGGPLVDTDIALKKLPIRGGALQRVKAVKIVDAPKKSIPT

SEQ ID NO: 896750 - protein, 370 aa, Homo sapiens
MVQSMTLLENQLVEKLWVLKVLQHLSTSEVNCTIMMKAQAASGICTHLNDPDPSGQLLFRSSEILWNLLEKSSKEEVIQQLSNLECLLALKEVFKNLFMRGFSHYDRQLRNDILVITTIIAQNPEAPMIECGFTKDLILFATFNEVKSQNLLVKGLKLSNSYEDFELKKLLFNVIVILCKDLPTVQLLIDGKVILALFTYVKKPEKQKIIDWSAAQHEELQLHAIATLSSVAPLLIEEYMSCQGNARVLAFLEWCESEDPFFSHGNSFHGTGGRGNKFAQMRYSLRLLRAMVYLEDETVNKDLCEKGTIQQMIGIFKNIISKPNEKEEAIVLEIQSDILLILSGLCENHIQRKVCMPVKVLFRSPSHLTL

SEQ ID NO: 896751 - protein, 696 aa, Homo sapiens
MVQSMTLLENQLVEKLWVLKVLQHLSTSEVNCTIMMKAQAASGICTHLNDPDPSGQLLFRSSEILWNLLEKSSKEEVIQQLSNLECLLALKEVFKNLFMRGFSHYDRQLRNDILVITTIIAQNPEAPMIECGFTKDLILFATFNEVKSQNLLVKGLKLSNSYEDFELKKLLFNVIVILCKDLPTVQLLIDGKVILALFTYVKKPEKQKIIDWSAAQHEELQLHAIATLSSVAPLLIEEYMSCQGNARVLAFLEWCESEDPFFSHGNSFHGTGGRGNKFAQMRYSLRLLRAMVYLEDETVNKDLCEKGTIQQMIGIFKNIISKPNEKEEAIVLEIQSDILLILSGLCENHIQRKEIFGTEGVDIVLHVMKTDPRKLQSGLGYNVLLFSTLDSIWCCILGCYPSEDYFLEKEGIFLLLDLLALNQKKFCNLILGIMVEFCDNPKTAAHVNAWQGKKDQTAASLLIKLWRKEEKELGVKRDKNGKIIDFENLPGLSAEDFVTLCIIHRYLDFKIGEIWNEIYEEIKLEKLRPVTTDKKALEAITTASENIGKMVASLQSDIIESQACQDMQNEQKVYAKIQATHKQRELANKSWEDFLARTSNAKTLKKAKRLQEKAIEASRYHKRPQNAIFHQTHIKGLNTMVPSGGVVTVESTPARLVGGPLVDTDIALKKLPIRGGALQRVKAVKIVDAPKKSIPT

SEQ ID NO: 896752 - protein, 676 aa, Homo sapiens
MVQSMTLLENQLVEKLWVLKVLQHLSTSEVNCTIMMKAQAASGICTHLNDPDPSGQLLFRSSEILWNLLEKSSKEEVIQQLSNLECLLALKEVFKNLFMRGFSHYDRQLRNDILVITTIIAQNPEAPMIECGFTKDLILFATFNEVKSQNLLVKGLKLSNSYEDFELKKLLFNVIVILCKDLPTVQLLIDGKVILALFTYVKKPEKQKIIDWSAAQHEELQLHAIATLSSVAPLLIEEYMSCQGNARVLAFLEWCESEDPFFSHGNSFHGTGGRGNKFAQMRYSLRLLRAMVYLEDETVNKDLCEKGTIQQMIGIFKNIISKPNEKEEAIVLEIQSDILLILSGLCENHIQRKEIFGTEGVDIVLHVMKTDPRKLQSGLGYNVLLFSTLDSIWCCILGCYPSEDYFLEKEGIFLLLDLLALNQKKFCNLILGIMVEFCDNPKTAAHVNAWQGKKDQTAASLLIKLWRKEEKELGVKRDKNGKIIDTKKPLFTSFQEEQKIIPLPANCPSIAVMDVSENIRAKIYAILGKLDFENLPGLSAEDFVTLCIIHRYLDFKIQATHKQRELANKSWEDFLARTSNAKTLKKAKRLQEKAIEASRYHKRPQNAIFHQTHIKGLNTMVPSGGVVTVESTPARLVGGPLVDTDIALKKLPIRGGALQRVKAVKIVDAPKKSIPT

SEQ ID NO: 896753 - protein, 1242 aa, Homo sapiens
MTIVDKASESSDPSAYQNQPGSSEAVSPGDMDAGSASWGAVSSLNDVSNHTLSLGPVPGAVVYSSSSVPDKSKPSPQKDQALGDGIAPPQKVLFPSEKICLKWQQTHRVGAGLQNLGNTCFANAALQCLTYTPPLANYMLSHEHSKTCHAEGFCMMCTMQAHITQALSNPGDVIKPMFVINEMRRIARHFRFGNQEDAHEFLQYTVDAMQKACLNGSNKLDRHTQATTLVCQIFGGYLRSRVKCLNCKGVSDTFDPYLDITLEIKAAQSVNKALEQFVKPEQLDGENSYKCSKCKKMVPASKRFTIHRSSNVLTLSLKRFANFTGGKIAKDVKYPEYLDIRPYMSQPNGEPIVYVLYAVLVHTGFNCHAGHYFCYIKASNGLWYQMNDSIVSTSDIRSVLSQQAYVLFYIRSHDVKNGGELTHPTHSPGQSSPRPVISQRVVTNKQAAPGFIGPQLPSHMIKNPPHLNGTGPLKDTPSSSMSSPNGNSSVNRASPVNASASVQNWSVNRSSVIPEHPKKQKITISIHNKLPVRQCQSQPNLHSNSLENPTKPVPSSTITNSAVQSTSNASTMSVSSKVTKPIPRSESCSQPVMNGKSKLNSSVLVPYGAESSEDSDEESKGLGKENGIGTIVSSHSPGQDAEDEEATPHELQEPMTLNGANSADSDSDPKENGLAPDGASCQGQPALHSENPFAKANGLPGKLMPAPLLSLPEDKILETFRLSNKLKGSTDEMSAPGAERGPPEDRDAEPQPGSPAAESLEEPDAAAGLSSTKKAPPPRDPGTPATKEGAWEAMAVAPEEPPPSAGEDIVGDTAPPDLCDPGSLTGDASPLSQDAKGMIAEGPRDSALAEAPEGLSPAPPARSEEPCEQPLLVHPSGDHARDAQDPSQSLGAPEAAERPPAPVLDMAPAGHPEGDAEPSPGERVEDAAAPKAPGPSPAKEKIGSLRKVDRGHYRSRRERSSSGEPARESRSKTEGHRHRRRRTCPRERDRQDRHAPEHHPGHGDRLSPGERRSLGRCSHHHSRHRSGVELDWVRHHYTEGERGWGREKFYPDRPRWDRCRYYHDRYALYAARDWKPFHGGREHERAGLHERPHKDHNRGRRGCEPARERERHRPSSPRAGAPHALAPHPDRFSHDRTALVAGDNCNLSDRFHEHENGKSRKRRHDSVENSDSHVEKKARRSEQKDPLEEPKAKKHKKSKKKKKSKDKHRDRDSRHQQDSDLSAACSDADLHPRAEFAVVLPF

SEQ ID NO: 896754 - protein, 1020 aa, Homo sapiens [sequence omitted]

SEQ ID NO: 896755 - protein, 236 aa, Homo sapiens
MTIVDKASESSDPSAYQNQPGSSEAVSPGDMDAGSASWGAVSSLNDVSNHTLSLGPVPGAVVYSSSSVPDKSKPSPQKDQALGDGIAPPQKVLFPSEKICLKWQQTHRVGAGLQNLGNTCFANAALQCLTYTPPLANYMLSHEHSKTCHAEGFCMMCTMQAHITQALSNPGDVIKPMFVINEMRRIARHFRFGNQEDAHEFLQYTVDAMQKACLNGSNKLDKTHPNLYDPNGSSGQ

SEQ ID NO: 896756 - protein, 1316 aa, Homo sapiens
MTIVDKASESSDPSAYQNQPGSSEAVSPGDMDAGSASWGAVSSLNDVSNHTLSLGPVPGAVVYSSSSVPDKSKPSPQKDQALGDGIAPPQKVLFPSEKICLKWQQTHRVGAGLQNLGNTCFANAALQCLTYTPPLANYMLSHEHSKTCHAEGFCMMCTMQAHITQALSNPGDVIKPMFVINEMRRIARHFRFGNQEDAHEFLQYTVDAMQKACLNGSNKLDRHTQATTLVCQIFGGYLRSRVKCLNCKGVSDTFDPYLDITLEIKAAQSVNKALEQFVKPEQLDGENSYKCSKCKKMVPASKRFTIHRSSNVLTLSLKRFANFTGGKIAKDVKYPEYLDIRPYMSQPNGEPIVYVLYAVLVHTGFNCHAGHYFCYIKASNGLWYQMNDSIVSTSDIRSVLSQQAYVLFYIRSHDVKNGGELTHPTHSPGQSSPRPVISQRVVTNKQAAPGFIGPQLPSHMIKNPPHLNGTGPLKDTPSSSMSSPNGNSSVNRASPVNASASVQNWSVNRSSVIPEHPKKQKITISIHNKLPVRQCQSQPNLHSNSLENPTKPVPSSTITNSAVQSTSNASTMSVSSKVTKPIPRSESCSQPVMNGKSKLNSSVLVPYGAESSEDSDEESKGLGKENGIGTIVSSHSPGQDAEDEEATPHELQEPMTLNGANSADSDSDPKENGLAPDGASCQGQPALHSENPFAKANGLPGKLMPAPLLSLPEDKILETFRLSNKLKGSTDEMSAPGAERGPPEDRDAEPQPGSPAAESLEEPDAAAGLSSTKKAPPPRDPGTPATKEGAWEAMAVAPEEPPPSAGEDIVGDTAPPDLCDPGSLTGDASPLSQDAKGMIAEGPRDSALAEAPEGLSPAPPARSEEPCEQPLLVHPSGDHARDAQDPSQSLGAPEAAERPPAPVLDMAPAGHPEGDAEPSPGERVEDAAAPKAPGPSPAKEKIGSLRKVDRGHYRSRRERSSSGEPARESRSKTEGHRHRRRRTCPRERDRQDRHAPEHHPGHGDRLSPGERRSLGRCSHHHSRHRSGVELDWVRHHYTEGERGWGREKFYPDRPRWDRCRYYHDRYALYAARDWKPFHGGREHERAGLHERPHKDHNRGRRGCEPARERERHRPSSPRAGAPHALAPHPDRFSHDRTALVAGDNCNLSDRFHEHENGKSRKRRHDSVENSDSHVEKKARRSEQKDPLEEPKAKKHKKSKKKKKSKDKHRDRDSRHQQDSDLSAACSDADLHRHKKKKKKKKRHSRKSEDFVKDSELHLPRVTSLETVAQFRRAQGGFPLSGGPPLEGVGPFREKTKHLRMESRDDRCRLFEYGQGD

SEQ ID NO: 896757 - protein, 1209 aa, Homo sapiens
KDFMLTGHTMQGHVVRKQKTGARGRHYWPEPSLRFPWEKQGHAEGFCMMCTMQAHITQALSNPGDVIKPMFVINEMRRIARHFRFGNQEDAHEFLQYTVDAMQKACLNGSNKLDRHTQATTLVCQIFGGYLRSRVKCLNCKGVSDTFDPYLDITLEIKAAQSVNKALEQFVKPEQLDGENSYKCSKCKKMVPASKRFTIHRSSNVLTLSLKRFANFTGGKIAKDVKYPEYLDIRPYMSQPNGEPIVYVLYAVLVHTGFNCHAGHYFCYIKASNGLWYQMNDSIVSTSDIRSVLSQQAYVLFYIRSHDVKNGGELTHPTHSPGQSSPRPVISQRVVTNKQAAPGFIGPQLPSHMIKNPPHLNGTGPLKDTPSSSMSSPNGNSSVNRASPVNASASVQNWSVNRSSVIPEHPKKQKITISIHNKLPVRQCQSQPNLHSNSLENPTKPVPSSTITNSAVQSTSNASTMSVSSKVTKPIPRSESCSQPVMNGKSKLNSSVLVPYGAESSEDSDEESKGLGKENGIGTIVSSHSPGQDAEDEEATPHELQEPMTLNGANSADSDSDPKENGLAPDGASCQGQPALHSENPFAKANGLPGKLMPAPLLSLPEDKILETFRLSNKLKGSTDEMSAPGAERGPPEDRDAEPQPGSPAAESLEEPDAAAGLSSTKKAPPPRDPGTPATKEGAWEAMAVAPEEPPPSAGEDIVGDTAPPDLCDPGSLTGDASPLSQDAKGMIAEGPRDSALAEAPEGLSPAPPARSEEPCEQPLLVHPSGDHARDAQDPSQSLGAPEAAERPPAPVLDMAPAGHPEGDAEPSPGERVEDAAAPKAPGPSPAKEKIGSLRKVDRGHYRSRRERSSSGEPARESRSKTEGHRHRRRRTCPRERDRQDRHAPEHHPGHGDRLSPGERRSLGRCSHHHSRHRSGVELDWVRHHYTEGERGWGREKFYPDRPRWDRCRYYHDRYALYAARDWKPFHGGREHERAGLHERPHKDHNRGRRGCEPARERERHRPSSPRAGAPHALAPHPDRFSHDRTALVAGDNCNLSDRFHEHENGKSRKRRHDSVENSDSHVEKKARRSEQKDPLEEPKAKKHKKSKKKKKSKDKHRDRDSRHQQDSDLSAACSDADLHRHKKKKKKKKRHSRKSEDFVKDSELHLPRVTSLETVAQFRRAQGGFPLSGGPPLEGVGPFREKTKHLRMESRDDRCRLFEYGQGD

SEQ ID NO: 896758 - protein, 550 aa, Homo sapiens
MTIVDKASESSDPSAYQNQPGSSEAVSPGDMDAGSASWGAVSSLNDVSNHTLSLGPVPGAVVYSSSSVPDKSKPSPQKDQALGDGIAPPQKVLFPSEKICLKWQQTHRVGAGLQNLGNTCFANAALQCLTYTPPLANYMLSHEHSKTCHAEGFCMMCTMQAHITQALSNPGDVIKPMFVINEMRRIARHFRFGNQEDAHEFLQYTVDAMQKACLNGSNKLDRHTQATTLVCQIFGGYLRSRVKCLNCKGVSDTFDPYLDITLEIKAAQSVNKALEQFVKPEQLDGENSYKCSKCKKMVPASKRFTIHRSSNVLTLSLKRFANFTGGKIAKDVKYPEYLDIRPYMSQPNGEPIVYVLYAVLVHTGFNCHAGHYFCYIKASNGLWYQMNDSIVSTSDIRSVLSQQAYVLFYIRSHDVKNGGELTHPTHSPGQSSPRPVISQRVVTNKQAAPGFIGPQLPSHMIKNPPHLNGTGPLKDTPSSSMSSPNGNSSVNRASPVNASASVQNWSVNRSSVIPEHPKKQKIKEEKEIQRQTPRPRLQASAGLRPLSSVL

SEQ ID NO: 896759 - protein, 102 aa, Homo sapiens
LPGESCRGLVGALTPGPAMPTPLLPLLLRLLLSCLLLPAARLARQYLLPLLRRLARRLGSQDMREALLGCLLFILSQRHSPDAGEASRVDRLERRERLGPQK

SEQ ID NO: 896760 - protein, 1976 aa, Homo sapiens
MAQRTGLEDPERYLFVDRAVIYNPATQADWTAKKLVWIPSERHGFEAASIKEERGDEVMVELAENGKKAMVNKDDIQKMNPPKFSKVEDMAELTCLNEASVLHNLKDRYYSGLIYTYSGLFCVVINPYKNLPIYSENIIEMYRGKKRHEMPPHIYAISESAYRCMLQDREDQSILCTGESGAGKTENTKKVIQYLAHVASSHKGRKDHNIPGELERQLLQANPILESFGNAKTVKNDNSSRFGKFIRINFDVTGYIVGANIETYLLEKSRAVRQAKDERTFHIFYQLLSGAGEHLKSDLLLEGFNNYRFLSNGYIPIPGQQDKDNFQETMEAMHIMGFSHEEILSMLKVVSSVLQFGNISFKKERNTDQASMPENTVAQKLCHLLGMNVMEFTRAILTPRIKVGRDYVQKAQTKEQADFAVEALAKATYERLFRWLVHRINKALDRTKRQGASFIGILDIAGFEIFELNSFEQLCINYTNEKLQQLFNHTMFILEQEEYQREGIEWNFIDFGLDLQPCIDLIERPANPPGVLALLDEECWFPKATDKTFVEKLVQEQGSHSKFQKPRQLKDKADFCIIHYAGKVDYKADEWLMKNMDPLNDNVATLLHQSSDRFVAELWKDVDRIVGLDQVTGMTETAFGSAYKTKKGMFRTVGQLYKESLTKLMATLRNTNPNFVRCIIPNHEKRAGKLDPHLVLDQLRCNGVLEGIRICRQGFPNRIVFQEFRQRYEILTPNAIPKGFMDGKQACERMIRALELDPNLYRIGQSKIFFRAGVLAHLEEERDLKITDIIIFFQAVCRGYLARKAFAKKQQQLSALKVLQRNCAAYLKLRHWQWWRVFTKVKPLLQVTRQEEELQAKDEELLKVKEKQTKVEGELEEMERKHQQLLEEKNILAEQLQAETELFAEAEEMRARLAAKKQELEEILHDLESRVEEEEERNQILQNEKKKMQAHIQDLEEQLDEEEGARQKLQLEKVTAEAKIKKMEEEILLLEDQNSKFIKEKKLMEDRIAECSSQLAEEEEKAKNLAKIRNKQEVMISDLEERLKKEEKTRQELEKAKRKLDGETTDLQDQIAELQAQIDELKLQLAKKEEELQGALARGDDETLHKNNALKVVRELQAQIAELQEDFESEKASRNKAEKQKRDLSEELEALKTELEDTLDTTAAQQELRTKREQEVAELKKALEEETKNHEAQIQDMRQRHATALEELSEQLEQAKRFKANLEKNKQGLETDNKELACEVKVLQQVKAESEHKRKKLDAQVQELHAKVSEGDRLRVELAEKASKLQNELDNVSTLLEEAEKKGIKFAKDAASLESQLQDTQELLQEETRQKLNLSSRIRQLEEEKNSLQEQQEEEEEARKNLEKQVLALQSQLADTKKKVDDDLGTIESLEEAKKKLLKDAEALSQRLEEKALAYDKLEKTKNRLQQELDDLTVDLDHQRQVASNLEKKQKKFDQLLAEEKSISARYAEERDRAEAEAREKETKALSLARALEEALEAKEEFERQNKQLRADMEDLMSSKDDVGKNVHELEKSKRALEQQVEEMRTQLEELEDELQATEDAKLRLEVNMQAMKAQFERDLQTRDEQNEEKKRLLIKQVRELEAELEDERKQRALAVASKKKMEIDLKDLEAQIEAANKARDEVIKQLRKLQAQMKDYQRELEEARASRDEIFAQSKESEKKLKSLEAEILQLQEELASSERARRHAEQERDELADEITNSASGKSALLDEKRRLEARIAQLEEELEEEQSNMELLNDRFRKTTLQVDTLNAELAAERSAAQKSDNARQQLERQNKELKAKLQELEGAVKSKFKATISALEAKIGQLEEQLEQEAKERAAANKLVRRTEKKLKEIFMQVEDERRHADQYKEQMEKANARMKQLKRQLEEAEEEATRANASRRKLQRELDDATEANEGLSREVSTLKNRLRRGGPISFSSSRSGRRQLHLEGASLELSDDDTESKTSDVNETQPPQSE

SEQ ID NO: 896761 - protein, 309 aa, Homo sapiens
MTATYETPALTSRTRVDRIVGLDQVTGMTETAFGSAYKTKKGMFRTVGQLYKESLTKLMATLRNTNPNFVRCIIPNHEKRAGKLDPHLVLDQLRCNGVLEGIRICRQGFPNRIVFQEFRQRYEILTPNAIPKGFMDGKQACERMIRALELDPNLYRIGQSKIFFRAGVLAHLEEERDLKITDIIIFFQAVCRGYLARKAFAKKQQQLSALKVLQRNCAAYLKLRHWQWWRVFTKVKPLLQVTRQEGYRIIPGGTYNQGQNGFDLVFQGPSNAVYLLEVKHVSTASGGRFSNVNMARVIPQKKKMIRVEL

SEQ ID NO: 896762 - protein, 163 aa, Homo sapiens
LPFTTKKTQELLQEETRQKLNLSSRIRQLEEEKNSLQEQQEEEEEARKNLEKQVLALQSQLADTKKKVDDDLGTIESLEEAKKKLLKDAEALSQRLEEKALAYDKLEKTKNRLQQELDDLTVDLDHQRQVASNLEKKQKKFDQVGRPRVVSSWQSSCFCSFGL

SEQ ID NO: 896763 - protein, 1976 aa, Homo sapiens; identical to SEQ ID NO: 896760

SEQ ID NO: 896764 - protein, 1986 aa, Homo sapiens
MAQRTGLEDPERYLFVDRAVIYNPATQADWTAKKLVWIPSERHGFEAASIKEERGDEVMVELAENGKKAMVNKDDIQKMNPPKFSKVEDMAELTCLNEASVLHNLKDRYYSGLIYTYSGLFCVVINPYKNLPIYSENIIEMYRGKKRHEMPPHIYAISESAYRCMLQDREDQSILCTGESGAGKTENTKKVIQYLAHVASSHKGRKDHNIPQESPKPVKHQGELERQLLQANPILESFGNAKTVKNDNSSRFGKFIRINFDVTGYIVGANIETYLLEKSRAVRQAKDERTFHIFYQLLSGAGEHLKSDLLLEGFNNYRFLSNGYIPIPGQQDKDNFQETMEAMHIMGFSHEEILSMLKVVSSVLQFGNISFKKERNTDQASMPENTVAQKLCHLLGMNVMEFTRAILTPRIKVGRDYVQKAQTKEQADFAVEALAKATYERLFRWLVHRINKALDRTKRQGASFIGILDIAGFEIFELNSFEQLCINYTNEKLQQLFNHTMFILEQEEYQREGIEWNFIDFGLDLQPCIDLIERPANPPGVLALLDEECWFPKATDKTFVEKLVQEQGSHSKFQKPRQLKDKADFCIIHYAGKVDYKADEWLMKNMDPLNDNVATLLHQSSDRFVAELWKDVDRIVGLDQVTGMTETAFGSAYKTKKGMFRTVGQLYKESLTKLMATLRNTNPNFVRCIIPNHEKRAGKLDPHLVLDQLRCNGVLEGIRICRQGFPNRIVFQEFRQRYEILTPNAIPKGFMDGKQACERMIRALELDPNLYRIGQSKIFFRAGVLAHLEEERDLKITDIIIFFQAVCRGYLARKAFAKKQQQLSALKVLQRNCAAYLKLRHWQWWRVFTKVKPLLQVTRQEEELQAKDEELLKVKEKQTKVEGELEEMERKHQQLLEEKNILAEQLQAETELFAEAEEMRARLAAKKQELEEILHDLESRVEEEEERNQILQNEKKKMQAHIQDLEEQLDEEEGARQKLQLEKVTAEAKIKKMEEEILLLEDQNSKFIKEKKLMEDRIAECSSQLAEEEEKAKNLAKIRNKQEVMISDLEERLKKEEKTRQELEKAKRKLDGETTDLQDQIAELQAQIDELKLQLAKKEEELQGALARGDDETLHKNNALKVVRELQAQIAELQEDFESEKASRNKAEKQKRDLSEELEALKTELEDTLDTTAAQQELRTKREQEVAELKKALEEETKNHEAQIQDMRQRHATALEELSEQLEQAKRFKANLEKNKQGLETDNKELACEVKVLQQVKAESEHKRKKLDAQVQELHAKVSEGDRLRVELAEKASKLQNELDNVSTLLEEAEKKGIKFAKDAASLESQLQDTQELLQEETRQKLNLSSRIRQLEEEKNSLQEQQEEEEEARKNLEKQVLALQSQLADTKKKVDDDLGTIESLEEAKKKLLKDAEALSQRLEEKALAYDKLEKTKNRLQQELDDLTVDLDHQRQVASNLEKKQKKFDQLLAEEKSISARYAEERDRAEAEAREKETKALSLARALEEALEAKEEFERQNKQLRADMEDLMSSKDDVGKNVHELEKSKRALEQQVEEMRTQLEELEDELQATEDAKLRLEVNMQAMKAQFERDLQTRDEQNEEKKRLLIKQVRELEAELEDERKQRALAVASKKKMEIDLKDLEAQIEAANKARDEVIKQLRKLQAQMKDYQRELEEARASRDEIFAQSKESEKKLKSLEAEILQLQEELASSERARRHAEQERDELADEITNSASGKSALLDEKRRLEARIAQLEEELEEEQSNMELLNDRFRKTTLQVDTLNAELAAERSAAQKSDNARQQLERQNKELKAKLQELEGAVKSKFKATISALEAKIGQLEEQLEQEAKERAAANKLVRRTEKKLKEIFMQVEDERRHADQYKEQMEKANARMKQLKRQLEEAEEEATRANASRRKLQRELDDATEANEGLSREVSTLKNRLRRGGPISFSSSRSGRRQLHLEGASLELSDDDTESKTSDVNETQPPQSE

SEQ ID NO: 896765 - protein, 2010 aa, Homo sapiens
LRANPSDNQSHNLWSPLKFTLETRGNCFWIVPFTMAQRTGLEDPERYLFVDRAVIYNPATQADWTAKKLVWIPSERHGFEAASIKEERGDEVMVELAENGKKAMVNKDDIQKMNPPKFSKVEDMAELTCLNEASVLHNLKDRYYSGLIYTYSGLFCVVINPYKNLPIYSENIIEMYRGKKRHEMPPHIYAISESAYRCMLQDREDQSILCTGESGAGKTENTKKVIQYLAHVASSHKGRKDHNIPGELERQLLQANPILESFGNAKTVKNDNSSRFGKFIRINFDVTGYIVGANIETYLLEKSRAVRQAKDERTFHIFYQLLSGAGEHLKSDLLLEGFNNYRFLSNGYIPIPGQQDKDNFQETMEAMHIMGFSHEEILSMLKVVSSVLQFGNISFKKERNTDQASMPENTVAQKLCHLLGMNVMEFTRAILTPRIKVGRDYVQKAQTKEQADFAVEALAKATYERLFRWLVHRINKALDRTKRQGASFIGILDIAGFEIFELNSFEQLCINYTNEKLQQLFNHTMFILEQEEYQREGIEWNFIDFGLDLQPCIDLIERPANPPGVLALLDEECWFPKATDKTFVEKLVQEQGSHSKFQKPRQLKDKADFCIIHYAGKVDYKADEWLMKNMDPLNDNVATLLHQSSDRFVAELWKDVDRIVGLDQVTGMTETAFGSAYKTKKGMFRTVGQLYKESLTKLMATLRNTNPNFVRCIIPNHEKRAGKLDPHLVLDQLRCNGVLEGIRICRQGFPNRIVFQEFRQRYEILTPNAIPKGFMDGKQACERMIRALELDPNLYRIGQSKIFFRAGVLAHLEEERDLKITDIIIFFQAVCRGYLARKAFAKKQQQLSALKVLQRNCAAYLKLRHWQWWRVFTKVKPLLQVTRQEEELQAKDEELLKVKEKQTKVEGELEEMERKHQQLLEEKNILAEQLQAETELFAEAEEMRARLAAKKQELEEILHDLESRVEEEEERNQILQNEKKKMQAHIQDLEEQLDEEEGARQKLQLEKVTAEAKIKKMEEEILLLEDQNSKFIKEKKLMEDRIAECSSQLAEEEEKAKNLAKIRNKQEVMISDLEERLKKEEKTRQELEKAKRKLDGETTDLQDQIAELQAQIDELKLQLAKKEEELQGALARGDDETLHKNNALKVVRELQAQIAELQEDFESEKASRNKAEKQKRDLSEELEALKTELEDTLDTTAAQQELRTKREQEVAELKKALEEETKNHEAQIQDMRQRHATALEELSEQLEQAKRFKANLEKNKQGLETDNKELACEVKVLQQVKAESEHKRKKLDAQVQELHAKVSEGDRLRVELAEKASKLQNELDNVSTLLEEAEKKGIKFAKDAASLESQLQDTQELLQEETRQKLNLSSRIRQLEEEKNSLQEQQEEEEEARKNLEKQVLALQSQLADTKKKVDDDLGTIESLEEAKKKLLKDAEALSQRLEEKALAYDKLEKTKNRLQQELDDLTVDLDHQRQVASNLEKKQKKFDQLLAEEKSISARYAEERDRAEAEAREKETKALSLARALEEALEAKEEFERQNKQLRADMEDLMSSKDDVGKNVHELEKSKRALEQQVEEMRTQLEELEDELQATEDAKLRLEVNMQAMKAQFERDLQTRDEQNEEKKRLLIKQVRELEAELEDERKQRALAVASKKKMEIDLKDLEAQIEAANKARDEVIKQLRKLQAQMKDYQRELEEARASRDEIFAQSKESEKKLKSLEAEILQLQEELASSERARRHAEQERDELADEITNSASGKSALLDEKRRLEARIAQLEEELEEEQSNMELLNDRFRKTTLQVDTLNAELAAERSAAQKSDNARQQLERQNKELKAKLQELEGAVKSKFKATISALEAKIGQLEEQLEQEAKERAAANKLVRRTEKKLKEIFMQVEDERRHADQYKEQMEKANARMKQLKRQLEEAEEEATRANASRRKLQRELDDATEANEGLSREVSTLKNRLRRGGPISFSSSRSGRRQLHLEGASLELSDDDTESKTSDVNETQPPQSE

SEQ ID NO: 896766 - protein, 1781 aa, Homo sapiens
QESPKPVKHQSGSLLYGELERQLLQANPILESFGNAKTVKNDNSSRFGKFIRINFDVTGYIVGANIETYLLEKSRAVRQAKDERTFHIFYQLLSGAGEHLKSDLLLEGFNNYRFLSNGYIPIPGQQDKDNFQETMEAMHIMGFSHEEILSMLKVVSSVLQFGNISFKKERNTDQASMPENTVAQKLCHLLGMNVMEFTRAILTPRIKVGRDYVQKAQTKEQADFAVEALAKATYERLFRWLVHRINKALDRTKRQGASFIGILDIAGFEIFELNSFEQLCINYTNEKLQQLFNHTMFILEQEEYQREGIEWNFIDFGLDLQPCIDLIERPANPPGVLALLDEECWFPKATDKTFVEKLVQEQGSHSKFQKPRQLKDKADFCIIHYAGKVDYKADEWLMKNMDPLNDNVATLLHQSSDRFVAELWKDVDRIVGLDQVTGMTETAFGSAYKTKKGMFRTVGQLYKESLTKLMATLRNTNPNFVRCIIPNHEKRAGKLDPHLVLDQLRCNGVLEGIRICRQGFPNRIVFQEFRQRYEILTPNAIPKGFMDGKQACERMIRALELDPNLYRIGQSKIFFRAGVLAHLEEERDLKITDIIIFFQAVCRGYLARKAFAKKQQQLSALKVLQRNCAAYLKLRHWQWWRVFTKVKPLLQVTRQEEELQAKDEELLKVKEKQTKVEGELEEMERKHQQLLEEKNILAEQLQAETELFAEAEEMRARLAAKKQELEEILHDLESRVEEEEERNQILQNEKKKMQAHIQDLEEQLDEEEGARQKLQLEKVTAEAKIKKMEEEILLLEDQNSKFIKEKKLMEDRIAECSSQLAEEEEKAKNLAKIRNKQEVMISDLEERLKKEEKTRQELEKAKRKLDGETTDLQDQIAELQAQIDELKLQLAKKEEELQGALARGDDETLHKNNALKVVRELQAQIAELQEDFESEKASRNKAEKQKRDLSEELEALKTELEDTLDTTAAQQELRTKREQEVAELKKALEEETKNHEAQIQDMRQRHATALEELSEQLEQAKRFKANLEKNKQGLETDNKELACEVKVLQQVKAESEHKRKKLDAQVQELHAKVSEGDRLRVELAEKASKLQNELDNVSTLLEEAEKKGIKFAKDAASLESQLQDTQELLQEETRQKLNLSSRIRQLEEEKNSLQEQQEEEEEARKNLEKQVLALQSQLADTKKKVDDDLGTIESLEEAKKKLLKDAEALSQRLEEKALAYDKLEKTKNRLQQELDDLTVDLDHQRQVASNLEKKQKKFDQLLAEEKSISARYAEERDRAEAEAREKETKALSLARALEEALEAKEEFERQNKQLRADMEDLMSSKDDVGKNVHELEKSKRALEQQVEEMRTQLEELEDELQATEDAKLRLEVNMQAMKAQFERDLQTRDEQNEEKKRLLIKQVRELEAELEDERKQRALAVASKKKMEIDLKDLEAQIEAANKARDEVIKQLRKLQAQMKDYQRELEEARASRDEIFAQSKESEKKLKSLEAEILQLQEELASSERARRHAEQERDELADEITNSASGKSALLDEKRRLEARIAQLEEELEEEQSNMELLNDRFRKTTLQVDTLNAELAAERSAAQKSDNARQQLERQNKELKAKLQELEGAVKSKFKATISALEAKIGQLEEQLEQEAKERAAANKLVRRTEKKLKEIFMQVEDERRHADQYKEQMEKANARMKQLKRQLEEAEEEATRANASRRKLQRELDDATEANEGLSREVSTLKNRLRRGGPISFSSSRSGRRQLHLEGASLELSDDDTESKTSDVNETQPPQSE

SEQ ID NO: 896767 - protein, 1749 aa, Homo sapiens
MYLLIFNFLFLIYFQGKFIRINFDVTGYIVGANIETYLLEKSRAVRQAKDERTFHIFYQLLSGAGEHLKSDLLLEGFNNYRFLSNGYIPIPGQQDKDNFQETMEAMHIMGFSHEEILSMLKVVSSVLQFGNISFKKERNTDQASMPENTVAQKLCHLLGMNVMEFTRAILTPRIKVGRDYVQKAQTKEQADFAVEALAKATYERLFRWLVHRINKALDRTKRQGASFIGILDIAGFEIFELNSFEQLCINYTNEKLQQLFNHTMFILEQEEYQREGIEWNFIDFGLDLQPCIDLIERPANPPGVLALLDEECWFPKATDKTFVEKLVQEQGSHSKFQKPRQLKDKADFCIIHYAGKVDYKADEWLMKNMDPLNDNVATLLHQSSDRFVAELWKDVDRIVGLDQVTGMTETAFGSAYKTKKGMFRTVGQLYKESLTKLMATLRNTNPNFVRCIIPNHEKRAGKLDPHLVLDQLRCNGVLEGIRICRQGFPNRIVFQEFRQRYEILTPNAIPKGFMDGKQACERMIRALELDPNLYRIGQSKIFFRAGVLAHLEEERDLKITDIIIFFQAVCRGYLARKAFAKKQQQLSALKVLQRNCAAYLKLRHWQWWRVFTKVKPLLQVTRQEEELQAKDEELLKVKEKQTKVEGELEEMERKHQQLLEEKNILAEQLQAETELFAEAEEMRARLAAKKQELEEILHDLESRVEEEEERNQILQNEKKKMQAHIQDLEEQLDEEEGARQKLQLEKVTAEAKIKKMEEEILLLEDQNSKFIKEKKLMEDRIAECSSQLAEEEEKAKNLAKIRNKQEVMISDLEERLKKEEKTRQELEKAKRKLDGETTDLQDQIAELQAQIDELKLQLAKKEEELQGALARGDDETLHKNNALKVVRELQAQIAELQEDFESEKASRNKAEKQKRDLSEELEALKTELEDTLDTTAAQQELRTKREQEVAELKKALEEETKNHEAQIQDMRQRHATALEELSEQLEQAKRFKANLEKNKQGLETDNKELACEVKVLQQVKAESEHKRKKLDAQVQELHAKVSEGDRLRVELAEKASKLQNELDNVSTLLEEAEKKGIKFAKDAASLESQLQDTQELLQEETRQKLNLSSRIRQLEEEKNSLQEQQEEEEEARKNLEKQVLALQSQLADTKKKVDDDLGTIESLEEAKKKLLKDAEALSQRLEEKALAYDKLEKTKNRLQQELDDLTVDLDHQRQVASNLEKKQKKFDQLLAEEKSISARYAEERDRAEAEAREKETKALSLARALEEALEAKEEFERQNKQLRADMEDLMSSKDDVGKNVHELEKSKRALEQQVEEMRTQLEELEDELQATEDAKLRLEVNMQAMKAQFERDLQTRDEQNEEKKRLLIKQVRELEAELEDERKQRALAVASKKKMEIDLKDLEAQIEAANKARDEVIKQLRKLQAQMKDYQRELEEARASRDEIFAQSKESEKKLKSLEAEILQLQEELASSERARRHAEQERDELADEITNSASGKSALLDEKRRLEARIAQLEEELEEEQSNMELLNDRFRKTTLQVDTLNAELAAERSAAQKSDNARQQLERQNKELKAKLQELEGAVKSKFKATISALEAKIGQLEEQLEQEAKERAAANKLVRRTEKKLKEIFMQVEDERRHADQYKEQMEKANARMKQLKRQLEEAEEEATRANASRRKLQRELDDATEANEGLSREVSTLKNRLRRGGPISFSSSRSGRRQLHLEGASLELSDDDTESKTSDVNETQPPQSE

SEQ ID NO: 896768 - protein, 1252 aa, Homo sapiens
MTEYEILTPNAIPKGFMDGKQACERMIRALELDPNLYRIGQSKIFFRAGVLAHLEEERDLKITDIIIFFQAVCRGYLARKAFAKKQQQLSALKVLQRNCAAYLKLRHWQWWRVFTKVKPLLQVTRQEEELQAKDEELLKVKEKQTKVEGELEEMERKHQQLLEEKNILAEQLQAETELFAEAEEMRARLAAKKQELEEILHDLESRVEEEEERNQILQNEKKKMQAHIQDLEEQLDEEEGARQKLQLEKVTAEAKIKKMEEEILLLEDQNSKFIKEKKLMEDRIAECSSQLAEEEEKAKNLAKIRNKQEVMISDLEERLKKEEKTRQELEKAKRKLDGETTDLQDQIAELQAQIDELKLQLAKKEEELQGALARGDDETLHKNNALKVVRELQAQIAELQEDFESEKASRNKAEKQKRDLSEELEALKTELEDTLDTTAAQQELRTKREQEVAELKKALEEETKNHEAQIQDMRQRHATALEELSEQLEQAKRFKANLEKNKQGLETDNKELACEVKVLQQVKAESEHKRKKLDAQVQELHAKVSEGDRLRVELAEKASKLQNELDNVSTLLEEAEKKGIKFAKDAASLESQLQDTQELLQEETRQKLNLSSRIRQLEEEKNSLQEQQEEEEEARKNLEKQVLALQSQLADTKKKVDDDLGTIESLEEAKKKLLKDAEALSQRLEEKALAYDKLEKTKNRLQQELDDLTVDLDHQRQVASNLEKKQKKFDQLLAEEKSISARYAEERDRAEAEAREKETKALSLARALEEALEAKEEFERQNKQLRADMEDLMSSKDDVGKNVHELEKSKRALEQQVEEMRTQLEELEDELQATEDAKLRLEVNMQAMKAQFERDLQTRDEQNEEKKRLLIKQVRELEAELEDERKQRALAVASKKKMEIDLKDLEAQIEAANKARDEVIKQLRKLQAQMKDYQRELEEARASRDEIFAQSKESEKKLKSLEAEILQLQEELASSERARRHAEQERDELADEITNSASGKSALLDEKRRLEARIAQLEEELEEEQSNMELLNDRFRKTTLQVDTLNAELAAERSAAQKSDNARQQLERQNKELKAKLQELEGAVKSKFKATISALEAKIGQLEEQLEQEAKERAAANKLVRRTEKKLKEIFMQVEDERRHADQYKEQMEKANARMKQLKRQLEEAEEEATRANASRRKLQRELDDATEANEGLSREVSTLKNRLRRGGPISFSSSRSGRRQLHLEGASLELSDDDTESKTSDVNETQPPQSE

SEQ ID NO: 896769 - protein, 1690 aa, Homo sapiens
MAQRTGLEDPERYLFVDRAVIYNPATQADWTAKKLVWIPSERHGFEAASIKEERGDEVMVELAENGKKAMVNKDDIQKMNPPKFSKVEDMAELTCLNEASVLHNLKDRYYSGLIYTYSGLFCVVINPYKNLPIYSENIIEMYRGKKRHEMPPHIYAISESAYRCMLQDREDQSILCTGESGAGKTENTKKVIQYLAHVASSHKGRKDHNIPGELERQLLQANPILESFGNAKTVKNDNSSRFGKFIRINFDVTGYIVGANIETYLLEKSRAVRQAKDERTFHIFYQLLSGAGEHLKSDLLLEGFNNYRFLSNGYIPIPGQQDKDNFQETMEAMHIMGFSHEEILSMLKVVSSVLQFGNISFKKERNTDQASMPENTVAQKLCHLLGMNVMEFTRAILTPRIKVGRDYVQKAQTKEQADFAVEALAKATYERLFRWLVHRINKALDRTKRQGASFIGILDIAGFEIFELNSFEQLCINYTNEKLQQLFNHTMFILEQEEYQREGIEWNFIDFGLDLQPCIDLIERPANPPGVLALLDEECWFPKATDKTFVEKLVQEQGSHSKFQKPRQLKDKADFCIIHYAGKVDYKADEWLMKNMDPLLEEKNILAEQLQAETELFAEAEEMRARLAAKKQELEEILHDLESRVEEEEERNQILQNEKKKMQAHIQDLEEQLDEEEGARQKLQLEKVTAEAKIKKMEEEILLLEDQNSKFIKEKKLMEDRIAECSSQLAEEEEKAKNLAKIRNKQEVMISDLEERLKKEEKTRQELEKAKRKLDGETTDLQDQIAELQAQIDELKLQLAKKEEELQGALARGDDETLHKNNALKVVRELQAQIAELQEDFESEKASRNKAEKQKRDLSEELEALKTELEDTLDTTAAQQELRTKREQEVAELKKALEEETKNHEAQIQDMRQRHATALEELSEQLEQAKRFKANLEKNKQGLETDNKELACEVKVLQQVKAESEHKRKKLDAQVQELHAKVSEGDRLRVELAEKASKLQNELDNVSTLLEEAEKKGIKFAKDAASLESQLQDTQELLQEETRQKLNLSSRIRQLEEEKNSLQEQQEEEEEARKNLEKQVLALQSQLADTKKKVDDDLGTIESLEEAKKKLLKDAEALSQRLEEKALAYDKLEKTKNRLQQELDDLTVDLDHQRQVASNLEKKQKKFDQLLAEEKSISARYAEERDRAEAEAREKETKALSLARALEEALEAKEEFERQNKQLRADMEDLMSSKDDVGKNVHELEKSKRALEQQVEEMRTQLEELEDELQATEDAKLRLEVNMQAMKAQFERDLQTRDEQNEEKKRLLIKQVRELEAELEDERKQRALAVASKKKMEIDLKDLEAQIEAANKARDEVIKQLRKLQAQMKDYQRELEEARASRDEIFAQSKESEKKLKSLEAEILQLQEELASSERARRHAEQERDELADEITNSASGKSALLDEKRRLEARIAQLEEELEEEQSNMELLNDRFRKTTLQVDTLNAELAAERSAAQKSDNARQQLERQNKELKAKLQELEGAVKSKFKATISALEAKIGQLEEQLEQEAKERAAANKLVRRTEKKLKEIFMQVEDERRHADQYKEQMEKANARMKQLKRQLEEAEEEATRANASRRKLQRELDDATEANEGLSREVSTLKNRLRRGGPISFSSSRSGRRQLHLEGASLELSDDDTESKTSDVNETQPPQSE

SEQ ID NO: 896770 - protein, 1976 aa, Homo sapiens; identical to SEQ ID NO: 896760

SEQ ID NO: 896771 - protein, 1849 aa, Homo sapiens
MAQRTGLEDPERYLFVDRAVIYNPATQADWTAKKLVWIPSERHGFEAASIKEERGDEVMVELAENGKKAMVNKDDIQKMNPPKFSKVEDMAELTCLNEASVLHNLKDRYYSGLIYTYSGLFCVVINPYKNLPIYSENIIEMYRGKKRHEMPPHIYAISESAYRCMLQDREDQSILCTGESGAGKTENTKKVIQYLAHVASSHKGRKDHNIPGELERQLLQANPILESFGNAKTVKNDNSSRFGKFIRINFDVTGYIVGANIETYLLEKSRAVRQAKDERTFHIFYQLLSGAGEHLKSDLLLEGFNNYRFLSNGYIPIPGQQDKDNFQETMEAMHIMGFSHEEILSMLKVVSSVLQFGNISFKKERNTDQASMPENTVAQKLCHLLGMNVMEFTRAILTPRIKVGRDYVQKAQTKEQADFAVEALAKATYERLFRWLVHRINKALDRTKRQGASFIGILDIAGFEIFELNSFEQLCINYTNEKLQQLFNHTMFILEQEEYQREGIEWNFIDFGLDLQPCIDLIERPANPPGVLALLDEECWFPKATDKTFVEKLVQEQGSHSKFQKPRQLKDKADFCIIHYAGKVDYKADEWLMKNMDPLNDNVATLLHQSSDRFVAELWKDVDRIVGLDQVTGMTETAFGSAYKTKKGMFRTVGQLYKESLTKLMATLRNTNPNFVRCIIPNHEKRAGKLDPHLVLDQLRCNGVLEGIRICRQGFPNRIVFQEFRQRYEILTPNAIPKGFMDGKQACERMIRALELDPNLYRIGQSKIFFRAGVLAHLEEERDLKITDIIIFFQAVCRGYLARKAFAKKQQQLSALKVLQRNCAAYLKLRHWQWWRVFTKVKPLLQVTRQEEELQAKDEELLKVKEKQTKVEGELEEMERKHQQLLEEKNILAEQLQAETELFAEAEEMRARLAAKKQELEEILHDLESRVEEEEERNQILQNEKKKMQAHIQDLEEQLDEEEGARQKLQLEKVTAEAKIKKMEEEILLLEDQNSKFIKEKKLMEDRIAECSSQLAEEEEKAKNLAKIRNKQEVMISDLEERLKKEEKTRQELEKAKRKLDGETTDLQDQIAELQAQIDELKLQLAKKEEELQGALARGDDETLHKNNALKVVRELQAQIAELQEDFESEKASRNKAEKQKRDLSEELEALKTELEDTLDTTAAQQELRTKREQEVAELKKALEEETKNHEAQIQDMRQRHATALEELSEQLEQAKRFKANLEKNKQGLETDNKELACEVKVLQQVKAESEHKRKKLDAQVQELHAKVSEGDRLRVELAEKASKLQNELDNVSTLLEEAEKKGIKFAKDAASLESQLQDTQELLQEETRQKLNLSSRIRQLEEEKNSLQEQQEEEEEARKNLEKQVLALQSQLADTKKKVDDDLGTIESLEEAKKKLLKDAEALSQRLEEKALAYDKLEKTKNRLQQELDDLTVDLDHQRQVASNLEKKQKKFDQLLAEEKSISARYAEERDRAEAEAREKETKALSLARALEEALEAKEEFERQNKQLRADMEDLMSSKDDVGKNVHELEKSKRALEQQVEEMRTQLEELEDELQATEDAKLRLEVNMQAMKAQFERDLQTRDEQNEEKKRLLIKQAALLDEKRRLEARIAQLEEELEEEQSNMELLNDRFRKTTLQVDTLNAELAAERSAAQKSDNARQQLERQNKELKAKLQELEGAVKSKFKATISALEAKIGQLEEQLEQEAKERAAANKLVRRTEKKLKEIFMQVEDERRHADQYKEQMEKANARMKQLKRQLEEAEEEATRANASRRKLQRELDDATEANEGLSREVSTLKNRLRRGGPISFSSSRSGRRQLHLEGASLELSDDDTESKTSDVNETQPPQSE

SEQ ID NO: 896772 - protein, 1153 aa, Homo sapiens
MFLLTGEVLPLIHPDERMICASPEKWIVEELQAKDEELLKVKEKQTKVEGELEEMERKHQQLLEEKNILAEQLQAETELFAEAEEMRARLAAKKQELEEILHDLESRVEEEEERNQILQNEKKKMQAHIQDLEEQLDEEEGARQKLQLEKVTAEAKIKKMEEEILLLEDQNSKFIKEKKLMEDRIAECSSQLAEEEEKAKNLAKIRNKQEVMISDLEERLKKEEKTRQELEKAKRKLDGETTDLQDQIAELQAQIDELKLQLAKKEEELQGALARGDDETLHKNNALKVVRELQAQIAELQEDFESEKASRNKAEKQKRDLSEELEALKTELEDTLDTTAAQQELRTKREQEVAELKKALEEETKNHEAQIQDMRQRHATALEELSEQLEQAKRFKANLEKNKQGLETDNKELACEVKVLQQVKAESEHKRKKLDAQVQELHAKVSEGDRLRVELAEKASKLQNELDNVSTLLEEAEKKGIKFAKDAASLESQLQDTQELLQEETRQKLNLSSRIRQLEEEKNSLQEQQEEEEEARKNLEKQVLALQSQLADTKKKVDDDLGTIESLEEAKKKLLKDAEALSQRLEEKALAYDKLEKTKNRLQQELDDLTVDLDHQRQVASNLEKKQKKFDQLLAEEKSISARYAEERDRAEAEAREKETKALSLARALEEALEAKEEFERQNKQLRADMEDLMSSKDDVGKNVHELEKSKRALEQQVEEMRTQLEELEDELQATEDAKLRLEVNMQAMKAQFERDLQTRDEQNEEKKRLLIKQVRELEAELEDERKQRALAVASKKKMEIDLKDLEAQIEAANKARDEVIKQLRKLQAQMKDYQRELEEARASRDEIFAQSKESEKKLKSLEAEILQLQEELASSERARRHAEQERDELADEITNSASGKSALLDEKRRLEARIAQLEEELEEEQSNMELLNDRFRKTTLQVDTLNAELAAERSAAQKSDNARQQLERQNKELKAKLQELEGAVKSKFKATISALEAKIGQLEEQLEQEAKERAAANKLVRRTEKKLKEIFMQVEDERRHADQYKEQMEKANARMKQLKRQLEEAEEEATRANASRRKLQRELDDATEANEGLSREVSTLKNRLRRGGPISFSSSRSGRRQLHLEGASLELSDDDTESKTSDVNETQPPQSE

SEQ ID NO: 896773 - protein, 965 aa, Homo sapiens
RRKMSPAKENKTETWLRKRRSERYEEGQRQTYIDRVIDRKTGRKRNRKLDGETTDLQDQIAELQAQIDELKLQLAKKEEELQGALARGDDETLHKNNALKVVRELQAQIAELQEDFESEKASRNKAEKQKRDLSEELEALKTELEDTLDTTAAQQELRTKREQEVAELKKALEEETKNHEAQIQDMRQRHATALEELSEQLEQAKRFKANLEKNKQGLETDNKELACEVKVLQQVKAESEHKRKKLDAQVQELHAKVSEGDRLRVELAEKASKLQNELDNVSTLLEEAEKKGIKFAKDAASLESQLQDTQELLQEETRQKLNLSSRIRQLEEEKNSLQEQQEEEEEARKNLEKQVLALQSQLADTKKKVDDDLGTIESLEEAKKKLLKDAEALSQRLEEKALAYDKLEKTKNRLQQELDDLTVDLDHQRQVASNLEKKQKKFDQLLAEEKSISARYAEERDRAEAEAREKETKALSLARALEEALEAKEEFERQNKQLRADMEDLMSSKDDVGKNVHELEKSKRALEQQVEEMRTQLEELEDELQATEDAKLRLEVNMQAMKAQFERDLQTRDEQNEEKKRLLIKQVRELEAELEDERKQRALAVASKKKMEIDLKDLEAQIEAANKARDEVIKQLRKLQAQMKDYQRELEEARASRDEIFAQSKESEKKLKSLEAEILQLQEELASSERARRHAEQERDELADEITNSASGKSALLDEKRRLEARIAQLEEELEEEQSNMELLNDRFRKTTLQVDTLNAELAAERSAAQKSDNARQQLERQNKELKAKLQELEGAVKSKFKATISALEAKIGQLEEQLEQEAKERAAANKLVRRTEKKLKEIFMQVEDERRHADQYKEQMEKANARMKQLKRQLEEAEEEATRANASRRKLQRELDDATEANEGLSREVSTLKNRLRRGGPISFSSSRSGRRQLHLEGASLELSDDDTESKTSDVNETQPPQSE

SEQ ID NO: 896774 - protein, 797 aa, Homo sapiens
GLAVPRLLVSRLYLVPRLYLVSRLYLVSRLYLDLQAKRFKANLEKNKQGLETDNKELACEVKVLQQVKAESEHKRKKLDAQVQELHAKVSEGDRLRVELAEKASKLQNELDNVSTLLEEAEKKGIKFAKDAASLESQLQDTQELLQEETRQKLNLSSRIRQLEEEKNSLQEQQEEEEEARKNLEKQVLALQSQLADTKKKVDDDLGTIESLEEAKKKLLKDAEALSQRLEEKALAYDKLEKTKNRLQQELDDLTVDLDHQRQVASNLEKKQKKFDQLLAEEKSISARYAEERDRAEAEAREKETKALSLARALEEALEAKEEFERQNKQLRADMEDLMSSKDDVGKNVHELEKSKRALEQQVEEMRTQLEELEDELQATEDAKLRLEVNMQAMKAQFERDLQTRDEQNEEKKRLLIKQVRELEAELEDERKQRALAVASKKKMEIDLKDLEAQIEAANKARDEVIKQLRKLQAQMKDYQRELEEARASRDEIFAQSKESEKKLKSLEAEILQLQEELASSERARRHAEQERDELADEITNSASGKSALLDEKRRLEARIAQLEEELEEEQSNMELLNDRFRKTTLQVDTLNAELAAERSAAQKSDNARQQLERQNKELKAKLQELEGAVKSKFKATISALEAKIGQLEEQLEQEAKERAAANKLVRRTEKKLKEIFMQVEDERRHADQYKEQMEKANARMKQLKRQLEEAEEEATRANASRRKLQRELDDATEANEGLSREVSTLKNRLRRGGPISFSSSRSGRRQLHLEGASLELSDDDTESKTSDVNETQPPQSE

SEQ ID NO: 896775 - protein, 664 aa, Homo sapiens
LPFTTKKTQELLQEETRQKLNLSSRIRQLEEEKNSLQEQQEEEEEARKNLEKQVLALQSQLADTKKKVDDDLGTIESLEEAKKKLLKDAEALSQRLEEKALAYDKLEKTKNRLQQELDDLTVDLDHQRQVASNLEKKQKKFDQLLAEEKSISARYAEERDRAEAEAREKETKALSLARALEEALEAKEEFERQNKQLRADMEDLMSSKDDVGKNVHELEKSKRALEQQVEEMRTQLEELEDELQATEDAKLRLEVNMQAMKAQFERDLQTRDEQNEEKKRLLIKQVRELEAELEDERKQRALAVASKKKMEIDLKDLEAQIEAANKARDEVIKQLRKLQAQMKDYQRELEEARASRDEIFAQSKESEKKLKSLEAEILQLQEELASSERARRHAEQERDELADEITNSASGKSALLDEKRRLEARIAQLEEELEEEQSNMELLNDRFRKTTLQVDTLNAELAAERSAAQKSDNARQQLERQNKELKAKLQELEGAVKSKFKATISALEAKIGQLEEQLEQEAKERAAANKLVRRTEKKLKEIFMQVEDERRHADQYKEQMEKANARMKQLKRQLEEAEEEATRANASRRKLQRELDDATEANEGLSREVSTLKNRLRRGGPISFSSSRSGRRQLHLEGASLELSDDDTESKTSDVNETQPPQSE

SEQ ID NO: 896776 - protein, 1976 aa, Homo sapiens; identical to SEQ ID NO: 896760

SEQ ID NO: 896777 - protein, 1976 aa, Homo sapiens; identical to SEQ ID NO: 896760

SEQ ID NO: 896778 - protein, 1976 aa, Homo sapiens; identical to SEQ ID NO: 896760

SEQ ID NO: 896779 - protein, 1976 aa, Homo sapiens; identical to SEQ ID NO: 896760

SEQ ID NO: 896780 - protein, 300 aa, Homo sapiens
RVWKQKSVQVDRVGNVGARVWRLSRRASTAEQERDELADEITNSASGKSALLDEKRRLEARIAQLEEELEEEQSNMELLNDRFRKTTLQVDTLNAELAAERSAAQKSDNARQQLERQNKELKAKLQELEGAVKSKFKATISALEAKIGQLEEQLEQEAKERAAANKLVRRTEKKLKEIFMQVEDERRHADQYKEQMEKANARMKQLKRQLEEAEEEATRANASRRKLQRELDDATEANEGLSREVSTLKNRLRRGGPISFSSSRSGRRQLHLEGASLELSDDDTESKTSDVNETQPPQSE

SEQ ID NO: 896781 - protein, 1976 aa, Homo sapiens; identical to SEQ ID NO: 896760

SEQ ID NO: 896782 - protein, 2003 aa, Homo sapiens
MAQRTGLEDPERYLFVDRAVIYNPATQADWTAKKLVWIPSERHGFEAASIKEERGDEVMVELAENGKKAMVNKDDIQKMNPPKFSKVEDMAELTCLNEASVLHNLKDRYYSGLIYTYSGLFCVVINPYKNLPIYSENIIEMYRGKKRHEMPPHIYAISESAYRCMLQDREDQSILCTGESGAGKTENTKKVIQYLAHVASSHKGRKDHNIPGELERQLLQANPILESFGNAKTVKNDNSSRFGKFIRINFDVTGYIVGANIETYLLEKSRAVRQAKDERTFHIFYQLLSGAGEHLKSDLLLEGFNNYRFLSNGYIPIPGQQDKDNFQETMEAMHIMGFSHEEILSMLKVVSSVLQFGNISFKKERNTDQASMPENTVAQKLCHLLGMNVMEFTRAILTPRIKVGRDYVQKAQTKEQADFAVEALAKATYERLFRWLVHRINKALDRTKRQGASFIGILDIAGFEIFELNSFEQLCINYTNEKLQQLFNHTMFILEQEEYQREGIEWNFIDFGLDLQPCIDLIERPANPPGVLALLDEECWFPKATDKTFVEKLVQEQGSHSKFQKPRQLKDKADFCIIHYAGKVDYKADEWLMKNMDPLNDNVATLLHQSSDRFVAELWKDVDRIVGLDQVTGMTETAFGSAYKTKKGMFRTVGQLYKESLTKLMATLRNTNPNFVRCIIPNHEKRAGKLDPHLVLDQLRCNGVLEGIRICRQGFPNRIVFQEFRQRYEILTPNAIPKGFMDGKQACERMIRALELDPNLYRIGQSKIFFRAGVLAHLEEERDLKITDIIIFFQAVCRGYLARKAFAKKQQQLSALKVLQRNCAAYLKLRHWQWWRVFTKVKPLLQVTRQEEELQAKDEELLKVKEKQTKVEGELEEMERKHQQLLEEKNILAEQLQAETELFAEAEEMRARLAAKKQELEEILHDLESRVEEEEERNQILQNEKKKMQAHIQDLEEQLDEEEGARQKLQLEKVTAEAKIKKMEEEILLLEDQNSKFIKEKKLMEDRIAECSSQLAEEEEKAKNLAKIRNKQEVMISDLEERLKKEEKTRQELEKAKRKLDGETTDLQDQIAELQAQIDELKLQLAKKEEELQGALARGDDETLHKNNALKVVRELQAQIAELQEDFESEKASRNKAEKQKRDLSEELEALKTELEDTLDTTAAQQELRTKREQEVAELKKALEEETKNHEAQIQDMRQRHATALEELSEQLEQAKRFKANLEKNKQGLETDNKELACEVKVLQQVKAESEHKRKKLDAQVQELHAKVSEGDRLRVELAEKASKLQNELDNVSTLLEEAEKKGIKFAKDAASLESQLQDTQELLQEETRQKLNLSSRIRQLEEEKNSLQEQQEEEEEARKNLEKQVLALQSQLADTKKKVDDDLGTIESLEEAKKKLLKDAEALSQRLEEKALAYDKLEKTKNRLQQELDDLTVDLDHQRQVASNLEKKQKKFDQLLAEEKSISARYAEERDRAEAEAREKETKALSLARALEEALEAKEEFERQNKQLRADMEDLMSSKDDVGKNVHELEKSKRALEQQVEEMRTQLEELEDELQATEDAKLRLEVNMQAMKAQFERDLQTRDEQNEEKKRLLIKQVRELEAELEDERKQRALAVASKKKMEIDLKDLEAQIEAANKARDEVIKQLRKLQAQMKDYQRELEEARASRDEIFAQSKESEKKLKSLEAEILQLQEELASSERARRHAEQERDELADEITNSASGKSALLDEKRRLEARIAQLEEELEEEQSNMELLNDRFRKTTLQVDTLNAELAAERSAAQKSDNARQQLERQNKELKAKLQELEGAVKSKFKATISALEAKIGQLEEQLEQEAKERAAANKLVRRTEKKLKEIFMQVEDERRHADQYKEQMEKANARMKQLKRQLEEAEEEATRANASRRKLQRELDDATEANEGLSREVSTLKNRLSMDHVDFQMVSRTAWLCRRPPHVRSKQPWTPKPSWWKAPPRRQPGPHADLANSAAALSPKWEYWFCVRGLFQVCQ

SEQ ID NO: 896783 - protein, 1976 aa, Homo sapiens; identical to SEQ ID NO: 896760

SEQ ID NO: 896784 - protein, 1931 aa, Homo sapiens
MAQRTGLEDPERYLFVDRAVIYNPATQADWTAKKLVWIPSERHGFEAASIKEERGDEVMVELAENGKKAMVNKDDIQKMNPPKFSKVEDMAELTCLNEASVLHNLKDRYYSGLIYTYSGLFCVVINPYKNLPIYSENIIEMYRGKKRHEMPPHIYAISESAYRCMLQDREDQSILCTGESGAGKTENTKKVIQYLAHVASSHKGRKDHNIPGELERQLLQANPILESFGNAKTVKNDNSSRFGKFIRINFDVTGYIVGANIETYLLEKSRAVRQAKDERTFHIFYQLLSGAGEHLKSDLLLEGFNNYRFLSNGYIPIPGQQDKDNFQETMEAMHIMGFSHEEILSMLKVVSSVLQFGNISFKKERNTDQASMPENTVAQKLCHLLGMNVMEFTRAILTPRIKVGRDYVQKAQTKEQADFAVEALAKATYERLFRWLVHRINKALDRTKRQGASFIGILDIAGFEIFELNSFEQLCINYTNEKLQQLFNHTMFILEQEEYQREGIEWNFIDFGLDLQPCIDLIERPANPPGVLALLDEECWFPKATDKTFVEKLVQEQGSHSKFQKPRQLKDKADFCIIHYAGKVDYKADEWLMKNMDPLNDNVATLLHQSSDRFVAELWKDVDRIVGLDQVTGMTETAFGSAYKTKKGMFRTVGQLYKESLTKLMATLRNTNPNFVRCIIPNHEKRAGKLDPHLVLDQLRCNGVLEGIRICRQGFPNRIVFQEFRQRYEILTPNAIPKGFMDGKQACERMIRALELDPNLYRIGQSKIFFRAGVLAHLEEERDLKITDIIIFFQAVCRGYLARKAFAKKQQQLSALKVLQRNCAAYLKLRHWQWWRVFTKVKPLLQVTRQEEELQAKDEELLKVKEKQTKVEGELEEMERKHQQLLEEKNILAEQLQAETELFAEAEEMRARLAAKKQELEEILHDLESRVEEEEERNQILQNEKKKMQAHIQDLEEQLDEEEGARQKLQLEKVTAEAKIKKMEEEILLLEDQNSKFIKEKKLMEDRIAECSSQLAEEEEKAKNLAKIRNKQEVMISDLEERLKKEEKTRQELEKAKRKLDGETTDLQDQIAELQAQIDELKLQLAKKEEELQGALARGDDETLHKNNALKVVRELQAQIAELQEDFESEKASRNKAEKQKRDLSEELEALKTELEDTLDTTAAQQELRTKREQEVAELKKALEEETKNHEAQIQDMRQRHATALEELSEQLEQAKRFKANLEKNKQGLETDNKELACEVKVLQQVKAESEHKRKKLDAQVQELHAKVSEGDRLRVELAEKASKLQNELDNVSTLLEEAEKKGIKFAKDAASLESQLQDTQELLQEETRQKLNLSSRIRQLEEEKNSLQEQQEEEEEARKNLEKQVLALQSQLADTKKKVDDDLGTIESLEEAKKKLLKDAEALSQRLEEKALAYDKLEKTKNRLQQELDDLTVDLDHQRQVASNLEKKQKKFDQLLAEEKSISARYAEERDRAEAEAREKETKALSLARALEEALEAKEEFERQNKQLRADMEDLMSSKDDVGKNVHELEKSKRALEQQVEEMRTQLEELEDELQATEDAKLRLEVNMQAMKAQFERDLQTRDEQNEEKKRLLIKQVRELEAELEDERKQRALAVASKKKMEIDLKDLEAQIEAANKARDEVIKQLRKLQAQMKDYQRELEEARASRDEIFAQSKESEKKLKSLEAEILQLQEELASSERARRHAEQERDELADEITNSASGKSALLDEKRRLEARIAQLEEELEEEQSNMELLNDRFRKTTLQVDTLNAELAAERSAAQKSDNARQQLERQNKELKAKLQELEGAVKSKFKATISALEAKIGQLEEQLEQEAKERAAANKLVRRTEKKLKEIFMQVEDERRHADQYKEQMEKANARMKQLKRQLEEAEEEATRANASRRKLQRELDDATEANEGLSREVSTLKNRLRLR

SEQ ID NO: 896785 - protein, 1699 aa, Homo sapiens
MAQRTGLEDPERYLFVDRAVIYNPATQADWTAKKLVWIPSERHGFEAASIKEERGDEVMVELAENGKKAMVNKDDIQKMNPPKFSKVEDMAELTCLNEASVLHNLKDRYYSGLIYTYSGLFCVVINPYKNLPIYSENIIEMYRGKKRHEMPPHIYAISESAYRCMLQDREDQSILCTGESGAGKTENTKKVIQYLAHVASSHKGRKDHNIPGELERQLLQANPILESFGNAKTVKNDNSSRFGKFIRINFDVTGYIVGANIETYLLEKSRAVRQAKDERTFHIFYQLLSGAGEHLKSDLLLEGFNNYRFLSNGYIPIPGQQDKDNFQETMEAMHIMGFSHEEILSMLKVVSSVLQFGNISFKKERNTDQASMPENTVAQKLCHLLGMNVMEFTRAILTPRIKVGRDYVQKAQTKEQADFAVEALAKATYERLFRWLVHRINKALDRTKRQGASFIGILDIAGFEIFELNSFEQLCINYTNEKLQQLFNHTMFILEQEEYQREGIEWNFIDFGLDLQPCIDLIERPANPPGVLALLDEECWFPKATDKTFVEKLVQEQGSHSKFQKPRQLKDKADFCIIHYAGKVDYKADEWLMKNMDPLNDNVATLLHQSSDRFVAELWKDVDRIVGLDQVTGMTETAFGSAYKTKKGMFRTVGQLYKESLTKLMATLRNTNPNFVRCIIPNHEKRAGKLDPHLVLDQLRCNGVLEGIRICRQGFPNRIVFQEFRQRYEILTPNAIPKGFMDGKQACERMIRALELDPNLYRIGQSKIFFRAGVLAHLEEERDLKITDIIIFFQAVCRGYLARKAFAKKQQQLSALKVLQRNCAAYLKLRHWQWWRVFTKVKPLLQVTRQEEELQAKDEELLKVKEKQTKVEGELEEMERKHQQLLEEKNILAEQLQAETELFAEAEEMRARLAAKKQELEEILHDLESRVEEEEERNQILQNEKKKMQAHIQDLEEQLDEEEGARQKLQLEKVTAEAKIKKMEEEILLLEDQNSKFIKEKKLMEDRIAECSSQLAEEEEKAKNLAKIRNKQEVMISDLEERLKKEEKTRQELEKAKRKLDGETTDLQDQIAELQAQIDELKLQLAKKEEELQGALARGDDETLHKNNALKVVRELQAQIAELQEDFESEKASRNKAEKQKRDLSEELEALKTELEDTLDTTAAQQELRTKREQEVAELKKALEEETKNHEAQIQDMRQRHATALEELSEQLEQAKRFKANLEKNKQGLETDNKELACEVKVLQQVKAESEHKRKKLDAQVQELHAKVSEGDRLRVELAEKASKLQNELDNVSTLLEEAEKKGIKFAKDAASLESQLQDTQELLQEETRQKLNLSSRIRQLEEEKNSLQEQQEEEEEARKNLEKQVLALQSQLADTKKKVDDDLGTIESLEEAKKKLLKDAEALSQRLEEKALAYDKLEKTKNRLQQELDDLTVDLDHQRQVASNLEKKQKKFDQLLAEEKSISARYAEERDRAEAEAREKETKALSLARALEEALEAKEEFERQNKQLRADMEDLMSSKDDVGKNVHELEKSKRALEQQVEEMRTQLEELEDELQATEDAKLRLEVNMQAMKAQFERDLQTRDEQNEEKKRLLIKQVRELEAELEDERKQRALAVASKKKMEIDLKDLEAQIEAANKARDEVIKQLRKLQAQMKDYQRELEEARASRDEIFAQSKESLRRTSSTETLCQPQTFLIHLT

SEQ ID NO: 896786 - protein, 916 aa, Homo sapiens
MAQRTGLEDPERYLFVDRAVIYNPATQADWTAKKLVWIPSERHGFEAASIKEERGDEVMVELAENGKKAMVNKDDIQKMNPPKFSKVEDMAELTCLNEASVLHNLKDRYYSGLIYTYSGLFCVVINPYKNLPIYSENIIEMYRGKKRHEMPPHIYAISESAYRCMLQDREDQSILCTGESGAGKTENTKKVIQYLAHVASSHKGRKDHNIPGELERQLLQANPILESFGNAKTVKNDNSSRFGKFIRINFDVTGYIVGANIETYLLEKSRAVRQAKDERTFHIFYQLLSGAGEHLKSDLLLEGFNNYRFLSNGYIPIPGQQDKDNFQETMEAMHIMGFSHEEILSMLKVVSSVLQFGNISFKKERNTDQASMPENTVAQKLCHLLGMNVMEFTRAILTPRIKVGRDYVQKAQTKEQADFAVEALAKATYERLFRWLVHRINKALDRTKRQGASFIGILDIAGFEIFELNSFEQLCINYTNEKLQQLFNHTMFILEQEEYQREGIEWNFIDFGLDLQPCIDLIERPANPPGVLALLDEECWFPKATDKTFVEKLVQEQGSHSKFQKPRQLKDKADFCIIHYAGKVDYKADEWLMKNMDPLNDNVATLLHQSSDRFVAELWKDVDRIVGLDQVTGMTETAFGSAYKTKKGMFRTVGQLYKESLTKLMATLRNTNPNFVRCIIPNHEKRAGKLDPHLVLDQLRCNGVLEGIRICRQGFPNRIVFQEFRQRYEILTPNAIPKGFMDGKQACERMIRALELDPNLYRIGQSKIFFRAGVLAHLEEERDLKITDIIIFFQAVCRGYLARKAFAKKQQQLSALKVLQRNCAAYLKLRHWQWWRVFTKVKPLLQVTRQEGYRIIPGGTYNQGQNGFDLVFQGPSNAVYLLEVKHVSTASGGRFSNVNMARVIPQKKKMIRVELI

SEQ ID NO: 896787 - protein, 840 aa, Homo sapiens
MAQRTGLEDPERYLFVDRAVIYNPATQADWTAKKLVWIPSERHGFEAASIKEERGDEVMVELAENGKKAMVNKDDIQKMNPPKFSKVEDMAELTCLNEASVLHNLKDRYYSGLIYTYSGLFCVVINPYKNLPIYSENIIEMYRGKKRHEMPPHIYAISESAYRCMLQDREDQSILCTGESGAGKTENTKKVIQYLAHVASSHKGRKDHNIPGELERQLLQANPILESFGNAKTVKNDNSSRFGKFIRINFDVTGYIVGANIETYLLEKSRAVRQAKDERTFHIFYQLLSGAGEHLKSDLLLEGFNNYRFLSNGYIPIPGQQDKDNFQETMEAMHIMGFSHEEILSMLKVVSSVLQFGNISFKKERNTDQASMPENTVAQKLCHLLGMNVMEFTRAILTPRIKVGRDYVQKAQTKEQADFAVEALAKATYERLFRWLVHRINKALDRTKRQGASFIGILDIAGFEIFELNSFEQLCINYTNEKLQQLFNHTMFILEQEEYQREGIEWNFIDFGLDLQPCIDLIERPANPPGVLALLDEECWFPKATDKTFVEKLVQEQGSHSKFQKPRQLKDKADFCIIHYAGKVDYKADEWLMKNMDPLNDNVATLLHQSSDRFVAELWKDVDRIVGLDQVTGMTETAFGSAYKTKKGMFRTVGQLYKESLTKLMATLRNTNPNFVRCIIPNHEKRAGKLDPHLVLDQLRCNGVLEGIRICRQGFPNRIVFQEFRQRYEILTPNAIPKGFMDGKQACERMIRALELDPNLYRIGQSKIFFRAGVLAHLEEERDLKITDIIIFFQAVCRGYLARNDYAKKQQHVSDQKFYHKAYGGALNFLHWQWWSDSSK

SEQ ID NO: 896788 - protein, 750 aa, Homo sapiens
MAQRTGLEDPERYLFVDRAVIYNPATQADWTAKKLVWIPSERHGFEAASIKEERGDEVMVELAENGKKAMVNKDDIQKMNPPKFSKVEDMAELTCLNEASVLHNLKDRYYSGLIYTYSGLFCVVINPYKNLPIYSENIIEMYRGKKRHEMPPHIYAISESAYRCMLQDREDQSILCTGESGAGKTENTKKVIQYLAHVASSHKGRKDHNIPGELERQLLQANPILESFGNAKTVKNDNSSRFGKFIRINFDVTGYIVGANIETYLLEKSRAVRQAKDERTFHIFYQLLSGAGEHLKSDLLLEGFNNYRFLSNGYIPIPGQQDKDNFQETMEAMHIMGFSHEEILSMLKVVSSVLQFGNISFKKERNTDQASMPENTVAQKLCHLLGMNVMEFTRAILTPRIKVGRDYVQKAQTKEQADFAVEALAKATYERLFRWLVHRINKALDRTKRQGASFIGILDIAGFEIFELNSFEQLCINYTNEKLQQLFNHTMFILEQEEYQREGIEWNFIDFGLDLQPCIDLIERPANPPGVLALLDEECWFPKATDKTFVEKLVQEQGSHSKFQKPRQLKDKADFCIIHYAGKVDYKADEWLMKNMDPLNDNVATLLHQSSDRFVAELWKDVDRIVGLDQVTGMTETAFGSAYKTKKGMFRTVGQLYKESLTKLMATLRNTNPNFVRCIIPNHEKRAGKLDPHLVLDQLRCNGVLEGIRICRQGFPNRIVFQEFRQRYEIYSNAILRFMDGTGLLTDDRA

SEQ ID NO: 896789 - protein, 625 aa, Homo sapiens
MAQRTGLEDPERYLFVDRAVIYNPATQADWTAKKLVWIPSERHGFEAASIKEERGDEVMVELAENGKKAMVNKDDIQKMNPPKFSKVEDMAELTCLNEASVLHNLKDRYYSGLIYTYSGLFCVVINPYKNLPIYSENIIEMYRGKKRHEMPPHIYAISESAYRCMLQDREDQSILCTGESGAGKTENTKKVIQYLAHVASSHKGRKDHNIPGELERQLLQANPILESFGNAKTVKNDNSSRFGKFIRINFDVTGYIVGANIETYLLEKSRAVRQAKDERTFHIFYQLLSGAGEHLKSDLLLEGFNNYRFLSNGYIPIPGQQDKDNFQETMEAMHIMGFSHEEILSMLKVVSSVLQFGNISFKKERNTDQASMPENTVAQKLCHLLGMNVMEFTRAILTPRIKVGRDYVQKAQTKEQADFAVEALAKATYERLFRWLVHRINKALDRTKRQGASFIGILDIAGFEIFELNSFEQLCINYTNEKLQQLFNHTMFILEQEEYQREGIEWNFIDFGLDLQPCIDLIERPANPPGVLALLDEECWFPKATDKTFVEKLVQEQGSHSKFQKPRQLKDKADFCIIHYAGKVDYKADEWLMKNMDPLNDNVATLLHQSSDRFVAELWKDVHIL

SEQ ID NO: 896790 - protein, 101 aa, Homo sapiens
YSGLFCVVINPYKNLPIYSENIIEMYRGKKRHEMPPHIYAISESAYRCMLQGNWKYLNTKCSEFLKCNLLFFNVSMYSTKVKFYFFKINKKVMFIVEKLSF

SEQ ID NO: 896791 - protein, 113 aa, Homo sapiens
VRHEFFNTGVFVLVINVMEVLPFTTKKTQELLQEETRQKLNLSSRIRQLEEEKNSLQEQQEEEEEARKNLEKQVLALQSQVCVLFRRPRWPRCVPSADPGPAVLGCLSSIWDS

SEQ ID NO: 896792 - protein, 210 aa, Homo sapiens
MAAGGSGVGGKRSSKSDADSGFLGLRPTSVDPALRRRRRGPRNKKRGWRRLAQEPLGLEVDQFLEDVRLQERTSGGLLSEAPNEKLFFVDTGSKEKGLTKKRTKVQKKSLLLKKPLRVDLILENTSKVPAPKDVLAHQVPNAKKLRRKEQLWEKLAKQGELPREVRRAQARLLNPSATRAKPWAPGHRRAALLRPLGLRQPPGQAVGWPG

SEQ ID NO: 896793 - protein, 216 aa, Homo sapiens
YGYRRPTRPGGSGVGGKRSSKSDADSGFLGLRPTSVDPALRRRRRGPRNKKRGWRRLAQEPLGLEVDQFLEDVRLQERTSGGLLSEAPNEKLFFVDTGSKEKGLTKKRTKVQKKSLLLKKPLRVDLILENTSKVPAPKDVLAHQVPNAKKLRRKEQLWEKLAKQGELPREVRRAQARLLNPSATRAKPWAPGHRRAALLRPLGLRQPPGQAVGWPG

SEQ ID NO: 896794 - protein, 217 aa, Homo sapiens
KITARYEAWVGGSGVGGKRSSKSDADSGFLGLRPTSVDPALRRRRRGPRNKKRGWRRLAQEPLGLEVDQFLEDVRLQERTSGGLLSEAPNEKLFFVDTGSKEKGLTKKRTKVQKKSLLLKKPLRVDLILENTSKVPAPKDVLAHQVPNAKKLRRKEQLWEKLAKQGELPREVRRAQARLLNPSATRAKPWAPGHRRAALLRPLGLRQPPGQAVGWPG

SEQ ID NO: 896795 - protein, 210 aa, Homo sapiens; identical to SEQ ID NO: 896792

SEQ ID NO: 896796 - protein, 74 aa, Homo sapiens
AAARHDRRVKYQAPDIDVQLSSELTDSLRTLNARGQHPSRPVQELPEEEYDRASRESQVQTQVQGEAGGEAGVP

SEQ ID NO: 896797 - protein, 203 aa, Homo sapiens
  misc_feature (7)..(7): Xaa can be any naturally occurring amino acid
QESTFQXGGLLRGGQGATQESTFQELCEGLLEESDGEGEPGQGEGPEAGDAEVCPTPARLATTEKKTEQQRRREKAVHRLRVQQAALRAARLRHQELFRLRGIKAQVALRLAELARRRRRRQARREAEADKPRRLGRLKYQAPDIDVQLSSELTDSLRTLNARGQHPSRPVQELPEEEYDRASRESQVQTQVQGEAGGEAGVP

SEQ ID NO: 896798 - protein, 206 aa, Homo sapiens
PRLVLQGVVCGPEVVEGPLYGVLGPGLGPCCRRVEEPDGEGEPGQGEGPEAGDAEVCPTPARLATTEKKTEQQRRREKAVHRLRVQQAALRAARLRHQELFRLRGIKAQVALRLAELARRRRRRQARREAEADKPRRLGRLKYQAPDIDVQLSSELTDSLRTLNARGQHPSRPVQELPEEEYDRASRESQVQTQVQGEAGGEAGVP

SEQ ID NO: 896799 - protein, 92 aa, Homo sapiens
FGTMAGRHPGGREAGGRLGDNPKLGRLKYQAPDIDVQLSSELTDSLRTLNARGQHPSRPVQELPEEEYDRASRESQVQTQVQGEAGGEAGVP

SEQ ID NO: 896800 - protein, 210 aa, Homo sapiens; identical to SEQ ID NO: 896792

SEQ ID NO: 896801 - protein, 217 aa, Homo sapiens; identical to SEQ ID NO: 896794

SEQ ID NO: 896802 - protein, 210 aa, Homo sapiens; identical to SEQ ID NO: 896792

SEQ ID NO: 896803 - protein, 210 aa, Homo sapiens; identical to SEQ ID NO: 896792

SEQ ID NO: 896804 - protein, 210 aa, Homo sapiens; identical to SEQ ID NO: 896792

SEQ ID NO: 896805 - protein, 210 aa, Homo sapiens; identical to SEQ ID NO: 896792

SEQ ID NO: 896806 - protein, 132 aa, Homo sapiens
MPRSVPRPPAWPPQRRRRSSSGGGRRLCTGCGYSRPRCGPPGSGTRSCSGCARREAEADKPRRLGRLKYQAPDIDVQLSSELTDSLRTLNARGQHPSRPVQELPEEEYDRASRESQVQTQVQGEAGGEAGVP

SEQ ID NO: 896807 - protein, 210 aa, Homo sapiens; identical to SEQ ID NO: 896792

SEQ ID NO: 896808 - protein, 210 aa, Homo sapiens; identical to SEQ ID NO: 896792

SEQ ID NO: 896809 - protein, 210 aa, Homo sapiens; identical to SEQ ID NO: 896792

SEQ ID NO: 896810 - protein, 210 aa, Homo sapiens; identical to SEQ ID NO: 896792

SEQ ID NO: 896811 - protein, 210 aa, Homo sapiens; identical to SEQ ID NO: 896792

SEQ ID NO: 896812 - protein, 210 aa, Homo sapiens; identical to SEQ ID NO: 896792

SEQ ID NO: 896813 - protein, 210 aa, Homo sapiens; identical to SEQ ID NO: 896792

SEQ ID NO: 896814 - protein, 210 aa, Homo sapiens; identical to SEQ ID NO: 896792

SEQ ID NO: 896815 - protein, 210 aa, Homo sapiens; identical to SEQ ID NO: 896792

SEQ ID NO: 896816 - protein, 210 aa, Homo sapiens; identical to SEQ ID NO: 896792

SEQ ID NO: 896817 - protein, 210 aa, Homo sapiens; identical to SEQ ID NO: 896792

SEQ ID NO: 896818 - protein, 210 aa, Homo sapiens; identical to SEQ ID NO: 896792

SEQ ID NO: 896819 - protein, 200 aa, Homo sapiens
MAAGGSGVGGKRSSKSDADSGFLGLRPTSVDPALRRRRRGPRNKKRGWRRLAQEPLGLEVDQFLEDVRLQERTSGGLLSEAPNEKLFFVDTGSKEKGLTKKRTKVQKKSLLLKKPLRVDLILENTSKVPAPKDVLAHQVPNAKKLRRKEQLWEKLAKQGELPREVRRAQARLLNPSATRAKPWAPGHRRAALLRPLGLRQ

SEQ ID NO: 896820 - protein, 323 aa, Homo sapiens
MAAGGSGVGGKRSSKSDADSGFLGLRPTSVDPALRRRRRGPRNKKRGWRRLAQEPLGLEVDQFLEDVRLQERTSGGLLSEAPNEKLFFVDTGSKEKGLTKKRTKVQKKSLLLKKPLRVDLILENTSKVPAPKDVLAHQVPNAKKLRRKEQLWEKLAKQGELPREVPCPARLHTKPSQAPAVEVAPAGASYNPSFEDHQTLLSAAHEVEVAAAERRRRSWSGSWPCPPRSRPPPRSPHSRSCARGCWRSRMVRGSQARARGRRLGMPRSVPRPPAWPPQRRRRSSSGGGRRLCTGCGYSRPRCGPPGSGTRSCSGCAGSRPRWP

SEQ ID NO: 896821 - protein, 210 aa, Homo sapiens; identical to SEQ ID NO: 896792

SEQ ID NO: 896822 - protein, 210 aa, Homo sapiens; identical to SEQ ID NO: 896792

SEQ ID NO: 896823 - protein, 210 aa, Homo sapiens; identical to SEQ ID NO: 896792

SEQ ID NO: 896824 - protein, 251 aa, Homo sapiens
MAAGGSGVGGKRSSKSDADSGFLGLRPTSVDPALRRRRRGPRNKKRGWRRLAQEPLGLEVDQFLEDVRLQERTSGGLLSEAPNEKLFFVDTGSKEKGLTKKRTKVQKKSLLLKKPLRVDLILENTSKVPAPKDVLAHQVPNAKKLRRKEQLWEKLAKQGELPREVRRAQARLLNPSATRAKPWAPGHRRAALLRPLGLRQPHGLHDFFQKKNKKKKKKKGGEDIREYCHNKGCHQYWQLYPVFFATRVGPP

SEQ ID NO: 896825 - protein, 234 aa, Homo sapiens
MAAGGSGVGGKRSSKSDADSGFLGLRPTSVDPALRRRRRGPRNKKRGWRRLAQEPLGLEVDQFLEDVRLQERTSGGLLSEAPNEKLFFVDTGSKEKGLTKKRTKVQKKSLLLKKPLRVDLILENTSKVPAPKDVLAHQVPNAKKLRRKESTFQELCEGLLEESDGEGEPGQGEGPEAGDAEVCPTPARLATTEKKTEQQRRREKAVHRLRVQQAALRAARLRHQELFRLRAAGG

SEQ ID NO: 896826 - protein, 117 aa, Homo sapiens
MAAGGSGVGGKRSSKSDADSGFLGLRPTSVDPALRRRRREAEADKPRRLGRLKYQAPDIDVQLSSELTDSLRTLNARGQHPSRPVQELPEEEYDRASRESQVQTQVQGEAGGEAGVP

SEQ ID NO: 896827 - protein, 106 aa, Homo sapiens
MAAGGSGVGGKRSSKSDADSGFLGLRPTSVDPALRRRRRGPRNKKRGWRRLAQEPLGLEVDQFLEDVRLQERTSGGLLSEAPNEKLFFVDTGSKEKGTRHLTSTCS

SEQ ID NO: 896828 - protein, 139 aa, Homo sapiens
MAAGGSGVGGKRSSKSDADSGFLGLRPTSVDPALRRRRRGPRNKKRGWRRLAQEPLGLEVDQFLEDVRLQERTSGGLLSEAPNEKLFFVDTGSKEKGLTKKRTKVQKKSLLLKKPLRVDLILENTSKVPAPKEVSVPAS

SEQ ID NO: 896829 - protein, 117 aa, Homo sapiens; identical to SEQ ID NO: 896826

SEQ ID NO: 896830 - protein, 201 aa, Homo sapiens
AAARGGGGGGAGSSRAAASRPRAGAGASGAEPRSGRERSRLSGRRAPAMARNTLSSRFRRVDIDEFDENKFVDEQEEAAAAAAEPGPDPSEVDGLLRQGDMLRAFHAALRNSPVNTKNQAVKERAQGVVLKVLTNFKSSEIEQAVQSLDRNGVDLLMKYIYKGFEKPTENSSAVLLQWHEKALAVGGLGSIIRVLTARKTV

SEQ ID NO: 896831 - protein, 201 aa, Homo sapiens; identical to SEQ ID NO: 896830

SEQ ID NO: 896832 - protein, 201 aa, Homo sapiens; identical to SEQ ID NO: 896830

SEQ ID NO: 896833 - protein, 121 aa, Homo sapiens
MTAWMCLSLAILNWWCCTGDMLRAFHAALRNSPVNTKNQAVKERAQGVVLKVLTNFKSSEIEQAVQSLDRNGVDLLMKYIYKGFEKPTENSSAVLLQWHEKALAVGGLGSIIRVLTARKTV

SEQ ID NO: 896834 - protein, 201 aa, Homo sapiens; identical to SEQ ID NO: 896830

SEQ ID NO: 896835 - protein, 201 aa, Homo sapiens; identical to SEQ ID NO: 896830

SEQ ID NO: 896836 - protein, 559 aa, Homo sapiens
MWTNFFKLRLFCCLLAVLMVVVLVINVTQVEYLDHETVSATFIDSSGQFVSSQVTGISRNPYCGYDQQTLSSQERMEEDSLLAALHRQVPDVGPVPFVKSTDPSSSYFVILNSAAFFKVGSQLEVLVHVQDFQRKPKKYGGDYLQARIHSLKLQAGAVGRVVDYQNGFYKVFFTLLWPGKVKVSVSLVHPSEGIRVLQRLQEDKPDRVYFKSLFRSGRISETTECNVCLPGNLPLCNFTDLYTGEPWFCFKPKKLPCSSRITHFKGGYLKGLLTAAESAFFQSGVNIKMPVNSSGPDWVTVIPRRIKETNSLELSQGSGTFPSGYYYKDQWRPRKFKMRQFNDPDNITECLQRKVVHLFGDSTIRQWFEYLTTFVPDLVEFNLGSPKNVGPFLAVDQKHNILLKYRCHGPPIRFTTVFSNELHYVANELNGIVGGKNTVVAIAVWSHFSTFPLEVYIRRLRNIRRAVVRLLDRSPKTVVVIRTANAQELGPEVSLFNSDWYNFQLDTILRRMFSGVGVYLVDAWEMTLAHYLPHKLHPDEVIVKNQLDMFLSFVCPLET

SEQ ID NO: 896837 - protein, 559 aa, Homo sapiens; identical to SEQ ID NO: 896836

SEQ ID NO: 896838 - protein, 559 aa, Homo sapiens; identical to SEQ ID NO: 896836

SEQ ID NO: 896839 - protein, 549 aa, Homo sapiens
ILHSQSIGITDMSHCTCQLPNSLPFFKRRFRFIDSSGQFVSSQVTGISRNPYCGYDQQTLSSQERMEEDSLLAALHRQVPDVGPVPFVKSTDPSSSYFVILNSAAFFKVGSQLEVLVHVQDFQRKPKKYGGDYLQARIHSLKLQAGAVGRVVDYQNGFYKVFFTLLWPGKVKVSVSLVHPSEGIRVLQRLQEDKPDRVYFKSLFRSGRISETTECNVCLPGNLPLCNFTDLYTGEPWFCFKPKKLPCSSRITHFKGGYLKGLLTAAESAFFQSGVNIKMPVNSSGPDWVTVIPRRIKETNSLELSQGSGTFPSGYYYKDQWRPRKFKMRQFNDPDNITECLQRKVVHLFGDSTIRQWFEYLTTFVPDLVEFNLGSPKNVGPFLAVDQKHNILLKYRCHGPPIRFTTVFSNELHYVANELNGIVGGKNTVVAIAVWSHFSTFPLEVYIRRLRNIRRAVVRLLDRSPKTVVVIRTANAQELGPEVSLFNSDWYNFQLDTILRRMFSGVGVYLVDAWEMTLAHYLPHKLHPDEVIVKNQLDMFLSFVCPLET

SEQ ID NO: 896840 - protein, 314 aa, Homo sapiens
MWTNFFKLRLFCCLLAVLMVVVLVINVTQVEYLDHETVSATFIDSSGQFVSSQVTGISRNPYCGYDQQTLSSQERMEEDSLLAALHRQVPDVGPVPFVKSTDPSSSYFVILNSAAFFKVGSQLEVLVHVQDFQRKPKKYGGDYLQARIHSLKLQAGAVGRVVDYQNGFYKVFFTLLWPGKVKVSVSLVHPSEGIRVLQRLQEDKPDRVYFKSLFRSGRISETTECNVCLPGNLPLCNFTDLYTGEPWFCFKPKKLPCSSRITHFKGGYLKGLLTAAESAFFQSSMKKEMLCVLLTVVALDSRTVPGLRSLRIIC

SEQ ID NO: 896841 - protein, 597 aa, Homo sapiens
MAHNKIPPRWLNCPRRGQPVAGRFLPLKTMLGPRYDSQVAEENRFHPSMLSNYLKSLKVKMGLLVDLTNTSRFYDRNDIEKEGIKYIKLQCKGHGECPTTENTETFIRLCERFNERNPPELIGVHCTHGFNRTGFLICAFLVEKMDWSIEAAVATFAQARPPGIYKGDYLKELFRRYGDIEEAPPPPLLPDWCFEDDEDEDEDEDGKKESEPGSSASFGKRRKERLKLGAIFLEGVTVKGVTQVTTQPKLGEVQQKCHQFCGWEGSGFPGAQPVSMDKQNIKLLDLKPYKVSWKADGTRYMMLIDGTNEVFMIDRDNSVFHVSNLEFPFRKDLRMHLSNTLLDGEMIIDRVNGQAVPRYLIYDIIKFNSQPVGDCDFNVRLQCIEREIISPRHEKMKTGLIDKTQEPFSVRNKPFFDICTSRKLLEGNFAKEVSHEMDGLIFQPTGKYKPGRCDDILKWKPPSLNSVDFRLKITRMGGEGLLPQNVGLLYVGGYERPFAQIKVTKELKQYDNKIIECKFENNSWVFMRQRTDKSFPNAYNTAMAVCNSISNPVTKEMLFEFIDRCTAASQGQKRKHHLDPDTELMPPPPPKRPRPLT

SEQ ID NO: 896842 - protein, 127 aa, Homo sapiens
MEASQSEFCGFSSKNNKNGRRRNLRGSRTAAGPCWTVPVHVPGHGAGEPAHHPAMSPDSHLHTSMYFFLSNLSLPDIGFTSTTVPQMTVDIQSRSRVISYAGCLTQKSLFAIFGGTEERHAPECDGL

SEQ ID NO: 896843 - protein, 127 aa, Homo sapiens; identical to SEQ ID NO: 896842

SEQ ID NO: 896844 - protein, 597 aa, Homo sapiens; identical to SEQ ID NO: 896841

SEQ ID NO: 896845 - protein, 597 aa, Homo sapiens; identical to SEQ ID NO: 896841

SEQ ID NO: 896846 - protein, 597 aa, Homo sapiens; identical to SEQ ID NO: 896841

SEQ ID NO: 896847 - protein, 597 aa, Homo sapiens; identical to SEQ ID NO: 896841

SEQ ID NO: 896848 - protein, 574 aa, Homo sapiens
MAHNKIPPRWLNCPRRGQPVAGRFLPLKTMLGPRYDSQVAEENRFHPSMLSNYLKSLKVKMGLLVDLTNTSRFYDRNDIEKEGIKYIKLQCKGHGECPTTENTETFIRLCERFNERNPPELIGVHCTHGFNRTGFLICAFLVEKMDWSIEAAVATFAQARPPGIYKGDYLKELFRRYGDIEEAPPPPLLPDWCFEDDEDEDEDEDGKKESEPGSSASFGKRRKERLKLGAIFLEGVTVKGVTQVTTQPKLGEVQQKCHQFCGWEGSGFPGAQPVSMDKQNIKLLDLKPYKVSWKADGTRYMMLIDGTNEVFMIDRDNSVFHVSNLEFPFRKDLRMHLSNTLLDGEMIIDRVNGQAVPRYLIYDIIKFNSQPVGDCDFNVRLQCIEREIISPRHEKMKTGLIDKTQEPFSVRNKPFFDICTSRKKYKPGRCDDILKWKPPSLNSVDFRLKITRMGGEGLLPQNVGLLYVGGYERPFAQIKVTKELKQYDNKIIECKFENNSWVFMRQRTDKSFPNAYNTAMAVCNSISNPVTKEMLFEFIDRCTAASQGQKRKHHLDPDTELMPPPPPKRPRPLT

SEQ ID NO: 896849 - protein, 597 aa, Homo sapiens; identical to SEQ ID NO: 896841

SEQ ID NO: 896850 - protein, 541 aa, Homo sapiens
MAHNKIPPRWLNCPRRGQPVAGRFLPLKTMLGPRYDSQVAEENRFHPSMLSNYLKSLKVKMGLLVDLTNTSRFYDRNDIEKEGIKYIKLQCKGHGECPTTENTETFIRLCERFNERNPPELIGVHCTHGFNRTGFLICAFLVEKMDWSIEAAVATFAQARPPGIYKGDYLKELFRRYGDIEEAPPPPLLPDWCFEDDEDEDEDEDGKKESEPGSSASFGKRRKERLKLGAIFLEGVTVKGVTQVTTQPKLGEVQQKCHQFCGWEGSGFPGAQPVSMDKQNIKLLDLKPYKVSWKADGTRYMMLIDGTNEVFMIDRDNSVFHVSNLEFPFRKDLRMHLSNTLLDGEMIIDRVNGQAVPRYLIYDIIKFNSQPVGDCDFNVRLQCIEREIISPRHEKMKTGLIDKTQEPFSVRNKPFFDICTSRKLLEGNFAKEVSHEMDGLIFQPTGKYKPGRCDDILKWKPPSLNSVDFRLKITRMGGEGLLPQNVGLLYVGGYERPFAQIKVCLFIFSVLFLDVLLSRIHQNLANNNQHIKISCSSTLGG

SEQ ID NO: 896851 - protein, 512 aa, Homo sapiens
MAHNKIPPRWLNCPRRGQPVAGRFLPLKTMLGPRYDSQVAEENRFHPSMLSNYLKSLKVKMGLLVDLTNTSRFYDRNDIEKEGIKYIKLQCKGHGECPTTENTETFIRLCERFNERNPPELIGVHCTHGFNRTGFLICAFLVEKMDWSIEAAVATFAQARPPGIYKGDYLKELFRRYGDIEEAPPPPLLPDWCFEDDEDEDEDEDGKKESEPGSSASFGKRRKERLKLGAIFLEGVTVKGVTQVTTQPKLGEVQQKCHQFCGWEGSGFPGAQPVSMDKQNIKLLDLKPYKVSWKADGTRYMMLIDGTNEVFMIDRDNSVFHVSNLEFPFRKDLRMHLSNTLLDGEMIIDRVNGQAVPRYLIYDIIKFNSQPVGDCDFNVRLQCIEREIISPRHEKMKTGLIDKTQEPFSVRNKPFFDICTSRKLLEGNFAKEVSHEMDGLIFQPTGKYKPGRCDDILKWKPPSLNSVDFRLKITRMGGEGTSEDPERQLVLAGLFLSMCLVMVLGNLLIIRP

SEQ ID NO: 896852 - protein, 457 aa, Homo sapiens
MAHNKIPPRWLNCPRRGQPVAGRFLPLKTMLGPRYDSQVAEENRFHPSMLSNYLKSLKVKMGLLVDLTNTSRFYDRNDIEKEGIKYIKLQCKGHGECPTTENTETFIRLCERFNERNPPELIGVHCTHGFNRTGFLICAFLVEKMDWSIEAAVATFAQARPPGIYKGDYLKELFRRYGDIEEAPPPPLLPDWCFEDDEDEDEDEDGKKESEPGSSASFGKRRKERLKLGAIFLEGVTVKGVTQVTTQPKLGEVQQKCHQFCGWEGSGFPGAQPVSMDKQNIKLLDLKPYKVSWKADGTRYMMLIDGTNEVFMIDRDNSVFHVSNLEFPFRKDLRMHLSNTLLDGEMIIDRVNGQAVPRYLIYDIIKFNSQPVGDCDFNVRLQCIEREIISPRHEKMKTGLIDKTQEPFSVRNKPFFDICTSRKLLEGNFAKEVSHEMDGLIFQPTGIRGFALLPRLV

SEQ ID NO: 896853 - protein, 115 aa, Homo sapiens
MFQGGIDTRVRGVEVLGPKPTFWPLFREQLCRRTCLFYTIRAQAWSRDIAEDHRRLLQLCPRLNRVLRHEQNFADRFLPDDEAAQALGKTCWEALVSPLVQNITSPGNHADTWPH

SEQ ID NO: 896854 - protein, 1227 aa, Homo sapiens
HILCKNGITNDFSMIPVMFRDNTLRLLFTYLKCSMSYIVRSSILEMRAVRLASLALGRRRHDWSMPGGWRDLSPSSALAVCSPISHGDLFLTCLLSDAEGVSALGWLLDQYLEQRETSRNPLSRAASFASRVRRLCHLLVHVEPPPGPSPEPSTRPFSKNSKGRDRSPAPSPVLPSSSLRNITQCWLSVVQEQVSRFLAAAWRAPDFVPRYCKLYEHLQRAGSELFGPRAAFMLALRSGFSGALLQQSFLTAAHMSEQFARYIDQQIQGGLIGGAPGVEMLGQLQRHLEPIMVLSGLELATTFEHFYQHYMADRLLSFGSSWLEGAVLEQIGLCFPNRLPQLMLQSLSTSEELQRQFHLFQLQRLDKLFLEQEDEEEKRLEEEEEEEEEEEAEKELFIEDPSPAISILVLSPRCWPVSPLCYLYHPRKCLPTEFCDALDRFSSFYSQSQNHPVLDMGPHRRLQWTWLGRAELQFGKQILHVSTVQMWLLLKFNQTEEVSVETLLKDSDLSPELLLQALVPLTSGNGPLTLHEGQDFPHGGVLRLHEPGPQRSGEALWLIPPQAYLNVEKDEGRTLEQKRNLLSCLLVRILKAHGEKGLHIDQLVCLVLEAWQKGPNPPGTLGHTVAGGVACTSTDVLSCILHLLGQGYVKRRDDRPQILMYAAPEPMGPCRGQADVPFCGSQSETSKPSPEAVATLASLQLPAGRTMSPQEVEGLMKQTVRQVQETLNLEPDVAQHLLAHSHWGAEQLLQSYSEDPEPLLLAAGLCVHQAQAVPVRPDHCPVCVSPLGCDDDLPSLCCMHYCCKSCWNEYLTTRIEQNLVLNCTCPIADCPAQPTGAFIRAIVSSPEVISKYEKALLRGYVESCSNLTWCTNPQGCDRILCRQGLGCGTTCSKCGWASCFNCSFPEAHYPASCGHMSQWVDDGGYYDGMSVEAQSKHLAKLISKRCPSCQAPIEKNEGCLHMTCAKCNHGFCWRCLKSWKPNHKDYYNCSAMVSKAARQEKRFQDYNERCTFHHQAREFAVNLRNRVSAIHEVPPPRSFTFLNDACQGLEQARKVLAYACVYSFYSQDAEYMDVVEQQTENLELHTNALQILLEETLLRCRDLASSLRLLRADCLSTGMELLRRIQERLLAILQHSAQDFRVGLQSPSVEAWEAKGPNMPGSQPQASSGPEAEEEEEDDEDDVPEWQQDEFDEELDNDSFSYDESENLDQETFFFGDEEEDEDEAYD

SEQ ID NO: 896855 - protein, 772 aa, Homo sapiens [sequence omitted]

SEQ ID NO: 896856 - protein, 1605 aa, Homo sapiens
QAEWWELLFFIKKLDLCEQQPIFQNLWKNLDETLGEKALGEISVSVEMAESLLQVLSSRFEGSTLNDLLNSQIYTKYGLLSNEPSSSSTSRNHSCTPDPEEESKSEASFSEEETESLKAKAEAPKTEAEPTKTRTETPMAQSDSQLFNQLLVTEGMTLPTEMKEAASEMARALRGPGPRSSLDQHVAAVVATVQISSLDTNLQLSGLSALSQAVEEVTERDHPLVRPDRSLREKLVKMLVELLTNQVGEKMVVVQALRLLYLLMTKHEWRPLFAREGGIYAVLVCMQEYKTSVLVQQAGLAALKMLAVASSSEIPTFVTGRDSIHSLFDAQMTREIFASIDSATRPGSESLLLTVPAAVILMLNTEGCSSAARNGLLLLNLLLCNHHTLGDQIITQELRDTLFRHSGIAPRTEPMPTTRTILMMLLNRYSEPPGSPERAALETPIIQGQDGSPELLIRSLVGGPSAELLLDLERVLCREGSPGGAVRPLLKRLQQETQPFLLLLRTLDAPGPNKTLLLSVLRVITRLLDFPEAMVLPWHEVLEPCLNCLSGPSSDSEIVQELTCFLHRLASMHKDYAVVLCCLGAKEILSKVLDKHSAQLLLGCELRDLVTECEKYAQLYSNLTSSILAGCIQMVLGQIEDHRRTHQPINIPFFDVFLRHLCQGSSVEVKEDKCWEKVEVSSNPHRASKLTDHNPKTYWESNGSTGSHYITLHMHRGVLVRQLTLLVASEDSSYMPARVVVFGGDSTSCIGTELNTVNVMPSASRVILLENLNRFWPIIQIRIKRCQQGGIDTRVRGVEVLGPKPTFWPLFREQLCRRTCLFYTIRAQAWSRDIAEDHRRLLQLCPRLNRVLRHEQNFADRFLPDDEAAQALGKTCWEALVSPLVQNITSPDAEGVSALGWLLDQYLEQRETSRNPLSRAASFASRVRRLCHLLVHVEPPPGPSPEPSTRPFSKNSKGRDRSPAPSPVLPSSSLRNITQCWLSVVQEQVSRFLAAAWRAPDFVPRYCKLYEHLQRAGSELFGPRAAFMLALRSGFSGALLQQSFLTAAHMSEQFARYIDQQIQGGLIGGAPGVEMLGQLQRHLEPIMVLSGLELATTFEHFYQHYMADRLLSFGSSWLEGAVLEQIGLCFPNRLPQLMLQSLSTSEELQRQFHLFQLQRLDKLFLEQEDEEEKRLEEEEEEEEEEEAEKELFIEDPSPAISILVLSPRCWPVSPLCYLYHPRKCLPTEFCDALDRFSSFYSQSQNHPVLDMGPHRRLQWTWLGRAELQFGKQILHVSTVQMWLLLKFNQTEEVSVETLLKDSDLSPELLLQALVPLTSGNGPLTLHEGQDFPHGGVLRLHEPGPQRSGEALWLIPPQAYLNVEKDEGRTLEQKRNLLSCLLVRILKAHGEKGLHIDQLVCLVLEAWQKGPNPPGTLGHTVAGGVACTSTDVLSCILHLLGQGYVKRRDDRPQILMYAAPEPMGPCRGQADVPFCGSQSETSKPSPEAVATLASLQLPAGRTMSPQEVEGLMKQTVRQVQETLNLEPDVAQHLLAHSHWGAEQLLQSYSEDPEPLLLAAGLCVHQAQAVPVRPDHCPVCVSPLGCDDDLPLSAACTIAVSLAGMST

SEQ ID NO: 896857 - protein, 1103 aa, Homo sapiens
QAEWWELLFFIKKLDLCEQQPIFQNLWKNLDETLGEKALGEISVSVEMAESLLQVLSSRFEGSTLNDLLNSQIYTKYGLLSNEPSSSSTSRNHSCTPDPEEESKSEASFSEEETESLKAKAEAPKTEAEPTKTRTETPMAQSDSQLFNQLLVTEGMTLPTEMKEAASEMARALRGPGPRSSLDQHVAAVVATVQISSLDTNLQLSGLSALSQAVEEVTERDHPLVRPDRSLREKLVKMLVELLTNQVGEKMVVVQALRLLYLLMTKHEWRPLFAREGGIYAVLVCMQEYKTSVLVQQAGLAALKMLAVASSSEIPTFVTGRDSIHSLFDAQMTREIFASIDSATRPGSESLLLTVPAAVILMLNTEGCSSAARNGLLLLNLLLCNHHTLGDQIITQELRDTLFRHSGIAPRTEPMPTTRTILMMLLNRYSEPPGSPERAALETPIIQGQDGSPELLIRSLVGGPSAELLLDLERVLCREGSPGGAVRPLLKRLQQETQPFLLLLRTLDAPGPNKTLLLSVLRVITRLLDFPEAMVLPWHEVLEPCLNCLSGPSSDSEIVQELTCFLHRLASMHKDYAVVLCCLGAKEILSKVLDKHSAQLLLGCELRDLVTECEKYAQLYSNLTSSILAGCIQMVLGQIEDHRRTHQPINIPFFDVFLRHLCQGSSVEVKEDKCWEKVEVSSNPHRASKLTDHNPKTYWESNGSTGSHYITLHMHRGVLVRQLTLLVASEDSSYMPARVVVFGGDSTSCIGTELNTVNVMPSASRVILLENLNRFWPIIQIRIKRCQQGGIDTRVRGVEVLGPKPTFWPLFREQLCRRTCLFYTIRAQAWSRDIAEDHRRLLQLCPRLNRVLRHEQNFADRFLPDDEAAQALGKTCWEALVSPLVQNITSPDAEGVSALGWLLDQYLEQRETSRNPLSRAASFASRVRRLCHLLVHVEPPPGPSPEPSTRPFSKNSKGRDRSPAPSPVLPSSSLRNITQCWLSVVQEQVSRFLAAAWRAPDFVPRYCKLYEHLQRAGSELFGPRAAFMLALRSGFSGALLQQSFLTAAHMSEQFARYIDQQIQGGLIGGAPGVEMLGQLQRHLEPIMVLSGLELATTFEHFYQ

SEQ ID NO: 896858 - protein, 150 aa, Homo sapiens
HILCKNGITNDFSMIPVMFRDNTLRLLFTYLKCSMSYIVRSSILEMRAVRLASLALGRRRHDWSMPGGWRDLSPSSALSCLFSHLPWRPVPDLSSFRCGRRECPGMAAGSVLRTERDLSEPLESSSVLCFSSSSPLPLAGACGTSSWAFS

SEQ ID NO: 896859 - protein, 2022 aa, Homo sapiens
QAEWWELLFFIKKLDLCEQQPIFQNLWKNLDETLGEKALGEISVSVEMAESLLQVLSSRFEGSTLNDLLNSQIYTKYGLLSNEPSSSSTSRNHSCTPDPEEESKSEASFSEEETESLKAKAEAPKTEAEPTKTRTETPMAQSDSQLFNQLLVTEGMTLPTEMKEAASEMARALRGPGPRSSLDQHVAAVVATVQISSLDTNLQLSGLSALSQAVEEVTERDHPLVRPDRSLREKLVKMLVELLTNQVGEKMVVVQALRLLYLLMTKHEWRPLFAREGGIYAVLVCMQEYKTSVLVQQAGLAALKMLAVASSSEIPTFVTGRDSIHSLFDAQMTREIFASIDSATRPGSESLLLTVPAAVILMLNTEGCSSAARNGLLLLNLLLCNHHTLGDQIITQELRDTLFRHSGIAPRTEPMPTTRTILMMLLNRYSEPPGSPERAALETPIIQGQDGSPELLIRSLVGGPSAELLLDLERVLCREGSPGGAVRPLLKRLQQETQPFLLLLRTLDAPGPNKTLLLSVLRVITRLLDFPEAMVLPWHEVLEPCLNCLSGPSSDSEIVQELTCFLHRLASMHKDYAVVLCCLGAKEILSKVLDKHSAQLLLGCELRDLVTECEKYAQLYSNLTSSILAGCIQMVLGQIEDHRRTHQPINIPFFDVFLRHLCQGSSVEVKEDKCWEKVEVSSNPHRASKLTDHNPKTYWESNGSTGSHYITLHMHRGVLVRQLTLLVASEDSSYMPARVVVFGGDSTSCIGTELNTVNVMPSASRVILLENLNRFWPIIQIRIKRCQQGGIDTRVRGVEVLGPKPTFWPLFREQLCRRTCLFYTIRAQAWSRDIAEDHRRLLQLCPRLNRVLRHEQNFADRFLPDDEAAQALGKTCWEALVSPLVQNITSPDAEGVSALGWLLDQYLEQRETSRNPLSRAASFASRVRRLCHLLVHVEPPPGPSPEPSTRPFSKNSKGRDRSPAPSPVLPSSSLRNITQCWLSVVQEQVSRFLAAAWRAPDFVPRYCKLYEHLQRAGSELFGPRAAFMLALRSGFSGALLQQSFLTAAHMSEQFARYIDQQIQGGLIGGAPGVEMLGQLQRHLEPIMVLSGLELATTFEHFYQHYMADRLLSFGSSWLEGAVLEQIGLCFPNRLPQLMLQSLSTSEELQRQFHLFQLQRLDKLFLEQEDEEEKRLEEEEEEEEEEEAEKELFIEDPSPAISILVLSPRCWPVSPLCYLYHPRKCLPTEFCDALDRFSSFYSQSQNHPVLDMGPHRRLQWTWLGRAELQFGKQILHVSTVQMWLLLKFNQTEEVSVETLLKDSDLSPELLLQALVPLTSGNGPLTLHEGQDFPHGGVLRLHEPGPQRSGEALWLIPPQAYLNVEKDEGRTLEQKRNLLSCLLVRILKAHGEKGLHIDQLVCLVLEAWQKGPNPPGTLGHTVAGGVACTSTDVLSCILHLLGQGYVKRRDDRPQILMYAAPEPMGPCRGQADVPFCGSQSETSKPSPEAVATLASLQLPAGRTMSPQEVEGLMKQTVRQVQETLNLEPDVAQHLLAHSHWGAEQLLQSYSEDPEPLLLAAGLCVHQAQAVPVRPDHCPVCVSPLGCDDDLPSLCCMHYCCKSCWNEYLTTRIEQNLVLNCTCPIADCPAQPTGAFIRAIVSSPEVISKYEKALLRGYVESCSNLTWCTNPQGCDRILCRQGLGCGTTCSKCGWASCFNCSFPEAHYPASCGHMSQWVDDGGYYDGMSVEAQSKHLAKLISKRCPSCQAPIEKNEGCLHMTCAKCNHGFCWRCLKSWKPNHKDYYNCSAMVSKAARQEKRFQDYNERCTFHHQAREFAVNLRNRVSAIHEVPPPRSFTFLNDACQGLEQARKVLAYACVYSFYSQDAEYMDVVEQQTENLELHTNALQILLEETLLRCRDLASSLRLLRADCLSTGMELLRRIQERLLAILQHSAQDFRVGLQSPSVEAWEAKGPNMPGSQPQASSGPEAEEEEEDDEDDVPEWQQDEFDEELDNDSFSYDESENLDQETFFFGDEEEDEDEAYD

SEQ ID NO: 896860 - protein, 1983 aa, Homo sapiens
QAEWWELLFFIKKLDLCEQQPIFQNLWKNLDETLGEKALGEISVSVEMAESLLQVLSSRFEGSTLNDLLNSQIYTKYGLLSNEPSSSSTSRNHSCTPDPEEESKSEASFSEEETESLKAKAEAPKTEAEPTKTRTETPMAQSDSQLFNQLLVTEGMTLPTEMKEAASEMARALRGPGPRSSLDQHVAAVVATVQISSLDTNLQLSGLSALSQAVEEVTERDHPLVRPDRSLREKLVKMLVELLTNQVGEKMVVVQALRLLYLLMTKHEWRPLFAREGGIYAVLVCMQEYKTSVLVQQAGLAALKMLAVASSSEIPTFVTGRDSIHSLFDAQMTREIFASIDSATRPGSESLLLTVPAAVILMLNTEGCSSAARNGLLLLNLLLCNHHTLGDQIITQELRDTLFRHSGIAPRTEPMPTTRTILMMLLNRYSEPPGSPERAALETPIIQGQDGSPELLIRSLVGGPSAELLLDLERVLCREGSPGGAVRPLLKRLQQETQPFLLLLRTLDAPGPNKTLLLSVLRVITRLLDFPEAMVLPWHEVLEPCLNCLSGPSSDSEIVQELTCFLHRLASMHKDYAVVLCCLGAKEILSKVLDKHSAQLLLGCELRDLVTECEKYAQLYSNLTSSILAGCIQMVLGQIEDHRRTHQPINIPFFDVFLRHLCQGSSVEVKEDKCWEKVEVSSNPHRASKLTDHNPKTYWESNGSTGSHYITLHMHRGVLVRQLTLLVASEDSSYMPARVVVFGGDSTSCIGTELNTVNVMPSASRVILLENLNRFWPIIQIRIKRCQQGGIDTRVRGVEVLGPKPTFWPLFREQLCRRTCLFYTIRAQAWSRDIAEDHRRLLQLCPRLNRVLRHEQNFADRFLPDDEAAQALGKTCWEALVSPLVQNITSPDAEGVSALGWLLDQYLEQRETSRNPLSRAASFASRVRRLCHLLVHVEPPPGPSPEPSTRPFSKNSKGRDRSPAPSPVLPSSSLRNITQCWLSVVQEQVSRFLAAAWRAPDFVPRYCKLYEHLQRAGSELFGPRAAFMLALRSGFSGALLQQSFLTAAHMSEQFARYIDQQIQGGLIGGAPGVEMLGQLQRHLEPIMVLSGLELATTFEHFYQHYMADRLLSFGSSWLEGAVLEQIGLCFPNRLPQLMLQSLSTSEELQRQFHLFQLQRLDKLFLEQEDEEEKRLEEEEEEEEEEEAEKELFIEDPSPAISILVLSPRCWPVSPLCYLYHPRKCLPTEFCDALDRFSSFYSQSQNHPVLDMGPHRRLQWTWLGRAELQFGKQILHVSTVQMWLLLKFNQTEEVSVETLLKDSDLSPELLLQALVPLTSGNGPLTLHEGQDFPHGGVLRLHEPGPQRSGEALWLIPPQAYLNVEKDEGRTLEQKRNLLSCLLVRILKAHGEKGLHIDQLVCLVLEAWQKGPNPPGTLGHTVAGGVACTSTDVLSCILHLLGQGYVKRRDDRPQILMYAAPEPMGPCRGQADVPFCGSQSETSKPSPEAVATLASLQLPAGRTMSPQEVEGLMKQTVRQVQETLNLEPDVAQHLLAHSHWGAEQLLQSYSEDPEPLLLAAVASCWNEYLTTRIEQNLVLNCTCPIADCPAQPTGAFIRAIVSSPEVISKYEKALLRGYVESCSNLTWCTNPQGCDRILCRQGLGCGTTCSKCGWASCFNCSFPEAHYPASCGHMSQWVDDGGYYDGMSVEAQSKHLAKLISKRCPSCQAPIEKNEGCLHMTCAKCNHGFCWRCLKSWKPNHKDYYNCSAMVSKAARQEKRFQDYNERCTFHHQAREFAVNLRNRVSAIHEVPPPRSFTFLNDACQGLEQARKVLAYACVYSFYSQDAEYMDVVEQQTENLELHTNALQILLEETLLRCRDLASSLRLLRADCLSTGMELLRRIQERLLAILQHSAQDFRVGLQSPSVEAWEAKGPNMPGSQPQASSGPEAEEEEEDDEDDVPEWQQDEFDEELDNDSFSYDESENLDQETFFFGDEEEDEDEAYD

SEQ ID NO: 896861 - protein, 2003 aa, Homo sapiens
QAEWWELLFFIKKLDLCEQQPIFQNLWKNLDETLGEKALGEISVSVEMAESLLQVLSSRFEGSTLNDLLNSQIYTKYGLLSNEPSSSSTSRNHSCTPDPEEESKSEASFSEEETESLKAKAEAPKTEAEPTKTRTETPMAQSDSQLFNQLLVTEGMTLPTEMKEAASEMARALRGPGPRSSLDQHVAAVVATVQISSLDTNLQLSGLSALSQAVEEVTERDHPLVRPDRSLREKLVKMLVELLTNQVGEKMVVVQALRLLYLLMTKHEWRPLFAREGGIYAVLVCMQEYKTSVLVQQAGLAALKMLAVASSSEIPTFVTGRDSIHSLFDAQMTREIFASIDSATRPGSESLLLTVPAAVILMLNTEGCSSAARNGLLLLNLLLCNHHTLGDQIITQELRDTLFRHSGIAPRTEPMPTTRTILMMLLNRYSEPPGSPERAALETPIIQGQDGSPELLIRSLVGGPSAELLLDLERVLCREGSPGGAVRPLLKRLQQETQPFLLLLRTLDAPGPNKTLLLSVLRVITRLLDFPEAMVLPWHEVLEPCLNCLSGPSSDSEIVQELTCFLHRLASMHKDYAVVLCCLGAKEILSKVLDKHSAQLLLGCELRDLVTECEKYAQLYSNLTSSILAGCIQMVLGQIEDHRRTHQPINIPFFDVFLRHLCQGSSVEVKEDKCWEKVEVSSNPHRASKLTDHNPKTYWESNGSTGSHYITLHMHRGVLVRQLTLLVASEDSSYMPARVVVFGGDSTSCIGTELNTVNVMPSASRVILLENLNRFWPIIQIRIKRCQQGGIDTRVRGVEVLGPKPTFWPLFREQLCRRTCLFYTIRAQAWSRDIAEDHRRLLQLCPRLNRVLRHEQNFADRFLPDDEAAQALGKTCWEALVSPLVQNITSPDAEGVSALGWLLDQYLEQRETSRNPLSRAASFASRVRRLCHLLVHVEPPPGPSPEPSTRPFSKNSKGRDRSPAPSPVLPSSSLRNITQCWLSVVQEQVSRFLAAAWRAPDFVPRYCKLYEHLQRAGSELFGPRAAFMLALRSGFSGALLQQSFLTAAHMSEQFARYIDQQIQGGLIGGAPGVEMLGQLQRHLEPIMVLSGLELATTFEHFYQHYMADRLLSFGSSWLEGAVLEQIGLCFPNRLPQLMLQSLSTSEELQRQFHLFQLQRLDKLFLEQEDEEEKRLEEEEEEEEEEEAEKELFIEDPSPAISILVLSPRCWPVSPLCYLYHPRKCLPTEFCDALDRFSSFYSQSQNHPVLDMGPHRRLQWTWLGRAELQFGKQILHVSTVQMWLLLKFNQTEEVSVETLLKDSDLSPELLLQALVPLTSGNGPLTLHEGQDFPHGGVLRLHEPGPQRSGEALWLIPPQAYLNVEKDEGRTLEQKRNLLSCLLVRILKAHGEKGLHIDQLVCLVLEAWQKGPNPPGTLGHTVAGGVACTSTDVLSCILHLLGQGYVKRRDDRPQILMYAAPEPMGPCRGQADVPFCGSQSETSKPSPEAVATLASLQLPAGRTMSPQEVEGLMKQTVRQVQETLNLEPDVAQHLLAHSHWGAEQLLQSYSEDPEPLLLAAGLCVHQAQAVPVRPDHCPVCVSPLGCDDDLPSLCCMHYCCKSCWNEYLTTRIEQNLVLNCTCPIADCPAQPTGAFIRAIVSSPEVISKYEKALLRGYVESCSNLTWCTNPQGCDRILCRQGLGCGTTCSKCGWASCFNCSFPEAHYPASCGHMSQWVDDGGYYDGMSVEAQSKHLAKLISKRCPSCQAPIEKNEGCLHMTCAKCNHGFCWRCLKSWKPNHKDYYNCSAMVSKAARQEKRFQDYNERCTFHHQAREFAVNLRNRVSAIHEVPPPRSFTFLNDACQGLEQARKVLAYACVYSFYSQDAEYMDVVEQQTENLELHTNALQILLEETLLRCRDLASSLRLLRADCLSTGMELLRRIQERLLAILQHSAQDFRVGLQSPSVEAWEAKGPNMPGSQPQASSGPEAEEEEEDDEDDVPEWQQDEFDEELDNDSFSYDESENL

SEQ ID NO: 896862 - protein, 434 aa, Homo sapiens
QAEWWELLFFIKKLDLCEQQPIFQNLWKNLDETLGEKALGEISVSVEMAESLLQVLSSRFEGSTLNDLLNSQIYTKYGLLSNEPSSSSTSRNHSCTPDPEEESKSEASFSEEETESLKAKAEAPKTEAEPTKTRTETPMAQSDSQLFNQLLVTEGMTLPTEMKEAASEMARALRGPGPRSSLDQHVAAVVATVQISSLDTNLQLSGLSALSQAVEEVTERDHPLVRPDRSLREKLVKMLVELLTNQVGEKMVVVQALRLLYLLMTKHEWRPLFAREGGIYAVLVCMQEYKTSVLVQQAGLAALKMLAVASSSEIPTFVTGRDSIHSLFDAQMTREIFASIDSATRPGSESLLLTVPAAVILMLNTEGSGHYLPNSRLLLSPKPCYSCAPGSCTPQKFPSRCHLRIKHWWRCQLLLEENPSGLGIGRFPERAETH

SEQ ID NO: 896863 - protein, 133 aa, Homo sapiens
KGPMPSTSFSNPSVCSPGFPGWSSESISRGLGGKRTQHAWQSVSGVGRAMEEAVDMAASSGLSVVALPRPQASSGPEAEEEEEDDEDDVPEWQQDEFDEELDNDSFSYDESENLDQETFFFGDEEEDEDEAYD

SEQ ID NO: 896864 - protein, 70 aa, Homo sapiens
VELLTNQVGEKMVVVQALRLLYLLMTKHEWRPLFAREGGIYAVLVCMQEYKTSVLVQQAGLAVSTLGLAG

SEQ ID NO: 896865 - protein, 385 aa, Homo sapiens
ADRIGGPAPSPSMGVVAATAGSASRSLRPQRTSHRLSVAARGASQPARAPASLPPRVPRCPPRAGAMRLGPRTAALGLLLLCAAAAGAGKAEELHYPLGERRSDYDREALLGVQEDVDEYVKLGHEEQQKRLQAIIKKIDLDSDGFLTESELSSWIQMSFKHYAMQEAKQQFVEYDKNSDDTVTWDEYNIQMYDRVIDFDENTALDDAEEESFRKLHLKDKKRFEKANQDSGPGLSLEEFIAFEHPEEVDYMTEFVIQEALEEHDKNGDGFVSLEEFLGDYRWDPTANEDPEWILVEKDRFVNDYDKDNDGRLDPQELLPWVVPNNQGIAQEEALHLIDEMDLNGDKSSLKKRFWKTRTCFSPVKPQIMADSSMMTISIMMSFNL

SEQ ID NO: 896866 - protein, 385 aa, Homo sapiens; identical to SEQ ID NO: 896865

SEQ ID NO: 896867 - protein, 425 aa, Homo sapiens
ADRIGGPAPSPSMGVVAATAGSASRSLRPQRTSHRLSVAARGASQPARAPASLPPRVPRCPPRAGAMRLGPRTAALGLLLLCAAAAGAGKAEELHYPLGERRSDYDREALLGVQEDVDEYVKLGHEEQQKRLQAIIKKIDLDSDGFLTESELSSWIQMSFKHYAMQEAKQQFVEYDKNSDDTVTWDEYNIQMYDRVIDFDENTALDDAEEESFRKLHLKDKKRFEKANQDSGPGLSLEEFIAFEHPEEVDYMTEFVIQEALEEHDKNGDGFVSLEEFLGDYRWDPTANEDPEWILVEKDRFVNDYDKDNDGRLDPQELLPWVVPNNQGIAQEEALHLIDEMDLNGDKSSLKKRFWKTRTCFSPVKPQIMADSSMMTISIMMSFNPRLVQKKGPFKFGPPPFGANSRGLSPQFTRDFWRKLGLEHN

SEQ ID NO: 896868 - protein, 403 aa, Homo sapiens
ADRIGGPAPSPSMGVVAATAGSASRSLRPQRTSHRLSVAARGASQPARAPASLPPRVPRCPPRAGAMRLGPRTAALGLLLLCAAAAGAGKAEELHYPLGERRSDYDREALLGVQEDVDEYVKLGHEEQQKRLQAIIKKIDLDSDGFLTESELSSWIQMSFKHYAMQEAKQQFVEYDKNSDDTVTWDEYNIQMYDRVIDFDENTALDDAEEESFRKEFAICKKQSFCFWLLRFNLHLKDKKRFEKANQDSGPGLSLEEFIAFEHPEEVDYMTEFVIQEALEEHDKNGDGFVSLEEFLGDYRWDPTANEDPEWILVEKDRFVNDYDKDNDGRLDPQELLPWVVPNNQGIAQEEALHLIDEMDLNGDKSSLKKRFWKTRTCFSPVKPQIMADSSMMTISIMMSFNL

SEQ ID NO: 896869 - protein, 230 aa, Homo sapiens
ADRIGGPAPSPSMGVVAATAGSASRSLRPQRTSHRLSVAARGASQPARAPASLPPRVPRCPPRAGAMRLGPRTAALGLLLLCAAAAGAGKAEELHYPLGERRSDYDREALLGVQEDVDEYVKLGHEEQQKRLQAIIKKIDLDSDGFLTESELSSWIQMSFKHYAMQEAKQQFVEYDKNSDDTVTWDEYNIQMYDRVIDFDENTALDDAEEESFRKHQCGGLGLHPQSQSA

SEQ ID NO: 896870 - protein, 292 aa, Homo sapiens
ADRIGGPAPSPSMGVVAATAGSASRSLRPQRTSHRLSVAARGASQPARAPASLPPRVPRCPPRAGAMRLGPRTAALGLLLLCAAAAGAGKAEELHYPLGERRSDYDREALLGVQEDVDEYVKLGHEEQQKRLQAIIKKIDLDSDGFLTESELSSWIQMSFKHYAMQEAKQQFVEYDKNSDDTVTWDEYNIQMYDRVIDFDENTALDDAEEESFRKLHLKDKKRFEKANQDSGPGLSLEEFIAFEHPEEVDYMTEFVIQEALEEHDKNGDGFVSLEEFLGDYRWDPSKSPGRM

SEQ ID NO: 896871 - protein, 451 aa, Homo sapiens
ADRIGGPAPSPSMGVVAATAGSASRSLRPQRTSHRLSVAARGASQPARAPASLPPRVPRCPPRAGAMRLGPRTAALGLLLLCAAAAGAGKAEELHYPLGERRSDYDREALLGVQEDVDEYVKLGHEEQQKRLQAIIKKIDLDSDGFLTESELSSWIQMSFKHYAMQEAKQQFVEYDKNSDDTVTWDEYNIQMYDRVIDFDENTALDDAEEESFRKVLMHMGKFSPLLVKRKAATLSSLYVVLALRFITLPLYRMDGRKQNLIKAKPGFRSRLDAALKNVIRFVSILKNVAMYMTVTLVIQEGFQEDTMTKMVHGICLPFGTKFLAVIHRVRIPTAHNEKPANEDPEWILVEKDRFVNDYDKDNDGRLDPQELLPWVVPNNQGIAQEEEALSSKLNATWDLKLVDKTYASTDTQRAFWEQTPELVYFHPVERPTRIYCAQNTLHCMTTFPNP

SEQ ID NO: 896872 - protein, 385 aa, Homo sapiens; identical to SEQ ID NO: 896865

SEQ ID NO: 896873 - protein, 385 aa, Homo sapiens; identical to SEQ ID NO: 896865

SEQ ID NO: 896874 - protein, 292 aa, Homo sapiens; identical to SEQ ID NO: 896870

SEQ ID NO: 896875 - protein, 134 aa, Homo sapiens
MTEFVIQEALEEHDKNGDGFVSLEEFLGDYRWDPTANEDPEWILVEKDRFVNDYDKDNDGRLDPQELLPWVVPNNQGIAQEEALHLIDEMDLNGDKSSLKKRFWKTRTCFSPVKPQIMADSSMMTISIMMSFNL

SEQ ID NO: 896876 - protein, 255 aa, Homo sapiens
LSCIPIAPSHPLPTMVGASSVRMARCGAGWPARRRGGAPGARVLGPRFGSLRHAGPLRYRGETHGPERIGYPQLSQTLQKLVFDPQAYRTISAGASPPAPNSLGLTTKLFPHMPSRLRKTRKLRGHVSHGHGRIGKHRKHPGGRGNAGGLHHHRINFDKYHPGYFGKVGMKHYHLKRNQSFCPTVNLDKLWTLVSEQTRVNAAKNKTGAAPIIDVVRSGYYKVLGKGKLPKQAVTVQAKFFSRRAEEKIKSVGGA

SEQ ID NO: 896877 - protein, 143 aa, Homo sapiens
MPSRLRKTRKLRGHVSHGHGRIGKHRKHPGGRGNAGGLHHHRINFDKYHPGYFGKVGMKHYHLKRNQSFCPTVNLDKLWTLVSEQTRVNAAKNKTGAAPIIDVVRSGYYKVLGKGKLPKQAVTVQAKFFSRRAEEKIKSVGGA

SEQ ID NO: 896878 - protein, 140 aa, Homo sapiens
DISGYIGKVGMKHYHLKRNQSFCPTVNLDKIVDLVGEQTRATSTDHSGYFGKVGMKHYHLKRNQSFCPTVNLDKLWTLVSEQTRVNAAKNKTGAAPIIDVVRSGYYKVLGKGKLPKQAVTVQAKFFSRRAEEKIKSVGGA

SEQ ID NO: 896879 - protein, 697 aa, Homo sapiens
GALSWLGPGKASLLRSFPHLCTLLPDFRLQDPQRAPAFHLSSETLPFSRKSTQETRKMATGLLRAKKEAFVAFRDVAVYFTQEEWRLLSPAQRTLHREVMLETYNHLVSLEIPSSKPKLIAQLERGEAPWREERKCPLDLCPESKPEIQLSPSCPLIFSSQQALSQHVWLSHLSQLFSSLWAGNPLHLGKHYPEDQKQQQDPFCFSGKAEWIQEGEDSRLLFGRVSKNGTSKALSSPPEEQQPAQSKEDNTVVDIGSSPERRADLEETDKVLHGLEVSGFGEIKYEEFGPGFIKESNLLSLQKTQTGETPYMYTEWGDSFGSMSVLIKNPRTHSGGKPYVCRECGRGFTWKSNLITHQRTHSGEKPYVCKDCGRGFTWKSNLFTHQRTHSGLKPYVCKECGQSFSLKSNLITHQRAHTGEKPYVCRECGRGFRQHSHLVRHKRTHSGEKPYICRECEQGFSQKSHLIRHLRTHTGEKPYVCTECGRHFSWKSNLKTHQRTHSGVKPYVCLECGQCFSLKSNLNKHQRSHTGEKPFVCTECGRGFTRKSTLSTHQRTHSGEKPFVCAECGRGFNDKSTLISHQRTHSGEKPFMCRECGRRFRQKPNLFRHKRAHSGAFVCRECGQGFCAKLTLIKHQRAHAGGKPHVCRECGQGFSRQSHLIRHQRTHSGEKPYICRKCGRGFSRKSNLIRHQRTHSG

SEQ ID NO: 896880 - protein, 83 aa, Homo sapiens
QAGSADGVRVYSGQCDSAVLGCSAKRPPDVGRWRVSSVESWPSASAAGKSAIATAGTRTGCVPALPHPSTGLVGARTDCDVVS

SEQ ID NO: 896881 - protein, 645 aa, Homo sapiens
MVHRQTMSCSGAGGITAFVAFRDVAVYFTQEEWRLLSPAQRTLHREVMLETYNHLVSLEIPSSKPKLIAQLERGEAPWREERKCPLDLCPESKPEIQLSPSCPLIFSSQQALSQHVWLSHLSQLFSSLWAGNPLHLGKHYPEDQKQQQDPFCFSGKAEWIQEGEDSRLLFGRVSKNGTSKALSSPPEEQQPAQSKEDNTVVDIGSSPERRADLEETDKVLHGLEVSGFGEIKYEEFGPGFIKESNLLSLQKTQTGETPYMYTEWGDSFGSMSVLIKNPRTHSGGKPYVCRECGRGFTWKSNLITHQRTHSGEKPYVCKDCGRGFTWKSNLFTHQRTHSGLKPYVCKECGQSFSLKSNLITHQRAHTGEKPYVCRECGRGFRQHSHLVRHKRTHSGEKPYICRECEQGFSQKSHLIRHLRTHTGEKPYVCTECGRHFSWKSNLKTHQRTHSGVKPYVCLECGQCFSLKSNLNKHQRSHTGEKPFVCTECGRGFTRKSTLSTHQRTHSGEKPFVCAECGRGFNDKSTLISHQRTHSGEKPFMCRECGRRFRQKPNLFRHKRAHSGAFVCRECGQGFCAKLTLIKHQRAHAGGKPHVCRECGQGFSRQSHLIRHQRTHSGEKPYICRKCGRGFSRKSNLIRHQRTHSG

SEQ ID NO: 896882 - protein, 645 aa, Homo sapiens; identical to SEQ ID NO: 896881

SEQ ID NO: 896883 - protein, 598 aa, Homo sapiens
MLETYNHLVSLEIPSSKPKLIAQLERGEAPWREERKCPLDLCPESKPEIQLSPSCPLIFSSQQALSQHVWLSHLSQLFSSLWAGNPLHLGKHYPEDQKQQQDPFCFSGKAEWIQEGEDSRLLFGRVSKNGTSKALSSPPEEQQPAQSKEDNTVVDIGSSPERRADLEETDKVLHGLEVSGFGEIKYEEFGPGFIKESNLLSLQKTQTGETPYMYTEWGDSFGSMSVLIKNPRTHSGGKPYVCRECGRGFTWKSNLITHQRTHSGEKPYVCKDCGRGFTWKSNLFTHQRTHSGLKPYVCKECGQSFSLKSNLITHQRAHTGEKPYVCRECGRGFRQHSHLVRHKRTHSGEKPYICRECEQGFSQKSHLIRHLRTHTGEKPYVCTECGRHFSWKSNLKTHQRTHSGVKPYVCLECGQCFSLKSNLNKHQRSHTGEKPFVCTECGRGFTRKSTLSTHQRTHSGEKPFVCAECGRGFNDKSTLISHQRTHSGEKPFMCRECGRRFRQKPNLFRHKRAHSGAFVCRECGQGFCAKLTLIKHQRAHAGGKPHVCRECGQGFSRQSHLIRHQRTHSGEKPYICRKCGRGFSRKSNLIRHQRTHSG

SEQ ID NO: 896884 - protein, 687 aa, Homo sapiens
MGIGCSGDFCDIPDPNCGALERTALHFVGRVFPPRPLLFLFTSPDLSSETLPFSRKSTQETRKMATGLLRAKKEKFHLLNQNSLLSWSEGKRPGERRENVHWTSVQGEWFQLSPIQYEVGCRSVTDNSSYFDESKPEIQLSPSCPLIFSSQQALSQHVWLSHLSQLFSSLWAGNPLHLGKHYPEDQKQQQDPFCFSGKAEWIQEGEDSRLLFGRVSKNGTSKALSSPPEEQQPAQSKEDNTVVDIGSSPERRADLEETDKVLHGLEVSGFGEIKYEEFGPGFIKESNLLSLQKTQTGETPYMYTEWGDSFGSMSVLIKNPRTHSGGKPYVCRECGRGFTWKSNLITHQRTHSGEKPYVCKDCGRGFTWKSNLFTHQRTHSGLKPYVCKECGQSFSLKSNLITHQRAHTGEKPYVCRECGRGFRQHSHLVRHKRTHSGEKPYICRECEQGFSQKSHLIRHLRTHTGEKPYVCTECGRHFSWKSNLKTHQRTHSGVKPYVCLECGQCFSLKSNLNKHQRSHTGEKPFVCTECGRGFTRKSTLSTHQRTHSGEKPFVCAECGRGFNDKSTLISHQRTHSGEKPFMCRECGRRFRQKPNLFRHKRAHSGAFVCRECGQGFCAKLTLIKHQRAHAGGKPHVCRECGQGFSRQSHLIRHQRTHSGEKPYICRKCGRGFSRKSNLIRHQRTHSG

SEQ ID NO: 896885 - protein, 581 aa, Homo sapiens [sequence omitted]

SEQ ID NO: 896886 - protein, 312 aa, Homo sapiens
MRCDFWLKPYVCKECGQSFSLKSNLITHQRAHTGEKPYVCRECGRGFRQHSHLVRHKRTHSGEKPYICRECEQGFSQKSHLIRHLRTHTGEKPYVCTECGRHFSWKSNLKTHQRTHSGVKPYVCLECGQCFSLKSNLNKHQRSHTGEKPFVCTECGRGFTRKSTLSTHQRTHSGEKPFVCAECGRGFNDKSTLISHQRTHSGEKPFMCRECGRRFRQKPNLFRHKRAHSGAFVCRECGQGFCAKLTLIKHQRAHAGGKPHVCRECGQGFSRQSHLIRHQRTHSGEKPYICRKCGRGFSRKSNLIRHQRTHSG

SEQ ID NO: 896887 - protein, 598 aa, Homo sapiens; identical to SEQ ID NO: 896883

SEQ ID NO: 896888 - protein, 228 aa, Homo sapiens
GALSWLGPGKASLLRSFPHLCTLLPDFRLQDPQRAPAFHLSSETLPFSRKSTQETRKMATGLLRAKKEAFVAFRDVAVYFTQEEWRLLSPAQRTLHREVMLETYNHLVSLEIPSSKPKLIAQLERGEAPWREERKCPLDLCPDGALLCCQAGIQWCYIGSLQPLPPGFKQFPCLSLLSSWDYRCTPPHLANFLYFSRDGVSPCWPGWSQSPDLVIHPPQPPKVLGLQA

SEQ ID NO: 896889 - protein, 598 aa, Homo sapiens; identical to SEQ ID NO: 896883

SEQ ID NO: 896890 - protein, 598 aa, Homo sapiens; identical to SEQ ID NO: 896883

SEQ ID NO: 896891 - protein, 386 aa, Homo sapiens
MYTEWGDSFGSMSVLIKNPRTHSGGKPYVCRECGRGFTWKSNLITHQRTHSGEKPYVCKDCGRGFTWKSNLFTHQRTHSGLKPYVCKECGQSFSLKSNLITHQRAHTGEKPYVCRECGRGFRQHSHLVRHKRTHSGEKPYICRECEQGFSQKSHLIRHLRTHTGEKPYVCTECGRHFSWKSNLKTHQRTHSGVKPYVCLECGQCFSLKSNLNKHQRSHTGEKPFVCTECGRGFTRKSTLSTHQRTHSGEKPFVCAECGRGFNDKSTLISHQRTHSGEKPFMCRECGRRFRQKPNLFRHKRAHSGAFVCRECGQGFCAKLTLIKHQRAHAGGKPHVCRECGQGFSRQSHLIRHQRTHSGEKPYICRKCGRGFSRKSNLIRHQRTHSG

SEQ ID NO: 896892 - protein, 386 aa, Homo sapiens; identical to SEQ ID NO: 896891

SEQ ID NO: 896893 - protein, 595 aa, Homo sapiens
MKSHSVAQAGVQWRDLGSLQPPPPGFKQFSASASRLAGTTESKPEIQLSPSCPLIFSSQQALSQHVWLSHLSQLFSSLWAGNPLHLGKHYPEDQKQQQDPFCFSGKAEWIQEGEDSRLLFGRVSKNGTSKALSSPPEEQQPAQSKEDNTVVDIGSSPERRADLEETDKVLHGLEVSGFGEIKYEEFGPGFIKESNLLSLQKTQTGETPYMYTEWGDSFGSMSVLIKNPRTHSGGKPYVCRECGRGFTWKSNLITHQRTHSGEKPYVCKDCGRGFTWKSNLFTHQRTHSGLKPYVCKECGQSFSLKSNLITHQRAHTGEKPYVCRECGRGFRQHSHLVRHKRTHSGEKPYICRECEQGFSQKSHLIRHLRTHTGEKPYVCTECGRHFSWKSNLKTHQRTHSGVKPYVCLECGQCFSLKSNLNKHQRSHTGEKPFVCTECGRGFTRKSTLSTHQRTHSGEKPFVCAECGRGFNDKSTLISHQRTHSGEKPFMCRECGRRFRQKPNLFRHKRAHSGAFVCRECGQGFCAKLTLIKHQRAHAGGKPHVCRECGQGFSRQSHLIRHQRTHSGEKPYICRKCGRGFSRKSNLIRHQRTHSG

SEQ ID NO: 896894 - protein, 286 aa, Homo sapiens
MAAGVDCGDGVGARQHVFLVSEYLKDASKKMKNGLMFVKLVNPCSGEGAIYLFNMCLQQLFEVKVFKEKHHSWFINQSVQSGGLLHFATPVDPLFLLLHYLIKADKEGKFQPLDQVVVDNVFPNCILLLKLPGLEKLLHHVTEEKGNPEIDNKKYYKYSKEKTLKWLEKKVNQTVAALKTNNVNVSSRVQSTAFFSGDQASTDKEEDYIRYAHGLISDYIPKELSDDLSKYLKLPEPSASLPNPPSKLLCSWYVYLLDPENGEANHKPHLTANCSVPSAQARSQMS

SEQ ID NO: 896895 - protein, 289 aa, Homo sapiens
MAAGVDCGDGVGARQHVFLVSEYLKDASKKMKNGLMFVKLVNPCSGEGAIYLFNMCLQQLFEVKVFKEKHHSWFINQSVQSGGLLHFATPVDPLFLLLHYLIKADKEGKFQPLDQVVVDNVFPNCILLLKLPGLEKLLHHVTEEKGNPEIDNKKYYKYSKEKTLKWLEKKVNQTVAALKTNNVNVSSRVQSTAFFSGDQASTDKEEDYIRYAHGLISDYIPKELSDDLSKYLKLPEPSASLPNPPSKKIKLSDEPVEAKEDYTKFNTKDLKTEKVCGFRCSGVSFILSA

SEQ ID NO: 896896 - protein, 259 aa, Homo sapiens
MAAGVDCGDGVGARQHVFLVSEYLKDASKKMKNGLMFVKLVNPCSGEGAIYLFNMCLQQLFEVKVFKEKHHSWFINQSVQSGGLLHFATPVDPLFLLLHYLIKADKEGKFQPLDQVVVDNVFPNCILLLKLPGLEKLLHHVTEEKGNPEIDNKKYYKYSKEKTLKWLEKKVNQTVAALKTNNVNVSSRVQSTAFFSGDQASTDKEEDYIRYAHGLISDYIPKELSDDLSKYLKLPEPSASLPNPPSKIQRMEKPIINHT

SEQ ID NO: 896897 - protein, 259 aa, Homo sapiens; identical to SEQ ID NO: 896896

SEQ ID NO: 896898 - protein, 252 aa, Homo sapiens
MAAGVDCGDGVGARQHVFLVSEYLKDASKKMKNGLMFVKLVNPCSGEGAIYLFNMCLQQLFEVKVFKEKHHSWFINQSVQSGGLLHFATPVDPLFLLLHYLIKADKEGKFQPLDQVVVDNVFPNCILLLKLPGLEKLLHHVTEEKGNPEIDNKKYYKYSKEKTLKWLEKKVNQTVAALKTNNVNVSSRVQSTAFFSGDQASTDKEEDYIRYAHGLISDYIPKELSDDLSKYLKLPEVAVSRDGAIALFGQQE

SEQ ID NO: 896899 - protein, 312 aa, Homo sapiens
MAAGVDCGDGVGARQHVFLVSEYLKDASKKMKNGLMFVKLVNPCSGEGAIYLFNMCLQQLFEVKVFKEKHHSWFINQSVQSGGLLHFATPVDPLFLLLHYLIKADKEGKFQPLDQVVVDNVFPNCILLLKLPGLEKLLHHVTEEKGNPEIDNKKYYKYSKEKTLKWLEKKVNQTVAALKTNNVNVSSRVQSTAFFSGDQASTDKEEDYIRYAHGLISDYIPKELSDDLSKYLKLPEPSASLPNPPSKKIKLSDEPVEAKEDYTKFNTKDLKTEKKNSKMTAAQKALAKVDKSGMKSIDTFFGVKNKKKIGKV

SEQ ID NO: 896900 - protein, 257 aa, Homo sapiens
MAAGVDCGDGVGARQHVFLVSEYLKDASKKMKNGLMFVKLVNPCSGEGAIYLFNMCLQQLFEVKVFKEKHHSWFINQSVQSGGLLHFATPVDPLFLLLHYLIKADKEGKFQPLDQVVVDNVFPNCILLLKLPGLEKLLHHVTEEKGNPEIDNKKYYKYSKEKTLKWLEKKVNQTVAALKTNNVNVSSRVQSTAFFSGDQASTDKEEDYIRYAHGLISDYIPKELSDDLSKYLKLPEPSASLPNPPSKMAAQRQKRGK

SEQ ID NO: 896901 - protein, 286 aa, Homo sapiens; identical to SEQ ID NO: 896894

SEQ ID NO: 896902 - protein, 256 aa, Homo sapiens
MKNGLMFVKLVNPCSGEGAIYLFNMCLQQLFEVKVFKEKHHSWFINQSVQSGGLLHFATPVDPLFLLLHYLIKADKEGKFQPLDQVVVDNVFPNCILLLKLPGLEKLLHHVTEEKGNPEIDNKKYYKYSKEKTLKWLEKKVNQTVAALKTNNVNVSSRVQSTAFFSGDQASTDKEEDYIRYAHGLISDYIPKELSDDLSKYLKLPEPSASLPNPPSKLLCSWYVYLLDPENGEANHKPHLTANCSVPSAQARSQMS

SEQ ID NO: 896903 - protein, 277 aa, Homo sapiens
MGLLECCARCLVGAPFASLVATGLCFFGVALFCGCGHEALTGTEKLIETYFSKNYQDYEYLINVIHAFQYVIYGTASFFFLYGALLLAEGFYTTGAVRQIFGDYKTTICGKGLSATVTGGQKGRGSRGQHQAHSLERVCHCLGKWLGHPDKFVGITYALTVVWLLVFACSAVPVYIYFNTWTTCQSIAFPSKTSASIGSLCADARMYGVLPWNAFPGKVCGSNLLSICKTAEFQMTFHLFIAAFVGAAATLVSLLTFMIAATYNFAVLKLMGRGTKF

SEQ ID NO: 896904 - protein, 277 aa, Homo sapiens; identical to SEQ ID NO: 896903

SEQ ID NO: 896905 - protein, 277 aa, Homo sapiens; identical to SEQ ID NO: 896903

SEQ ID NO: 896906 - protein, 242 aa, Homo sapiens
MGLLECCARCLVGAPFASLVATGLCFFGVALFCGCGHEALTGTEKLIETYFSKNYQDYEYLINVIHAFQYVIYGTASFFFLYGALLLAEGFYTTGAVRQIFGDYKTTICGKGLSATFVGITYALTVVWLLVFACSAVPVYIYFNTWTTCQSIAFPSKTSASIGSLCADARMYGVLPWNAFPGKVCGSNLLSICKTAEFQMTFHLFIAAFVGAAATLVSLLTFMIAATYNFAVLKLMGRGTKF

SEQ ID NO: 896907 - protein, 277 aa, Homo sapiens; identical to SEQ ID NO: 896903

SEQ ID NO: 896908 - protein, 277 aa, Homo sapiens; identical to SEQ ID NO: 896903

SEQ ID NO: 896909 - protein, 277 aa, Homo sapiens; identical to SEQ ID NO: 896903

SEQ ID NO: 896910 - protein, 228 aa, Homo sapiens
MGLLECCARCLVGAPFASLVATGLCFFGVALFCGCGHEALTGTEKLIETYFSKNYQDYEYLINVIHAFQYVIYGTASFFFLYGALLLAEGFYTTGAVRQIFGDYKTTICGKGLSATFVGITYALTVVWLLVFACSAVPVYIYFNTWTTCQSIAFPSKTSASIGSLCADARMYGVLPWNAFPGKVCGSNLLSICKTAEAAATLVSLLTFMIAATYNFAVLKLMGRGTKF

SEQ ID NO: 896911 - protein, 368 aa, Homo sapiens
MTPGFHWHPVQAAGCHQEGWQCLLRNPLAVQEPSWTQEYFAKGTQQNQWKQNHRNRRRGQRYSERKSKRPKKEAGETRILPAEQSQPQSRLASRLQLESESQRHGLVRVLCKMSGRGPLCFPGGHCGHEALTGTEKLIETYFSKNYQDYEYLINVIHAFQYVIYGTASFFFLYGALLLAEGFYTTGAVRQIFGDYKTTICGKGLSATVTGGQKGRGSRGQHQAHSLERVCHCLGKWLGHPDKFVGITYALTVVWLLVFACSAVPVYIYFNTWTTCQSIAFPSKTSASIGSLCADARMYGVLPWNAFPGKVCGSNLLSICKTAEFQMTFHLFIAAFVGAAATLVSLLTFMIAATYNFAVLKLMGRGTKF

SEQ ID NO: 896912 - protein, 259 aa, Homo sapiens
MGLLECCARCLVGAPFASLVATGLCFFGVALFCGCGHEALTGTEKLIETYFSIIYGTASFFFLYGALLLAEGFYTTGAVRQIFGDYKTTICGKGLSATVTGGQKGRGSRGQHQAHSLERVCHCLGKWLGHPDKFVGITYALTVVWLLVFACSAVPVYIYFNTWTTCQSIAFPSKTSASIGSLCADARMYGVLPWNAFPGKVCGSNLLSICKTAEFQMTFHLFIAAFVGAAATLVSLLTFMIAATYNFAVLKLMGRGTKF

SEQ ID NO: 896913 - protein, 320 aa, Homo sapiens
MTPGFHWHPVQAAGCHQEGWQCPLEESLGSARSLAGLKNILPRAPSRTNGSRITEIGEEDKDTQREKVKDRRRRLESCGHEALTGTEKLIETYFSKNYQDYEYLINVIHAFQYVIYGTASFFFLYGALLLAEGFYTTGAVRQIFGDYKTTICGKGLSATVTGGQKGRGSRGQHQAHSLERVCHCLGKWLGHPDKFVGITYALTVVWLLVFACSAVPVYIYFNTWTTCQSIAFPSKTSASIGSLCADARMYGVLPWNAFPGKVCGSNLLSICKTAEFQMTFHLFIAAFVGAAATLVSLLTFMIAATYNFAVLKLMGRGTKF

SEQ ID NO: 896914 - protein, 224 aa, Homo sapiens
MGLLECCARCLVGAPFASLVATGLCFFGVALFCGCGHEALTGTEKLIETYFSIIYGTASFFFLYGALLLAEGFYTTGAVRQIFGDYKTTICGKGLSATFVGITYALTVVWLLVFACSAVPVYIYFNTWTTCQSIAFPSKTSASIGSLCADARMYGVLPWNAFPGKVCGSNLLSICKTAEFQMTFHLFIAAFVGAAATLVSLLTFMIAATYNFAVLKLMGRGTKF

SEQ ID NO: 896915 - protein, 183 aa, Homo sapiens
LVMLEVMFLVNRRGKICRVPFTFSRAEFGTRFNSQHQAHSLERVCHCLGKWLGHPDKFVGITYALTVVWLLVFACSAVPVYIYFNTWTTCQSIAFPSKTSASIGSLCADARMYGVLPWNAFPGKVCGSNLLSICKTAEFQMTFHLFIAAFVGAAATLVSLLTFMIAATYNFAVLKLMGRGTKF

SEQ ID NO: 896916 - protein, 245 aa, Homo sapiens
MGLLECCARCLVGAPFASLVATGLCFFGVALFCGCGHEALTGTEKLIETYFSKNYQDYEYLINVIHAFQYVIYGTASFFFLYGALLLAEGFYTTGAVRQIFGDYKTTICGKGLSATVTGGQKGRGSRGQHQAHSLERVCHCLGKWLGHPDKFVGITYALTVVWLLVFACSAVPVYIYFNTWTTCQSIAFPSKTSASIGSLCADARMYGVLPWNAFPGKVCGSNLLSICKTAEAHFMGYYPFSHRR

SEQ ID NO: 896917 - protein, 277 aa, Homo sapiens; identical to SEQ ID NO: 896903

SEQ ID NO: 896918 - protein, 160 aa, Homo sapiens
MGLLECCARCLVGAPFASLVATGLCFFGVALFCGCGHEALTGTEKLIETYFSKNYQDYEYLINVIHAFQYVIYGTASFFFLYGALLLAEGFYTTGAVRQIFGDYKTTICGKGLSATVTGGQKGRGSRGQHQAHSLERVCHCLGKWLGHPDKVIILRILWQ

SEQ ID NO: 896919 - protein, 277 aa, Homo sapiens; identical to SEQ ID NO: 896903

SEQ ID NO: 896920 - protein, 277 aa, Homo sapiens; identical to SEQ ID NO: 896903

SEQ ID NO: 896921 - protein, 277 aa, Homo sapiens; identical to SEQ ID NO: 896903

SEQ ID NO: 896922 - protein, 312 aa, Homo sapiens
ETQPKACREQNMEGDFSVCRNCKRHVVSANFTLHEAYCLRFLVLCPECEEPVPKETMEEHCKLEHQQVGCTMCQQSMQKSSLEFHKANECQERPVECKFCKLDMQLSKLELHESYCGSRTELCQGCGQFIMHRMLAQHRDVCRSEQAQLGKGERISAPEREIYCHYCNQMIPENKYFHHMGKCCPDSEFKKHFPVGNPEILPSSLPSQAAENQTSTMEKDVRPKTRSINRFPLHSESSSKKAPRSKNKTLDPLLMSEPKPRTSSPRGDKAAYDILRRCSQCGILLPLPILNQHQEKCRWLASSKGKQVRNFS

SEQ ID NO: 896923 - protein, 104 aa, Homo sapiens [sequence omitted]

SEQ ID NO: 896924 - protein, 104 aa, Homo sapiens [sequence omitted]

SEQ ID NO: 896925 - protein, 104 aa, Homo sapiens [sequence omitted]

SEQ ID NO: 896926 - protein, 243 aa, Homo sapiens [sequence omitted]

SEQ ID NO: 896927 - protein, 293 aa, Homo sapiens
ETQPKACREQNMEGDFSVCRNCKRHVVSANFTLHEAYCLRFLVLCPECEEPVPKETMEEHCKLEHQQANECQERPVECKFCKLDMQLSKLELHESYCGSRTELCQGCGQFIMHRMLAQHRDVCRSEQAQLGKGERISAPEREIYCHYCNQMIPENKYFHHMGKCCPDSEFKKHFPVGNPEILPSSLPSQAAENQTSTMEKDVRPKTRSINRFPLHSESSSKKAPRSKNKTLDPLLMSEPKPRTSSPRGDKAAYDILRRCSQCGILLPLPILNQHQEKCRWLASSKGKQVRNFS

SEQ ID NO: 896928 - protein, 143 aa, Homo sapiens
MIPENKYFHHMGKCCPDSEFKKHFPVGNPEILPSSLPSQAAENQTSTMEKDVRPKTRSINRFPLHSESSSKKAPRSKNKTLDPLLMSEPKPRTSSPRGDKAAYDILRRCSQCGILLPLPILNQHQEKCRWLASSKGKQVRNFS

SEQ ID NO: 896929 - protein, 121 aa, Homo sapiens
ETQPKACREQNMEGDFSVCRNCKRHVVSANFTLHEAYCLRFLVLCPECEEPVPKETMEEHCKLEHQQAYGSGIGKRFWFQERLAVLLRSVKRGCESIPPGAPDLSLWRYSSSGSRCQLRLV

SEQ ID NO: 896930 - protein, 918 aa, Homo sapiens
LGRSRSRHPPGARVLLALPGIPMAAAGPRRSVRGAVCLHLLLTLVIFSRDGEACKKVILNVPSKLEADKIIGRVNLEECFRSADLIRSSDPDFRVLNDGSVYTARAVALSDKKRSFTIWLSDKRKQTQKEVTVLLEHQKKVSKTRHTRETVLRRAKRRWAPIPCSMQENSLGPFPLFLQQVESDAAQNYTVFYSISGRGVDKEPLNLFYIERDTGNLFCTRPVDREEYDVFDLIAYASTADGYSADLPLPLPIRVEDENDNHPVFTEAIYNFEVLESSRPGTTVGVVCATDRDEPDTMHTRLKYSILQQTPRSPGLFSVHPSTGVITTVSHYLDREVVDKYSLIMKVQDMDGQFFGLIGTSTCIITVTDSNDNAPTFRQNAYEAFVEENAFNVEILRIPIEDKDLINTANWRVNFTILKGNENGHFKISTDKETNEGVLSVVKPLNYEENRQVNLEIGVNNEAPFARDIPRVTALNRALVTVHVRDLDEGPECTPAAQYVRIKENLAVGSKINGYKAYDPENRNGNGLRYKKLHDPKGWITIDEISGSIITSKILDREVETPKNELYNITVLAIDKDDRSCTGTLAVNIEDVNDNPPEILQEYVVICKPKMGYTDILAVDPDEPVHGAPFYFSLPNTSPEISRLWSLTKVNDTAARLSYQKNAGFQEYTIPITVKDRAGQAATKLLRVNLCECTHPTQCRATSRSTGVILGKWAILAILLGIALLFSVLLTLVCGVFGATKGKRFPEDLAQQNLIISNTEAPGDDRVCSANGFMTQTTNNSSQGFCGTMGSGMKNGGQETIEMMKGGNQTLESCRGAGHHHTLDSCRGGHTEVDNCRYTYSEWHSFTQPRLGEKLHRCNQNEDRMPSQDYVLTYNYEGRGSPAGSVGCCSEKQEEDGLDFLNNLEPKFITLAEACTKR

SEQ ID NO: 896931 - protein, 856 aa, Homo sapiens
LGRSRSRHPPGARVLLALPGIPMAAAGPRRSVRGAVCLHLLLTLVIFSRDGEACKKVILNVPSKLEADKIIGRVNLEECFRSADLIRSSDPDFRVLNDGSVYTARAVALSDKKRSFTIWLSDKRKQTQKEVTVLLEHQKKVSKTRHTRETVLRRAKRRWAPIPCSMQENSLGPFPLFLQQVESDAAQNYTVFYSISGRGVDKEPLNLFYIERDTGNLFCTRPVDREEYDVFDLIAYASTADGYSADLPLPLPIRVEDENDNHPVFTEAIYNFEVLESSRPGTTVGVVCATDRDEPDTMHTRLKYSILQQTPRSPGLFSVHPSTGVITTVSHYLDREVVDKYSLIMKVQDMDGQFFGLIGTSTCIITVTDSNDNAPTFRQNAYEAFVEENAFNVEILRIPIEDKDLINTANWRVNFTILKGNENGHFKISTDKETNEGVLSVVKPLNYEENRQVNLEIGVNNEAPFARDIPRVTALNRALVTVHVRDLDEGPECTPAAQYVRIKENLAVGSKINGYKAYDPENRNGNGLRYKKLHDPKGWITIDEISGSIITSKILDREVETPKNELYNITVLAIDKDDRSCTGTLAVNIEDVNDNPPEILQEYVVICKPKMGYTDILAVDPDEPVHGAPFYFSLPNTSPEISRLWSLTKVNDTAARLSYQKNAGFQEYTIPITVKDRAGQAATKLLRVNLCECTHPTQCRATSRSTGVILGKWAILAILLGIALLFSVLLTLVCGVFGATKGKRFPEDLAQQNLIISNTEAPGDDRVCSANGFMTQTTNNSSQGFCGTMGSGMKNGGQETIEMMKGGNQTLESCRGAGHHHTLDSCRGGHTEVDNCRYTYSEWHSFTQPRLGEESI

SEQ ID NO: 896932 - protein, 918 aa, Homo sapiens; identical to SEQ ID NO: 896930

SEQ ID NO: 896933 - protein, 918 aa, Homo sapiens; identical to SEQ ID NO: 896930

SEQ ID NO: 896934 - protein, 145 aa, Homo sapiens
MTQTTNNSSQGFCGTMGSGMKNGGQETIEMMKGGNQTLESCRGAGHHHTLDSCRGGHTEVDNCRYTYSEWHSFTQPRLGEKLHRCNQNEDRMPSQDYVLTYNYEGRGSPAGSVGCCSEKQEEDGLDFLNNLEPKFITLAEACTKR

SEQ ID NO: 896935 - protein, 90 aa, Homo sapiens
KVEGTKSKGALAPRRELRYDVGCMSKLHRCNQNEDRMPSQDYVLTYNYEGRGSPAGSVGCCSEKQEEDGLDFLNNLEPKFITLAEACTKR

SEQ ID NO: 896936 - protein, 81 aa, Homo sapiens
  misc_feature (2)..(2): Xaa can be any naturally occurring amino acid
  misc_feature (4)..(4): Xaa can be any naturally occurring amino acid
  misc_feature (14)..(14): Xaa can be any naturally occurring amino acid
  misc_feature (16)..(16): Xaa can be any naturally occurring amino acid
RXMXRLMNPGAVFXKXAVYGRFRRIWVGVKATSSASYFFLGLALPFPFSGQWQLPFESGEGSANLFSMAHLIWSEKSRRQS

SEQ ID NO: 896937 - protein, 270 aa, Homo sapiens
QHKRLDYEQCKVLASRSGEYTIPITVKDRAGQAATKLLRVNLCECTHPTQCRATSRSTGVILGKWAILAILLGIALLFSVLLTLVCGVFGATKGKRFPEDLAQQNLIISNTEAPGDDRVCSANGFMTQTTNNSSQGFCGTMGSGMKNGGQETIEMMKGGNQTLESCRGAGHHHTLDSCRGGHTEVDNCRYTYSEWHSFTQPRLGEKLHRCNQNEDRMPSQDYVLTYNYEGRGSPAGSVGCCSEKQEEDGLDFLNNLEPKFITLAEACTKR

SEQ ID NO: 896938 - protein, 145 aa, Homo sapiens; identical to SEQ ID NO: 896934

SEQ ID NO: 896939 - protein, 145 aa, Homo sapiens; identical to SEQ ID NO: 896934

SEQ ID NO: 896940 - protein, 145 aa, Homo sapiens; identical to SEQ ID NO: 896934

SEQ ID NO: 896941 - protein, 295 aa, Homo sapiens
RLRDPWEPRCIVGERKMAAPVRRTLLGVAGGWRRFERLWAGSLSSRSLALAAAPSSNGSPWRLLGALCLQRPPVVSKPLTPLQEEMASLLQQIEIERSLYSDHELRALDENQRLAKKKADLHDEEDEQDILLAQDLEDMWEQKFLQFKLGARITEADEKNDRTSLNRKLDRNLVLLVREKFGDQDVWILPQAEWQPGETLRGTAERTLATLSENNMEAKFLGNAPCGHYTFKFPQAMRTESNLGAKVFFFKALLLTGDFSQAGNKGHHVWVTKDELGDYLKPKYLAQVRRFVSDL

SEQ ID NO: 896942 - protein, 217 aa, Homo sapiens
ALEDLGVPLSLLQQIEIERSLYSDHELRALDENQRLAKKKADLHDEEDEQDILLAQDLEDMWEQKFLQFKLGARITEADEKNDRTSLNRKLDRNLVLLVREKFGDQDVWILPQAEWQPGETLRGTAERTLATLSENNMEAKFLGNAPCGHYTFKFPQAMRTESNLGAKVFFFKALLLTGDFSQAGNKGHHVWVTKDELGDYLKPKYLAQVRRFVSDL

SEQ ID NO: 896943 - protein, 222 aa, Homo sapiens
ALEDLGVPLSLLQQIEIERSLYSDHELRALDENQRLAKKKADLHDEEDEQDILLAQDLEDMWEQKFLQFKLGARITEADEKNDRTSLNRKLDRNLVLLVREKFGDQDVWILPQAEWQPGETLRGTAERTLATLSENNMEAKFLGNAPCGHYTFKFPQAMRTESNLGAKVFFFKALLLTGDFSQAGTKGNTGVSLCLLPFTKSVALPPKFLSPLPLLRRLPLS

SEQ ID NO: 896944 - protein, 295 aa, Homo sapiens; identical to SEQ ID NO: 896941

SEQ ID NO: 896945 - protein, 295 aa, Homo sapiens; identical to SEQ ID NO: 896941

SEQ ID NO: 896946 - protein, 185 aa, Homo sapiens
RLRDPWEPRCIVGERKMAAPVRRTLLGVAGGWRRFERLWAGSLSSRSLALAAAPSSNGSPWRLLGALCLQRPPVVSKPLTPLQEEMASLLQQIEIERSLYSDHELRALDENQRLAKKKADLHDEEDEQDILLAQDLEDMWEQKFLQFKLGARITGCDPFRPARRKGKGVFGFPNKRQLLGPCFVF

SEQ ID NO: 896947 - protein, 167 aa, Homo sapiens
RLRDPWEPRCIVGERKMAAPVRRTLLGVAGGWRRFERLWAGSLSSRSLALAAAPSSNGSPWRLLGALCLQRPPVVSKPLTPLQEEMASLLQQIEIERSLYSDHELRALDEDILLAQDLEDMWEQKFLQFKLGARITGCDPFRPARRKGKGVFGFPNKRQLLGPCFVF

SEQ ID NO: 896948 - protein, 233 aa, Homo sapiens
AAEGSLGAAVHCGRTKDGGARKADAVRGGGGLAAVREALGRQSKLSQPGSCSRTLKQRIPMALVGRVVPAAATCSLQAVDPIAGRDGVSTAAEADEKNDRTSLNRKLDRNLVLLVREKFGDQDVWILPQAEWQPGETLRGTAERTLATLSENNMEAKFLGNAPCGHYTFKFPQAMRTESNLGAKVFFFKALLLTGDFSQAGNKGHHVWVTKDELGDYLKPKYLAQVRRFVSDL

SEQ ID NO: 896949 - protein, 295 aa, Homo sapiens; identical to SEQ ID NO: 896941

SEQ ID NO: 896950 - protein, 1048 aa, Homo sapiens
MQSKVTGNMPTQSLLMYMDGPEVIGSSLGSPMEMEDALSMKGTAVVPFRATQEKNVIQIEGYMPLDCMFCSQTFTHSEDLNKHVLMQHRPTLCEPAVLRVEAEYLSPLDKSQVRTEPPKEKNCKENEFSCEVCGQTFRVAFDVEIHMRTHKDSFTYGCNMCGRRFKEPWFLKNHMRTHNGKSGARSKLQQGLESSPATINEVVQVHAAESISSPYKICMVCGFLFPNKESLIEHRKVHTKKTAFGTSSAQTDSPQGGMPSSREDFLQLFNLRPKSHPETGKKPVRCIPQLDPFTTFQAWQLATKGKVAICQEVKESGQEGSTDNDDSSSEKELGETNKGSCAGLSQEKEKCKHSHGEAPSVDADPKLPSSKEKPTHCSECGKAFRTYHQLVLHSRVHKKDRRAGAESPTMSVDGRQPGTCSPDLAAPLDENGAVDRGEGGSEDGSEDGLPEGIHLDKNDDGGKIKHLTSSRECSYCGKFFRSNYYLNIHLRTHTGEKPYKCEFCEYAAAQKTSLRYHLERHHKEKQTDVAAEVKNDGKNQDTEDALLTADSAQTKNLKRFFDGAKDVTGSPPAKQLKEMPSVFQNVLGSAVLSPAHKDTQDFHKNAADDSADKVNKNPTPAYLDLLKKRSAVETQANNLICRTKADVTPPPDGSTTHNLEVSPKEKQTETAADCRYRPSVDCHEKPLNLSVGALHNCPAISLSKSLIPSITCPFCTFKTFYPEVLMMHQRLEHKYNPDVHKNCRNKSLLRSRRTGCPPALLGKDVPPLSSFCKPKPKSAFPAQSKSLPSAKGKQSPPGPGKAPLTSGIDSSTLAPSNLKSHRPQQNVGVQGAATRQQQSEMFPKTSVSPAPDKTKRPETKLKPLPVAPSQPTLGSSNINGSIDYPAKNDSPWAPPGRDYFCNRSASNTAAEFGEPLPKRLKSSVVALDVDQPGANYRRGYDLPKYHMVRGITSLLPQDCVYPSQALPPKPRFLSSSEVDSPNVLTVQKPYGGSGPLYTCVPAGSPASSSTLEGKRPVSYQHLSNSMAQKRNYENFIGNAHYRPNDKKT

SEQ ID NO: 896951 - protein, 1061 aa, Homo sapiens
MQSKVTGNMPTQSLLMYMDGPEVIGSSLGSPMEMEDALSMKGTAVVPFRATQEKNVIQIEGYMPLDCMFCSQTFTHSEDLNKHVLMQHRPTLCEPAVLRVEAEYLSPLDKSQVRTEPPKEKNCKENEFSCEVCGQTFRVAFDVEIHMRTHKDSFTYGCNMCGRRFKEPWFLKNHMRTHNGKSGARSKLQQGLESSPATINEVVQVHAAESISSPYKICMVCGFLFPNKESLIEHRKVHTKKTAFGTSSAQTDSPQGGMPSSREDFLQLFNLRPKSHPETGKKPVRCIPQLDPFTTFQAWQLATKGKVAICQEVKESGQEGSTDNDDSSSEKELGETNKGSCAGLSQEKEKCKHSHGEAPSVDADPKLPSSKEKPTHCSECGKAFRTYHQLVLHSRVHKKDRRAGAESPTMSVDGRQPGTCSPDLAAPLDENGAVDRGEGGSEDGSEDGLPEGIHLDKNDDGGKIKHLTSSRECSYCGKFFRSNYYLNIHLRTHTGEKPYKCEFCEYAAAQKTSLRYHLERHHKEKQTDVAAEVKNDGKNQDTEDALLTADSAQTKNLKRFFDGAKDVTGSPPAKQLKEMPSVFQNVLGSAVLSPAHKDTQDFHKNAADDSADKVNKNPTPAYLDLLKKRSAVETQANNLICRTKADVTPPPDGSTTHNLEVSPKEKQTETAADCRYRPSVDCHEKPLNLSVGALHNCPAISLSKSLIPSITCPFCTFKTFYPEVLMMHQRLEHKYNPDVHKNCRNKSLLRSRRTGCPPALLGKDVPPLSSFCKPKPKSAFPAQSKSLPSAKGKQSPPGPGKAPLTSGIDSSTLAPSNLKSHRPQQNVGVQGAATRQQQSEMFPKTSVSPAPDKTKRPETKLKPLPVAPSQPTLGSSNINGSIDYPAKNDSPWAPPGRDYFCNRSASNTAAEFGEPLPKRLKSSVVALDVDQPGANYRRGYDLPKYHMVRGITSLLPQDCVYPSQALPPKPRFLSSSEVDSPNVLTVQKPYGGSGPLYTCVPAGSPASSSTLEGLGGCQCLLPMKLNFTSSFEKRMVKATEISCDCTVHKTYEESARNTTVV

SEQ ID NO: 896952 - protein, 131 aa, Homo sapiens
MGSKFRLHKKIKPATKKRKEGPQMISLPFSGSLGFASLSVYMAFCPPSEPLLSLCQHAQAKIDVIKLMKLKRIRLIRLRGKKGLGGCQCLLPMKLNFTSSFEKRMVKATEISCDCTVHKTYEESARNTTVV

SEQ ID NO: 896953 - protein, 1048 aa, Homo sapiens; identical to SEQ ID NO: 896950

SEQ ID NO: 896954 - protein, 1015 aa, Homo sapiens [sequence omitted]

SEQ ID NO: 896955 - protein, 756 aa, Homo sapiens
AAAAAAKNCSFHLFSPGRTGAAAANPGRGQHAASRRAPPPGSGPDTRGERENGSGGGGGGGGGRMQGKKPGGSSGGGRSGELQGDEAQRNKKKKKKVSCFSNIKIFLVSECALMLAQGTVGAYLVSVLTTLERRFNLQSADVGVIASSFEIGNLALILFVSYFGARGHRPRLIGCGGIVMALGALLSALPEFLTHQYKYEAGEIRWGAEGRDVCAANGSGGDEGPDPDLICRNRTATNMMYLLLIGAQVLLGIGATPVQPLGVSYIDDHVRRKDSSLYIGILFTMLVFGPACGFILGSFCTKIYVDAVFIDTSNLDITPDDPRWIGAWWGGFLLCGALLFFSSLLMFGFPQSLPPHSDPAMESEQAMLSEREYERPKPSNGVLRHPLEPDSSASCFQQLRVIPKVTKHLLSNPVFTCIILAACMEIAVVAGFAAFLGKYLEQQFNLTTSSANQLLGMTAIPCACLGIFLGGLLVKKLSLSALGAIRMAMLVNLVSTACYVSFLFLGCDTGPVAGVTVPYGNSTAPGSALDPYSPCNNNCECQTDSFTPVCGADGITYLSACFAGCNSTNLTGCACLTTVPAENATVVPGKCPSPGCQEAFLTFLCVMCICSLIGAMAQTPSVIILIRTVSPELKSYALGVLFLLLRLLGFIPPPLIFGAGIDSTCLFWSTFCGEQGACVLYDNVVYRYLYVSIAIALKSFAFILYTTTWQCLRKNYKRYIKNHEGGLSTSTEYQDIETEKTCPESHSPSEDSFVRS

SEQ ID NO: 896956 - protein, 774 aa, Homo sapiens
AAAAAAKNCSFHLFSPGRTGAAAANPGRGQHAASRRAPPPGSGPDTRGERENGSGGGGGGGGGRMQGKKPGGSSGGGRSGELQGDEAQRNKKKKKKVSCFSNIKIFLVSECALMLAQGTVGAYLVSVLTTLERRFNLQSADVGVIASSFEIGNLALILFVSYFGARGHRPRLIGCGGIVMALGALLSALPEFLTHQYKYEAGEIRWGAEGRDVCAANGSGGDEGPDPDLICRNRTATNMMYLLLIGAQVLLGIGATPVQPLGVSYIDDHVRRKDSSLYIGILFTMLVFGPACGFILGSFCTKIYVDAVFIDTSNLDITPDDPRWIGAWWGGFLLCGALLFFSSLLMFGFPQSLPPHSDPAMESEQAMLSEREYERPKPSNGVLRHPLEPDSSASCFQQLRVIPKVTKHLLSNPVFTCIILAACMEIAVVAGFAAFLGKYLEQQFNLTTSSANQLLGMTAIPCACLGIFLGGLLVKKLSLSALGAIRMAMLVNLVSTACYVSFLFLGCDTGPVAGVTVPYGNSTAPGSALDPYSPCNNNCECQTDSFTPVCGADGITYLSACFAGCNSTNLTGCACLTTVPAENATVVPGKCPSPGCQEAFLTFLCVMCICSLIGAMAQTPSVIILIRTVSPELKSYALGVLFLLLRLLGFIPPPLIFGAGIDSTCLFWSTFCGEQGACVLYDNVVYRYLYVSIAIALKSFAFILYTTTWQCLRKNYKRYIKNHEGGLSTSEFFASTLTLDNLGRDPVPANQTHRTKFIYNLEDHEWCENMESVL

SEQ ID NO: 896957 - protein, 490 aa, Homo sapiens [sequence omitted]

SEQ ID NO: 896958 - protein, 815 aa, Homo sapiens
AAAAAAKNCSFHLFSPGRTGAAAANPGRGQHAASRRAPPPGSGPDTRGERENGSGGGGGGGGGRMQGKKPGGSSGGGRSGELQGDEAQRNKKKKKKVSCFSNIKIFLVSECALMLAQGTVGAYLVSVLTTLERRFNLQSADVGVIASSFEIGNLALILFVSYFGARGHRPRLIGCGGIVMALGALLSALPEFLTHQYKYEAGEIRWGAEGRDVCAANGSGGDEGPDPDLICRNRTATNMMYLLLIGAQVLLGIGATPVQPLGVSYIDDHVRRKDSSLYIGILFTMLVFGPACGFILGSFCTKIYVDAVFIDTSNLDITPDDPRWIGAWWGGFLLCGALLFFSSLLMFGFPQSLPPHSDPAMESEQAMLSEREYERPKPSNGVLRHPLEPDSSASCFQQLRVIPKVTKHLLSNPVFTCIILAACMEIAVVAGFAAFLGKYLEQQFNLTTSSANQLLGMTAIPCACLGIFLGGLLVKKLSLSALGAIRMAMLVNLVSTACYVSFLFLGCDTGPVAGVTVPYGNSTAPGSALDPYSPCNNNCECQTDSFTPVCGADGITYLSACFAGCNSTNLTGCACLTTVPAENATVVPGKCPSPGCQEAFLTFLCVMCICSLIGAMAQTPSVIILIRTVSPELKSYALGVLFLLLRLLGPSKINHHYFNVKAGKDIRSCDIINFFAGLARAMGIQWDITGFIPPPLIFGAGIDSTCLFWSTFCGEQGACVLYDNVVYRYLYVSIAIALKSFAFILYTTTWQCLRKNYKRYIKNHEGGLSTSEFFASTLTLDNLGRDPVPANQTHRTKFIYNLEDHEWCENMESVL

SEQ ID NO: 896959 - protein, 761 aa, Homo sapiens
AAAAAAKNCSFHLFSPGRTGAAAANPGRGQHAASRRAPPPGSGPDTRGERENGSGGGGGGGGGRMQGKKPGGSSGGGRSGELQGDEAQRNKKKKKKVSCFSNIKIFLVSECALMLAQGTVGAYLVSVLTTLERRFNLQSADVGVIASSFEIGNLALILFVSYFGARGHRPRLIGCGGIVMALGALLSALPEFLTHQYKYEAGEIRWGAEGRDVCAANGSGGDEGPDPDLICRNRTATNMMYLLLIGAQVLLGIGATPVQPLGVSYIDDHVRRKDSSLYIGILFTMLVFGPACGFILGSFCTKIYVDAVFIDTSNLDITPDDPRWIGAWWGGFLLCGALLFFSSLLMFGFPQSLPPHSDPAMESEQAMLSEREYERPKPSNGVLRHPLEPDSSASCFQQLRVIPKVTKHLLSNPVFTCIILAACMEIAVVAGFAAFLGKYLEQQFNLTTSSANQLLGMTAIPCACLGIFLGGLLVKKLSLSALGAIRMAMLVNLVSTACYVSFLFLGCDTGPVAGVTVPYGNSTAPGSALDPYSPCNNNCECQTDSFTPVCGADGITYLSACFAGCNSTNLTGCACLTTVPAENATVVPGKCPSPGCQEAFLTFLCVMCICSLIGAMAQTPSVIILIRTVSPELKSYALGVLFLLLRLLGFIPPPLIFGAGIDSTCLFWSTFCGEQGACVLYDNVVYRYLYVSIAIALKSFAFILYTTTWQCLRKNYKRYIKNHEGGLSTTSEPDRIQNKERMTSCGRVLEATRAAGPQSLL

SEQ ID NO: 896960 - protein, 802 aa, Homo sapiens
AAAAAAKNCSFHLFSPGRTGAAAANPGRGQHAASRRAPPPGSGPDTRGERENGSGGGGGGGGGRMQGKKPGGSSGGGRSGELQGDEAQRNKKKKKKVSCFSNIKIFLVSECALMLAQGTVGAYLVSVLTTLERRFNLQSADVGVIASSFEIGNLALILFVSYFGARGHRPRLIGCGGIVMALGALLSALPEFLTHQYKYEAGEIRWGAEGRDVCAANGSGGDEGPDPDLICRNRTATNMMYLLLIGAQVLLGIGATPVQPLGVSYIDDHVRRKDSSLYIGILFTMLVFGPACGFILGSFCTKIYVDAVFIDTSNLDITPDDPRWIGAWWGGFLLCGALLFFSSLLMFGFPQSLPPHSDPAMESEQAMLSEREYERPKPSNGVLRHPLEPDSSASCFQQLRVIPKVTKHLLSNPVFTCIILAACMEIAVVAGFAAFLGKYLEQQFNLTTSSANQLLGMTAIPCACLGIFLGGLLVKKLSLSALGAIRMAMLVNLVSTACYVSFLFLGCDTGPVAGVTVPYGNSTAPGSALDPYSPCNNNCECQTDSFTPVCGADGITYLSACFAGCNSTNLTGCACLTTVPAENATVVPGKCPSPGCQEAFLTFLCVMCICSLIGAMAQTPSVIILIRTVSPELKSYALGVLFLLLRLLGPSKINHHYFNVKAGKDIRSCDIINFFAGLARAMGIQWDITGFIPPPLIFGAGIDSTCLFWSTFCGEQGACVLYDNVVYRYLYVSIAIALKSFAFILYTTTWQCLRKNYKRYIKNHEGGLSTTSEPDRIQNKERMTSCGRVLEATRAAGPQSLL

SEQ ID NO: 896961 - protein, 675 aa, Homo sapiens
AAAAAAKNCSFHLFSPGRTGAAAANPGRGQHAASRRAPPPGSGPDTRGERENGSGGGGGGGGGRMQGKKPGGSSGGGRSGELQGDEAQRNKKKKKKVSCFSNIKIFLVSECALMLAQGTVGAYLVSVLTTLERRFNLQSADVGVIASSFEIGNLALILFVSYFGARGHRPRLIGCGGIVMALGALLSALPEFLTHQYKYEAGEIRWGAEGRDVCAANGSGGDEGPDPDLICRNRTATNMMYLLLIGAQVLLGIGATPVQPLGVSYIDDHVRRKDSSLYIGILFTMLVFGPACGFILGSFCTKIYVDAVFIDTSNLDITPDDPRWIGAWWGGFLLCGALLFFSSLLMFGFPQSLPPHSDPAMESEQAMLSEREYERPKPSNGVLRHPLEPDSSASCFQQLRVIPKVTKHLLSNPVFTCIILAACMEIAVVAGFAAFLGKYLEQQFNLTTSSANQLLGMTAIPCACLGIFLGGLLVKKLSLSALGAIRMAMLVNLVSTACYVSFLFLGCDTGPVAGVTVPYGNSTAPGSALDPYSPCNNNCECQTDSFTPVCGADGITYLSACFAGCNSTNLTGCACLTTVPAENATVVPGKCPSPGCQEAFLTFLCVMCICSLIGAMAQTPSVIILIRTVSPELKSYALGVLFLLLRLLGTEYQDIETEKTCPESHSPSEDSFVRS

SEQ ID NO: 896962 - protein, 564 aa, Homo sapiens
MSAGSATHPGAGGRRSKWDQPAPAPLLFLPPAAPGGEVTSSGGSPGGTTAAPSGALDAAAAVAAKINAMLMAKGKLKPTQNASEKLQAPGKGLTSNKSKDDLVVAEVEINDVPLTCRNLLTRGQTQDEISRLSGAAVSTRGRFMTTEEKAKVGPGDRPLYLHVQGQTRELVDRAVNRIKEIITNGVVKAATGTSPTFNGATVTVYHQPAPIAQLSPAVSQKPPFQSGMHYVQDKLFVGLEHAVPTFNVKEKVEGPGCSYLQHIQIETGAKVFLRGKGSGCIEPASGREAFEPMYIYISHPKPEGLAAAKKLCENLLQTVHAEYSRFVNQINTAVPLPGYTQPSAISSVPPQPPYYPSNGYQSGYPVVPPPQQPVQPPYGVPSIVPPAVSLAPGVLPALPTGVPPVPTQYPITQVQPPASTGQSPMGGPFIPAAPVKTALPAGPQPQPQPQPPLPSQPQAQKRRFTEELPDERESGLLGYQHGPIHMTNLGTGFSSQNEIEGAGSKPASSSGKERERDRQLMPPPAFPVTGIKTESDERNGSGTLTGSHGECDIAGGTGEWLRLV

SEQ ID NO: 896963 - protein, 384 aa, Homo sapiens
MSAGSATHPGAGGRRSKWDQPAPAPLLFLPPAAPGGEVTSSGGSPGGTTAAPSGALDAAAAVAAKINAMLMAKGKLKPTQNASEKLQAPGKGLTSNKSKDDLVVAEVEINDVPLTCRNLLTRGQTQDEISRLSGAAVSTRGRFMTTEEKAKVGPGDRPLYLHVQGQTRELVDRAVNRIKEIITNGVVKAATGTSPTFNGATVTVYHQPAPIAQLSPAVSQKPPFQSGMHYVQDKLFVGLEHAVPTFNVKEKVEGPGCSYLQHIQIETGAKVFLRGKGSGCIEPASGREAFEPMYIYISHPKPEGLAAAKKLCENLLQTVHAEYSRFVNQINTAVPLPAASSTSLRSTKHSATSCFISTWSLAGITYWSPTCANTIPDNTSAASS

SEQ ID NO: 896964 - protein, 306 aa, Homo sapiens
MSAGSATHPGAGGRRSKWDQPAPAPLLFLPPAAPGGEVTSSGGSPGGTTAAPSGALDAAAAVAAKINAMLMAKGKLKPTQNASEKLQAPGKGLTSNKSKDDLVVAEVEINDVPLTCRNLLTRGQTQDEISRLSGAAVSTRGRFMTTEEKAKVGPGDRPLYLHVQGQTRELVDRAVNRIKEIITNGVVKAATGTSPTFNGATVTVYHQPAPIAQLSPAVSQKPPFQSGMHYVQDKLFVGLEHAVPTFNVKEKVEGPGCSYLQHIQIETGAKVFLRGKGSGCIEPASGREAFEPMYIYIRFMLNTLDL

SEQ ID NO: 896965 - protein, 384 aa, Homo sapiens; identical to SEQ ID NO: 896963

SEQ ID NO: 896966 - protein, 384 aa, Homo sapiens; identical to SEQ ID NO: 896963

SEQ ID NO: 896967 - protein, 384 aa, Homo sapiens; identical to SEQ ID NO: 896963

SEQ ID NO: 896968 - protein, 384 aa, Homo sapiens; identical to SEQ ID NO: 896963

SEQ ID NO: 896969 - protein, 384 aa, Homo sapiens; identical to SEQ ID NO: 896963

SEQ ID NO: 896970 - protein, 292 aa, Homo sapiens
RAAGIGTRSATHPGAGGRRSKWDQPAPAPLLFLPPAAPGGEVTSSGGSPGGTTAAPSGALDAAAAVAAKINAMLMAKGKLKPTQNASEKLQAPGKGLTSNKSKDDLVVAEVEINDVPLTCRNLLTRGQTQDEISRLSGAAVSTRGRFMTTEEKAKVGPGDRPLYLHVQGQTRELVDRAVNRIKEIITNGVVHQPAPIAQLSPAVSQKPPFQSGMHYVQDKLFVGLEHAVPTFNVKEKVEGPGCSYLQHIQIETGAKVFLRGKGSGCIEPASGREAFEPMYIYIRFMLNTLDL

SEQ ID NO: 896971 - protein, 166 aa, Homo sapiens
MSAGSATHPGAGGRRSKWDQPAPAPLLFLPPAAPGGEVTSSGGSPGGTTAAPSGALDAAAAVAAKINAMLMAKGKLKPTQNASEKLQAPGKGLTSNKSKDDLVVAEVEINDVPLTCRNLLTRGQTQDEISRLSGAAVSTRGRFMTTEEKAKVGPGCIMFKINYLWV

SEQ ID NO: 896972 - protein, 370 aa, Homo sapiens
MSAGSATHPGAGGRRSKWDQPAPAPLLFLPPAAPGGEVTSSGGSPGGTTAAPSGALDAAAAVAAKINAMLMAKGKLKPTQNASEKLQAPGKGLTSNKSKDDLVVAEVEINDVPLTCRNLLTRGQTQDEISRLSGAAVSTRGRFMTTEEKAKVGPGHPKPEGLAAAKKLCENLLQTVHAEYSRFVNQINTAVPLPGYTQPSAISSVPPQPPYYPSNGYQSGYPVVPPPQQPVQPPYGVPSIVPPAVSLAPGVLPALPTGVPPVPTQYPITQVQPPASTGQSPMGGPFIPAAPSQVSPRHRRDDSQRSYQMNGNLDCLDTRLNKIPCFPIFTLFFYYILPLKKINSHHSPSTRISAFWNSFWLGFLSYSTDS

SEQ ID NO: 896973 - protein, 384 aa, Homo sapiens; identical to SEQ ID NO: 896963

SEQ ID NO: 896974 - protein, 384 aa, Homo sapiens; identical to SEQ ID NO: 896963

SEQ ID NO: 896975 - protein, 384 aa, Homo sapiens; identical to SEQ ID NO: 896963

SEQ ID NO: 896976 - protein, 105 aa, Homo sapiens
MRLRLKKKFLMALVLELCNQTLVNAQLRLSHVNLFPPLFVHAEYSRFVNQINTAVPLPAASSTSLRSTKHSATSCFISTWSLAGITYWSPTCANTIPDNTSAASS

SEQ ID NO: 896977 - protein, 174 aa, Homo sapiens [sequence omitted]

SEQ ID NO: 896978 - protein, 155 aa, Homo sapiens
CAAPRTGNSAGSAMAAAAEGVLATRSDEPARDDAAVETAEEAKEPAEADITELCRDMFSKMATYLTGELTATSEDYKLLENMNKLTSLKYLEMKDIAINISRNLKDLNQKYAGLQPYLDQINVIEEQVAALEQAAYKLDAYSKKLEAKYKKLEKR

SEQ ID NO: 896979 - protein, 126 aa, Homo sapiens
MFRYGEYLCPPIMFAPPPRMIMGSSVPPQNFFSPVCPLFAQLRRRCVFIIAPPLAALWGFYYTPPSFWGGPLVSTKNGGPAPKLGPPRGGIFLARGPPSFFFFFFFFFFFFFVSLFFFFFFFFMVF

SEQ ID NO: 896980 - protein, 155 aa, Homo sapiens; identical to SEQ ID NO: 896978

SEQ ID NO: 896981 - protein, 155 aa, Homo sapiens; identical to SEQ ID NO: 896978

SEQ ID NO: 896982 - protein, 155 aa, Homo sapiens; identical to SEQ ID NO: 896978

SEQ ID NO: 896983 - protein, 74 aa, Homo sapiens
CAAPRPGNSAGSAMAAAAEGVLATRSDEPARDDAAVETAEEAKEPAEADITELCRDMFSKMATYLTGELTELRD

SEQ ID NO: 896984 - protein, 170 aa, Homo sapiens
CAAPRTGNSAGSAMAAAAEGVLATRSDEPARDDAAVETAEEAKEPAEADITELCRDMFSKMATYLTGELTATSEDYKLLENMNKLTSLKYLEMKDIAINISRNLKDLNQKYAGLQPYLDQINVIEEQVAALEQAAYKLDAYSKKLGNRFYFCFDVIKTASCQHILSKHNS

SEQ ID NO: 896985 - protein, 155 aa, Homo sapiens; identical to SEQ ID NO: 896978

SEQ ID NO: 896986 - protein, 172 aa, Homo sapiens
SEGLEIMADGEWSRLDGMKASGGMSEQAALAGLAPGVGGTLESFSLGPDDAAVETAEEAKEPAEADITELCRDMFSKMATYLTGELTATSEDYKLLENMNKLTSLKYLEMKDIAINISRNLKDLNQKYAGLQPYLDQINVIEEQVAALEQAAYKLDAYSKKLEAKYKKLEKR

SEQ ID NO: 896987 - protein, 638 aa, Homo sapiens
MSASSSGGSPRFPSCGKNGVTSLTQKKVLRAPCGAPSVTVTKSHKRGMKGDTVNVRRSVRVKTKNPPHCLEITPPSSEKLVSVMRLSDLSTEDDDSGHCKMNRYDKKIDSLMNAVGCLKSEVKMQKGERQMAKRFLEERKEELEEVAHELAETEHENTVLRHNIERMKEEKDFTILQKKHLQQEKECLMSKLVEAEMDGAAAAKQVMALKDTIGKLKTEKQMTCTDINTLTRQKELLLQKLSTFEETNRTLRDLLREQHCKEDSERLMEQQGALLKRLAEADSEKARLLLLLQDKDKEVEELLQEIQCEKAQAKTASELSKSMESMRGHLQAQLRSKEAENSRLCMQIKNLERSGNQHKAEVEAIMEQLKELKQKGDRDKESLKKAIRAQKERAEKSEEYAEQLHVQLADKDLYVAEALSTLESWRSRYNQVVKEKGDLELEIIVLNDRVTDLVNQQQTLEEKMREDRDSLVERLHRQTAEYSAFKLENERLKASFAPMEDKLNQAHLEVQQLKASVKNYEGMIDNYKSQVMKTRLEADEVAAQLERCDKENKILKDEMNKEIEAARRQFQSQLADLQQLPDILKITEAKLAECQDQLQGYERKNIDLTAIISDLRSRVRDWQKGSHELTRAGARIPR

SEQ ID NO: 896988 - protein, 184 aa, Homo sapiens
ANGRAADRVSEKEAEAGRSRCQSQTASAAASPWHDPGLRLQRLHKAAFLGAAVSLLDSCCATWTVEERLPSFHPTANPKASTLLPSERTFDAGPLERLIDKPAPLGPPEQSLLTQLPTFAALMPSHVCLILRRLPQVSIVWEERSNESHAEKGLESTLWRTQCNCDEANHEGPLFNSPLTCSRG

SEQ ID NO: 896989 - protein, 824 aa, Homo sapiens
MKDRSSTPPLHVHVDENTPVHVHIKKLPKPSATSSQKSHKRGMKGDTVNVRRSVRVKTKVPWMPPGKSSARPVGCKWENPPHCLEITPPSSEKLVSVMRLSDLSTEDDDSGHCKMNRYDKKIDSLMNAVGCLKSEVKMQKGERQMAKRFLEERKEELEEVAHELAETEHENTVLRHNIERMKEEKDFTILQKKHLQQEKECLMSKLVEAEMDGAAAAKQVMALKDTIGKLKTEKQMTCTDINTLTRQKELLLQKLSTFEETNRTLRDLLREQHCKEDSERLMEQQGALLKRLAEADSEKARLLLLLQDKDKEVEELLQEIQCEKAQAKTASELSKSMESMRGHLQAQLRSKEAENSRLCMQIKNLERSGNQHKAEVEAIMEQLKELKQKGDRDKESLKKAIRAQKERAEKSEEYAEQLHVQLADKDLYVAEALSTLESWRSRYNQVVKEKGDLELEIIVLNDRVTDLVNQQQTLEEKMREDRDSLVERLHRQTAEYSAFKLENERLKASFAPMEDKLNQAHLEVQQLKASVKNYEGMIDNYKSQVMKTRLEADEVAAQLERCDKENKILKDEMNKEIEAARRQFQSQLADLQQLPDILKITEAKLAECQDQLQGYERKNIDLTAIISDLRSRIEHQGDKLEMAREKHQASQKENKQLSLKVDELERKLEATSAQNIEFLQVIAKREEAIHQSQLRLEEKTRECGTLARQLESAIEDARRQVEQTKEHALSKERAAQNKILDLETQLSRTKTELSQLRRSRDDADRRYQSRLQDLKDRLEQSESTNRSMQNYVQFLKSSYANVFGDGPYSTFLTSSPIRSRSPPA

SEQ ID NO: 896990 - protein, 912 aa, Homo sapiens
MGELPTGCRKRRRKRGGAAARARLHPPRRLHGTTLASDFNDFIRRRFWAQPCRSWFPSCGKNGVTSLTQKKVLRAPCGAPSVTVTKPTMKDRSSTPPLHVHVDENTPVHVHIKKLPKPSATSSQKSHKRGMKGDTVNVRRSVRVKTKVPWMPPGKSSARPVGCKWENPPHCLEITPPSSEKLVSVMRLSDLSTEDDDSGHCKMNRYDKKIDSLMNAVGCLKSEVKMQKGERQMAKRFLEERKEELEEVAHELAETEHENTVLRHNIERMKEEKDFTILQKKHLQQEKECLMSKLVEAEMDGAAAAKQVMALKDTIGKLKTEKQMTCTDINTLTRQKELLLQKLSTFEETNRTLRDLLREQHCKEDSERLMEQQGALLKRLAEADSEKARLLLLLQDKDKEVEELLQEIQCEKAQAKTASELSKSMESMRGHLQAQLRSKEAENSRLCMQIKNLERSGNQHKAEVEAIMEQLKELKQKGDRDKESLKKAIRAQKERAEKSEEYAEQLHVQLADKDLYVAEALSTLESWRSRYNQVVKEKGDLELEIIVLNDRVTDLVNQQQTLEEKMREDRDSLVERLHRQTAEYSAFKLENERLKASFAPMEDKLNQAHLEVQQLKASVKNYEGMIDNYKSQVMKTRLEADEVAAQLERCDKENKILKDEMNKEIEAARRQFQSQLADLQQLPDILKITEAKLAECQDQLQGYERKNIDLTAIISDLRSRIEHQGDKLEMAREKHQASQKENKQLSLKVDELERKLEATSAQNIEFLQVIAKREEAIHQSQLRLEEKTRECGTLARQLESAIEDARRQVEQTKEHALSKERAAQNKILDLETQLSRTKTELSQLRRSRDDADRRYQSRLQDLKDRLEQSESTNRSMQNYVQFLKSSYANVFGDGPYSTFLTSSPIRSRSPPA

SEQ ID NO: 896991 - protein, 873 aa, Homo sapiens
MGELPTGCRKRRRKRGGAAARARLHPPRRLHGTTLASDFNDFIRRRFWAQPCRSWFPSCGKNGVTSLTQKKVLRAPCGAPSVTVTKSHKRGMKGDTVNVRRSVRVKTKVPWMPPGKSSARPVGCKWENPPHCLEITPPSSEKLVSVMRLSDLSTEDDDSGHCKMNRYDKKIDSLMNAVGCLKSEVKMQKGERQMAKRFLEERKEELEEVAHELAETEHENTVLRHNIERMKEEKDFTILQKKHLQQEKECLMSKLVEAEMDGAAAAKQVMALKDTIGKLKTEKQMTCTDINTLTRQKELLLQKLSTFEETNRTLRDLLREQHCKEDSERLMEQQGALLKRLAEADSEKARLLLLLQDKDKEVEELLQEIQCEKAQAKTASELSKSMESMRGHLQAQLRSKEAENSRLCMQIKNLERSGNQHKAEVEAIMEQLKELKQKGDRDKESLKKAIRAQKERAEKSEEYAEQLHVQLADKDLYVAEALSTLESWRSRYNQVVKEKGDLELEIIVLNDRVTDLVNQQQTLEEKMREDRDSLVERLHRQTAEYSAFKLENERLKASFAPMEDKLNQAHLEVQQLKASVKNYEGMIDNYKSQVMKTRLEADEVAAQLERCDKENKILKDEMNKEIEAARRQFQSQLADLQQLPDILKITEAKLAECQDQLQGYERKNIDLTAIISDLRSRIEHQGDKLEMAREKHQASQKENKQLSLKVDELERKLEATSAQNIEFLQVIAKREEAIHQSQLRLEEKTRECGTLARQLESAIEDARRQVEQTKEHALSKERAAQNKILDLETQLSRTKTELSQLRRSRDDADRRYQSRLQDLKDRLEQSESTNRSMQNYVQFLKSSYANVFGDGPYSTFLTSSPIRSRSPPA

SEQ ID NO: 896992 - protein, 829 aa, Homo sapiens
MSASSSGGSPRFPSCGKNGVTSLTQKKVLRAPCGAPSVTVTKSHKRGMKGDTVNVRRSVRVKTKVPWMPPGKSSARPVGCKWENPPHCLEITPPSSEKLVSVMRLSDLSTEDDDSGHCKMNRYDKKIDSLMNAVGCLKSEVKMQKGERQMAKRFLEERKEELEEVAHELAETEHENTVLRHNIERMKEEKDFTILQKKHLQQEKECLMSKLVEAEMDGAAAAKQVMALKDTIGKLKTEKQMTCTDINTLTRQKELLLQKLSTFEETNRTLRDLLREQHCKEDSERLMEQQGALLKRLAEADSEKARLLLLLQDKDKEVEELLQEIQCEKAQAKTASELSKSMESMRGHLQAQLRSKEAENSRLCMQIKNLERSGNQHKAEVEAIMEQLKELKQKGDRDKESLKKAIRAQKERAEKSEEYAEQLHVQLADKDLYVAEALSTLESWRSRYNQVVKEKGDLELEIIVLNDRVTDLVNQQQTLEEKMREDRDSLVERLHRQTAEYSAFKLENERLKASFAPMEDKLNQAHLEVQQLKASVKNYEGMIDNYKSQVMKTRLEADEVAAQLERCDKENKILKDEMNKEIEAARRQFQSQLADLQQLPDILKITEAKLAECQDQLQGYERKNIDLTAIISDLRSRIEHQGDKLEMAREKHQASQKENKQLSLKVDELERKLEATSAQNIEFLQVIAKREEAIHQSQLRLEEKTRECGTLARQLESAIEDARRQVEQTKEHALSKERAAQNKILDLETQLSRTKTELSQLRRSRDDADRRYQSRLQDLKDRLEQSESTNRSMQNYVQFLKSSYANVFGDGPYSTFLTSSPIRSRSPPA

SEQ ID NO: 896993 - protein, 810 aa, Homo sapiens
MSASSSGGSPRFPSCGKNGVTSLTQKKVLRAPCGAPSVTVTKSHKRGMKGDTVNVRRSVRVKTKNPPHCLEITPPSSEKLVSVMRLSDLSTEDDDSGHCKMNRYDKKIDSLMNAVGCLKSEVKMQKGERQMAKRFLEERKEELEEVAHELAETEHENTVLRHNIERMKEEKDFTILQKKHLQQEKECLMSKLVEAEMDGAAAAKQVMALKDTIGKLKTEKQMTCTDINTLTRQKELLLQKLSTFEETNRTLRDLLREQHCKEDSERLMEQQGALLKRLAEADSEKARLLLLLQDKDKEVEELLQEIQCEKAQAKTASELSKSMESMRGHLQAQLRSKEAENSRLCMQIKNLERSGNQHKAEVEAIMEQLKELKQKGDRDKESLKKAIRAQKERAEKSEEYAEQLHVQLADKDLYVAEALSTLESWRSRYNQVVKEKGDLELEIIVLNDRVTDLVNQQQTLEEKMREDRDSLVERLHRQTAEYSAFKLENERLKASFAPMEDKLNQAHLEVQQLKASVKNYEGMIDNYKSQVMKTRLEADEVAAQLERCDKENKILKDEMNKEIEAARRQFQSQLADLQQLPDILKITEAKLAECQDQLQGYERKNIDLTAIISDLRSRIEHQGDKLEMAREKHQASQKENKQLSLKVDELERKLEATSAQNIEFLQVIAKREEAIHQSQLRLEEKTRECGTLARQLESAIEDARRQVEQTKEHALSKERAAQNKILDLETQLSRTKTELSQLRRSRDDADRRYQSRLQDLKDRLEQSESTNRSMQNYVQFLKSSYANVFGDGPYSTFLTSSPIRSRSPPA

SEQ ID NO: 896994 - protein, 810 aa, Homo sapiens
MGRNRYPPACWFPSCGKNGVTSLTQKKVLRAPCGAPSVTVTKSHKRGMKGDTVNVRRSVRVKTKNPPHCLEITPPSSEKLVSVMRLSDLSTEDDDSGHCKMNRYDKKIDSLMNAVGCLKSEVKMQKGERQMAKRFLEERKEELEEVAHELAETEHENTVLRHNIERMKEEKDFTILQKKHLQQEKECLMSKLVEAEMDGAAAAKQVMALKDTIGKLKTEKQMTCTDINTLTRQKELLLQKLSTFEETNRTLRDLLREQHCKEDSERLMEQQGALLKRLAEADSEKARLLLLLQDKDKEVEELLQEIQCEKAQAKTASELSKSMESMRGHLQAQLRSKEAENSRLCMQIKNLERSGNQHKAEVEAIMEQLKELKQKGDRDKESLKKAIRAQKERAEKSEEYAEQLHVQLADKDLYVAEALSTLESWRSRYNQVVKEKGDLELEIIVLNDRVTDLVNQQQTLEEKMREDRDSLVERLHRQTAEYSAFKLENERLKASFAPMEDKLNQAHLEVQQLKASVKNYEGMIDNYKSQVMKTRLEADEVAAQLERCDKENKILKDEMNKEIEAARRQFQSQLADLQQLPDILKITEAKLAECQDQLQGYERKNIDLTAIISDLRSRIEHQGDKLEMAREKHQASQKENKQLSLKVDELERKLEATSAQNIEFLQVIAKREEAIHQSQLRLEEKTRECGTLARQLESAIEDARRQVEQTKEHALSKERAAQNKILDLETQLSRTKTELSQLRRSRDDADRRYQSRLQDLKDRLEQSESTNRSMQNYVQFLKSSYANVFGDGPYSTFLTSSPIRSRSPPA

SEQ ID NO: 896995 - protein, 767 aa, Homo sapiens
MKDRSSTPPLHVHVDENTPVHVHIKKLPKPSATSSQKSHKRGMKGDTVNVRRSVRVKTKVPWMPPGKSSARPVGCKWEVKMQKGERQMAKRFLEERKEELEEVAHELAETEHENTVLRHNIERMKEEKDFTILQKKHLQQEKECLMSKLVEAEMDGAAAAKQVMALKDTIGKLKTEKQMTCTDINTLTRQKELLLQKLSTFEETNRTLRDLLREQHCKEDSERLMEQQGALLKRLAEADSEKARLLLLLQDKDKEVEELLQEIQCEKAQAKTASELSKSMESMRGHLQAQLRSKEAENSRLCMQIKNLERSGNQHKAEVEAIMEQLKELKQKGDRDKESLKKAIRAQKERAEKSEEYAEQLHVQLADKDLYVAEALSTLESWRSRYNQVVKEKGDLELEIIVLNDRVTDLVNQQQTLEEKMREDRDSLVERLHRQTAEYSAFKLENERLKASFAPMEDKLNQAHLEVQQLKASVKNYEGMIDNYKSQVMKTRLEADEVAAQLERCDKENKILKDEMNKEIEAARRQFQSQLADLQQLPDILKITEAKLAECQDQLQGYERKNIDLTAIISDLRSRIEHQGDKLEMAREKHQASQKENKQLSLKVDELERKLEATSAQNIEFLQVIAKREEAIHQSQLRLEEKTRECGTLARQLESAIEDARRQVEQTKEHALSKERAAQNKILDLETQLSRTKTELSQLRRSRDDADRRYQSRLQDLKDRLEQSESTNRSMQNYVQFLKSSYANVFGDGPYSTFLTSSPIRSRSPPA

SEQ ID NO: 896996 - protein, 753 aa, Homo sapiens
MSASSSGGSPRFPSCGKNGVTSLTQKKVLRAPCGAPSVTVTKSHKRGMKGDTVNVRRSVRVKTKVKMQKGERQMAKRFLEERKEELEEVAHELAETEHENTVLRHNIERMKEEKDFTILQKKHLQQEKECLMSKLVEAEMDGAAAAKQVMALKDTIGKLKTEKQMTCTDINTLTRQKELLLQKLSTFEETNRTLRDLLREQHCKEDSERLMEQQGALLKRLAEADSEKARLLLLLQDKDKEVEELLQEIQCEKAQAKTASELSKSMESMRGHLQAQLRSKEAENSRLCMQIKNLERSGNQHKAEVEAIMEQLKELKQKGDRDKESLKKAIRAQKERAEKSEEYAEQLHVQLADKDLYVAEALSTLESWRSRYNQVVKEKGDLELEIIVLNDRVTDLVNQQQTLEEKMREDRDSLVERLHRQTAEYSAFKLENERLKASFAPMEDKLNQAHLEVQQLKASVKNYEGMIDNYKSQVMKTRLEADEVAAQLERCDKENKILKDEMNKEIEAARRQFQSQLADLQQLPDILKITEAKLAECQDQLQGYERKNIDLTAIISDLRSRIEHQGDKLEMAREKHQASQKENKQLSLKVDELERKLEATSAQNIEFLQVIAKREEAIHQSQLRLEEKTRECGTLARQLESAIEDARRQVEQTKEHALSKERAAQNKILDLETQLSRTKTELSQLRRSRDDADRRYQSRLQDLKDRLEQSESTNRSMQNYVQFLKSSYANVFGDGPYSTFLTSSPIRSRSPPA

SEQ ID NO: 896997 - protein, 650 aa, Homo sapiens
MRLSDLSTEDDDSGQLQKKHLQQEKECLMSKLVEAEMDGAAAAKQVMALKDTIGKLKTEKQMTCTDINTLTRQKELLLQKLSTFEETNRTLRDLLREQHCKEDSERLMEQQGALLKRLAEADSEKARLLLLLQDKDKEVEELLQEIQCEKAQAKTASELSKSMESMRGHLQAQLRSKEAENSRLCMQIKNLERSGNQHKAEVEAIMEQLKELKQKGDRDKESLKKAIRAQKERAEKSEEYAEQLHVQLADKDLYVAEALSTLESWRSRYNQVVKEKGDLELEIIVLNDRVTDLVNQQQTLEEKMREDRDSLVERLHRQTAEYSAFKLENERLKASFAPMEDKLNQAHLEVQQLKASVKNYEGMIDNYKSQVMKTRLEADEVAAQLERCDKENKILKDEMNKEIEAARRQFQSQLADLQQLPDILKITEAKLAECQDQLQGYERKNIDLTAIISDLRSRIEHQGDKLEMAREKHQASQKENKQLSLKVDELERKLEATSAQNIEFLQVIAKREEAIHQSQLRLEEKTRECGTLARQLESAIEDARRQVEQTKEHALSKERAAQNKILDLETQLSRTKTELSQLRRSRDDADRRYQSRLQDLKDRLEQSESTNRSMQNYVQFLKSSYANVFGDGPYSTFLTSSPIRSRSPPA

SEQ ID NO: 896998 - protein, 589 aa, Homo sapiens [sequence omitted]

SEQ ID NO: 896999 - protein, 484 aa, Homo sapiens
VFPNCSMKRKVKLCELKAHITKENLERSGNQHKAEVEAIMEQLKELKQKGDRDKESLKKAIRAQKERAEKSEEYAEQLHVQLADKDLYVAEALSTLESWRSRYNQVVKEKGDLELEIIVLNDRVTDLVNQQQTLEEKMREDRDSLVERLHRQTAEYSAFKLENERLKASFAPMEDKLNQAHLEVQQLKASVKNYEGMIDNYKSQVMKTRLEADEVAAQLERCDKENKILKDEMNKEIEAARRQFQSQLADLQQLPDILKITEAKLAECQDQLQGYERKNIDLTAIISDLRSRIEHQGDKLEMAREKHQASQKENKQLSLKVDELERKLEATSAQNIEFLQVIAKREEAIHQSQLRLEEKTRECGTLARQLESAIEDARRQVEQTKEHALSKERAAQNKILDLETQLSRTKTELSQLRRSRDDADRRYQSRLQDLKDRLEQSESTNRSMQNYVQFLKSSYANVFGDGPYSTFLTSSPIRSRSPPA

SEQ ID NO: 897000 - protein, 732 aa, Homo sapiens
MKDRSSTPPLHVHVDENTPVHVHIKKLPKPSATSSQKSHKRGMKGDTVNVRRSVRVKTKVPWMPPGKSSARPVGCKWENPPHCLEITPPSSEKLVSVMRLSDLSTEDDDSGHCKMNRYDKKIDSLMNAVGCLKSEVKMQKGERQMAKRFLEERKEELEEVAHELAETEHENTVLRHNIERMKEEKDFTILQKKHLQQEKECLMSKLVEAEMDGAAAAKQVMALKDTIGKLKTEKQMTCTDINTLTRQKELLLQKLSTFEETNRTLRDLLREQHCKEDSERLMEQQGALLKRLAEADSEKARLLLLLQDKDKEVEELLQEIQCEKAQAKTASELSKSMESMRGHLQAQLRSKEAENSRLCMQIKNLERSGNQHKAEVEAIMEQLKELKQKGDRDKESLKKAIRAQKERAEKSEEYAEQLHVQLADKDLYVAEALSTLESWRSRYNQVVKEKGDLELEIIVLNDRVTDLVNQQQTLEEKMREDRDSLVERLHRQTAEYSAFKLENERLKASFAPMEDKLNQAHLEVQQLKASVKNYEGMIDNYKSQVMKTRLEADEVAAQLERCDKENKILKDEMNKEIEAARRQFQSQLADLQQLPDILKITEAKLAECQDQLQGYERKNIDLTAIISDLRSRIEHQGDKLEMAREKHQASQKENKQLSLKVDELERLEALGPISVLFLGPETFSHLAVFCLVCGSVEGLEALEGTRQTSEEKLLPFQWKLEATSAQNIEFLI

SEQ ID NO: 897001 - protein, 183 aa, Homo sapiens [sequence omitted]

SEQ ID NO: 897002 - protein, 235 aa, Homo sapiens
MAREKHQASQKENKQLSLKVDELERLEALGPISVLFLGPETFSHLAVFCLVCGSVEGLEALEGTRQTSEEKLLPFQWKLEATSAQNIEFLQVIAKREEAIHQSQLRLEEKTRECGTLARQLESAIEDARRQVEQTKEHALSKERAAQNKILDLETQLSRTKTELSQLRRSRDDADRRYQSRLQDLKDRLEQSESTNRSMQNYVQFLKSSYANVFGDGPYSTFLTSSPIRSRSPPA

SEQ ID NO: 897003 - protein, 700 aa, Homo sapiens
MKDRSSTPPLHVHVDENTPVHVHIKKLPKPSATSSQKSHKRGMKGDTVNVRRSVRVKTKVPWMPPGKSSARPVGCKWENPPHCLEITPPSSEKLVSVMRLSDLSTEDDDSGHCKMNRYDKKIDSLMNAVGCLKSEVKMQKGERQMAKRFLEERKEELEEVAHELAETEHENTVLRHNIERMKEEKDFTILQKKHLQQEKECLMSKLVEAEMDGAAAAKQVMALKDTIGKLKTEKQMTCTDINTLTRQKELLLQKLSTFEETNRTLRDLLREQHCKEDSERLMEQQGALLKRLAEADSEKARLLLLLQDKDKEVEELLQEIQCEKAQAKTASELSKSMESMRGHLQAQLRSKEAENSRLCMQIKNLERSGNQHKAEVEAIMEQLKELKQKGDRDKESLKKAIRAQKERAEKSEEYAEQLHVQLADKDLYVAEALSTLESWRSRYNQVVKEKGDLELEIIVLNDRVTDLVNQQQTLEEKMREDRDSLVERLHRQTAEYSAFKLENERLKASFAPMEDKLNQAHLEVQQLKASVKNYEGNVTCKYTKQQQKTHTFDEPLLSVSGVGAKTRPRPLDTGAQLGSFTCVSLDPTLSFVTHGWLNSLAAALPHFCDLRLTFSRYNAPGSYSCIHATSGDDLPPRAMRPPRRARPLLASPDSDRPRRPRSPSSHSALPRPRHPPPLPASPPSPLCPASPPLSVPPPPP

SEQ ID NO: 897004 - protein, 308 aa, Homo sapiens
MKDRSSTPPLHVHVDENTPVHVHIKKLPKPSATSSQKSHKRGMKGDTVNVRRSVRVKTKVPWMPPGKSSARPVGCKWENPPHCLEITPPSSEKLVSVMRLSDLSTEDDDSGHCKMNRYDKKIDSLMNAVGCLKSEVKMQKGERQMAKRFLEERKEELEEVAHELAETEHENTVLRHNIERMKEEKDFTILQKKHLQQEKECLMSKLVEAEMDGAAAAKQVMALKDTIGKLKTEKQMTCTDINTLTRQKELLLQKLSTFEETNRTLRDLLREQHCKEDSEQTNWRQKDTVKPLAVATSENGAGCYCGDR

SEQ ID NO: 897005 - protein, 66 aa, Homo sapiens
QQLKASVKNYEGMIDNYKSQVGLTGALALLSSALPAPIRLGAPYQATPREGWVWKMVFIKTWLYLR

SEQ ID NO: 897006 - protein, 805 aa, Homo sapiens
MKDRSSTPPLHVHVDENTPVHVHIKKLPKPSATSSQKSHKRGMKGDTVNVRRSVRVKTKNPPHCLEITPPSSEKLVSVMRLSDLSTEDDDSGHCKMNRYDKKIDSLMNAVGCLKSEVKMQKGERQMAKRFLEERKEELEEVAHELAETEHENTVLRHNIERMKEEKDFTILQKKHLQQEKECLMSKLVEAEMDGAAAAKQVMALKDTIGKLKTEKQMTCTDINTLTRQKELLLQKLSTFEETNRTLRDLLREQHCKEDSERLMEQQGALLKRLAEADSEKARLLLLLQDKDKEVEELLQEIQCEKAQAKTASELSKSMESMRGHLQAQLRSKEAENSRLCMQIKNLERSGNQHKAEVEAIMEQLKELKQKGDRDKESLKKAIRAQKERAEKSEEYAEQLHVQLADKDLYVAEALSTLESWRSRYNQVVKEKGDLELEIIVLNDRVTDLVNQQQTLEEKMREDRDSLVERLHRQTAEYSAFKLENERLKASFAPMEDKLNQAHLEVQQLKASVKNYEGMIDNYKSQVMKTRLEADEVAAQLERCDKENKILKDEMNKEIEAARRQFQSQLADLQQLPDILKITEAKLAECQDQLQGYERKNIDLTAIISDLRSRIEHQGDKLEMAREKHQASQKENKQLSLKVDELERKLEATSAQNIEFLQVIAKREEAIHQSQLRLEEKTRECGTLARQLESAIEDARRQVEQTKEHALSKERAAQNKILDLETQLSRTKTELSQLRRSRDDADRRYQSRLQDLKDRLEQSESTNRSMQNYVQFLKSSYANVFGDGPYSTFLTSSPIRSRSPPA

SEQ ID NO: 897007 - protein, 129 aa, Homo sapiens
  misc_feature (1)..(1): Xaa can be any naturally occurring amino acid
  misc_feature (5)..(5): Xaa can be any naturally occurring amino acid
  misc_feature (9)..(9): Xaa can be any naturally occurring amino acid
  misc_feature (15)..(15): Xaa can be any naturally occurring amino acid
XAFKXKETXEGDDLXNYEEFKVMKTRLEADEVAAQLERCDKENKILKDEMNKEIEAARRQFQSQLADLQQLPDILKITEAKLAECQDQLQGYERKNIDLTAIISDLRSRVRDWQKGSHELTRAGARIPR

SEQ ID NO: 897008 - protein, 78 aa, Homo sapiens
PSTSHFQHLITPSNISWRKKVLRAPCGAPSVTVTKPTMKDRSSTPPLHVHVDENTPVHVHIKKLPKPSATSSQKSHKR

SEQ ID NO: 897009 - protein, 824 aa, Homo sapiens; identical to SEQ ID NO: 896989

SEQ ID NO: 897010 - protein, 805 aa, Homo sapiens; identical to SEQ ID NO: 897006

SEQ ID NO: 897011 - protein, 854 aa, Homo sapiens
MGELPTGCRKRRRKRGGAAARARLHPPRRLHGTTLASDFNDFIRRRFWAQPCRSWFPSCGKNGVTSLTQKKVLRAPCGAPSVTVTKSHKRGMKGDTVNVRRSVRVKTKNPPHCLEITPPSSEKLVSVMRLSDLSTEDDDSGHCKMNRYDKKIDSLMNAVGCLKSEVKMQKGERQMAKRFLEERKEELEEVAHELAETEHENTVLRHNIERMKEEKDFTILQKKHLQQEKECLMSKLVEAEMDGAAAAKQVMALKDTIGKLKTEKQMTCTDINTLTRQKELLLQKLSTFEETNRTLRDLLREQHCKEDSERLMEQQGALLKRLAEADSEKARLLLLLQDKDKEVEELLQEIQCEKAQAKTASELSKSMESMRGHLQAQLRSKEAENSRLCMQIKNLERSGNQHKAEVEAIMEQLKELKQKGDRDKESLKKAIRAQKERAEKSEEYAEQLHVQLADKDLYVAEALSTLESWRSRYNQVVKEKGDLELEIIVLNDRVTDLVNQQQTLEEKMREDRDSLVERLHRQTAEYSAFKLENERLKASFAPMEDKLNQAHLEVQQLKASVKNYEGMIDNYKSQVMKTRLEADEVAAQLERCDKENKILKDEMNKEIEAARRQFQSQLADLQQLPDILKITEAKLAECQDQLQGYERKNIDLTAIISDLRSRIEHQGDKLEMAREKHQASQKENKQLSLKVDELERKLEATSAQNIEFLQVIAKREEAIHQSQLRLEEKTRECGTLARQLESAIEDARRQVEQTKEHALSKERAAQNKILDLETQLSRTKTELSQLRRSRDDADRRYQSRLQDLKDRLEQSESTNRSMQNYVQFLKSSYANVFGDGPYSTFLTSSPIRSRSPPA

SEQ ID NO: 897012 - protein, 810 aa, Homo sapiens; identical to SEQ ID NO: 896993

SEQ ID NO: 897013 - protein, 748 aa, Homo sapiens
MKDRSSTPPLHVHVDENTPVHVHIKKLPKPSATSSQKSHKRGMKGDTVNVRRSVRVKTKVKMQKGERQMAKRFLEERKEELEEVAHELAETEHENTVLRHNIERMKEEKDFTILQKKHLQQEKECLMSKLVEAEMDGAAAAKQVMALKDTIGKLKTEKQMTCTDINTLTRQKELLLQKLSTFEETNRTLRDLLREQHCKEDSERLMEQQGALLKRLAEADSEKARLLLLLQDKDKEVEELLQEIQCEKAQAKTASELSKSMESMRGHLQAQLRSKEAENSRLCMQIKNLERSGNQHKAEVEAIMEQLKELKQKGDRDKESLKKAIRAQKERAEKSEEYAEQLHVQLADKDLYVAEALSTLESWRSRYNQVVKEKGDLELEIIVLNDRVTDLVNQQQTLEEKMREDRDSLVERLHRQTAEYSAFKLENERLKASFAPMEDKLNQAHLEVQQLKASVKNYEGMIDNYKSQVMKTRLEADEVAAQLERCDKENKILKDEMNKEIEAARRQFQSQLADLQQLPDILKITEAKLAECQDQLQGYERKNIDLTAIISDLRSRIEHQGDKLEMAREKHQASQKENKQLSLKVDELERKLEATSAQNIEFLQVIAKREEAIHQSQLRLEEKTRECGTLARQLESAIEDARRQVEQTKEHALSKERAAQNKILDLETQLSRTKTELSQLRRSRDDADRRYQSRLQDLKDRLEQSESTNRSMQNYVQFLKSSYANVFGDGPYSTFLTSSPIRSRSPPA

SEQ ID NO: 897014 - protein, 687 aa, Homo sapiens
SSSCPPKSQNMSRAFPTSTVPCVAHELAETEHENTVLRHNIERMKEEKDFTILQKKHLQQEKECLMSKLVEAEMDGAAAAKQVMALKDTIGKLKTEKQMTCTDINTLTRQKELLLQKLSTFEETNRTLRDLLREQHCKEDSERLMEQQGALLKRLAEADSEKARLLLLLQDKDKEVEELLQEIQCEKAQAKTASELSKSMESMRGHLQAQLRSKEAENSRLCMQIKNLERSGNQHKAEVEAIMEQLKELKQKGDRDKESLKKAIRAQKERAEKSEEYAEQLHVQLADKDLYVAEALSTLESWRSRYNQVVKEKGDLELEIIVLNDRVTDLVNQQQTLEEKMREDRDSLVERLHRQTAEYSAFKLENERLKASFAPMEDKLNQAHLEVQQLKASVKNYEGMIDNYKSQVMKTRLEADEVAAQLERCDKENKILKDEMNKEIEAARRQFQSQLADLQQLPDILKITEAKLAECQDQLQGYERKNIDLTAIISDLRSRIEHQGDKLEMAREKHQASQKENKQLSLKVDELERKLEATSAQNIEFLQVIAKREEAIHQSQLRLEEKTRECGTLARQLESAIEDARRQVEQTKEHALSKERAAQNKILDLETQLSRTKTELSQLRRSRDDADRRYQSRLQDLKDRLEQSESTNRSMQNYVQFLKSSYANVFGDGPYSTFLTSSPIRSRSPPA

SEQ ID NO: 897015 - protein, 876 aa, Homo sapiens
MKDRSSTPPLHVHVDENTPVHVHIKKLPKPSATSSQKSHKRGMKGDTVNVRRSVRVKTKVPWMPPGKSSARPVGCKWENPPHCLEITPPSSEKLVSVMRLSDLSTEDDDSGHCKMNRYDKKIDSLMNAVGCLKSEVKMQKGERQMAKRFLEERKEELEEVAHELAETEHENTVLRHNIERMKEEKDFTILQKKHLQQEKECLMSKLVEAEMDGAAAAKQVMALKDTIGKLKTEKQMTCTDINTLTRQKELLLQKLSTFEETNRTLRDLLREQHCKEDSERLMEQQGALLKRLAEADSEKARLLLLLQDKDKEVEELLQEIQCEKAQAKTASELSKSMESMRGHLQAQLRSKEAENSRLCMQIKNLERSGNQHKAEVEAIMEQLKELKQKGDRDKESLKKAIRAQKERAEKSEEYAEQLHVQLADKDLYVAEALSTLESWRSRYNQVVKEKGDLELEIIVLNDRVTDLVNQQQTLEEKMREDRDSLVERLHRQTAEYSAFKLENERLKASFAPMEDKLNQAHLEVQQLKASVKNYEGMIDNYKSQVMKTRLEADEVAAQLERCDKENKILKDEMNKEIEAARRQFQSQLADLQQLPDILKITEAKLAECQDQLQGYERKNIDLTAIISDLRSRIEHQGDKLEMAREKHQASQKENKQLSLKVDELERLEALGPISVLFLGPETFSHLAVFCLVCGSVEGLEALEGTRQTSEEKLLPFQWKLEATSAQNIEFLQVIAKREEAIHQSQLRLEEKTRECGTLARQLESAIEDARRQVEQTKEHALSKERAAQNKILDLETQLSRTKTELSQLRRSRDDADRRYQSRLQDLKDRLEQSESTNRSMQNYVQFLKSSYANVFGDGPYSTFLTSSPIRSRSPPA

SEQ ID NO: 897016 - protein, 701 aa, Homo sapiens
MGELPTGCRKRRRKRGGAAARARLHPPRRLHGTTLASDFNDFIRRRFWAQPCRSWFPSCGKNGVTSLTQKKVLRAPCGAPSVTVTKSHKRGMKGDTVNVRRSVRVKTKVPWMPPGKSSARPVGCKWENPPHCLEITPPSSEKLVSVMRLSDLSTEDDDSGHCKMNRYDKKIDSLMNAVGCLKSEVKMQKGERQMAKRFLEERKEELEEVAHELAETEHENTVLRHNIERMKEEKDFTILQKKHLQQEKECLMSKLVEAEMDGAAAAKQVMALKDTIGKLKTEKQMTCTDINTLTRQKELLLQKLSTFEETNRTLRDLLREQHCKEDSERLMEQQGALLKRLAEADSEKARLLLLLQDKDKEVEELLQEIQCEKAQAKTASELSKSMESMRGHLQAQLRSKEAENSRLCMQIKNLERSGNQHKAEVEAIMEQLKELKQKGDRDKESLKKAIRAQKERAEKSEEYAEQLHVQLADKDLYVAEALSTLESWRSRYNQVVKEKGDLELEIIVLNDRVTDLVNQQQTLEEKMREDRDSLVERLHRQTAEYSAFKLENERLKASFAPMEDKLNQAHLEVQQLKASVKNYEGMIDNYKSQVMKTRLEADEVAAQLERCDKENKILKDEMNKEIEAARRQFQSQLADLQQLPDILKITEAKLAECQDQLQGYERKNIDLTAIISDLRSRVRDWQKGSHELTRAGARIPR

SEQ ID NO: 897017 - protein, 824 aa, Homo sapiens; identical to SEQ ID NO: 896989

SEQ ID NO: 897018 - protein, 159 aa, Homo sapiens
MKLEATSAQNIEFLQVIAKREEAIHQSQLRLEEKTRECGTLARQLESAIEDARRQVEQTKEHALSKERAAQNKILDLETQLSRTKTELSQLRRSRDDADRRYQSRLQDLKDRLEQSESTNRSMQNYVQFLKSSYANVFGDGPYSTFLTSSPIRSRSPPA

SEQ ID NO: 897019 - protein, 552 aa, Homo sapiens
MKDRSSTPPLHVHVDENTPVHVHIKKLPKPSATSSQKSHKRGMKGDTVNVRRSVRVKTKVPWMPPGKSSARPVGCKWENPPHCLEITPPSSEKLVSVMRLSDLSTEDDDSGHCKMNRYDKKIDSLMNAVGCLKSEVKMQKGERQMAKRFLEERKEELEEVAHELAETEHENTVLRHNIERMKEEKDFTILQKKHLQQEKECLMSKLVEAEMDGAAAAKQVMALKDTIGKLKTEKQMTCTDINTLTRQKELLLQKLSTFEETNRTLRDLLREQHCKEDSERLMEQQGALLKRLAEADSEKARLLLLLQDKDKEVEELLQEIQCEKAQAKTASELSKSMESMRGHLQAQLRSKEAENSRLCMQIKNLERSGNQHKAEVEAIMEQLKELKQKGDRDKESLKKAIRAQKERAEKSEEYAEQLHVQLADKDLYVAEALSTLESWRSRYNQVVKEKGDLELEIIVLNDRVTDLVNQQQTLEEKMREDRDSLVERLHRQTAEYSAFKLENERLKCQDQLQGYERKNIDLTAIISDLRSRVRDWQKGSHELTRAGARIPR

SEQ ID NO: 897020 - protein, 112 aa, Homo sapiens
MKDRSSTPPLHVHVDENTPVHVHIKKLPKPSATSSQKSHKRGMKGDTVNVRRSVRVKTKVPWMPPGKSSARPVGCKWEVGSPLPRLFFSDCSDPSRPQPRYDSGSAIATGMS

SEQ ID NO: 897021 - protein, 795 aa, Homo sapiens
TAVGSFNPNVTSSMLGNVNISTSNIPSAAGVSVGPGVTSGVNVNILSGMGNGTISSSAAVSSVPNAAAGMTGGSVSSQQQQPTVNTSRFRVVKLDSSSEPFKKGRWTCTEFYEKENAVPATEGVLINKVVETVKQNPIEVTSERESTSGSSVSSSVSTLSHYTESVGSGEMGAPTVVVQQQQQQQQQQQQQPALQGVTLQQMDFGSTGPQSIPAVSIPQSISQSQISQVQLQSQELSYQQKQGLQPVPLQATMSAATGIQPSPVNVVGVTSALGQQPSISSLAQPQLPYSQAAPPVQTPLPGAPPPQQLQYGQQQPMVSTQMAPGHVKSVTQNPASEYVQQQPILQTAMSSGQPSSAGVGAGTTVIPVAQPQGIQLPVQPTAVPAQPAGASVQPVGQAPAAVSAVPTGSQIANIGQQANIPTAVQQPSTQVPPSVIQQGAPPSSQVVPPAQTGIIHQGVQTSAPSLPQQLVIASQSSLLTVPPQPQGVEPVAQGIVSQQLPAVSSLPSASSISVTSQVSSTGPSGMPSAPTNLVPPQNIAQTPATQNGNLVQSVSQPPLIATNTNLPLAQQIPLSSTQFSAQSLAQAIGSQIEDARRAAEPSLVGLPQTISGDSGGMSAVSDGSSSSLAASASLFPLKVLPLTTPLVDGEDESSSGASVVAIDNKIEQAMDLVKSHLMYAVREEVEVLKEQIKELIEKNSQLEQENNLLKTLASPEQLAQFQAQLQTGLPPCHHPATGHHTAPRPASIAGLRTNRIAAYAPAELAAACELNRRRRCARENLPPQSPISLLAAKET

SEQ ID NO: 897022 - protein, 681 aa, Homo sapiens
TAVGSFNPNVTSSMLGNVNISTSNIPSAAGVSVGPGVTSGVNVNILSGMGNGTISSSAAVSSVPNAAAGMTGGSVSSQQQQPTVNTSRFRVVKLDSSSEPFKKGRWTCTEFYEKENAVPATEGVLINKVVETVKQNPIEVTSERESTSGSSVSSSVSTLSHYTESVGSGEMGAPTVVVQQQQQQQQQQQQQPALQGVTLQQMDFGSTGPQSIPAVSIPQSISQSQISQVQLQSQELSYQQKQGLQPVPLQATMSAATGIQPSPVNVVGVTSALGQQPSISSLAQPQLPYSQAAPPVQTPLPGAPPPQQLQYGQQQPMVSTQMAPGHVKSVTQNPASEYVQQQPILQTAMSSGQPSSAGVGAGTTVIPVAQPQGIQLPVQPTAVPAQPAGASVQPVGQAPAAVSAVPTGSQIANIGQQANIPTAVQQPSTQVPPSVIQQGAPPSSQVVPPAQTGIIHQGVQTSAPSLPQQLVIASQSSLLTVPPQPQGVEPVAQGIVSQQLPAVSSLPSASSISVTSQVSSTGPSGMPSAPTNLVPPQNIAQTPATQNGNLVQSVSQPPLIATNTNLPLAQQIPLSSTQFSAQSLAQAIGSQIEDARRAAEPSLVGLPQTISGDSGGMSAVSDGSSSSLAASASLFPLKVLPLTTPLVDGEDESSLFQCFSPTRGARSDPRTTDTAKTTESF

SEQ ID NO: 897023 - protein, 184 aa, Homo sapiens
MKSQWCRPVAMDLGVYQLRHFSISFLSSLLGTENASVRLDNSSSGASVVAIDNKIEQAMDLVKSHLMYAVREEVEVLKEQIKELIEKNSQLEQENNLLKTLASPEQLAQFQAQLQTGLPPCHHPATGHHTAPRPASIAGLRTNRIAAYAPAELAAACELNRRRRCARENLPPQSPISLLAAKET

SEQ ID NO: 897024 - protein, 184 aa, Homo sapiens; identical to SEQ ID NO: 897023

SEQ ID NO: 897025 - protein, 184 aa, Homo sapiens; identical to SEQ ID NO: 897023

SEQ ID NO: 897026 - protein, 126 aa, Homo sapiens
MDLVKSHLMYAVREEVEVLKEQIKELIEKNSQLEQENNLLKTLASPEQLAQFQAQLQTGLPPCHHPATGHHTAPRPASIAGLRTNRIAAYAPAELAAACELNRRRRCARENLPPQSPISLLAAKET

SEQ ID NO: 897027 - protein, 126 aa, Homo sapiens; identical to SEQ ID NO: 897026

SEQ ID NO: 897028 - protein, 126 aa, Homo sapiens; identical to SEQ ID NO: 897026

SEQ ID NO: 897029 - protein, 158 aa, Homo sapiens
GAWGARGQWCEMKLQSSSGASVVAIDNKIEQAMDLVKSHLMYAVREEVEVLKEQIKELIEKNSQLEQENNLLKTLASPEQLAQFQAQLQTGLPPCHHPATGHHTAPRPASIAGLRTNRIAAYAPAELAAACELNRRRRCARENLPPQSPISLLAAKET

SEQ ID NO: 897030 - protein, 126 aa, Homo sapiens; identical to SEQ ID NO: 897026

SEQ ID NO: 897031 - protein, 145 aa, Homo sapiens
MQLEQVFLSSKSSTASNTLTDLVKSHLMYAVREEVEVLKEQIKELIEKNSQLEQENNLLKTLASPEQLAQFQAQLQTGLPPCHHPATGHHTAPRPASIAGLRTNRIAAYAPAELAAACELNRRRRCARENLPPQSPISLLAAKET

SEQ ID NO: 897032 - protein, 118 aa, Homo sapiens
MYAVREEVEVLKEQIKELIEKNSQLEQENNLLKTLASPEQLAQFQAQLQTGLPPCHHPATGHHTAPRPASIAGLRTNRIAAYAPAELAAACELNRRRRCARENLPPQSPISLLAAKET

SEQ ID NO: 897033 - protein, 184 aa, Homo sapiens; identical to SEQ ID NO: 897023

SEQ ID NO: 897034 - protein, 184 aa, Homo sapiens; identical to SEQ ID NO: 897023

SEQ ID NO: 897035 - protein, 184 aa, Homo sapiens; identical to SEQ ID NO: 897023

SEQ ID NO: 897036 - protein, 121 aa, Homo sapiens
MPMGVRTKFGINMVTSRERGTTRLPKEEVNRPRSETEQVKTPVLISSGIAPVNSQLHSSLSNIARPRLVQIYRDLMQLGRYLRNGLIHAQELCAFPSLPAPYPSLPRVLSPCLRLVSYMGL

SEQ ID NO: 897037 - protein, 132 aa, Homo sapiens
MKSQWCRPVAMDLGVYQLRHFSISFLSSLLGTENASVRLDNSSSGASVVAIDNKIEQAMDLVKSHLMYAVREEVEVLKEQIKELIEKNSQLEQENNLLKTLASPEQLAQFQAQLQTGLPPCHHPATARATFS

SEQ ID NO: 897038 - protein, 681 aa, Homo sapiens; identical to SEQ ID NO: 897022

SEQ ID NO: 897039 - protein, 419 aa, Homo sapiens
PEPRPSGPGSARPACQPRCCCSSCCGTADRAAAPLSPLQAPIWAPATSMDARRVPQKDLRVKKNLKKFRYVKLISMETSSSSDDSCDSFASDNFANTRLQSVREGCRTRSQCRHSGPLRVAMKFPARSTRGATNKKAESRQPSENSVTDSNSDSEDESGMNFLEKRALNIKQNKAMLAKLMSELESFPGSFRGRHPLPGSDSQSRRPRRRTFPGVASRRNPERRARPLTRSRSRILGSLDALPMEEEEEEDKYMLVRKRKTVDGYMNEDDLPRSRRSRSSVTLPHIIRPVEEITEEELENVCSNSREKIYNRSLGSTCHQCRQKTIDTKTNCRNPDCWGVRGQFCGPCLRNRYGEEVRDALLDPNWHCPPCRGICNCSFCRQRDGRCATGVLVYLAKYHGFGNVHAYLKSLKQEFEMQA

SEQ ID NO: 897040 - protein, 419 aa, Homo sapiens; identical to SEQ ID NO: 897039

SEQ ID NO: 897041 - protein, 498 aa, Homo sapiens
PEPRPSGPGSARPACQPRCCCSSCCGTADRAAAPLSPLQAPIWAPATSMDARRVPQKDLRVKKNLKKFRYVKLISMETSSSSDDSCDSFASDNFANTKPKFRSDISEELANVFYEDSDNESFCGFSESEVQDVLDHCGFLQKPRPDVTNELAGIFHADSDDESFCGFSESEIQDGMRLQSVREGCRTRSQCRHSGPLRVAMKFPARSTRGATNKKAESRQPSENSVTDSNSDSEDESGMNFLEKRALNIKQNKAMLAKLMSELESFPGSFRGRHPLPGSDSQSRRPRRRTFPGVASRRNPERRARPLTRSRSRILGSLDALPMEEEEEEDKYMLVRKRKTVDGYMNEDDLPRSRRSRSSVTLPHIIRPVEEITEEELENVCSNSREKIYNRSLGSTCHQCRQKTIDTKTNCRNPDCWGVRGQFCGPCLRNRYGEEVRDALLDPNWHCPPCRGICNCSFCRQRDGRCATGVLVYLAKYHGFGNVHAYLKSLKQEFEMQA

SEQ ID NO: 897042 - protein, 498 aa, Homo sapiens; identical to SEQ ID NO: 897041

SEQ ID NO: 897043 - protein, 394 aa, Homo sapiens
NLKKFRYVKFFFTLRSFCGTRRASMLVAGAQKDLRVKKNLKKFRYVKLISMETSSSSDDSCDSFASDNFANTRLQSVREGCRTRSQCRHSGPLRVAMKFPARSTRGATNKKAESRQPSENSVTDSNSDSEDESGMNFLEKRALNIKQNKAMLAKLMSELESFPGSFRGRHPLPGSDSQSRRPRRRTFPGVASRRNPERRARPLTRSRSRILGSLDALPMEEEEEEDKYMLVRKRKTVDGYMNEDDLPRSRRSRSSVTLPHIIRPVEEITEEELENVCSNSREKIYNRSLGSTCHQCRQKTIDTKTNCRNPDCWGVRGQFCGPCLRNRYGEEVRDALLDPNWHCPPCRGICNCSFCRQRDGRCATGVLVYLAKYHGFGNVHAYLKSLKQEFEMQA

SEQ ID NO: 897044 - protein, 242 aa, Homo sapiens
PEPRPSGPGSARPACQPRCCCSSCCGTADRAAAPLSPLQAPIWAPATSMDARRVPQKDLRVKKNLKKFRYVKLISMETSSSSDDSCDSFASDNFANTRLQSVREGCRTRSQCRHSGPLRVAMKFPARSTRGATNKKAESRQPSENSVTDSNSDSEDESGMNFLEKRALNIKQNKAMLAKLMSELESFPGSFRGRHPLPGSDSVSTSSCLYTVVFWAHLRSICVVFKNLISLFVWPSRQTKGT

SEQ ID NO: 897045 - protein, 498 aa, Homo sapiens; identical to SEQ ID NO: 897041

SEQ ID NO: 897046 - protein, 291 aa, Homo sapiens
PEPRPSGPGSARPACQPRCCCSSCCGTADRAAAPLSPLQAPIWAPATSMDARRVPQKDLRVKKNLKKFRYVKLISMETSSSSDDSCDSFASDNFANTKPKFRSDISEELANVFYEDSDNESFCGFSESEVQDVLDHCGFLQKPRPDVTNELAGIFHADSDDESFCGFSESEIQDGMRLQSVREGCRTRSQCRHSGPLRVAMKFPARSTRGATNKKAESRQPSENSVTDSNSDSEDESGMNFLEKRALNIKQNKAMLAKLMSELESFPGSFRGRHPLPGSDSTNEGDLEETP

SEQ ID NO: 897047 - protein, 179 aa, Homo sapiens
PEPRPSGPGSARPACQPRCCCSSCCGTADRAAAPLSPLQAPIWAPATSMDARRVPQKDLRVKKNLKKFRYVKLISMETSSSSDDSCDSFASDNFANTRLQSVREGCRTRSQCRHSGPLRVAMKFPARSTRGATNKKAESRQPSENSVTDSNSDSEDESGMNFLEKRALNIKQNKAMVGI

SEQ ID NO: 897048 - protein, 443 aa, Homo sapiens
MDSRAQLWGLALNKRRATLPHPGGSTNLKADPEELFTKLEKIGKGSFGEVFKGIDNRTQKVVAIKIIDLEEAEDEIEDIQQEITVLSQCDSPYVTKYYGSYLKDTKLWIIMEYLGGGSALDLLEPGPLDETQIATILREILKGLDYLHSEKKIHRDIKAANVLLSEHGEVKLADFGVAGQLTDTQIKRNTFVGTPFWMAPEVIKQSAYDSKADIWSLGITAIELARGEPPHSELHPMKVLFLIPKNNPPTLEGNYSKPLKEFVEACLNKEPSFRPTAKELLKHKFILRNAKKTSYLTELIDRYKRWKAEQSHDDSSSEDSDAETDGQASGGSDSGDWIFTIREKDPKNLENGALQPSDLDRNKMKDIPKRPFSQCLSTIISPLFAELKEKSQACGGNLGSIEELRGAIYLAEEACPGISDTMVAQLVQRLQRYSLSGGGTSSH

SEQ ID NO: 897049 - protein, 534 aa, Homo sapiens
SGQRARAQAARLQPSSSGSSGGGGSAREALRPQQLLPGAVHGDAARHPPLSPRRPAGTRQAGVASGSGRPRRPRAARGPRASPPRADRRGPAVPSQEVAVLSAMAHSPVQSGLPGMQNLKADPEELFTKLEKIGKGSFGEVFKGIDNRTQKVVAIKIIDLEEAEDEIEDIQQEITVLSQCDSPYVTKYYGSYLKDTKLWIIMEYLGGGSALDLLEPGPLDETQIATILREILKGLDYLHSEKKIHRDIKAANVLLSEHGEVKLADFGVAGQLTDTQIKRNTFVGTPFWMAPEVIKQSAYDSKADIWSLGITAIELARGEPPHSELHPMKVLFLIPKNNPPTLEGNYSKPLKEFVEACLNKEPSFRPTAKELLKHKFILRNAKKTSYLTELIDRYKRWKAEQSHDDSSSEDSDAETDGQASGGSDSGDWIFTIREKDPKNLENGALQPSDLDRNKMKDIPKRPFSQCLSTIISPLFAELKEKSQACGGNLGSIEELRGAIYLAEEACPGISDTMVAQLVQRLQRYSLSGGGTSSH

SEQ ID NO: 897050 - protein, 534 aa, Homo sapiens; identical to SEQ ID NO: 897049

SEQ ID NO: 897051 - protein, 534 aa, Homo sapiens; identical to SEQ ID NO: 897049

SEQ ID NO: 897052 - protein, 427 aa, Homo sapiens
TGARVGLELPNLKADPEELFTKLEKIGKGSFGEVFKGIDNRTQKVVAIKIIDLEEAEDEIEDIQQEITVLSQCDSPYVTKYYGSYLKDTKLWIIMEYLGGGSALDLLEPGPLDETQIATILREILKGLDYLHSEKKIHRDIKAANVLLSEHGEVKLADFGVAGQLTDTQIKRNTFVGTPFWMAPEVIKQSAYDSKADIWSLGITAIELARGEPPHSELHPMKVLFLIPKNNPPTLEGNYSKPLKEFVEACLNKEPSFRPTAKELLKHKFILRNAKKTSYLTELIDRYKRWKAEQSHDDSSSEDSDAETDGQASGGSDSGDWIFTIREKDPKNLENGALQPSDLDRNKMKDIPKRPFSQCLSTIISPLFAELKEKSQACGGNLGSIEELRGAIYLAEEACPGISDTMVAQLVQRLQRYSLSGGGTSSH

SEQ ID NO: 897053 - protein, 515 aa, Homo sapiens
SGQRARAQAARLQPSSSGSSGGGGSAREALRPQQLLPGAVHGDAARHPPLSPRRPAGTRQAGVASGSGRPRRPRAARGPRASPPRADRRGPAVPSQEVAVLSAMAHSPVQSGLPGMQNLKADPEELFTKLEKIGKGSFGEVFKGIDNRTQKVVAIKIIDLEEAEDEIEDIQQEITVLSQCDSPYVTKYYGSYLKLEPGPLDETQIATILREILKGLDYLHSEKKIHRDIKAANVLLSEHGEVKLADFGVAGQLTDTQIKRNTFVGTPFWMAPEVIKQSAYDSKADIWSLGITAIELARGEPPHSELHPMKVLFLIPKNNPPTLEGNYSKPLKEFVEACLNKEPSFRPTAKELLKHKFILRNAKKTSYLTELIDRYKRWKAEQSHDDSSSEDSDAETDGQASGGSDSGDWIFTIREKDPKNLENGALQPSDLDRNKMKDIPKRPFSQCLSTIISPLFAELKEKSQACGGNLGSIEELRGAIYLAEEACPGISDTMVAQLVQRLQRYSLSGGGTSSH

SEQ ID NO: 897054 - protein, 534 aa, Homo sapiens; identical to SEQ ID NO: 897049

SEQ ID NO: 897055 - protein, 444 aa, Homo sapiens
SGQRARAQAARLQPSSSGSSGGGGSAREALRPQQLLPGAVHGDAARHPPLSPRRPAGTRQAGVASGSGRPRRPRAARGPRASPPRADRRGPAVPSQEVAVLSAMAHSPVQSGLPGMQNLKADPEELFTKLEKIGKGSFGEVFKGIDNRTQKVVAIKIIDLEEAEDEIEDIQQEITVLSQCDSPYVTKYYGSYLKDTKLWIIMEYLGGGSALDLLEPGPLDETQIATILREILKGLDYLHSEKKIHRDIKAANVLLSEHGEVKLADFGVAGQLTDTQIKRNTFVGTPFWMAPEVIKQSAYDSKADIWSLGITAIELARGEPPHSELHPMKVLFLIPKNNPPTLEGNYSKPLKEFVEACLNKEPSFRPTAKELLKHKFILRNAKKTSYLTELIDRYKRWKAEQSHDDSSSEDSDAETDGQASGGSDSGDWIFTIRVFSHRTWTEIR

SEQ ID NO: 897056 - protein, 534 aa, Homo sapiens; identical to SEQ ID NO: 897049

SEQ ID NO: 897057 - protein, 371 aa, Homo sapiens
SGQRARAQAARLQPSSSGSSGGGGSAREALRPQQLLPGAVHGDAARHPPLSPRRPAGTRQAGVASGSGRPRRPRAARGPRASPPRADRRGPAVPSQEVAVLSAMAHSPVQSGLPGMQNLKADPEELFTKLEKIGKGSFGEVFKGIDNRTQKVVAIKIIDLEEAEDEIEDIQQEITVLSQCDSPYVTKYYGSYLKDTKLWIIMEYLGGGSALDLLEPGPLDETQIATILREILKGLDYLHSEKKIHRDIKAANVLLSEHGEVKLADFGVAGQLTDTQIKRNTLQPSDLDRNKMKDIPKRPFSQCLSTIISPLFAELKEKSQACGGNLGSIEELRGAIYLAEEACPGISDTMVAQLVQRLQRYSLSGGGTSSH

SEQ ID NO: 897058 - protein, 496 aa, Homo sapiens
SGQRARAQAARLQPSSSGSSGGGGSAREALRPQQLLPGAVHGDAARHPPLSPRRPAGTRQAGVASGSGRPRRPRAARGPRASPPRADRRGPAVPSQEVAVLSAMAHSPVQSGLPGMQNLKADPEELFTKLEKIGKGSFGEVFKGIDNRTQKVVAIKIIDLEEAEDEIEDIQQEITVLSQCDSPYVTKYYGSYLKDTKLWIIMEYLGGGSALDLLEPGPLDETQIATILREILKGLDYLHSEKKIHRDIKAANVLLSEHGEVKLADFGVAGQLTDTQIKRNTFVGTPFWMAPEVIKQSAYDSKADIWSLGITAIELARGEPPHSELHPMKVLFLIPKNNPPTLEGNYSKPLKEFVEACLNKEPSFRPTAKELLKHKFILRNAKKTSYLTELIDRYKRWKAEQSHDDSSSEDSDAETDGQASGGSDSGDWIFTIREKDPKNLENGALQPSDLDRNKMKDIPKRPFSQCLSTIISPLFAEPSARRPSRDTHSLHCAAAR

SEQ ID NO: 897059 - protein, 534 aa, Homo sapiens; identical to SEQ ID NO: 897049

SEQ ID NO: 897060 - protein, 523 aa, Homo sapiens
SGQRARAQAARLQPSSSGSSGGGGSAREALRPQQLLPGAVHGDAARHPPLSPRRPAGTRQAGVASGSGRPRRPRAARGPRASPPRADRRGPAVPSQEVAVLSAMAHSPVQSGLPGMQNLKADPEELFTKLEKIGKGSFGEVFKGIDNRTQKVVAIKIIDLEEAEDEIEDIQQEITVLSQCDSPYVTKYYGSYLKDTKLWIIMEYLGGGSALDLLEPGPLDETQIATILREILKGLDYLHSEKKIHRDIKAANVLLSEHGEVKLADFGVAGQLTDTQIKRNTFVGTPFWMAPEVIKQSAYDSKADIWSLGITAIELARGEPPHSELHPMKVLFLIPKNNPPTLEGNYSKPLKEFVEACLNKEPSFRPTAKELLKHKFILRNAKKTSYLTELIDRYKRWKAEQSHDDSSSEDSDAETDGQASGGSDSGDWIFTIREKDPKNLENGALQPSDLDRNKMKDIPKRPFSQCLSTIISPLFAELKEKSQACGGNLGSIEELRGAIYLAEEACPGISDTMVAQLVQRLQR

SEQ ID NO: 897061 - protein, 554 aa, Homo sapiens
SGQRARAQAARLQPSSSGSSGGGGSAREALRPQQLLPGAVHGDAARHPPLSPRRPAGTRQAGVASGSGRPRRPRAARGPRASPPRADRRGPAVPSQEVAVLSAMAHSPVQSGLPGMQNLKADPEELFTKLEKIGKGSFGEVFKGIDNRTQKVVAIKIIDLEEAEDEIEDIQQEITVLSQCDSPYVTKYYGSYLKDTKLWIIMEYLGGGSALDLLEPGPLDETQIATILREILKGLDYLHSEKKIHRDIKAANVLLSEHGEVKLADFGVAGQLTDTQIKRNTFVGTPFWMAPEVIKQSAYDSKADIWSLGITAIELARGEPPHSELHPMKVLFLIPKNNPPTLEGNYSKPLKEFVEACLNKEPSFRPTAKELLKHKFILRNAKKTSYLTELIDRYKRWKAEQSHDDSSSEDSDAETDGQASGGSDSGDWIFTIREKDPKNLENGALQPSDLDRNKMKDIPKRPFSQCLSTIISPLFAELKEKSQACGGNLGSIEELRGAIYLAEEACPGISDTMVAQLVQRLQRSIHGNQAPPDCHLAQVQAFGGSGCVLGSRSV

SEQ ID NO: 897062 - protein, 534 aa, Homo sapiens; identical to SEQ ID NO: 897049

SEQ ID NO: 897063 - protein, 523 aa, Homo sapiens; identical to SEQ ID NO: 897060

SEQ ID NO: 897064 - protein, 464 aa, Homo sapiens
SGQRARAQAARLQPSSSGSSGGGGSAREALRPQQLLPGAVHGDAARHPPLSPRRPAGTRQAGVASGSGRPRRPRAARGPRASPPRADRRGPAVPSQEVAVLSAMAHSPVQSGLPGMQNLKADPEELFTKLEKIGKGSFGEVFKGIDNRTQKVVAIKIIDLEEAEDEIEDIQQEITVLSQCDSPYVTKYYGSYLKDTKLWIIMEYLGGGSALDLLEPGPLDETQIATILREILKGLDYLHSEKKIHRDIKAANVLLSEHGEVKLADFGVAGQLTDTQIKRNTFVGTPFWMAPEVIKQSAYDSKADIWSLGITAIELARGEPPHSELHPMKVLFLIPKNNPPTLEGNYSKPLKEFVEACLNKEPSFRPTAKELLKHKFILRNAKKTSYLTELIDRYKRWKAEQSHDDSSSEDSDAETDGQASGGSDSGDWIFTIREKDPKNLENGALQPSDLDRNKVRLLTPEWPR

SEQ ID NO: 897065 - protein, 431 aa, Homo sapiens
SGQRARAQAARLQPSSSGSSGGGGSAREALRPQQLLPGAVHGDAARHPPLSPRRPAGTRQAGVASGSGRPRRPRAARGPRASPPRADRRGPAVPSQEVAVLSAMAHSPVQSGLPGMQNLKADPEELFTKLEKIGKGSFGEVFKGIDNRTQKVVAIKIIDLEEAEDEIEDIQQEITVLSQCDSPYVTKYYGSYLKDTKLWIIMEYLGGGSALDLLEPGPLDETQIATILREILKGLDYLHSEKKIHRDIKAANVLLSEHGEVKLADFGVAGQLTDTQIKRNTFVGTPFWMAPEVIKQSAYDSKADIWSLGITAIELARGEPPHSELHPMKVLFLIPKNNPPTLEGNYSKPLKEFVEACLNKEPSFRPTAKELLKHSRSSPGRLKKELLLRSAPAVAPADLTSSRLGRALRESSGLENTGNLSGSKLFCKPDE

SEQ ID NO: 897066 - protein, 336 aa, Homo sapiens
SGQRARAQAARLQPSSSGSSGGGGSAREALRPQQLLPGAVHGDAARHPPLSPRRPAGTRQAGVASGSGRPRRPRAARGPRASPPRADRRGPAVPSQEVAVLSAMAHSPVQSGLPGMQNLKADPEELFTKLEKIGKGSFGEVFKGIDNRTQKVVAIKIIDLEEAEDEIEDIQQEITVLSQCDSPYVTKYYGSYLKDTKLWIIMEYLGGGSALDLLEPGPLDETQIATILREILKGLDYLHSEKKIHRDIKAANVLLSEHGEVKLADFGVAGQLTDTQIKRNTFVGTPFWMAPEVIKQSAYDSKADIWSLGITAIELARGEPPHSECTPAWATRAKLS

SEQ ID NO: 897067 - protein, 126 aa, Homo sapiens
KGIDNRTQKVVAIKIIDLEEAEDEIEDIQQEITVLSQCDSPYVTKYYGSYLKVRLKITCFSVLQHLAEVPAGNGKDSDRTKHSRFQSKERCFDLRDQKNLALIVPSSQMSPIEIFVVKVFDVLILF

SEQ ID NO: 897068 - protein, 485 aa, Homo sapiens
MALPPFFGQGRPGPPPPQPPPPAPFGCPPPPLPSPAFPPPLPQRPGPFPGASAPFLQPPLALQPRASAEASRGGGGAGAFYPVPPPPLPPPPPQCRPFPGTDAGERPRPPPPGPGPPWSPRWPEAPPPPADVLGDAALQRLRDRQWLEAVFGTPRRAGCPVPQRTHAGPSLGEVRARLLRALRLVRRLRGLSQALREAEADGAAWVLLYSQTAPLRAELAERLQPLTQAAYVGEARRRLERVRRRRLRLRERAREREAEREAEAARAVEREQEIDRWRVKCVQEVEEKKREQELKAAADGVLSEVRKKQADTKRMVDILRALEKLRKLRKEAAARKGVCPPASADETFTHHLQRLRKLIKKRSELYEAEERALRVMLEGEQEEERKRELEKKQRKEKEKILLQKREIESKLFGDPDEFPLAHLLEPFRQYYLQAEHSLPALIQIRHDWDQYLVPSDHPKGNFVPQGWVLPPLPSNDIWATAVKLH

SEQ ID NO: 897069 - protein, 171 aa, Homo sapiens
MVDILRALEKLRKLRKEAAARKGVCPPASADETFTHHLQRLRKLIKKRSELYEAEERALRVMLEGEQEEERKRELEKKQRKEKEKILLQKREIESKLFGDPDEFPLAHLLEPFRQYYLQAEHSLPALIQIRHDWDQYLVPSDHPKGNFVPQGWVLPPLPSNDIWATAVKLH

SEQ ID NO: 897070 - protein, 171 aa, Homo sapiens; identical to SEQ ID NO: 897069

SEQ ID NO: 897071 - protein, 425 aa, Homo sapiens
MALPPFFGQGRPGPPPPQPPPPAPFGCPPPPLPSPAFPPPLPQRPGPFPGASAPFLQPPLALQPRASAEASRGGGGAGAFYPVPPPPLPPPPPQCRPFPGTDAGERPRPPPPGPGPPWSPRWPEAPPPPADVLGDAALQRLRDRQWLEAVFGTPRRAGCPVPQRTHAGPSLGEVRARLLRALRLVRRLRGLSQALREAEADGAAWVLLYSQTAPLRAELAERLQPLTQAAYVGEARRRLERVRRRRLRLRERAREREAEREAEAARAVEREQEIDRWRVKCVQEVEEKKREQELKAAADGVLSEVRKKQADTKRMVDILRALEKLRKLRKEAAARKGVCPPASADETFTHHLQRLRKLIKKRSELYEAEERALRVMLEGEQEEERKRELEKKQRKEKEKILLQKREIESKLFGDPGMLLYNQWRK

SEQ ID NO: 897072 - protein, 273 aa, Homo sapiens
LLLNSRPGRRNMKRHEMVVAKHSALCSRFAQDLWLEQNIKDSFQKVTLSRYGKYGHKNLQLRKGCKSVDECKGHQGGYNGLNQCLKITTSKIFQCNKYVKVMHKFSNSNRHKIRHTENKHFRCKECDKSLCMLSRLTQHKKIHTRENFYKCEECGKTFNWSTNLSKPKKIHTGEKPYKCEVCGKAFHQSSILTKHKIIRTGEKPYKCAHCGKAFKQSSHLTRHKIIHTEEKPYKCEQCGKVFKQSPTLTKHQIIYTGEEPYKCEECGKAFNLS

SEQ ID NO: 897073 - protein, 308 aa, Homo sapiens
MTSSGSGGVFVSLQRVLQVWPSLFCVLLLLEAQPLWRCDLVIGRFTAKTPGSPEKPRNALCSRFAQDLWLEQNIKDSFQKVTLSRYGKYGHKNLQLRKGCKSVDECKGHQGGYNGLNQCLKITTSKIFQCNKYVKVMHKFSNSNRHKIRHTENKHFRCKECDKSLCMLSRLTQHKKIHTRENFYKCEECGKTFNWSTNLSKPKKIHTGEKPYKCEVCGKAFHQSSILTKHKIIRTGEKPYKCAHCGKAFKQSSHLTRHKIIHTEEKPYKCEQCGKVFKQSPTLTKHQIIYTGEEPYKCEECGKAFNLS

SEQ ID NO: 897074 - protein, 915 aa, Homo sapiens [sequence omitted]

SEQ ID NO: 897075 - protein, 125 aa, Homo sapiens
MTRHADRIISLFTFAVGVNICLGFTAHRIKRAEGWEEGPPTVLSDSPWTNISGSCKGRCFELQEAGPPDCRCDNLCKSYTSCCHDFDELCLKTARGWECTKDRCGEVRNEENACHCSEDWRVALG

SEQ ID NO: 897076 - protein, 863 aa, Homo sapiens [sequence omitted]

SEQ ID NO: 897077 - protein, 863 aa, Homo sapiens [sequence omitted]

SEQ ID NO: 897078 - protein, 845 aa, Homo sapiens
MARRSSFQSCQIISLFTFAVGVNICLGFTAHRIKRAEGWEEGPPTVLSDSPWTNISGSCKGRCFELQEAGPPDCRCDNLCKSYTSCCHDFDELCLKTARGWECTKDRCGEVRNEENACHCSEDCLARGDCCTNYQVVCKGESHWVDDDCEEIKAAECPAGFVRPPLIIFSVDGFRASYMKKGSKVMPNIEKLRSCGTHSPYMRPVYPTKTFPNLYTLATGLYPESHGIVGNSMYDPVFDATFHLRGREKFNHRWWGGQPLWITATKQGVKAGTFFWSVVIPHERRILTILQWLTLPDHERPSVYAFYSEQPDFSGHKYGPFGPEMTNPLREIDKIVGQLMDGRMEDVTCDRTEFLSNYLTNVDDITLVPGTLGRIRSKFSNNAKYDPKAIIANLTCKKPDQHFKPYLKQHLPKRLHYANNRRIEDIHLLVERRWHVARKPLDVYKKPSGKCFFQGDHGFDNKVNSMQTVFVGYGPTFKYKTKVPPFENIELYNVMCDLLGLKPAPNNGTHGSLNHLLRTNTFRPTMPEEVTRPNYPGIMYLQSDFDLGCTCDDKVEPKNKLDELNKRLHTKGSTEERHLLYGRPAVLYRTRYDILYHTDFESGYSEIFLMPLWTSYTVSKQAEVSSVPDHLTSCVRPDVRVSPSFSQNCLAYKNDKQMSYGFLFPPYLSSSPEAKYDAFLVTNMVPMYPAFKRVWNYFQRVLVKKYASERNGVNVISGPIFDYDYDGLHDTEDKIKQYVEGSSIPVPTHYYSIITSCLDFTQPADKCDGPLSVSSFILPHRPDNEESCNSSEDESKWVEELMKMHTARVRDIEHLTSLDFFRKTSRSYPEILTLKTYLHTYESEI

SEQ ID NO: 897079 - protein, 870 aa, Homo sapiens
MARRSSFQSCQIISLFTFAVGVNICLGFTAHRIKRAEGWEEGPPTVLSDSPWTNISGSCKGRCFELQEAGPPDCRCDNLCKSYTSCCHDFDELCLKTARGWECTKDRCGEVRNEENACHCSEDCLARGDCCTNYQVVCKGESHWVDDDCEEIKAAECPAGFVRPPLIIFSVDGFRASYMKKGSKVMPNIEKLRSCGTHSPYMRPVYPTKTFPNLYTLATGLYPESHGIVGNSMYDPVFDATFHLRGREKFNHRWWGGQPLWITATKQGVKAGTFFWSVVIPHERRILTILQWLTLPDHERPSVYAFYSEQPDFSGHKYGPFGPEMTNPLREIDKIVGQLMDGRMEDVTCDRTEFLSNYLTNVDDITLVPGTLGRIRSKFSNNAKYDPKAIIANLTCKKPDQHFKPYLKQHLPKRLHYANNRRIEDIHLLVERRWHVARKPLDVYKKPSGKCFFQGDHGFDNKVNSMQTVFVGYGPTFKYKTKVPPFENIELYNVMCDLLGLKPAPNNGTHGSLNHLLRTNTFRPTMPEEVTRPNYPGIMYLQSDFDLGCTCDDKVEPKNKLDELNKRLHTKGSTEAETRKFRGSRNENKENINGNFEPRKERHLLYGRPAVLYRTRYDILYHTDFESGYSEIFLMPLWTSYTVSKQAEVSSVPDHLTSCVRPDVRVSPSFSQNCLAYKNDKQMSYGFLFPPYLSSSPEAKYDAFLVTNMVPMYPAFKRVWNYFQRVLVKKYASERNGVNVISGPIFDYDYDGLHDTEDKIKQYVEGSSIPVPTHYYSIITSCLDFTQPADKCDGPLSVSSFILPHRPDNEESCNSSEDESKWVEELMKMHTARVRDIEHLTSLDFFRKTSRSYPEILTLKTYLHTYESEI

SEQ ID NO: 897080 - protein, 841 aa, Homo sapiens
MTRHADRIISLFTFAVGVNICLGFTAHRIKRAEGWEEGPPTVLSDSPWTNISGSCKGRCFELQEAGPPDCRCDNLCKSYTSCCHDFDELCLKTARGWECTKDRCGEVRNEENACHCSEDCLARGDCCTNYQVVCKGESHWVDDDCEEIKAAECPAGFVRPPLIIFSVDGFRASYMKKGSKVMPNIEKLRSCGTHSPYMRPVYPTKTFPNLYTLATGLYPESHGIVGNSMYDPVFDATFHLRGREKFNHRWWGGQPLWITATKQGVKAGTFFWSVVIPHERRILTILQWLTLPDHERPSVYAFYSEQPDFSGHKYGPFGPEMTNPLREIDKIVGQLMDGRMEDVTCDRTEFLSNYLTNVDDITLVPGTLGRIRSKFSNNAKYDPKAIIANLTCKKPDQHFKPYLKQHLPKRLHYANNRRIEDIHLLVERRWHVARKPLDVYKKPSGKCFFQGDHGFDNKVNSMQTVFVGYGPTFKYKTKVPPFENIELYNVMCDLLGLKPAPNNGTHGSLNHLLRTNTFRPTMPEEVTRPNYPGIMYLQSDFDLGCTCDDKVEPKNKLDELNKRLHTKGSTEERHLLYGRPAVLYRTRYDILYHTDFESGYSEIFLMPLWTSYTVSKQAEVSSVPDHLTSCVRPDVRVSPSFSQNCLAYKNDKQMSYGFLFPPYLSSSPEAKYDAFLVTNMVPMYPAFKRVWNYFQRVLVKKYASERNGVNVISGPIFDYDYDGLHDTEDKIKQYVEGSSIPVPTHYYSIITSCLDFTQPADKCDGPLSVSSFILPHRPDNEESCNSSEDESKWVEELMKMHTARVRDIEHLTSLDFFRKTSRSYPEILTLKTYLHTYESEI

SEQ ID NO: 897081 - protein, 431 aa, Homo sapiens
PKLGTRARIEDIHLLVERRWHVARKPLDVYKKPSGKCFFQGDHGFDNKVNSMQTVFVGYGPTFKYKTKVPPFENIELYNVMCDLLGLKPAPNNGTHGSLNHLLRTNTFRPTMPEEVTRPNYPGIMYLQSDFDLGCTCDDKVEPKNKLDELNKRLHTKGSTEERHLLYGRPAVLYRTRYDILYHTDFESGYSEIFLMPLWTSYTVSKQAEVSSVPDHLTSCVRPDVRVSPSFSQNCLAYKNDKQMSYGFLFPPYLSSSPEAKYDAFLVTNMVPMYPAFKRVWNYFQRVLVKKYASERNGVNVISGPIFDYDYDGLHDTEDKIKQYVEGSSIPVPTHYYSIITSCLDFTQPADKCDGPLSVSSFILPHRPDNEESCNSSEDESKWVEELMKMHTARVRDIEHLTSLDFFRKTSRSYPEILTLKTYLHTYESEI

SEQ ID NO: 897082 - protein, 351 aa, Homo sapiens
MCDLLGLKPAPNNGTHGSLNHLLRTNTFRPTMPEEVTRPNYPGIMYLQSDFDLGCTCDDKVEPKNKLDELNKRLHTKGSTEERHLLYGRPAVLYRTRYDILYHTDFESGYSEIFLMPLWTSYTVSKQAEVSSVPDHLTSCVRPDVRVSPSFSQNCLAYKNDKQMSYGFLFPPYLSSSPEAKYDAFLVTNMVPMYPAFKRVWNYFQRVLVKKYASERNGVNVISGPIFDYDYDGLHDTEDKIKQYVEGSSIPVPTHYYSIITSCLDFTQPADKCDGPLSVSSFILPHRPDNEESCNSSEDESKWVEELMKMHTARVRDIEHLTSLDFFRKTSRSYPEILTLKTYLHTYESEI

SEQ ID NO: 897083 - protein, 335 aa, Homo sapiens
VMSSVPPSTLFFRPTMPEEVTRPNYPGIMYLQSDFDLGCTCDDKVEPKNKLDELNKRLHTKGSTEERHLLYGRPAVLYRTRYDILYHTDFESGYSEIFLMPLWTSYTVSKQAEVSSVPDHLTSCVRPDVRVSPSFSQNCLAYKNDKQMSYGFLFPPYLSSSPEAKYDAFLVTNMVPMYPAFKRVWNYFQRVLVKKYASERNGVNVISGPIFDYDYDGLHDTEDKIKQYVEGSSIPVPTHYYSIITSCLDFTQPADKCDGPLSVSSFILPHRPDNEESCNSSEDESKWVEELMKMHTARVRDIEHLTSLDFFRKTSRSYPEILTLKTYLHTYESEI

SEQ ID NO: 897084 - protein, 863 aa, Homo sapiens [sequence omitted]

SEQ ID NO: 897085 - protein, 863 aa, Homo sapiens [sequence omitted]

SEQ ID NO: 897086 - protein, 162 aa, Homo sapiens
GPRVSSVADWVWNYFQRVLVKKYASERNGVNVISGPIFDYDYDGLHDTEDKIKQYVEGSSIPVPTHYYSIITSCLDFTQPADKCDGPLSVSSFILPHRPDNEESCNSSEDESKWVEELMKMHTARVRDIEHLTSLDFFRKTSRSYPEILTLKTYLHTYESEI

SEQ ID NO: 897087 - protein, 109 aa, Homo sapiens
MYVEGSSIPVPTHYYSIITSCLDFTQPADKCDGPLSVSSFILPHRPDNEESCNSSEDESKWVEELMKMHTARVRDIEHLTSLDFFRKTSRSYPEILTLKTYLHTYESEI

SEQ ID NO: 897088 - protein, 653 aa, Homo sapiens
  misc_feature (635)..(635): Xaa can be any naturally occurring amino acid
  misc_feature (641)..(641): Xaa can be any naturally occurring amino acid
  misc_feature (652)..(652): Xaa can be any naturally occurring amino acid
MARRSSFQSCQIISLFTFAVGVNICLGFTAHRIKRAEGWEEGPPTVLSDSPWTNISGSCKGRCFELQEAGPPDCRCDNLCKSYTSCCHDFDELCLKTARGWECTKDRCGEVRNEENACHCSEDCLARGDCCTNYQVVCKGESHWVDDDCEEIKAAECPAGFVRPPLIIFSVDGFRASYMKKGSKVMPNIEKLRSCGTHSPYMRPVYPTKTFPNLYTLATGLYPESHGIVGNSMYDPVFDATFHLRGREKFNHRWWGGQPLWITATKQGVKAGTFFWSVVIPHERRILTILQWLTLPDHERPSVYAFYSEQPDFSGHKYGPFGPEMTNPLREIDKIVGQLMDGRMEDVTCDRTEFLSNYLTNVDDITLVPGTLGRIRSKFSNNAKYDPKAIIANLTCKKPDQHFKPYLKQHLPKRLHYANNRRIEDIHLLVERRWHVARKPLDVYKKPSGKCFFQGDHGFDNKVNSMQTVFVGYGPTFKYKTKVPPFENIELYNVMCDLLGLKPAPNNGTHGSLNHLLRTNTFRPTMPEEVTRPNYPGIMYLQSDFDLGCTCDDKVEPKNKLDELNKRLHTKGSTEERHLLYGRPAVLYRTRYDILYHTDFESGYSEIFLMPLWTSYTVSKQAEGSKRSLTNLDQXGVPGPXWSVVSPRGFQXQ

SEQ ID NO: 897089 - protein, 461 aa, Homo sapiens
MARRSSFQSCQIISLFTFAVGVNICLGFTAHRIKRAEGWEEGPPTVLSDSPWTNISGSCKGRCFELQEAGPPDCRCDNLCKSYTSCCHDFDELCLKTARGWECTKDRCGEVRNEENACHCSEDCLARGDCCTNYQVVCKGESHWVDDDCEEIKAAECPAGFVRPPLIIFSVDGFRASYMKKGSKVMPNIEKLRSCGTHSPYMRPVYPTKTFPNLYTLATGLYPESHGIVGNSMYDPVFDATFHLRGREKFNHRWWGGQPLWITATKQGVKAGTFFWSVVIPHERRILTILQWLTLPDHERPSVYAFYSEQPDFSGHKYGPFGPEESSYGSPFTPAKRPKRKVAPKRRQERPVAPPKKRRRKIHRMDHYAAETRQDKMTNPLREIDKIVGQLMDGLCTGSDAEKGKEEIRVPQMGFYQISGKLVSCFLSRPTHRITVGRQNPRLFRSGSLGKESRGKVPKSL

SEQ ID NO: 897090 - protein, 159 aa, Homo sapiens
MYPAFKRVWNYFQRVLVKKYASERNGVNVISGPIFDYDYDGLHDTEDKIKQYVEGSSIPVPTHYYSIITSCLDFTQPADKCDGPLSVSSFILPHRPDNEESCNSSEDESKWVEELMKMHTARVRDIEHLTSLDFFRKTSRSYPEILTLKTYLHTYESEI

SEQ ID NO: 897091 - protein, 828 aa, Homo sapiens
MARRSSFQSCQIISLFTFAVGVNICLGFTAHRIKRAEGWEEGPPTVLSDSPWTNISGSCKGRCFELQEAGPPDCRCDNLCKSYTSCCHDFDELCLKTARGWECTKDRCGEVRNEENACHCSEDCLARGDCCTNYQVVCKGESHWVDDDCEEIKAAECPAGFVRPPLIIFSVDGFRASYMKKGSKVMPNIEKLRSCGTHSPYMRPVYPTKTFPNLYTLATGLYPESHGIVGNSMYDPVFDATFHLRGREKFNHRWWGGQPLWITATKQGVKAGTFFWSVVIPHERRILTILQWLTLPDHERPSVYAFYSEQPDFSGHKYGPFGPEMTNPLREIDKIVGQLMDGRMEDVTCDRTEFLSNYLTNVDDITLVPGTLGRIRSKFSNNAKYDPKAIIANLTCKKPDQHFKPYLKQHLPKRLHYANNRRIEDIHLLVERRWHVARKPLDVYKKPSGKCFFQGDHGFDNKVNSMQTVFVGYGPTFKYKTKVPPFENIELYNVMCDLLGLKPAPNNGTHGSLNHLLRTNTFRPTMPEEVTRPNYPGIMYLQSDFDLGCTCDDKVEPKNKLDELNKRLHTKGSTEERHLLYGRPAVLYRTRYDILYHTDFESGYSEIFLMPLWTSYTVSKQAEVSSVPDHLTSCVRPDVRVSPSFSQNCLAYKNDKQMSYGFLFPPYLSSSPEAKYDAFLVTNMVPMYPAFKRVWNYFQRVLVKKYASERNGVNVISGPIFDYDYDGLHDTEDKIKQYVEGSSIPVPTHYYSIITSCLDFTQPADKCDGPLSVSSFILPHRPDNEESCNSPEDESQRVEESMKTHTARVRWTLDIGAPDNEPARDSKT

SEQ ID NO: 897092 - protein, 616 aa, Homo sapiens
MARRSSFQSCQIISLFTFAVGVNICLGFTAHRIKRAEGWEEGPPTVLSDSPWTNISGSCKGRCFELQEAGPPDCRCDNLCKSYTSCCHDFDELCLKTARGWECTKDRCGEVRNEENACHCSEDCLARGDCCTNYQVVCKGESHWVDDDCEEIKAAECPAGFVRPPLIIFSVDGFRASYMKKGSKVMPNIEKLRSCGTHSPYMRPVYPTKTFPNLYTLATGLYPESHGIVGNSMYDPVFDATFHLRGREKFNHRWWGGQPLWITATKQGVKAGTFFWSVVIPHERRILTILQWLTLPDHERPSVYAFYSEQPDFSGHKYGPFGPEMTNPLREIDKIVGQLMDGRMEDVTCDRTEFLSNYLTNVDDITLVPGTLGRIRSKFSNNAKYDPKAIIANLTCKKPDQHFKPYLKQHLPKRLHYANNRRIEDIHLLVERRWHVARKPLDVYKKPSGKCFFQGDHGFDNKVNSMQTVFVGYGPTFKYKTKVPPFENIELYNVMCDLLGLKPAPNNGTHGSLNHLLRTNTFRPTMPEEVTRPNYPGIMYLQSDFDLGCTCDDKVEPKNKLDELNKRLHTKGSTEGKGWLQNNQIRFFSFSKIEKASYLHYSVSTILFKIRICISK

SEQ ID NO: 897093 - protein, 336 aa, Homo sapiens
MARRSSFQSCQIISLFTFAVGVNICLGFTAHRIKRAEGWEEGPPTVLSDSPWTNISGSCKGRCFELQEAGPPDCRCDNLCKSYTSCCHDFDELCLKTARGWECTKDRCGEVRNEENACHCSEDCLARGDCCTNYQVVCKGESHWVDDDCEEIKAAECPAGFVRPPLIIFSVDGFRASYMKKGSKVMPNIEKLRSCGTHSPYMRPVYPTKTFPNLYTLATGLYPESHGIVGNSMYDPVFDATFHLRGREKFNHRWWGGQPLWITATKQGVKAGTFFWSVVIPHERRILTILQWLTLPDHERPSVYAFYSEQPDFSGHNFVDFPQRICHLRAKGPYLV

SEQ ID NO: 897094 - protein, 111 aa, Homo sapiens
MPVAERLTDHLSQDVFCLHESKFEEERMVAGWLTNYSQDSVTFEDVAVDFTQEEWTLLDQTQRNLYRDVMLENYKNLVAVDWESHINTKWSAPQQNFLQGKTSSVVEMNSE

SEQ ID NO: 897095 - protein, 565 aa, Homo sapiens
MPVAERLTDHLSQDVFCLHESKFEEERMVAGWLTNYSQDSVTFEDVAVDFTQEEWTLLDQTQRNLYRDVMLENYKNLVAVDWESHINTKWSAPQQNFLQGKTSSVVEMERNHFGEELFDFNQCEKALSEHSCLKTHRRTYFRKKTCECNQCEKAFRKPSIFTLHKKTDIGEELPNCNQCETAFSQHLHLVCKKTSQNLHLVCKKTHTQEKPYKCSDCEKGLPSSSHLRECVRIYGGERPYTHKEYVETFSHSTALFVHMQTQDGEKFYECKACGKPFTESSYLTQHLRTHSRVLPIEHKKFGKAFAFSPDLAKHIRLRTRGKHYVCNECGKEFTCFSKLNIHIRVHTGEKPYECNKCGKAFTDSSGLIKHRRTHTGEKPYECKECGKAFANSSHLTVHMRTHTGEKPYQCKECGKAFINSSSFKSHMQTHPGVKPYDCQQCGKAFIRSSFLIRHLRSHSAERPFECEECGKAFRYSSHLSQHKRIHTGERPYKCQKCGQAFSISSGLTVHMRTHTGERPFECQECGKAFTRSTYLIRHLRSHSVEKPYKECGQTFSNSSCLTECV

SEQ ID NO: 897096 - protein, 112 aa, Homo sapiens
MLAIGLSLCDHLSQDVFCLHESKFEEERMVAGWLTNYSQDSVTFEDVAVDFTQEEWTLLDQTQRNLYRDVMLENYKNLVAVDWESHINTKWSAPQQNFLQGKTSSVVEMNSE

SEQ ID NO: 897097 - protein, 112 aa, Homo sapiens; identical to SEQ ID NO: 897096

SEQ ID NO: 897098 - protein, 111 aa, Homo sapiens; identical to SEQ ID NO: 897094

SEQ ID NO: 897099 - protein, 112 aa, Homo sapiens; identical to SEQ ID NO: 897096

SEQ ID NO: 897100 - protein, 111 aa, Homo sapiens; identical to SEQ ID NO: 897094

SEQ ID NO: 897101 - protein, 321 aa, Homo sapiens
MAAGWLTTWSQNSVTFQEVAVDFSQEEWALLDPAQKNLYKDVMLENFRNLASVGYQLCRHSLISKVDQEQLKTDERGILQGDCADWETQLKPKDTIAMQNIPGGKTSNGINMNCVRTHSGEMPYECSDCGKAFIFQSSLKKHMRSHTGEKPYECDHCGKSFSQSSHLNVHKRTHTGEKPYDCKECGKAFTVPSSLQKHVRTHTGEKPYECSDCGKAFIDQSSLKKHTRSHTGEKPYECNQCGKSFSTGSYLIVHKRTHTGEKTYECKECGKAFRNSSCLRVHVRTHTGEKPYKCFQCEKAFSTSTNLIMHKRIHNGQKLHE

SEQ ID NO: 897102 - protein, 271 aa, Homo sapiens
MSFSLHSSCSVREQIPTGEKGDECSDYGKISPLSVHTKTGSVEEGLECNEHEKTFTDPLSLQNCVRTHSGEMPYECSDCGKAFIFQSSLKKHMRSHTGEKPYECDHCGKSFSQSSHLNVHKRTHTGEKPYDCKECGKAFTVPSSLQKHVRTHTGEKPYECSDCGKAFIDQSSLKKHTRSHTGEKPYECNQCGKSFSTGSYLIVHKRTHTGEKTYECKECGKAFRNSSCLRVHVRTHTGEKPYKCFQCEKAFSTSTNLIMHKRIHNGQKLHE

SEQ ID NO: 897103 - protein, 321 aa, Homo sapiens; identical to SEQ ID NO: 897101

SEQ ID NO: 897104 - protein, 321 aa, Homo sapiens; identical to SEQ ID NO: 897101

SEQ ID NO: 897105 - protein, 321 aa, Homo sapiens; identical to SEQ ID NO: 897101

SEQ ID NO: 897106 - protein, 271 aa, Homo sapiens; identical to SEQ ID NO: 897102

SEQ ID NO: 897107 - protein, 481 aa, Homo sapiens [sequence omitted]

SEQ ID NO: 897108 - protein, 311 aa, Homo sapiens [sequence omitted]

SEQ ID NO: 897109 - protein, 311 aa, Homo sapiens [sequence omitted]

SEQ ID NO: 897110 - protein, 311 aa, Homo sapiens [sequence omitted]

SEQ ID NO: 897111 - protein, 263 aa, Homo sapiens
MLQFVRAGARAWLRPTGSQGLSSLAEEAARATENPEQVASEGLPEPVLRKVELPVPTHRRPVQAWVESLRGFEQERVGLADLHPDVFATAPRLDILHQVAMWQKNFKRISYAKTKTRAEVRGGGRKPWPQKGTGRARHGSIRSPLWRGGGVAHGPRGPTSYYYMLPMKVRALGLKVALTVKLAQDDLHIMDSLELPTGDPQYLTELAHYRRWGDSVLLVDLTHEEMPQSIVEATSRLKTFNLIPAVGEQRAQAPRVRMCRLRC

SEQ ID NO: 897112 - protein, 263 aa, Homo sapiens; identical to SEQ ID NO: 897111

SEQ ID NO: 897113 - protein, 263 aa, Homo sapiens; identical to SEQ ID NO: 897111

SEQ ID NO: 897114 - protein, 357 aa, Homo sapiens
MLQFVRAGARAWLRPTGSQGLSSLAEEAARATENPEQVASEGLPEPVLRKVELPVPTHRRPVQAWVESLRGFEQERVGLADLHPDVFATAPRLDILHQVAMWQKNFKRISYAKTKTRAEVRGGGRKPWPQKGTGRARHGSIRSPLWRGGGVAHGPRGPTSYYYMLPMKVRALGLKVALTVKLAQDDLHIMDSLELPTGDPQYLTELAHYRRWGDSVLLVDLTHEEMPQSIVEATSRLKTFNLIPAVATRWRHEPKSSPVPQPTPLAGFPTSLRMKAQVIRVARQALHDVPRHLPALPSFALGLPHQNGSQESQPGTGPSLALGQQVMSWEQLLGQRLTGNKRPGRVWPRAAGLTKSH

SEQ ID NO: 897115 - protein, 288 aa, Homo sapiens
MLQFVRAGARAWLRPTGSQGLSSLAEEAARATENPEQVASEGLPEPVLRKVELPVPTHRRPVQAWVESLRGFEQERVGLADLHPDVFATAPRLDILHQVAMWQKNFKRISYAKTKTRAEVRGGGRKPWPQKGTGRARHGSIRSPLWRGGGVAHGPRGPTSYYYMLPMKVRALGLKVALTVKLAQDDLHIMDSLELPTGDPQYLTELAHYRRWGDSVLLVDLTHEEMPQSIVEATSRLKTFNLIPAVGLNVHSMLKHQTLVLTLPTVAFLEDKLLWQDSRYRPLGPPGS

SEQ ID NO: 897116 - protein, 307 aa, Homo sapiens
MLQFVRAGARAWLRPTGSQGLSSLAEEAARATENPEQVASEGLPEPVLRKVELPVPTHRRPVQAWVESLRGFEQERVGLADLHPDVFATAPRLDILHQVAMWQKNFKRISYAKTKTRAEVRGGGRKPWPQKGTGRARHGSIRSPLWRGGGVAHGPRGPTSYYYMLPMKVRALGLKVALTVKLAQDDLHIMDSLELPTGDPQYLTELAHYRRWGDSVLLVDLTHEEMPQSIVEATSRLKTFNLIPAVGLNVHSMLKHQTLVLTLPTVAFLEDKLLWQDSRYRPLQDGAGGFCASPGARLLRRGAGPGR

SEQ ID NO: 897117 - protein, 221 aa, Homo sapiens [sequence omitted]

SEQ ID NO: 897118 - protein, 324 aa, Homo sapiens
MLQHVLSRGCRGSGVCALAISGGIVYFALAGIERNQQCAPEETREPGGGADGLSRVLGACAIGLCLPVPTHRRPVQAWVESLRGFEQERVGLADLHPDVFATAPRLDILHQVAMWQKNFKRISYAKTKTRAEVRGGGRKPWPQKGTGRARHGSIRSPLWRGGGVAHGPRGPTSYYYMLPMKVRALGLKVALTVKLAQDDLHIMDSLELPTGDPQYLTELAHYRRWGDSVLLVDLTHEEMPQSIVEATSRLKTFNLIPAVGLNVHSMLKHQTLVLTLPTVAFLEDKLLWQDSRYRPLYPFSLPYSDFPRPLPHATQGPAATPYHC

SEQ ID NO: 897119 - protein, 220 aa, Homo sapiens
MKFGGVQGSSLTFAQPLQGLSSLAEEAARATENPEQVASEGLPEPVLRKVELPVPTHRRPVQAWVESLRGFEQERVGLADLHPDVFATAPRLDILHQVAMWQKNFKRISYAKTKTRAEVRGGGRKPWPQKGTGRARHGSIRSPLWRGGGVAHGPRGPTSYYYMLPMKVRALGLKVALTVKLAQDDLHIMDSLELPTGDPQYLTELAHYRRWGDSVLLVDL

SEQ ID NO: 897120 - protein, 188 aa, Homo sapiens
MLQFVRAGARAWLRPTGSQGLSSLAEEAARATENPEQVASEGLPEPVLRKVELPVPTHRRPVQAWVESLRGFEQERVGLADLHPDVFATAPRLDILHQVAMWQKNFKRISYAKTKTRAEVRGGGRKPWPQKGTGRARHGSIRSPLWRGGGVAHGPRGPTSYYYMLPMKVRALGLKRPPRTTVDVKHLF

SEQ ID NO: 897121 - protein, 175 aa, Homo sapiens
  misc_feature (169)..(169): Xaa can be any naturally occurring amino acid
MLQFVRAGARAWLRPTGSQGSSLTFAQPLQGLSSLAEEAARATENPEQVASEGLPEPVLRKVELPVPTHRRPVQAWVESLRGFEQERVGLADLHPDVFATAPRLDILHQVAMWQKNFKRISYAKTKTRAEVRGGGRKPWPQKGTGRARHGSIRSPLWRGGGFAHWPPGXNKFINL

SEQ ID NO: 897122 - protein, 170 aa, Homo sapiens
MGKRYFCDYCDRSFQDNLHNRKKHLNGLQHLKAKKVWYDMFRDAAAILLDEQNKRPCRKFLLTGQCDFGSNCRFSHMSERDLQELSIQVEEERRAREWLLDAPELPEGHLEDWLEKRAKRLSSAPSSRAEPIRTTVFQYPVGWPPVQELPPSLRAPPPGGWPLQPRVQWG

SEQ ID NO: 897123 - protein, 170 aa, Homo sapiens; identical to SEQ ID NO: 897122

SEQ ID NO: 897124 - protein, 170 aa, Homo sapiens; identical to SEQ ID NO: 897122

SEQ ID NO: 897125 - protein, 131 aa, Homo sapiens
MFRDAAAILLDEQNKRPCRKFLLTGQCDFGSNCRFSHMSERDLQELSIQVEEERRAREWLLDAPELPEGHLEDWLEKRAKRLSSAPSSRAEPIRTTVFQYPVGWPPVQELPPSLRAPPPGGWPLQPRVQWG

SEQ ID NO: 897126 - protein, 170 aa, Homo sapiens; identical to SEQ ID NO: 897122

SEQ ID NO: 897127 - protein, 109 aa, Homo sapiens
MGKRYFCDYCDRSFQDNLHNRKKHLNGLQHLKAKKVWYDMFRDAAAILLDEQNKRPCRKFLLTGQCDFGSNCRFSHMSERDLQELSIQVEEKRAKRLSSAPSSSSHQSQ

SEQ ID NO: 897128 - protein, 170 aa, Homo sapiens; identical to SEQ ID NO: 897122

SEQ ID NO: 897129 - protein, 170 aa, Homo sapiens; identical to SEQ ID NO: 897122

SEQ ID NO: 897130 - protein, 175 aa, Homo sapiens
MGKRYFCDYCDRSFQDNLHNRKKHLNGLQHLKAKKVWYDMFRDAAAILLDEQNKRPCRKFLLTGQCDFGSNCRFSHMSERDLQELSIQVEEERRAREWLLDAPELPEGHLEDWLEKRAKRLSSAPSSRPHGILCCGRAYVLNQSPTGGHEGYSHCLAAQCLPATPLFPWAQFLEG

SEQ ID NO: 897131 - protein, 221 aa, Homo sapiens
MSSRPGREDVGAAGARRPREPPEQELQRRREQKRRRHDAQQLQQLKHLESFYEKPPPGLIKEDETKPEDCIPDVPGNEHAREFLAHAPTKGLWMPLGKEVKVMQCWRCKRYGHRTGDKECPFFIKGNQKLEQFRVAHEDPMYDIIRDNKRHEKDVRIQQLKQLLEDSTSDEDRSSSSSSEGKEKHKKKKKKEKHKKRKKEKKKKKKRKHKSSKSNEGSDSE

SEQ ID NO: 897132 - protein, 207 aa, Homo sapiens
KHLAFRISFPSCCLSHLETCVLSILGLLWVQSLDGNKEGLASLRWQVPLSTEEEKHSALLSYEKPPPGLIKEDETKPEDCIPDVPGNEHAREFLAHAPTKGLWMPLGKEVKVMQCWRCKRYGHRTGDKECPFFIKGNQKLEQFRVAHEDPMYDIIRDNKRHEKDVRIQQLKQLLEDSTSDEDRSSSSSSEGKEKHKKKKKKEKHKKK

SEQ ID NO: 897133 - protein, 112 aa, Homo sapiens
MQSRSLVQASRLQLPFFIKGNQKLEQFRVAHEDPMYDIIRDNKRHEKDVRIQQLKQLLEDSTSDEDRSSSSSSEGKEKHKKKKKKEKHLKKRGKIKERKTFSEACQQYNHYS

SEQ ID NO: 897134 - protein, 148 aa, Homo sapiens
MSSRPGREDVGAAGARRPREPPEQELQRRREQKRRRHDAQQLQQLKHLESFYEKPPPGLIKEDETKPEDCIPDVPGNEHAREFLAHAPTKGLWMPLGKEVKVMQCECGRVSLIHATYMPQFTKSVYFFYLTCSHHSPLTAKARSPSSR

SEQ ID NO: 897135 - protein, 172 aa, Homo sapiens
KARYEAGVESAPRIICLDLSEEMSLPKLESFNGQQKTELPVTENVQTIPPPYVVRTILVYSRPPCQPQFSLTEPMKKMFQCPYFFFDVVYIHNGTEEKEEEMSWKDMFAFMGSLDTKGTSYKYEVALAGPALELHNCMAKLLAHPLQRPCQSHASYSLLEEEDEAIEVEATV

SEQ ID NO: 897136 - protein, 95 aa, Homo sapiens
SLIFLIQSHFILCSSVANHIPGPAAPSSRQLSLQTPPPTQFQPISFQVLSSLNQFLSLLVLQPAELHFLISEASGLRRTTSGCKDGGFLVSRRLI

SEQ ID NO: 897137 - protein, 329 aa, Homo sapiens
MEVAEPSSPTEEEEEEEEHSAEPRPRTRSNPEGAEDRAVGAQASVGSRSEGEGEAASADDGSLNTSGAGPKSWQVPPPAPEVQIRTPRVNCPEKVIICLDLSEEMSLPKLESFNGSKTNALNVSQKMIEMFVRTKHKIDKSHEFALVVVNDDTAWLSGLTSDPRELCSCLYDLETASCSTFNLEGLFSLIQQKTELPVTENVQTIPPPYVVRTILVYSRPPCQPQFSLTEPMKKMFQCPYFFFDVVYIHNGTEEKEEEMSWKDMFAFMGSLDTKGTSYKYEVALAGPALELHNCMAKLLAHPLQRPCQSHASYSLLEEEDEAIEVEATV

SEQ ID NO: 897138 - protein, 329 aa, Homo sapiens; identical to SEQ ID NO: 897137

SEQ ID NO: 897139 - protein, 329 aa, Homo sapiens; identical to SEQ ID NO: 897137

SEQ ID NO: 897140 - protein, 358 aa, Homo sapiens
RETLAGQAGLIGRGLKEVQATVSRSHTGAMEVAEPSSPTEEEEEEEEHSAEPRPRTRSNPEGAEDRAVGAQASVGSRSEGEGEAASADDGSLNTSGAGPKSWQVPPPAPEVQIRTPRVNCPEKVIICLDLSEEMSLPKLESFNGSKTNALNVSQKMIEMFVRTKHKIDKSHEFALVVVNDDTAWLSGLTSDPRELCSCLYDLETASCSTFNLEGLFSLIQQKTELPVTENVQTIPPPYVVRTILVYSRPPCQPQFSLTEPMKKMFQCPYFFFDVVYIHNGTEEKEEEMSWKDMFAFMGSLDTKGTSYKYEVALAGPALELHNCMAKLLAHPLQRPCQSHASYSLLEEEDEAIEVEATV

SEQ ID NO: 897141 - protein, 329 aa, Homo sapiens; identical to SEQ ID NO: 897137

SEQ ID NO: 897142 - protein, 329 aa, Homo sapiens; identical to SEQ ID NO: 897137

SEQ ID NO: 897143 - protein, 276 aa, Homo sapiens
MEVAEPSSPTEEEEEEEEHSAEPRPRTRSNPEGAEDRAVGAQASVGSRSEGEGEAASADDGSLNTSGAGPKSWQVPPPAPEVQIRTPRVNCPEKVIICLDLSEEMSLPKLESFNGSKTNALNVSQKMIEMFVRTKHKIDKSHEFALVVVNDDTAWLSGLTSDPRELCSCLYDLETASCSTFNLEGLFSLIQQKTELPVTENVQTIPPPYVVRTILVYSRPPCQPQFSLTEPMKKMFQCPYFFFDVVYIHNGTEEKEEEMSWKRRGFTVLAGMVLIS

SEQ ID NO: 897144 - protein, 301 aa, Homo sapiens
MEVAEPSSPTEEEEEEEEHSAEPRPRTRSNPEGAEDRAVGAQASVGSRSEGEGEAASADDGSLNTSGIICLDLSEEMSLPKLESFNGSKTNALNVSQKMIEMFVRTKHKIDKSHEFALVVVNDDTAWLSGLTSDPRELCSCLYDLETASCSTFNLEGLFSLIQQKTELPVTENVQTIPPPYVVRTILVYSRPPCQPQFSLTEPMKKMFQCPYFFFDVVYIHNGTEEKEEEMSWKDMFAFMGSLDTKGTSYKYEVALAGPALELHNCMAKLLAHPLQRPCQSHASYSLLEEEDEAIEVEATV

SEQ ID NO: 897145 - protein, 276 aa, Homo sapiens; identical to SEQ ID NO: 897143

SEQ ID NO: 897146 - protein, 333 aa, Homo sapiens
MEVAEPSSPTEEEEEEEEHSAEPRPRTRSNPEGAEDRAVGAQASVGSRSEGEGEAASADDGSLNTSGAGPKSWQVPPPAPEVQIRTPRVNCPEKVIICLDLSEEMSLPKLESFNGSKTNALNVSQKMIEMFVRTKHKIDKSHEFALVVVNDDTAWLSGLTSDPRELCSCLYDLETASCSTFNLEGLFSLIQQKTELPVTENVQTIPPPYVVRTILVYSRPPCQPQFSLTEPMKKWFPGAALFLGLDACVTIHNWHLRRTRRRIELEDMFAFMGSLDTKGTSYKYEVALAGPALELHNCMAKLLAHPLQRPCQSHASYSLLEEEDEAIEVEATV

SEQ ID NO: 897147 - protein, 337 aa, Homo sapiens
MEVAEPSSPTEEEEEEEEHSAEPRPRTRSNPEGAEDRAVGAQASVGSRSEGEGEAASADDGSLNTSGAGPKSWQVPPPAPEVQIRTPRVNCPEKVIICLDLSEEMSLPKLESFNGSKTNALNVSQKMIEMFVRTKHKIDKSHEFALVVVNDDTAWLSGLTSDPRELCSCLYDLETASCSTFTFSLAPPPDLEGLFSLIQQKTELPVTENVQTIPPPYVVRTILVYSRPPCQPQFSLTEPMKKMFQCPYFFFDVVYIHNGTEEKEEEMSWKDMFAFMGSLDTKGTSYKYEVALAGPALELHNCMAKLLAHPLQRPCQSHASYSLLEEEDEAIEVEATV

SEQ ID NO: 897148 - protein, 159 aa, Homo sapiens
MEVAEPSSPTEEEEEEEEHSAEPRPRTRSNPEGAEDRAVGAQASVGSRSEGEGEAASADDGSLNTSGAGPKSWQVPPPAPEVQIRTPRVNCPEKVIICLDLSEEMSLPKLESFNGSKTNALNVSQKMIEMFVRTKHKIDKSHEFALVVVNDDTAWPAEN

SEQ ID NO: 897149 - protein, 329 aa, Homo sapiens; identical to SEQ ID NO: 897137

SEQ ID NO: 897150 - protein, 159 aa, Homo sapiens; identical to SEQ ID NO: 897148

SEQ ID NO: 897151 - protein, 254 aa, Homo sapiens
MEVAEPSSPTEEEEEEEEHSAEPRPRTRSNPEGAEDRAVGAQASVGSRSEGEGEAASADDGSLNTSGAGPKSWQVPPPAPEVQIRTPRVNCPEKVIICLDLSEEMSLPKLESFNGQQKTELPVTENVQTIPPPYVVRTILVYSRPPCQPQFSLTEPMKKMFQCPYFFFDVVYIHNGTEEKEEEMSWKDMFAFMGSLDTKGTSYKYEVALAGPALELHNCMAKLLAHPLQRPCQSHASYSLLEEEDEAIEVEATV

SEQ ID NO: 897152 - protein, 224 aa, Homo sapiens
MEVAEPSSPTEEEEEEEEHSAEPRPRTRSNPEGAEDRAVGAQASVGSRSEGEGEAASADDGSLNTSGAGPKSWQVPPPAPEVQIRTPRVNCPEKVIICLDLSEEMSLPKLESFNGSKTNALNVSQKMIEMFVRTKHKIDKSHEFALVVVNDDTAWLSGLTSDPRELCSCLYDLETASCSTFKRADDSPAICGPHHPCLQPSTLPAPVLLDGAHEENVPVPIFLL

SEQ ID NO: 897153 - protein, 192 aa, Homo sapiens
MEVAEPSSPTEEEEEEEEHSAEPRPRTRSNPEGAEDRAVGAQASVGSRSEGEGEAASADDGSLNTSGAGPKSWQVPPPAPEVQIRTPRVNCPEKVIICLDLSEEMSLPKLESFNGSKTNALNVSQKMIEMFVRTKHKIDKSHEFALVVVNDDTAWLSGLTSDPRELCSCLYDLETASCSTFTTMALRRRRRR

SEQ ID NO: 897154 - protein, 211 aa, Homo sapiens
MEVAEPSSPTEEEEEEEEHSAEPRPRTRSNPEGAEDRAVGAQASVGSRSEGEGEAASADDGSLNTSGAGPKSWQVPPPAPEVQIRTPRVNCPEKVIICLDLSEEMSLPKLESFNGSKTNALNVSQKMIEMFVRTKHKIDKSHEFALVVVNDDTAWLSGLTSDPRELCSCLYDLETASCSTFRRGMFAECVNGFCLANSSSPFRTHPRCPLF

SEQ ID NO: 897155 - protein, 112 aa, Homo sapiens
  misc_feature (101)..(101): Xaa can be any naturally occurring amino acid
MEVAEPSSPTEEEEEEEEHSAEPRPRTRSNPEGAEDRAVGAQASVGSRSEGEGEAASADDGSLNTSGAGPKSWQVPPPAPEVQIRTPRVNCPEKVIIECAXVRGNVNAKAAQ

SEQ ID NO: 897156 - protein, 278 aa, Homo sapiens
MEVAEPSSPTEEEEEEEEHSAEPRPRTRSNPEGAEDRAVGAQASVGSRSEGEGEAASADDGSLNTSGAGPKSWQVPPPAPEVQIRTPRVNCPEKVIICLDLSEEMSLPKLESFNGSKTNALNVSQKMIEMFVRTKHKIDKSHEFALVVVNDDTAWLSGLTSDPRELCSCLYDLETASCSTFNLEGLFSLIQQKTELPVTENVQTIPPPYVVRTILVYSRPPCQPQFSLTEPMKKMFQCPYFFFDVVYIHNGTEEKEEEMSWKEAEAGESLEPGRQRLR

SEQ ID NO: 897157 - protein, 257 aa, Homo sapiens
MEVAEPSSPTEEEEEEEEHSAEPRPRTRSNPEGAEDRAVGAQASVGSRSEGEGEAASADDGSLNTSGAGPKSWQVPPPAPEVQIRTPRVNCPEKVIICLDLSEEMSLPKLESFNGSKTNALNVSQKMIEMFVRTKHKIDKSHEFALVVVNDDTAWLSGLTSDPRELCSCLYDLETASCSTFNLEGLFSLIQQKTELPVTENVQTIPPPYVVRTILVYSRPPCQPQSPWPKALVLKLGSLGPPGWGGSRRHVGYLAGS

SEQ ID NO: 897158 - protein, 248 aa, Homo sapiens
MEVAEPSSPTEEEEEEEEHSAEPRPRTRSNPEGAEDRAVGAQASVGSRSEGEGEAASADDGSLNTSGAGPKSWQVPPPAPEVQIRTPRVNCPEKVIICLDLSEEMSLPKLESFNGSKTNALNVSQKMIEMFVRTKHKIDKSHEFALVVVNDDTAWLSGLTSDPRELCSCLYDLETASCSTFNLEGLFSLIQQKTELPVTENVQTIPPPYVVRTILVYSRPPCQPQKLGSLGPPGWGGSRRHVGYLAGS

SEQ ID NO: 897159 - protein, 159 aa, Homo sapiens; identical to SEQ ID NO: 897148

SEQ ID NO: 897160 - protein, 266 aa, Homo sapiens
MEVAEPSSPTEEEEEEEEHSAEPRPRTRSNPEGAEDRAVGAQASVGSRSEGEGEAASADDGSLNTSGAGPKSWQVPPPAPEVQIRTPRVNCPEKVIICLDLSEEMSLPKLESFNGSKTNALNVSQKMIEMFVRTKHKIDKSHEFALVVVNDDTAWLSGLTSDPRELCSCLYDLETASCSTFNLEGLFSLIQQKTELPVTENVQTIPPPYVVRTILVYSRPPCQPQFSLTEPMKKMFQCPYFFFDVVYIHNGTEEKEEEMSWKPGGT

SEQ ID NO: 897161 - protein, 270 aa, Homo sapiens
MEVAEPSSPTEEEEEEEEHSAEPRPRTRSNPEGAEDRAVGAQASVGSRSEGEGEAASADDGSLNTSGAGPKSWQVPPPAPEVQIRTPRVNCPEKVIICLDLSEEMSLPKLESFNGSKTNALNVSQKMIEMFVRTKHKIDKSHEFALVVVNDDTAWLSGLTSDPRELCSCLYDLETASCSTFNLEGLFSLIQQKTELPVTECWPTPCSGLARAMLPTACWRRRMKPLRLRPLSEPSLYICTFLCKEVLGLKPWFSNWVPWDLRGGGVPGGT

SEQ ID NO: 897162 - protein, 166 aa, Homo sapiens
MEVAEPSSPTEEEEEEEEHSAEPRPRTRSNPEGAEDRAVGAQASVGSRSEGEGEAASADDGSLNTSGAGPKSWQVPPPAPEVQIRTPRVNCPEKVIICLDLSEEMSLPKLESFNGSKTNALNVSQKMIEMFVRTKHKIDKSHEFALVVVNDDTAWPCFLQPAGGGG

SEQ ID NO: 897163 - protein, 81 aa, Homo sapiens
  misc_feature (20)..(20): Xaa can be any naturally occurring amino acid
  misc_feature (22)..(22): Xaa can be any naturally occurring amino acid
  misc_feature (43)..(43): Xaa can be any naturally occurring amino acid
  misc_feature (53)..(54): Xaa can be any naturally occurring amino acid
MEVAEPSSPTEEEESCRIRXAXRLRWGEALTSSGDYTASGSAXLHSAAPWPLXXSFACIYSALILHDDEVTITEDKINCPH

SEQ ID NO: 897164 - protein, 67 aa, Homo sapiens
TADPGGYTEVDSVNLGRQQQTGFQEPVFDEARTEEQASKQQFVVKIGKESSSTYPGSWSWPAAKCCS

SEQ ID NO: 897165 - protein, 164 aa, Homo sapiens
MAEMATATRLLGWRVASWRLRPPLAGFVSQRAHSLLPVDDAINGLSEEQRQLRQTMAKFLQEHLAPKAQEIDRSNEFKNLREFWKQLGNLGVLGITAPVQYGGSGLGYLEHVLVMEEISRASGAVGLSYGAHSNLCINQLVRNGNEAQKEKYLPKVRKWKCNTR

SEQ ID NO: 897166 - protein, 426 aa, Homo sapiens
MAEMATATRLLGWRVASWRLRPPLAGFVSQRAHSLLPVDDAINGLSEEQRQLRQTMAKFLQEHLAPKAQEIDRSNEFKNLREFWKQLGNLGVLGITAPVQYGGSGLGYLEHVLVMEEISRASGAVGLSYGAHSNLCINQLVRNGNEAQKEKYLPKLISGEYIGALAMSEPNAGSDVVSMKLKAEKKGNHYILNGNKFWITNGPDADVLIVYAKTDLAAVPASRGITAFIVEKGMPGFSTSKKLDKLGMRGSNTCELIFEDCKIPAANILGHENKGVYVLMSGLDLERLVLAGGPLGLMQAVLDHTIPYLHVREAFGQKIGHFQLMQGKMADMYTRLMACRQYVYNVAKACDEGHCTAKDCAGVILYSAECATQVALDGIQCFGGNGYINDFPMGRFLRDAKLYEIGAGTSEVRRLVIGRAFNADFH

SEQ ID NO: 897167 - protein, 296 aa, Homo sapiens [sequence omitted]

SEQ ID NO: 897168 - protein, 426 aa, Homo sapiens; identical to SEQ ID NO: 897166

SEQ ID NO: 897169 - protein, 426 aa, Homo sapiens; identical to SEQ ID NO: 897166

SEQ ID NO: 897170 - protein, 374 aa, Homo sapiens
MAEMATATRLLGWRVASWRLRPPLAGFVSQRAHSLLPVDDAINGLSEEQRQLRQTMAKFLQEHLAPKAQEIDRSNEFKNLREFWKQLGNLGVLGITAPVQYGGSGLGYLEHVLVMEEISRASGAVGLSYGAHSNLCINQLVRNGNEAQKEKYLPKLISGEYIGALAMSEPNAGSDVVSMKLKAEKKGNHYILNGNKFWITNGPDADVLIVYAKTDLAAVPASRGITAFIVEKGMPGFSTSKKLDKLGMRGSNTCELIFEDCKIPAANILGHENKGVYVLMSGLDLERLVLAGGPLGLMQAVLDHTIPYLHVREAFGQKIGHFQLMQGKMADMYTRLMACRQYVYNVAKACDEGHCTAKDCAGVILYSAECALAL

SEQ ID NO: 897171 - protein, 325 aa, Homo sapiens
MAEMATATRLLGWRVASWRLRPPLAGFVSQRAHSLLPVDDAINGLSEEQRQLRQTMAKFLQEHLAPKAQEIDRSNEFKNLRVSWEARAVGGSQGVGLSCTAAWKSSHSFLEFWKQLGNLGVLGITAPVQYGGSGLGYLEHVLVMEEISRASGAVGLSYGAHSNLCINQLVRNGNEAQKEKYLPKLISGEYIGALAMSEPNAGSDVVSMKLKAEKKGNHYILNGNKFWITNGPDADVLIVYAKTDLAAVPASRGITAFIVEKGMPGFSTSKKLDKLGMRGSNTCELIFEDCKIPAANILGHENKGVYVLMSGLDLERLVLAGGPLG

SEQ ID NO: 897172 - protein, 277 aa, Homo sapiens
MVFWWRIGQATYRLWHKGPQSVCSSLTPEQAELRQTMAKFLQEHLAPKAQEIDRSNEFKNLREFWKQLGNLGVLGITAPVQYGGSGLGYLEHVLVMEEISRASGAVGLSYGAHSNLCINQLVRNGNEAQKEKYLPKLISGEYIGALAMSEPNAGSDVVSMKLKAEKKGNHYILNGNKFWITNGPDADVLIVYAKTDLAAVPASRGITAFIVEKGMPGFSTSKKLDKLGMRGSNTCELIFEDCKIPAANILGHENKGVYVLMSGLDLERLVLAGGPLG

SEQ ID NO: 897173 - protein, 389 aa, Homo sapiens
MAEMATATRLLGWRVASWRLRPPLAGFVSQRAHSLLPVDDAINGLSEEQRQLRQTMAKFLQEHLAPKAQEIDRSNEFKNLREFWKQLGNLGVLGITAPVQYGGSGLGYLEHVLVMEEISRASGAVGLSYGAHSNLCINQLVRNGNEAQKEKYLPKLISGEYIGALAMSEPNAGSDVVSMKLKAEKKGNHYILNGNKFWITNGPDADVLIVYAKTDLAAVPASRGITAFIVEKGMPGFSTSKKLDKLGMRGSNTCELIFEDCKIPAANILGHENKGVYVLMSGLDLERLVLAGGPLGLMQAVLDHTIPYLHVREAFGQKIGHFQLMQGKMADMYTRLMACRQYVYNVAKACDEGHCTAKDCAGVILYSAECATQVALDGIQCFVSRGISS

SEQ ID NO: 897174 - protein, 266 aa, Homo sapiens
MAEMATATRLLGWRVASWRLRPPLAGFVSQRAHSLLPVDDAINGLSEEQRQEFWKQLGNLGVLGITAPVQYGGSGLGYLEHVLVMEEISRASGAVGLSYGAHSNLCINQLVRNGNEAQKEKYLPKLISGEYIGALAMSEPNAGSDVVSMKLKAEKKGNHYILNGNKFWITNGPDADVLIVYAKTDLAAVPASRGITAFIVEKGMPGFSTSKKLDKLGMRGSNTCELIFEDCKIPAANILGHENKGVYVLMSGLDLERLVLAGGPLG

SEQ ID NO: 897175 - protein, 426 aa, Homo sapiens; identical to SEQ ID NO: 897166

SEQ ID NO: 897176 - protein, 197 aa, Homo sapiens
SALSFIETTSEPALGSLMARAPMYSPLLSYGAHSNLCINQLVRNGNEAQKEKYLPKLISGEYIGALAMSEPNAGSDVVSMKLKAEKKGNHYILNGNKFWITNGPDADVLIVYAKTDLAAVPASRGITAFIVEKGMPGFSTSKKLDKLGMRGSNTCELIFEDCKIPAANILGHENKGVYVLMSGLDLERLVLAGGPLG

SEQ ID NO: 897177 - protein, 426 aa, Homo sapiens; identical to SEQ ID NO: 897166

SEQ ID NO: 897178 - protein, 223 aa, Homo sapiens
FTPTGSMSHHRLYVTTTGSISHPRALSHTYGLCLTPTGSISHPWVSISHPRALCHNQRLYLTPMGSISRPSDPLKMGQMDLMVGLVLAGGPLGLMQAVLDHTIPYLHVREAFGQKIGHFQLMQGKMADMYTRLMACRQYVYNVAKACDEGHCTAKDCAGVILYSAECATQVALDGIQCFGGNGYINDFPMGRFLRDAKLYEIGAGTSEVRRLVIGRAFNADFH

SEQ ID NO: 897179 - protein, 108 aa, Homo sapiens
MQGNLADRGPRLKCMLAIRSTSSPAPAMRAHCTCYRNCAGLWISFNSGCTCAQHRVALDGISDFGGNGYINDFPMGRFLRDAKLYEIGAGTSEVRRLVIGRAFNADFH

SEQ ID NO: 897180 - protein, 426 aa, Homo sapiens; identical to SEQ ID NO: 897166

SEQ ID NO: 897181 - protein, 487 aa, Homo sapiens
MAEMATATRLLGWRVASWRLRPPLAGFVSQRAHSLLPVDDAINGLSEEQRQLRQTMAKFLQEHLAPKAQEIDRSNEFKNLREFWKQLGNLGVLGITAPVQYGGSGLGYLEHVLVMEEISRASGAVGLSYGAHSNLCINQLVRNGNEAQKEKYLPKLISGEYIGALAMSEPNAGSDVVSMKLKAEKKGNHYILNGNKFWITNGPDADVLIVYAKTDLAAVPASRGITAFIVEKGMPGFSTSKKLDKLGMRGSNTCELIFEDCKIPAANILGHENKGVYVLMSGLDLERLVLAGGPLGLMQAVLDHTIPYLHVREAFGQKIGHFQLMQGKMADMYTRLMACRQYVYNVAKACDEGHCTAKDCAGVILYSAECATQVALDGIQCFGQTFSAQHPPGREGETRGQTSLEQVSTARELRCKILLPELTPRVLLPQLASWISDQKLPFLKILLCSPTSLGQSSLAGFTKLRWPYPLLQPHLLPHPYTTALHLC

SEQ ID NO: 897182 - protein, 410 aa, Homo sapiens
MAEMATATRLLGWRVASWRLRPPLAGFVSQRAHSLLPVDDAINGLSEEQRQLRQTMAKFLQEHLAPKAQEIDRSNEFKNLREFWKQLGNLGVLGITAPVQYGGSGLGYLEHVLVMEEISRASGAVGLSYGAHSNLCINQLVRNGNEAQKEKYLPKLISGEYIGALAMSEPNAGSDVVSMKLKAEKKGNHYILNGNKFWITNGPDADVLIVYAKTDLAAVPASRGITAFIVEKGMPGFSTSKKLDKLGMRGSNTCELIFEDCKIPAANILGHENKGVYVLMSGLDLERLVLAGGPLGLMQAVLDHTIPYLHVREAFGQKIGHFQLMQGKMADMYTRLMACRQYVYNVAKACDEGHCTAKDCAGVILYSAECATQVALDGIQCFGHAPQPFLYTEPVNYQAPRKFFSGSQHL

SEQ ID NO: 897183 - protein, 448 aa, Homo sapiens
MAEMATATRLLGWRVASWRLRPPLAGFVSQRAHSLLPVDDAINGLSEEQRQLRQTMAKFLQEHLAPKAQEIDRSNEFKNLREFWKQLGNLGVLGITAPVQYGGSGLGYLEHVLVMEEISRASGAVGLSYGAHSNLCINQLVRNGNEAQKEKYLPKLISGEYIGALAMSEPNAGSDVVSMKLKAEKKGNHYILNGNKFWITNGPDADVLIVYAKTDLAAVPASRGITAFIVEKGMPGFSTSKKLDKLGMRGSNTCELIFEDCKIPAANILGHENKGVYVLMSGLDLERLVLAGGPLGLMQAVLDHTIPYLHVREAFGQKIGHFQPGSMDLGVCSVNICSWGNNEGQTFSAQHPPGREGETRGQTSLEQVSTARELRCKILLPELTPRVLLPQLASWISDQKLPFLKILLCSPTSLGQSSLAGFTKLRWPYPLLQPHLLPHPYTTALHLC

SEQ ID NO: 897184 - protein, 266 aa, Homo sapiens [sequence omitted]

SEQ ID NO: 897185 - protein, 534 aa, Homo sapiens
MAHGSVTFRDVAIDFSQEEWEFLDPAQRDLYRDVMWENYSNFISLAGPSISKPDVITLLDEERKEPGMVVREGTRRYCPDLESRYRTNTLSPEKDIYEIYSFQWDIMERIKSYSLQGSIFRNDWECKSKIEGEKEQQEGYFGQVKITSEKMTTYKRHNFLTEYQIVHNGEKVYECKECRKTFIRRSTLSQHLRIHTGEKPYKCKECGQAFRQRAHLIRHHKLHTGEKPYECKECGKAFTVLQELTQHQRLHTGEKPYECKECGKAFRVHQQLARHQRIHTGEKPYECKDCGKTFRQCTHLTRHQRLHTAEKLYECKECGKAFVCGPDLRVHQKIHFGEKPYECKECGKAFRICQQLTVHQSIHTGEKPYECKECGKTFRLRQQLVRHQRIHTREKPYECMECWKTFSSYSQLISHQSIHIGERPYECEECGKAFRLLSQLTQHQSIHTGEKPYECKECRKPFRLLSQLTQHQSIHTGEKPYECKECGKAFRLYSFLTQHQRIHTGEKPYKCKECKKAFRQHSHLTQHQKIHNGI

SEQ ID NO: 897186 - protein, 534 aa, Homo sapiens; identical to SEQ ID NO: 897185

SEQ ID NO: 897187 - protein, 206 aa, Homo sapiens
MLPPAIHFYLLPLACILMKSCLAFKNDATEILYSHVVKPVPAHPSSNSTLNQARNGGRHFSNTGLDRNTRVQVGCRELRSTKYISDGQCTSISPLKELVCAGECLPLPVLPNWIGGGYGTKYWSRRSSQEWRCVNDKTRTQRIQLQCQDGSTRTYKITVVTACKCKRYTRQHNESSHNFESMSPAKPVQHHRERKRASKSSKHSMS

SEQ ID NO: 897188 - protein, 262 aa, Homo sapiens
TQFPATHLNPSVPIQSSVTEMPASISGLIQRAVAAGVCWNSKRINQLFSQANPLLTMLPPAIHFYLLPLACILMKSCLAFKNDATEILYSHVVKPVPAHPSSNSTLNQARNGGRHFSNTGLDRNTRVQVGCRELRSTKYISDGQCTSISPLKELVCAGECLPLPVLPNWIGGGYGTKYWSRRSSQEWRCVNDKTRTQRIQLQCQDGSTRTYKITVVTACKCKRYTRQHNESSHNFESMSPAKPVQHHRERKRASKSSKHSMS

SEQ ID NO: 897189 - protein, 206 aa, Homo sapiens; identical to SEQ ID NO: 897187

SEQ ID NO: 897190 - protein, 188 aa, Homo sapiens
MLPPAIHFYLLPLACILMKSCLAFKNDATEILYSHVVKPVPAHPSSNSTLNQARNGGRHFSNTGLDRNTRVQVGCRELRSTKYISDGQCTSISPLKELVCAGECLPLPVLPNWIGGGYGTKYWSRRSSQEWRCVNDYKITVVTACKCKRYTRQHNESSHNFESMSPAKPVQHHRERKRASKSSKHSMS

SEQ ID NO: 897191 - protein, 952 aa, Homo sapiens
PKARVRARRVPLVLSPHTPMALPQPPPPAGARDPVTPEHWASGPPSQAQPLLRQEAKEEEEGEETGVQGAWGTGTAEQRRRGWGEAAESAAAEEGQAEVGGAAAAGSGSPAGGAGGGLGSWRPLLAWLQRRQPQCCPCAAPLSRSAAHCCHGGTKMAALAYNLGKREINHYFSVRSAKVLALVAVLLLAACHLASRRYRGNDSCEYLLSSGRFLGEKVWQPHSCMMHKYKISEAKNCLVDKHIAFIGDSRIRQLFYSFVKIINPQFKEEGNKHENIPFEDKTASVKVDFLWHPEVNGSMKQCIKVWTEDSIAKPHVIVAGAATWSIKIHNGSSEALSQYKMNITSIAPLLEKLAKTSDVYWVLQDPVYEDLLSENRKMITNEKIDAYNEAAVSILNSSTRNSKSNVKMFSVSKLIAQETIMESLDGLHLPESSRETTAMILMNVYCNKILKPVDGSCCQPRPPVTLIQKLAACFFTLSIIGYLIFYIIHRNAHRKNKPCTDLESGEEKKNIINTPVSSLEILLQSFCKLGLIMAYFYMCDRANLFMKENKFYTHSSFFIPIIYILVLGVFYNENTKETKVLNREQTDEWKGWMQLVILIYHISGASTFLPVYMHIRVLVAAYLFQTGYGHFSYFWIKGDFGIYRVCQVLFRLNFLVVVLCIVMDRPYQFYYFVPLVTVWFMVIYVTLALWPQIIQKKANGNCFWHFGLLLKLGFLLLFICFLAYSQGAFEKIFSLWPLSKCFELKGNVYEWWFRWRLDRYVVFHGMLFAFIYLALQKRQILSEGKGEPLFSNKISNFLLFISVVSFLTYSIWASSCKNKAECNELHPSVSVVQILAFILIRNIPGYARSVYSSFFAWFGKISLELFICQYHIWLAADTRGILVLIPGNPMLNIIVSTFIFVCVAHEISQITNDLAQIIIPKDNSSLLKRLACIAAFFCGLLILSSIQDKSKH

SEQ ID NO: 897192 - protein, 272 aa, Homo sapiens
PKARVRARRVPLVLSPHTPMALPQPPPPAGARDPVTPEHWASGPPSQAQPLLRQEAKEEEEGEETGVQGAWGTGTAEQRRRGWGEAAESAAAEEGQAEVGGAAAAGSGSPAGGAGGGLGSWRPLLAWLQRRQPQCCPCAAPLSRSAAHCCHGGTKMAALAYNLGKREINHYFSVRSAKVLALVAVLLLAACHLASRRYRGNDSCEYLLSSGRFLGEKVWQPHSCMMHKYKISEAKNCLVDKHIAFIGDSRIRQLFYSFVKIINPQFKEEGNK

SEQ ID NO: 897193 - protein, 258 aa, Homo sapiens
PKARVRARRVPLVLSPHTPMALPQPPPPAGARDPVTPEHWASGPPSQAQPLLRQEAKEEEEGEETGVQGAWGTGTAEQRRRGWGEAAESAAAEEGQAEVGGAAAAGSGSPAGGAGGGLGSWRPLLAWLQRRQPQCCPCAAPLSRSAAHCCHGGTKMAALAYNLGKREINHYFSVRSAKVLALVAVLLLAACHLASRRYRGNDSCEYLLSSGRFLGEKVWQPHSCMMHKYKISMKTFLLKTRLHQLKWIFCGILKLMVL

SEQ ID NO: 897194 - protein, 952 aa, Homo sapiens; identical to SEQ ID NO: 897191

SEQ ID NO: 897195 - protein, 290 aa, Homo sapiens [sequence omitted]

SEQ ID NO: 897196 - protein, 280 aa, Homo sapiens
PKARVRARRVPLVLSPHTPMALPQPPPPAGARDPVTPEHWASGPPSQAQPLLRQEAKEEEEGEETGVQGAWGTGTAEQRRRGWGEAAESAAAEEGQAEVGGAAAAGSGSPAGGAGGGLGSWRPLLAWLQRRQPQCCPCAAPLSRSAAHCCHGGTKMAALAYNLGKREINHYFSVRSAKVLALVAVLLLAACHLASRRYRGNDSCEYLLSSGRFLGEKVWQPHSCMMHKYKISEAKNCLVDKHIAFIGDSRIRQLFYSFVKIINPQFKEEGNKVKLVYSLL

SEQ ID NO: 897197 - protein, 952 aa, Homo sapiens; identical to SEQ ID NO: 897191

SEQ ID NO: 897198 - protein, 900 aa, Homo sapiens
PKARVRARRVPLVLSPHTPMALPQPPPPAGARDPVTPEHWASGPPSQAQPLLRQEAKEEEEGEETGVQGAWGTGTAEQRRRGWGEAAESAAAEEGQAEVGGAAAAVVRFPGGRRRWRPGELAAAPRLAAAAAAPVLPLCGAPFPLRRALLSWRNQDGGSGLQPGQAGDQPSCMMHKYKISEAKNCLVDKHIAFIGDSRIRQLFYSFVKIINPQFKEEGNKHENIPFEDKTASVKVDFLWHPEVNGSMKQCIKVWTEDSIAKPHVIVAGAATWSIKIHNGSSEALSQYKMNITSIAPLLEKLAKTSDVYWVLQDPVYEDLLSENRKMITNEKIDAYNEAAVSILNSSTRNSKSNVKMFSVSKLIAQETIMESLDGLHLPESSRETTAMILMNVYCNKILKPVDGSCCQPRPPVTLIQKLAACFFTLSIIGYLIFYIIHRNAHRKNKPCTDLESGEEKKNIINTPVSSLEILLQSFCKLGLIMAYFYMCDRANLFMKENKFYTHSSFFIPIIYILVLGVFYNENTKETKVLNREQTDEWKGWMQLVILIYHISGASTFLPVYMHIRVLVAAYLFQTGYGHFSYFWIKGDFGIYRVCQVLFRLNFLVVVLCIVMDRPYQFYYFVPLVTVWFMVIYVTLALWPQIIQKKANGNCFWHFGLLLKLGFLLLFICFLAYSQGAFEKIFSLWPLSKCFELKGNVYEWWFRWRLDRYVVFHGMLFAFIYLALQKRQILSEGKGEPLFSNKISNFLLFISVVSFLTYSIWASSCKNKAECNELHPSVSVVQILAFILIRNIPGYARSVYSSFFAWFGKISLELFICQYHIWLAADTRGILVLIPGNPMLNIIVSTFIFVCVAHEISQITNDLAQIIIPKDNSSLLKRLACIAAFFCGLLILSSIQDKSKH

SEQ ID NO: 897199 - protein, 952 aa, Homo sapiens; identical to SEQ ID NO: 897191

SEQ ID NO: 897200 - protein, 627 aa, Homo sapiens
PKARVRARRVPLVLSPHTPMALPQPPPPAGARDPVTPEHWASGPPSQAQPLLRQEAKEEEEGEETGVQGAWGTGTAEQRRRGWGEAAESAAAEEGQAEVGGAAAAGSGSPAGGAGGGLGSWRPLLAWLQRRQPQCCPCAAPLSRSAAHCCHGGTKMAALAYNLGKREINHYFSVRSAKVLALVAVLLLAACHLASRRYRGNDSCEYLLSSGRFLGEKVWQPHSCMMHKYKISEAKNCLVDKHIAFIGDSRIRQLFYSFVKIINPQFKEEGNKHENIPFEDKTASVKVDFLWHPEVNGSMKQCIKVWTEDSIAKPHVIVAGAATWSIKIHNGSSEALSQYKMNITSIAPLLEKLAKTSDVYWVLQDPVYEDLLSENRKMITNEKIDAYNEAAVSILNSSTRNSKSNVKMFSVSKLIAQETIMESLDGLHLPESSRETTAMILMNVYCNKILKPVDGSCCQPRPPVTLIQKLAACFFTLSIIGYLIFYIIHRNAHRKNKPCTDLESGEEKKNIINTPVSSLEILLQSFCKLGLIMAYFYMCDRANLFMKENKFYTHSSFFIPIIYILVLGVFYNENTKETKVLNREQTDEWKGWMQLVILIYHISGASTVSIWNLSSESIGSDVILMFL

SEQ ID NO: 897201 - protein, 393 aa, Homo sapiens
PSPTLPSPLSRDRSVAPTMMEDDGQPRTLYVGNLSRDVTEVLILQLFSQIGPCKSCKMITEHTSNDPYCFVEFYEHRDAAAALAAMNGRKILGKEVKVNWATTPSSQKKDTSNHFHVFVGDLSPEITTEDIKSAFAPFGKISDARVVKDMATGKSKGYGFVSFYNKLDAENAIVHMGGQWLGGRQIRTNWATRKPPAPKSTQENNTKQLRFEDVVNQSSPKNCTVYCGGIASGLTDQLMRQTFSPFGQIMEIRVFPEKGYSFVRFSTHESAAHAIVSVNGTTIEGHVVKCYWGKESPDMTKNFQQVDYSQWGQWSQVYGNPQQYGQYMANGWQVPPYGVYGQPWNQQGFGVDQSPSAAWMGGFGAQPPQGQAPPPVIPPPNQAGYGMASYQTQ

SEQ ID NO: 897202 - protein, 393 aa, Homo sapiens; identical to SEQ ID NO: 897201

SEQ ID NO: 897203 - protein, 336 aa, Homo sapiens
MITEHTSNDPYCFVEFYEHRDAAAALAAMNGRKILGKEVKVNWATTPSSQKKDTSNHFHVFVGDLSPEITTEDIKSAFAPFGKISDARVVKDMATGKSKGYGFVSFYNKLDAENAIVHMGGQWLGGRQIRTNWATRKPPAPKSTQENNTKQLRFEDVVNQSSPKNCTVYCGGIASGLTDQLMRQTFSPFGQIMEIRVFPEKGYSFVRFSTHESAAHAIVSVNGTTIEGHVVKCYWGKESPDMTKNFQQVDYSQWGQWSQVYGNPQQYGQYMANGWQVPPYGVYGQPWNQQGFGVDQSPSAAWMGGFGAQPPQGQAPPPVIPPPNQAGYGMASYQTQ

SEQ ID NO: 897204 - protein, 353 aa, Homo sapiens
MITEQPDSRRVNSSVGFSVLQHTSNDPYCFVEFYEHRDAAAALAAMNGRKILGKEVKVNWATTPSSQKKDTSNHFHVFVGDLSPEITTEDIKSAFAPFGKISDARVVKDMATGKSKGYGFVSFYNKLDAENAIVHMGGQWLGGRQIRTNWATRKPPAPKSTQENNTKQLRFEDVVNQSSPKNCTVYCGGIASGLTDQLMRQTFSPFGQIMEIRVFPEKGYSFVRFSTHESAAHAIVSVNGTTIEGHVVKCYWGKESPDMTKNFQQVDYSQWGQWSQVYGNPQQYGQYMANGWQVPPYGVYGQPWNQQGFGVDQSPSAAWMGGFGAQPPQGQAPPPVIPPPNQAGYGMASYQTQ

SEQ ID NO: 897205 - protein, 410 aa, Homo sapiens
PSPTLPSPLSRDRSVAPTMMEDDGQPRTLYVGNLSRDVTEVLILQLFSQIGPCKSCKMITEQPDSRRVNSSVGFSVLQHTSNDPYCFVEFYEHRDAAAALAAMNGRKILGKEVKVNWATTPSSQKKDTSNHFHVFVGDLSPEITTEDIKSAFAPFGKISDARVVKDMATGKSKGYGFVSFYNKLDAENAIVHMGGQWLGGRQIRTNWATRKPPAPKSTQENNTKQLRFEDVVNQSSPKNCTVYCGGIASGLTDQLMRQTFSPFGQIMEIRVFPEKGYSFVRFSTHESAAHAIVSVNGTTIEGHVVKCYWGKESPDMTKNFQQVDYSQWGQWSQVYGNPQQYGQYMANGWQVPPYGVYGQPWNQQGFGVDQSPSAAWMGGFGAQPPQGQAPPPVIPPPNQAGYGMASYQTQ

SEQ ID NO: 897206 - protein, 153 aa, Homo sapiens
PSPTLPSPLSRDRSVAPTMMEDDGQPRTLYVGNLSRDVTEVLILQLFSQIGPCKSCKMITEHTSNDPYCFVEFYEHRDAAAALAAMNGRKILGKEVKVNWATTPSSQKKDTSNHFHVFVGDLSPEITTEDIKSAFAPFGKISIAHKNGQDLEG

SEQ ID NO: 897207 - protein, 249 aa, Homo sapiens
MITEHTSNDPYCFVEFYEHRDAAAALAAMNGRKILGKEVKVNWATTPSSQKKDTSNHFHVFVGDLSPEITTEDIKSAFAPFGKISDARVVKDMATGKSKGYGFVSFYNKLDAENAIVHMGGQWLGGRQIRTNWATRKPPAPKSTQENNTKQLRFEDVVNQSSPKNCTVYCGGIASGLTDQLMRQTFSPFGQIMEIRVFPEKGYSFVRFSTHESAAHAIVSVNGTTIEGHVVKCYWGKESPDMTKNFQQR

SEQ ID NO: 897208 - protein, 153 aa, Homo sapiens; identical to SEQ ID NO: 897206

SEQ ID NO: 897209 - protein, 153 aa, Homo sapiens; identical to SEQ ID NO: 897206

SEQ ID NO: 897210 - protein, 249 aa, Homo sapiens; identical to SEQ ID NO: 897207

SEQ ID NO: 897211 - protein, 153 aa, Homo sapiens; identical to SEQ ID NO: 897206

SEQ ID NO: 897212 - protein, 153 aa, Homo sapiens; identical to SEQ ID NO: 897206

SEQ ID NO: 897213 - protein, 142 aa, Homo sapiens
PSPTLPSPLSRDRSVAPTMMEDDGQPRTLYVGNLSRDVTEVLILQLFSQIGPCKSCKMITEHTSNDPYCFVEFYEHRDAAAALAAMNGRKILGKEVKVNWATTPSSQKKDTSNHFHVFVGDLSPEITTEDIKSAFAPFGKIS

SEQ ID NO: 897214 - protein, 393 aa, Homo sapiens; identical to SEQ ID NO: 897201

SEQ ID NO: 897215 - protein, 375 aa, Homo sapiens
LKKKERKKERKYVGNLSRDVTEVLILQLFSQIGPCKSCKMITEHTSNDPYCFVEFYEHRDAAAALAAMNGRKILGKEVKVNWATTPSSQKKDTSNHFHVFVGDLSPEITTEDIKSAFAPFGKISDARVVKDMATGKSKGYGFVSFYNKLDAENAIVHMGGQWLGGRQIRTNWATRKPPAPKSTQENNTKQLRFEDVVNQSSPKNCTVYCGGIASGLTDQLMRQTFSPFGQIMEIRVFPEKGYSFVRFSTHESAAHAIVSVNGTTIEGHVVKCYWGKESPDMTKNFQQVDYSQWGQWSQVYGNPQQYGQYMANGWQVPPYGVYGQPWNQQGFGVDQSPSAAWMGGFGAQPPQGQAPPPVIPPPNQAGYGMASYQTQ

SEQ ID NO: 897216 - protein, 353 aa, Homo sapiens; identical to SEQ ID NO: 897204

SEQ ID NO: 897217 - protein, 153 aa, Homo sapiens; identical to SEQ ID NO: 897206

SEQ ID NO: 897218 - protein, 252 aa, Homo sapiens
MDARVVKDMATGKSKGYGFVSFYNKLDAENAIVHMGGQWLGGRQIRTNWATRKPPAPKSTQENNTKQLRFEDVVNQSSPKNCTVYCGGIASGLTDQLMRQTFSPFGQIMEIRVFPEKGYSFVRFSTHESAAHAIVSVNGTTIEGHVVKCYWGKESPDMTKNFQQVDYSQWGQWSQVYGNPQQYGQYMANGWQVPPYGVYGQPWNQQGFGVDQSPSAAWMGGFGAQPPQGQAPPPVIPPPNQAGYGMASYQTQ

SEQ ID NO: 897219 - protein, 248 aa, Homo sapiens
EVTLQELYAVSGYGFVSLYNKLDAENAIVHMGGQWLGGRQIRTNWATRKPPAPKSTQENNTKQLRFEDVVNQSSPKNCTVYCGGIASGLTDQLMRQTFSPFGQIMEIRVFPEKGYSFVRFSTHESAAHAIVSVNGTTIEGHVVKCYWGKESPDMTKNFQQVDYSQWGQWSQVYGNPQQYGQYMANGWQVPPYGVYGQPWNQQGFGVDQSPSAAWMGGFGAQPPQGQAPPPVIPPPNQAGYGMASYQTQ

SEQ ID NO: 897220 - protein, 233 aa, Homo sapiens
EVTLQELYAVSGYGFVSLYNKLDAENAIVHMGGQWLGGRQIRTNWATRKPPAPKSTQENNTKQLRFEDVVNQSSPKNCTVYCGGIASGLTDQLMRQTFSPFGQIMEIRVFPEKGYSFVRFSTHESAAHAIVSVNGTTIEGHVVKCYWGKESPDMTKNFQQPQQYGQYMANGWQVPPYGVYGQPWNQQGFGVDQSPSAAWMGGFGAQPPQGQAPPPVIPPPNQAGYGMASYQTQ

SEQ ID NO: 897221 - protein, 153 aa, Homo sapiens; identical to SEQ ID NO: 897206

SEQ ID NO: 897222 - protein, 153 aa, Homo sapiens; identical to SEQ ID NO: 897206

SEQ ID NO: 897223 - protein, 102 aa, Homo sapiens
MITEQPDSRRVNSSVGFSVLQHTSNDPYCFVEFYEHRDAAAALAAMNGRKILGKEVKVNWATTPSSQKKDTSNHFHVFVGDLSPEITTEDIKSAFAPFGKIS

SEQ ID NO: 897224 - protein, 747 aa, Homo sapiens
MSKLKSSESVRVVVRCRPMNGKEKAASYDKVVDVDVKLGQVSVKNPKGTAHEMPKTFTFDAVYDWNAKQFELYDETFRPLVDSVLQGFNGTIFAYGQTGTGKTYTMEGIRGDPEKRGVIPNSFDHIFTHISRSQNQQYLVRASYLEIYQEEIRDLLSKDQTKRLELKERPDTGVYVKDLSSFVTKSVKEIEHVMNVGNQNRSVGATNMNEHSSRSHAIFVITIECSEVGLDGENHIRVGKLNLVDLAGSERQAKTGAQGERLKEATKINLSLSALGNVISALVDGKSTHIPYRDSKLTRLLQDSLGGNAKTVMVANVGPASYNVEETLTTLRYANRAKNIKNKPRVNEDPKDALLREFQEEIARLKAQLEKRSIGRRKRREKRREGGGSGGGGEEEEEEGEEGEEEGDDKDDYWREQQEKLEIEKRAIVEDHSLVAEEKMRLLKEKEKKMEDLRREKDAAEMLGAKIKAMESKLLVGGKNIVDHTNEQQKILEQKRQEIAEQKRREREIQQQMESRDEETLELKETYSSLQQEVDIKTKKLKKLFSKLQAVKAEIHDLQEEHIKERQELEQTQNELTRELKLKHLIIENFIPLEEKSKIMNRAFFDEEEDHWKLHPITRLENQQMMKRPVSAVGYKRPLSQHARMSMMIRPEARYRAENIVLLELDMPSRTTRDYEGPAIAPKVQAALDAALQDEDEIQVDASSFESTANKKSKARPKSGRKSGSSSSSSGTPASQLYPQSRGLVPK

SEQ ID NO: 897225 - protein, 747 aa, Homo sapiens; identical to SEQ ID NO: 897224

SEQ ID NO: 897226 - protein, 747 aa, Homo sapiens; identical to SEQ ID NO: 897224

SEQ ID NO: 897227 - protein, 747 aa, Homo sapiens; identical to SEQ ID NO: 897224

SEQ ID NO: 897228 - protein, 747 aa, Homo sapiens; identical to SEQ ID NO: 897224

SEQ ID NO: 897229 - protein, 747 aa, Homo sapiens; identical to SEQ ID NO: 897224

SEQ ID NO: 897230 - protein, 747 aa, Homo sapiens; identical to SEQ ID NO: 897224

SEQ ID NO: 897231 - protein, 747 aa, Homo sapiens; identical to SEQ ID NO: 897224

SEQ ID NO: 897232 - protein, 109 aa, Homo sapiens
YLEDPVYATPNRPPFTLQPKTHIAANGNSDSSRAKNLMGFSLHCAKFWAGLSTFGNRKAGVSIEDPLGLRAQSENPGMEEWHESTGHEFMSRPSCRQQLAKPESKSNRI

SEQ ID NO: 897233 - protein, 89 aa, Homo sapiens
EEGDDKDDYWREQQEKLEIEKRAIVEDHSLVAEEKMRLLKEKEKKMEDLRREKDAAEMLGAKIKVPYPYPSLGPCPVTAFAFIKQQQKT

SEQ ID NO: 897234 - protein, 156 aa, Homo sapiens
MALEKSLVRLLLLVLILLVLGWVQPSLGKESRAKKFQRQHMDSDSSPSSSSTYCNQMMRRRNMTQGRCKPVNTFVHEPLVDVQNVCFQEKVTCKNGQGNCYKSNSSMHITDCRLTNGSRYPNCAYRTSPKERHIIVACEGSPYVPVHFDASVEDST

SEQ ID NO: 897235 - protein, 156 aa, Homo sapiens; identical to SEQ ID NO: 897234

SEQ ID NO: 897236 - protein, 156 aa, Homo sapiens; identical to SEQ ID NO: 897234

SEQ ID NO: 897237 - protein, 156 aa, Homo sapiens; identical to SEQ ID NO: 897234

SEQ ID NO: 897238 - protein, 176 aa, Homo sapiens
DRPLVRSGYGYTLFWESEATMALEKSLVRLLLLVLILLVLGWVQPSLGKESRAKKFQRQHMDSDSSPSSSSTYCNQMMRRRNMTQGRCKPVNTFVHEPLVDVQNVCFQEKVTCKNGQGNCYKSNSSMHITDCRLTNGSRYPNCAYRTSPKERHIIVACEGSPYVPVHFDASVEDST

SEQ ID NO: 897239 - protein, 156 aa, Homo sapiens; identical to SEQ ID NO: 897234

SEQ ID NO: 897240 - protein, 156 aa, Homo sapiens; identical to SEQ ID NO: 897234

SEQ ID NO: 897241 - protein, 138 aa, Homo sapiens
MALEKSLVRLLLLVLILLVLGWVQPSLGKESRAKKFQRQHMDSDSSPSSSSTYCNQMMRRRNMTQGRCKPVNTFVHEPLVDVQNVCFQVHITDCRLTNGSRYPNCAYRTSPKERHIIVACEGSPYVPVHFDASVEDST

SEQ ID NO: 897242 - protein, 138 aa, Homo sapiens; identical to SEQ ID NO: 897241

SEQ ID NO: 897243 - protein, 157 aa, Homo sapiens
MALEKSLVRLLLLVLILLVLGWVQPSLGKESRAKKFQRQHMDSDSSPSSSSTYCNQMMRRRNMTQGRCKPVNTFVHEPLVDVQNVCFQEKVTCKNGQGNCYKSNSSMHITDCRLTNGSRYPNSTSSSPQLPLPSSFPAVKEVTTVRAPIQHTHASLS

SEQ ID NO: 897244 - protein, 156 aa, Homo sapiens; identical to SEQ ID NO: 897234

SEQ ID NO: 897245 - protein, 156 aa, Homo sapiens; identical to SEQ ID NO: 897234

SEQ ID NO: 897246 - protein, 156 aa, Homo sapiens; identical to SEQ ID NO: 897234

SEQ ID NO: 897247 - protein, 173 aa, Homo sapiens
NSGASCSSRLFWESEATMALEKSLVRLLLLVLILLVLGWVQPSLGKESRAKKFQRQHMDSDSSPSSSSTYCNQMMRRRNMTQGRCKPVNTFVHEPLVDVQNVCFQEKVTCKNGQGNCYKSNSSMHITDCRLTNGSRYPNCAYRTSPKERHIIVACEGSPYVPVHFDASVEDST

SEQ ID NO: 897248 - protein, 116 aa, Homo sapiens
MDSDSSPSSSSTYCNQMMRRRNMTQGRCKPVNTFVHEPLVDVQNVCFQEKVTCKNGQGNCYKSNSSMHITDCRLTNGSRYPNCAYRTSPKERHIIVACEGSPYVPVHFDASVEDST

SEQ ID NO: 897249 - protein, 178 aa, Homo sapiens
MALEKSLVRLLLLVLILLVLGWVQPSLGKESRAKKFQRQHMDSDSSPSSSSTYCNQMMRRRNMTQGRCKPVNTFVHEPLVDVQNVCFQEKVTCKNGQGNCYKSNSSMHITDCRLTNGSRYPNCAYRTSPKERHIIVACEGSPYVPVHFDASVEDSTNLILSTAASSLFLPCCERSNYS

SEQ ID NO: 897250 - protein, 165 aa, Homo sapiens
MALEKSLVRLLLLVLILLVLGWVQPSLGKESRAKKFQRQHMDSDSSPSSSSTYCNQMMRRRNMTQGRCKPVNTFVHEPLVDVQNVCFQEKVTCKNGQGNCYKSNSSMHITDCRLTNGSRYPNCAYRTSPKERHIIVACEPTHNQKPTHHPPPPNNPKTTPQERER

SEQ ID NO: 897251 - protein, 1411 aa, Homo sapiens
MLRRILQRTPGRVGSQGSDLDSSATPINTVDVNNESSSEGFICPQCMKSLGSADELFKHYEAVHDAGNDSGHGGESNLALKRDDVTLLRQEVQDLQASLKEEKWYSEELKKELEKYQGLQQQEAKPDGLVTDSSAELQSLEQQLEEAQTENFNIKQMKDLFEQKAAQLATEIADIKSKYDEERSLREAAEQKVTRLTEELNKEATVIQDLKTELLQRPGIEDVAVLKKELVQVQTLMDNMTLERERESEKLKDECKKLQSQYASSEATISQLRSELAKGPQEVAVYVQELQKLKSSVNELTQKNQTLTENLLKKEQDYTKLEEKHNEESVSKKNIQATLHQKDLDCQQLQSRLSASETSLHRIHVELSEKGEATQKLKEELSEVETKYQHLKAEFKQLQQQREEKEQHGLQLQSEINQLHSKLLETERQLGEAHGRLKEQRQLSSEKLMDKEQQVADLQLKLSRLEEQLKEKVTNSTELQHQLDKTKQQHQEQQALQQSTTAKLREAQNDLEQVLRQIGDKDQKIQNLEALLQKSKENISLLEKEREDLYAKIQAGEGETAVLNQLQEKNHTLQEQVTQLTEKLKNQSESHKQAQENLHDQVQEQKAHLRAAQDRVLSLETSVNELNSQLNESKEKVSQLDIQIKAKTELLLSAEAAKTAQRADLQNHLDTAQNALQDKQQELNKITTQLDQVTAKLQDKQEHCSQLESHLKEYKEKYLSLEQKTEELEGQIKKLEADSLEVKASKEQALQDLQQQRQLNTDLELRATELSKQLEMEKEIVSSTRLDLQKKSEALESIKQKLTKQEEEKQILKQDFETLSQETKIQHEELNNRIQTTVTELQKVKMEKEALMTELSTVKDKLSKVSDSLKNSKSEFEKENQKGKAAILDLEKTCKELKHQLQVQMENTLKEQKELKKSLEKEKEASHQLKLELNSMQEQLIQAQNTLKQNEKEEQQLQGNINELKQSSEQKKKQIEALQGELKIAVLQKTELENKLQQQLTQAAQELAAEKEKISVLQNNYEKSQETFKQLQSDFYGRESELLATRQDLKSVEEKLSLAQEDLISNRNQIGNQNKLIQELKTAKATLEQDSAKKEQQLQERCKALQDIQKEKSLKEKELVNEKSKLAEIEEIKCRQEKEITKLNEELKSHKLESIKEITNLKDAKQLLIQQKLELQGKADSLKAAVEQEKRNQQILKDQVKKEEEELKKEFIEKEAKLHSEIKEKEVGMKKHEENEAKLTMQITALNENLGTVKKEWQSSQRRVSELEKQTDDLRGEIAVLEATVQNNQDERRALLERCLKGEGEIEKLQTKVLELQRKLDNTTAAVQELGRENQSLQIKHTQALNRKWAEDNEVQNCMACGKGFSVTVRRHHCRQCGNIFCAECSAKNALTPSSKKPVRVCDACFNDLQG

SEQ ID NO: 897252 - protein, 1411 aa, Homo sapiens; identical to SEQ ID NO: 897251

SEQ ID NO: 897253 - protein, 1411 aa, Homo sapiens; identical to SEQ ID NO: 897251

SEQ ID NO: 897254 - protein, 1411 aa, Homo sapiens; identical to SEQ ID NO: 897251

SEQ ID NO: 897255 - protein, 1411 aa, Homo sapiens; identical to SEQ ID NO: 897251

SEQ ID NO: 897256 - protein, 1425 aa, Homo sapiens
MLRRILQRTPGRVGSQGSDLDSSATPINTVDVNNESSSEGFICPQCMKSLGSADELFKHYEAVHDAGNDSGHGGESNLALKRDDVTLLRQEVQDLQASLKEEKWYSEELKKELEKYQGLQQQEAKPDGLVTDSSAELQSLEQQLEEAQTENFNIKQMKDLFEQKAAQLATEIADIKSKYDEERSLREAAEQKVTRLTEELNKEATVIQDLKTELLQRPGIEDVAVLKKELVQVQTLMDNMTLERERESEKLKDECKKLQSQYASSEATISQLRSELAKGPQEVAVYVQELQKLKSSVNELTQKNQTLTENLLKKEQDYTKLEEKHNEESVSKKNIQATLHQKDLDCQQLQSRLSASETSLHRIHVELSEKGEATQKLKEELSEVETKYQHLKAEFKQLQQQREEKEQHGLQLQSEINQLHSKLLETERQLGEAHGRLKEQRQLSSEKLMDKEQQVADLQLKLSRLEEQLKEKVTNSTELQHQLDKTKQQHQEQQALQQSTTAKLREAQNDLEQVLRQIGDKDQKIQNLEALLQKSKENISLLEKEREDLYAKIQAGEGETAVLNQLQEKNHTLQEQVTQLTEKLKNQSESHKQAQENLHDQVQEQKAHLRAAQDRVLSLETSVNELNSQLNESKEKVSQLDIQIKAKTELLLSAEAAKTAQRADLQNHLDTAQNALQDKQQELNKITTQLDQVTAKLQDKQEHCSQLESHLKEYKEKYLSLEQKTEELEGQIKKLEADSLEVKASKEQALQDLQQQRQLNTDLELRATELSKQLEMEKEIVSSTRLDLQKKSEALESIKQKLTKQEEEKQILKQDFETLSQETKIQHEELNNRIQTTVTELQKVKMEKEALMTELSTVKDKLSKVSDSLKNSKSEFEKENQKGKAAILDLEKTCKELKHQLQVQMENTLKEQKELKKSLEKEKELLIESRLVFVDASHASHQLKLELNSMQEQLIQAQNTLKQNEKEEQQLQGNINELKQSSEQKKKQIEALQGELKIAVLQKTELENKLQQQLTQAAQELAAEKEKISVLQNNYEKSQETFKQLQSDFYGRESELLATRQDLKSVEEKLSLAQEDLISNRNQIGNQNKLIQELKTAKATLEQDSAKKEQQLQERCKALQDIQKEKSLKEKELVNEKSKLAEIEEIKCRQEKEITKLNEELKSHKLESIKEITNLKDAKQLLIQQKLELQGKADSLKAAVEQEKRNQQILKDQVKKEEEELKKEFIEKEAKLHSEIKEKEVGMKKHEENEAKLTMQITALNENLGTVKKEWQSSQRRVSELEKQTDDLRGEIAVLEATVQNNQDERRALLERCLKGEGEIEKLQTKVLELQRKLDNTTAAVQELGRENQSLQIKHTQALNRKWAEDNEVQNCMACGKGFSVTVRRHHCRQCGNIFCAECSAKNALTPSSKKPVRVCDACFNDLQG

SEQ ID NO: 897257 - protein, 82 aa, Homo sapiens
IGVCSKSSGSCRRVSPGEKAPTPMLLPGSSEPRIDLTSSVPYGRLSVVPHEWLLSDPLLGDYTGPEIFFFVLTLLYHVLFLR

SEQ ID NO: 897258 - protein, 1160 aa, Homo sapiens
MLRRILQRTPGRVGSQGSDLDSSATPINTVDVNNESSSEGFICPQCMKSLGSADELFKHYEAVHDAGNDSGHGGESNLALKRDDVTLLRQEVQDLQASLKEEKWYSEELKKELEKYQGLQQQEAKPDGLVTDSSAELQSLEQQLEEAQTENFNIKQMKDLFEQKAAQLATEIADIKSKYDEERSLREAAEQKVTRLTEELNKEATVIQDLKTELLQRPGIEDVAVLKKELVQVQTLMDNMTLERERESEKLKDECKKLQSQYASSEATISQLRSELAKGPQEVAVYVQELQKLKSSVNELTQKNQTLTENLLKKEQDYTKLEEKHNEESVSKKNIQATLHQKDLDCQQLQSRLSASETSLHRIHVELSEKGEATQKLKEELSEVETKYQHLKAEFKQLQQQREEKEQHGLQLQSEINQLHSKLLETERQLGEAHGRLKEQRQLSSEKLMDKEQQVADLQLKLSRLEEQLKEKVTNSTELQHQLDKTKQQHQEQQALQQSTTAKLREAQNDLEQVLRQIGDKDQKIQNLEALLQKSKENISLLEKEREDLYAKIQAGEGETAVLNQLQEKNHTLQEQVTQLTEKLKNQSESHKQAQENLHDQVQEQKAHLRAAQDRVLSLETSVNELNSQLNESKEKVSQLDIQIKAKTELLLSAEAAKTAQRADLQNHLDTAQNALQDKQQELNKITTQLDQVTAKLQDKQEHCSQLESHLKEYKEKYLSLEQKTEELEGQIKKLEADSLEVKASKEQALQDLQQQRQLNTDLELRATELSKQLEMEKEIVSSTRLDLQKKSEALESIKQKLTKQEEEKQILKQDFETLSQETKIQHEELNNRIQTTVTELQKVKMEKEALMTELSTVKDKLSKVSDSLKNSKSEFEKENQKGKAAILDLEKTCKELKHQLQVQMENTLKEQKELKKSLEKEKEASHQLKLELNSMQEQLIQAQNTLKQNEKEEQQLQGNINELKQSSEQKKKQIEALQGELKIAVLQKTELENKLQQQLTQAAQELAAEKEKISVLQNNYEKSQETFKQLQSDFYGRESELLATRQDLKSVEEKLSLAQEDLISNRNQIGNQNKLIQELKTAKATLEQDSAKKEQQLQERCKALQDIQKEKSLKEKELVNEKSKLAEIEEIKCRQEKEITKLNEELKSHKLESIKRYQS

SEQ ID NO: 897259 - protein, 1141 aa, Homo sapiens
MLRRILQRTPGRVGSQGSDLDSSATPINTVDVNNESSSEGFICPQCMKSLGSADELFKHYEAVHDAGNDSGHGGESNLALKRDDVTLLRQEVQDLQASLKEEKWYSEELKKELEKYQGLQQQEAKPDGLVTDSSAELQSLEQQLEEAQTENFNIKQMKDLFEQKAAQLATEIADIKSKYDEERSLREAAEQKVTRLTEELNKEATVIQDLKTELLQRPGIEDVAVLKKELVQVQTLMDNMTLERERESEKLKDECKKLQSQYASSEATISQLRSELAKGPQEVAVYVQELQKLKSSVNELTQKNQTLTENLLKKEQDYTKLEEKHNEESVSKKNIQATLHQKDLDCQQLQSRLSASETSLHRIHVELSEKGEATQKLKEELSEVETKYQHLKAEFKQLQQQREEKEQHGLQLQSEINQLHSKLLETERQLGEAHGRLKEQRQLSSEKLMDKEQQVADLQLKLSRLEEQLKEKVTNSTELQHQLDKTKQQHQEQQALQQSTTAKLREAQNDLEQVLRQIGDKDQKIQNLEALLQKSKENISLLEKEREDLYAKIQAGEGETAVLNQLQEKNHTLQEQVTQLTEKLKNQSESHKQAQENLHDQVQEQKAHLRAAQDRVLSLETSVNELNSQLNESKEKVSQLDIQIKAKTELLLSAEAAKTAQRADLQNHLDTAQNALQDKQQELNKITTQLDQVTAKLQDKQEHCSQLESHLKEYKEKYLSLEQKTEELEGQIKKLEADSLEVKASKEQALQDLQQQRQLNTDLELRATELSKQLEMEKEIVSSTRLDLQKKSEALESIKQKLTKQEEEKQILKQDFETLSQETKIQHEELNNRIQTTVTELQKVKMEKEALMTELSTVKDKLSKVSDSLKNSKSEFEKENQKGKAAILDLEKTCKELKHQLQVQMENTLKEQKELKKSLEKEKEASHQLKLELNSMQEQLIQAQNTLKQNEKEEQQLQGNINELKQSSEQKKKQIEALQGELKIAVLQKTELENKLQQQLTQAAQELAAEKEKISVLQNNYEKSQETFKQLQSDFYGRESELLATRQDLKSVEEKLSLAQEDLISNRNQIGNQNKLIQELKTAKATLEQDSAKKEQQLQERCKALQDIQKEKSLKEKELVNEKSKLAEIEEIKCRQERYQS

SEQ ID NO: 897260 - protein, 131 aa, Homo sapiens
MRREETKEKGKKEEEKRRRGERRQRDQQRDAARDEESNRAANRSKQREPRRRATPTQRRDHAETRKCDQTAGVGGKRSGIRQAIVQVRVMYRSRQKQRAAPTRDKEETPPEEEKQSKTEHKRAVNKLKNSK

SEQ ID NO: 897261 - protein, 70 aa, Homo sapiens
VRGEHKVKLLLFPVLQPQPSRPPRAWQVLSQGLSVASIPAGRLSSGKLLGPSLKLNPHLAPGQASWVAGT

SEQ ID NO: 897262 - protein, 397 aa, Homo sapiens
MAPISLSWLLRLATFCHLTVLLAGQHHGVTKCNITCSKMTSKIPVALLIHYQQNQASCGKRAIILETRQHRLFCADPKEQWVKDAMQHLDRQAAALTRNGGTFEKQIGEVKPRTTPAAGGMDESVVLEPEATGESSSLEPTPSSQEAQRALGTSPELPTGVTGSSGTRLPPTPKAQDGGPVGTELFRVPPVSTAATWQSSAPHQPGPSLWAEAKTSEAPSTQDPSTQASTASSPAPEENAPSEGQRVWGQGQSPRPENSLEREEMGPVPAHTDAFQDWGPGSMAHVSVVPVSSEGTPSREPVASGSWTPKAEEPIHATMDPQRLGVLITPVPDAQAATRRQAVGLLAFLGLLFCLGVAMFTYQSLQGCPRKMAGEMAEGLRYIPRSCGSNSYVLVPV

SEQ ID NO: 897263 - protein, 397 aa, Homo sapiens; identical to SEQ ID NO: 897262

SEQ ID NO: 897264 - protein, 397 aa, Homo sapiens; identical to SEQ ID NO: 897262

SEQ ID NO: 897265 - protein, 397 aa, Homo sapiens; identical to SEQ ID NO: 897262

SEQ ID NO: 897266 - protein, 66 aa, Homo sapiens
STEPGIMRQTRNHVGTALEASEIPFGPLEYSQTSENLRPHLRSQTWAPSQRPQHTLLLPLACRPPH

SEQ ID NO: 897267 - protein, 273 aa, Homo sapiens [sequence omitted]

SEQ ID NO: 897268 - protein, 273 aa, Homo sapiens [sequence omitted]

SEQ ID NO: 897269 - protein, 273 aa, Homo sapiens [sequence omitted]

SEQ ID NO: 897270 - protein, 219 aa, Homo sapiens
RKRSNEEGEEDDTGKMRRRRRRKDVKVFRALILGELEKGQSQFQALCFVTQLQHNEIIPSEAMAKLRQKNPRAVRQAEEVRGLEHLHMDVAVNFSQGALLSPHLHNVCAEAVDAIYTRQEDVRFWLEQGVDSSVFEALPKASEQAELPRCRQVGDRGKPCVCHYGLSLAWYPCMLKYCHSRDRPTPYKCGIRSCQKSYSFDFYVPQRQLCLWDEDPYPG

SEQ ID NO: 897271 - protein, 273 aa, Homo sapiens [sequence omitted]

SEQ ID NO: 897272 - protein, 273 aa, Homo sapiens [sequence omitted]

SEQ ID NO: 897273 - protein, 273 aa, Homo sapiens [sequence omitted]

SEQ ID NO: 897274 - protein, 245 aa, Homo sapiens
MRLPGVPLARPALLLLLPLLAPLLGTGAPAELRVRVRLPDGQVTEESLQADSDADSISLELRKPDGTLVSFTADFKKLQHNEIIPSEAMAKLRQKNPRAVRQAEEVRGLEHLHMDVAVNFSQGALLSPHLHNVCAEAVDAIYTRQEDVRFWLEQGVDSSVFEALPKASEQAELPRCRQVGDRGKPCVCHYGLSLAWYPCMLKYCHSRDRPTPYKCGIRSCQKSYSFDFYVPQRQLCLWDEDPYPG

SEQ ID NO: 897275 - protein, 97 aa, Homo sapiens
CLSPPDGVDSSVFEALPKASEQAELPRCRQVGDRGKPCVCHYGLSLAWYPCMLKYCHSRDRPTPYKCGIRSCQKSYSFDFYVPQRQLCLWDEDPYPG

SEQ ID NO: 897276 - protein, 417 aa, Homo sapiens
MAGPFSRLLSARPGLRLLALAGAGSLAAGFLLRPEPVRAASERRRLYPPSAEYPDLRKHNNCMASHLTPAVYARLCDKTTPTGWTLDQCIQTGVDNPGHPFIKTVGMVAGDEETYEVFADLFDPVIQERHNGYDPRTMKHTTDLDASKIRSGYFDERYVLSSRVRTGRSIRGLSLPPACTRAERREVERVVVDALSGLKGDLAGRYYRLSEMTEAEQQQLIDDHFLFDKPVSPLLTAAGMARDWPDARGIWHNNEKSFLIWVNEEDHTRVISMEKGGNMKRVFERFCRGLKEVERLIQERGWEFMWNERLGYILTCPSNLGTGLRAGVHIKLPLLSKDSRFPKILENLRLQKRGTGGVDTAATGGVFDISNLDRLGKSEVELVQLVIDGVNYLIDCERRLERGQDIRIPTPVIHTKH

SEQ ID NO: 897277 - protein, 417 aa, Homo sapiens; identical to SEQ ID NO: 897276

SEQ ID NO: 897278 - protein, 417 aa, Homo sapiens; identical to SEQ ID NO: 897276

SEQ ID NO: 897279 - protein, 417 aa, Homo sapiens; identical to SEQ ID NO: 897276

SEQ ID NO: 897280 - protein, 417 aa, Homo sapiens; identical to SEQ ID NO: 897276

SEQ ID NO: 897281 - protein, 417 aa, Homo sapiens; identical to SEQ ID NO: 897276

SEQ ID NO: 897282 - protein, 372 aa, Homo sapiens
MAGPFSRLLSARPGLRLLALAGAGSLAAGFLLRPEPVRAASERRRLYPPSAEYPDLRKHNNCMASHLTPAVYARLCDKTTPTGWTLDQCIQTGVDNPGHPFIKTVGMVAGDEETYEVFADLFDPVIQERHNGYDPRTMKHTTDLDASKIRSGYFDERYVLSSRVRTGRSIRGLSLPPACTRAERREVERVVVDALSGLKGDLAGRYYRLSEMTEAEQQQLIDDHFLFDKPVSPLLTAAGMARDWPDARGIWHNNEKSFLIWVNEEDHTRVISMEKGGNMKRVFERFCRGLKEDSRFPKILENLRLQKRGTGGVDTAATGGVFDISNLDRLGKSEVELVQLVIDGVNYLIDCERRLERGQDIRIPTPVIHTKH

SEQ ID NO: 897283 - protein, 305 aa, Homo sapiens [sequence omitted]

SEQ ID NO: 897284 - protein, 417 aa, Homo sapiens; identical to SEQ ID NO: 897276

SEQ ID NO: 897285 - protein, 185 aa, Homo sapiens
MAGPFSRLLSARPGLRLLALAGAGSLAAGFLLRPEPVRAASERRRLYPPSAEYPDLRKHNNCMASHLTPAVYARLCDKTTPTGWTLDQCIQTGVDNPGHPFIKTVGMVAGDEETYEVFADLFDPVIQERHNGYDPRTMKHTTDLDASKSQNWPKHPRTQSASSLHSSRATRGGTCCGGCTEWPEG

SEQ ID NO: 897286 - protein, 168 aa, Homo sapiens
MKHTTDLDASKIRSGYFDERYVLSSRVRTGRSIRGLSLPPACTRAERREVERVVVDALSGLKGDLAGRYYRLSEMTEAEQQQLIDDHFLFDKPVSPLLTAAGMARDWPDARGIWHNNEKSFLIWVNEEDHTRVISMEKGGNMKRVFERFCRGLKEVREDYVGELGGRT

SEQ ID NO: 897287 - protein, 336 aa, Homo sapiens
MAGPFSRLLSARPGLRLLALAGAGSLAAGFLLRPEPVRAASERRRLYPPSQTWPTGQLPGNCTRSRRLCPPSMVTGYPLPSAEYPDLRKHNNCMASHLTPAVYARLCDKTTPTGWTLDQCIQTGVDNPGHPFIKTVGMVAGDEETYEVFADLFDPVIQERHNGYDPRTMKHTTDLDASKIRSGYFDERYVLSSRVRTGRSIRGLSLPPACTRAERREVERVVVDALSGLKGDLAGRYYRLSEMTEAEQQQLIDDHFLFDKPVSPLLTAAGMARDWPDARGIWHNNEKSFLIWVNEEDHTRVISMEKGGNMKRVFERFCRGLKEVREDYVGELGGRT

SEQ ID NO: 897288 - protein, 188 aa, Homo sapiens
MFPGFAMFPNERHNGYDPRTMKHTTDLDASKIRSGYFDERYVLSSRVRTGRSIRGLSLPPACTRAERREVERVVVDALSGLKGDLAGRYYRLSEMTEAEQQQLIDDHFLFDKPVSPLLTAAGMARDWPDARGIWHNNEKSFLIWVNEEDHTRVISMEKGGNMKRVFERFCRGLKEVREDYVGELGGRT

SEQ ID NO: 897289 - protein, 168 aa, Homo sapiens; identical to SEQ ID NO: 897286

SEQ ID NO: 897290 - protein, 417 aa, Homo sapiens; identical to SEQ ID NO: 897276

SEQ ID NO: 897291 - protein, 214 aa, Homo sapiens
MAGPFSRLLSARPGLRLLALAGAGSLAAGFLLRPEPVRAASERRRLYPPSAEYPDLRKHNNCMASHLTPAVYARLCDKTTPTGWTLDQCIQTGVDNPGHPFIKTVGMVAGDEETYEVFADLFDPVIQERHNGYDPRTMKHTTDLDASKIRSGYFDERYVLSSRVRTGRSIRGLSLPPACTRAERREVERVVVDALIYASNQWVWSCRRAVHRLL

SEQ ID NO: 897292 - protein, 417 aa, Homo sapiens; identical to SEQ ID NO: 897276

SEQ ID NO: 897293 - protein, 178 aa, Homo sapiens
MARDWPDARGIWHNNEKSFLIWVNEEDHTRVISMEKGGNMKRVFERFCRGLKEVERLIQERGWEFMWNERLGYILTCPSNLGTGLRAGVHIKLPLLSKDSRFPKILENLRLQKRGTGGVDTAATGGVFDISNLDRLGKSEVELVQLVIDGVNYLIDCERRLERGQDIRIPTPVIHTKH

SEQ ID NO: 897294 - protein, 281 aa, Homo sapiens
MAGPFSRLLSARPGLRLLALAGAGSLAAGFLLRPEPVRAASERRRLYPPSAEYPDLRKHNNCMASHLTPAVYARLCDKTTPTGWTLDQCIQTGVDNPGHPFIKTVGMVAGDEETYEVFADLFDPVIQERHNGYDPRTMKHTTDLDASKIRSGYFDERYVLSSRVRTGRSIRGLSLPPACTRAERREVERVVVDALSGLKGDLAGRYYRLSEMTEAEQQQLIDDHFLFDKPVSPLLTAAGMARDWPDARGIWHNNEKSFLIWVNEPPHSPRRTSLLVPTVIS

SEQ ID NO: 897295 - protein, 376 aa, Homo sapiens
MVTGYPLPSAEYPDLRKHNNCMASHLTPAVYARLCDKTTPTGWTLDQCIQTGVDNPGHPFIKTVGMVAGDEETYEVFADLFDPVIQERHNGYDPRTMKHTTDLDASKIRSGYFDERYVLSSRVRTGRSIRGLSLPPACTRAERREVERVVVDALSGLKGDLAGRYYRLSEMTEAEQQQLIDDHFLFDKPVSPLLTAAGMARDWPDARGIWHNNEKSFLIWVNEEDHTRVISMEKGGNMKRVFERFCRGLKEVERLIQERGWEFMWNERLGYILTCPSNLGTGLRAGVHIKLPLLSKDSRFPKILENLRLQKRGTGGVDTAATGGVFDISNLDRLGKSEVELVQLVIDGVNYLIDCERRLERGQDIRIPTPVIHTKH

SEQ ID NO: 897296 - protein, 384 aa, Homo sapiens
MVTGYPLPSAEYPDLRKHNNCMASHLTPAVYARLCDKTTPTGWTLDQCIQTGVDNPGHPFIKTVGMVAGDEETYEVFADLFDPVIQERHNGYDPRTMKHTTDLDASKIRSGIHIWKLARQRGLLLNPSSRVRTGRSIRGLSLPPACTRAERREVERVVVDALSGLKGDLAGRYYRLSEMTEAEQQQLIDDHFLFDKPVSPLLTAAGMARDWPDARGIWHNNEKSFLIWVNEEDHTRVISMEKGGNMKRVFERFCRGLKEVERLIQERGWEFMWNERLGYILTCPSNLGTGLRAGVHIKLPLLSKDSRFPKILENLRLQKRGTGGVDTAATGGVFDISNLDRLGKSEVELVQLVIDGVNYLIDCERRLERGQDIRIPTPVIHTKH

SEQ ID NO: 897297 - protein, 97 aa, Homo sapiens
STSVGPLVRLKLPLLSKDSRFPKILENLRLQKRGTGGVDTAATGGVFDISNLDRLGKSEVELVQLVIDGVNYLIDCERRLERGQDIRIPTPVIHTKH

SEQ ID NO: 897298 - protein, 720 aa, Homo sapiens
RRAGPALAGRVADMAGSRLPRQLFLQGVAAVFMFAFASLYTQIPGLYGPEGILPARRTLRPQGKGRWQQLWETPTLLWEAPRLGLDTAQGLELLSLLGALVALGALLLSPLRHPVIYLLLWAAYLSACQVGQVFLYFQWDSLLLETGFLAVLVAPLRPASHRKEAPQGRQAGALPHEDLPFWLVRWLLFRLMFASGVVKLTSRCPAWWGLTALTYHYETQCLPTPAAWFAHHLPVWLHKLSVVATFLIEIAVPPLFFAPIRRLRLAAFYSQVLLQVLIIITGNYNFFNLMTLVLTTALLDDQHLAAEPGHGSRKKTATSWPKALLATLSLLLELAVYGLLAYGTVHYFGLEVDWQQRTIHSRTTFTFHQFSQWLKTLTLPTVWLGVASLVWELLSALWRWTQVRGWLRKLSAVVQLSLVGTATVALFLISLVPYSYVEPGTHGRLWTGAHRLFGAVEHLQLANSYGLFRRMTGLGGRPEVVLEGSYDGHHWTEIEFMYKPGNLSRPPPVVVPHQPRLDWQMWFAALGPHTHSPWFTSLVLRLLQGKEPVIRLVQSQVARYPFHKQPPTYVRAQRYKYWFSQPGEQGQWWRRQWVEEFFPSVSLGDPTLETLLRQFGLQEKSPPRTRSANSTLAQALHWTRSQLSPLEAPALLWGLLMAVGAVRFVQALLAPCSLRSSPLAPVSGEKRRPASQKDSGAASEQATAAPNPCSSSSRTTRRKK

SEQ ID NO: 897299 - protein, 682 aa, Homo sapiens
MTCPPTGLYGPEGILPARRTLRPQGKGRWQQLWETPTLLWEAPRLGLDTAQGLELLSLLGALVALGALLLSPLRHPVIYLLLWAAYLSACQVGQVFLYFQWDSLLLETGFLAVLVAPLRPASHRKEAPQGRQAGALPHEDLPFWLVRWLLFRLMFASGVVKLTSRCPAWWGLTALTYHYETQCLPTPAAWFAHHLPVWLHKLSVVATFLIEIAVPPLFFAPIRRLRLAAFYSQVLLQVLIIITGNYNFFNLMTLVLTTALLDDQHLAAEPGHGSRKKTATSWPKALLATLSLLLELAVYGLLAYGTVHYFGLEVDWQQRTIHSRTTFTFHQFSQWLKTLTLPTVWLGVASLVWELLSALWRWTQVRGWLRKLSAVVQLSLVGTATVALFLISLVPYSYVEPGTHGRLWTGAHRLFGAVEHLQLANSYGLFRRMTGLGGRPEVVLEGSYDGHHWTEIEFMYKPGNLSRPPPVVVPHQPRLDWQMWFAALGPHTHSPWFTSLVLRLLQGKEPVIRLVQSQVARYPFHKQPPTYVRAQRYKYWFSQPGEQGQWWRRQWVEEFFPSVSLGDPTLETLLRQFGLQEKSPPRTRSANSTLAQALHWTRSQLSPLEAPALLWGLLMAVGAVRFVQALLAPCSLRSSPLAPVSGEKRRPASQKDSGAASEQATAAPNPCSSSSRTTRRKK

SEQ ID NO: 897300 - protein, 754 aa, Homo sapiens
MAGSRLPRQLFLQGVAAVFMFAFASLYTQIPGLYGPEGILPARRTLRPQGKGRWQQLWETPTLLWEAPRLGLDTAQGLELLSLLGALVALGALLLSPLRHPVIYLLLWAAYLSACQVGQVFLYFQWDSLLLETGFLAVLVAPLRPASHRKEAPQGRQAGALPHEDLPFWLVRWLLFRLMFASGVVKLTSRCPAWWGLTALTYHYETQCLPTPAAWFAHHLPVWLHKLSVVATFLIEIAVPPLFFAPIRRLRLAAFYSQVLLQVLIIITGNYNFFNLMTLVLTTALLDDQHLAAEPGHGSRKKTATSWPKALLATLSLLLELAVYGLLAYGTVHYFGLEVDWQQRTIHSRTSEADLGGPEGRGGPVLTPPSSTSFHLPPVFSVAEDTDAAHCVAGCGLPGLGAAECPVEVHGPGSREGAQVCRAGLTTLGPAHRWTQVRGWLRKLSAVVQLSLVGTATVALFLISLVPYSYVEPGTHGRLWTGAHRLFGAVEHLQLANSYGLFRRMTGLGGRPEVVLEGSYDGHHWTEIEFMYKPGNLSRPPPVVVPHQPRLDWQMWFAALGPHTHSPWFTSLVLRLLQGKEPVIRLVQSQVARYPFHKQPPTYVRAQRYKYWFSQPGEQGQWWRRQWVEEFFPSVSLGDPTLETLLRQFGLQEKSPPRTRSANSTLAQALHWTRSQLSPLEAPALLWGLLMAVGAVRFVQALLAPCSLRSSPLAPVSGEKRRPASQKDSGAASEQATAAPNPCSSSSRTTRRKK

SEQ ID NO: 897301 - protein, 720 aa, Homo sapiens; identical to SEQ ID NO: 897298

SEQ ID NO: 897302 - protein, 684 aa, Homo sapiens
ADSDLRDGGLYGPEGILPARRTLRPQGKGRWQQLWETPTLLWEAPRLGLDTAQGLELLSLLGALVALGALLLSPLRHPVIYLLLWAAYLSACQVGQVFLYFQWDSLLLETGFLAVLVAPLRPASHRKEAPQGRQAGALPHEDLPFWLVRWLLFRLMFASGVVKLTSRCPAWWGLTALTYHYETQCLPTPAAWFAHHLPVWLHKLSVVATFLIEIAVPPLFFAPIRRLRLAAFYSQVLLQVLIIITGNYNFFNLMTLVLTTALLDDQHLAAEPGHGSRKKTATSWPKALLATLSLLLELAVYGLLAYGTVHYFGLEVDWQQRTIHSRTTFTFHQFSQWLKTLTLPTVWLGVASLVWELLSALWRWTQVRGWLRKLSAVVQLSLVGTATVALFLISLVPYSYVEPGTHGRLWTGAHRLFGAVEHLQLANSYGLFRRMTGLGGRPEVVLEGSYDGHHWTEIEFMYKPGNLSRPPPVVVPHQPRLDWQMWFAALGPHTHSPWFTSLVLRLLQGKEPVIRLVQSQVARYPFHKQPPTYVRAQRYKYWFSQPGEQGQWWRRQWVEEFFPSVSLGDPTLETLLRQFGLQEKSPPRTRSANSTLAQALHWTRSQLSPLEAPALLWGLLMAVGAVRFVQALLAPCSLRSSPLAPVSGEKRRPASQKDSGAASEQATAAPNPCSSSSRTTRRKK

SEQ ID NO: 897303 - protein, 692 aa, Homo sapiens
AEGGPCSSGPRSGHGGLPAPAAALPPGRGGRLHVCFRFPLHANPRPVWPRGHPTCKEDAAASGQGALAAAVGDPDAAVGSAETGAGHGPGPGAAEPAGCTSGPGSPAAEPTAPPCHLLAALGRLPVSLPGGPGVPLFPVGLPAARDWLPGRAGGPAEASLPPQGGPPGQAGRGPAPRRPPLLAALTYHYETQCLPTPAAWFAHHLPVWLHKLSVVATFLIEIAVPPLFFAPIRRLRLAAFYSQVLLQVLIIITGNYNFFNLMTLVLTTALLDDQHLAAEPGHGSRKKTATSWPKALLATLSLLLELAVYGLLAYGTVHYFGLEVDWQQRTIHSRTTFTFHQFSQWLKTLTLPTVWLGVASLVWELLSALWRWTQVRGWLRKLSAVVQLSLVGTATVALFLISLVPYSYVEPGTHGRLWTGAHRLFGAVEHLQLANSYGLFRRMTGLGGRPEVVLEGSYDGHHWTEIEFMYKPGNLSRPPPVVVPHQPRLDWQMWFAALGPHTHSPWFTSLVLRLLQGKEPVIRLVQSQVARYPFHKQPPTYVRAQRYKYWFSQPGEQGQWWRRQWVEEFFPSVSLGDPTLETLLRQFGLQEKSPPRTRSANSTLAQALHWTRSQLSPLEAPALLWGLLMAVGAVRFVQALLAPCSLRSSPLAPVSGEKRRPASQKDSGAASEQATAAPNPCSSSSRTTRRKK

SEQ ID NO: 897304 - protein, 529 aa, Homo sapiens
MFASGVVKLTSRCPAWWGLTALTYHYETQCLPTPAAWFAHHLPVWLHKLSVVATFLIEIAVPPLFFAPIRRLRLAAFYSQVLLQVLIIITGNYNFFNLMTLVLTTALLDDQHLAAEPGHGSRKKTATSWPKALLATLSLLLELAVYGLLAYGTVHYFGLEVDWQQRTIHSRTTFTFHQFSQWLKTLTLPTVWLGVASLVWELLSALWRWTQVRGWLRKLSAVVQLSLVGTATVALFLISLVPYSYVEPGTHGRLWTGAHRLFGAVEHLQLANSYGLFRRMTGLGGRPEVVLEGSYDGHHWTEIEFMYKPGNLSRPPPVVVPHQPRLDWQMWFAALGPHTHSPWFTSLVLRLLQGKEPVIRLVQSQVARYPFHKQPPTYVRAQRYKYWFSQPGEQGQWWRRQWVEEFFPSVSLGDPTLETLLRQFGLQEKSPPRTRSANSTLAQALHWTRSQLSPLEAPALLWGLLMAVGAVRFVQALLAPCSLRSSPLAPVSGEKRRPASQKDSGAASEQATAAPNPCSSSSRTTRRKK

SEQ ID NO: 897305 - protein, 250 aa, Homo sapiens
  misc_feature (6)..(6): Xaa can be any naturally occurring amino acid
  misc_feature (9)..(9): Xaa can be any naturally occurring amino acid
DIWDHXIKXNPLGILKAAVGRFRMRRRVMSAGLSRPPPVVVPHQPRLDWQMWFAALGPHTHSPWFTSLVLRLLQGKEPVIRLVQSQVARYPFHKQPPTYVRAQRYKYWFSQPGEQGQWWRRQWVEEFFPSVSLGDPTLETLLRQFGLQEKSPPRTRSANSTLAQALHWTRSQLSPLEAPALLWGLLMAVGAVRFVQALLAPCSLRSSPLAPVSGEKRRPASQKDSGAASEQATAAPNPCSSSSRTTRRKK

SEQ ID NO: 897306 - protein, 224 aa, Homo sapiens [sequence omitted]

SEQ ID NO: 897307 - protein, 311 aa, Homo sapiens
RRAGPALAGRVADMAGSRLPRQLFLQGVAAVFMFAFASLYTQIPGLYGPEGILPARRTLRPQGKGRWQQLWETPTLLWEAPRLGLDTAQGLELLSLLGALVALGALLLSPLRHPVIYLLLWAAYLSACQVGQVFLYFQWDSLLLETGFLAVLVAPLRPASHRKEAPQGRQAGALPHEDLPFWLVRWLLFRLMFASGVVKLTSRCPAWWGLTALTYHYETQCLPTPAAWFAHHLPVWLHKLSVVATFLIEIAVPPLFFAPIRRLRLAAFYSQVLLQVLIIITGNYNFFNLMTLVLTTALLDDHNEFRHDDDE

SEQ ID NO: 897308 - protein, 126 aa, Homo sapiens
PGAVGGWVGGGGGLCPSWEDFPREAAVWGGALGAICSPHRDSLLLETGFLAVLVAPLRPASHRKEAPQGRQAGALPHEDLPFWLVRWLLFRRRLGVCRTQFETPVLCDAKMLTFLPCLSALLFGGA

SEQ ID NO: 897309 - protein, 732 aa, Homo sapiens
MAGSRLPRQLFLQGVAAVFMFAFASLYTQIPGLYGPEGILPARRTLRPQGKGRWQQLWETPTLLWEAPRLGLDTAQGLELLSLLGALVALGALLLSPLRHPVIYLLLWAAYLSACQVGQVFLYFQWDSLLLETGFLAVLVAPLRPASHRKEAPQGRQAGALPHEDLPFWLVRWLLFRLMFASGVVKLTSRCPAWWGLTALTYHYETQCLPTPAAWFAHHLPVWLHKLSVVATFLIEIAVPPLFFAPIRRLRLAAFYSQVLLQVLIIITGNYNFFNLMTLVLTTALLDDQHLAAEPGHGSRKKTATSWPKALLATLSLLLELAVYGLLAYGTVHYFGLEVDWQQRTIHSRTTFTFHQFSQWLKTLTLPTVWLGVASLVWELLSALWRYMAQEAGRGHRCAGPAGRPWVLAHRWTQVRGWLRKLSAVVQLSLVGTATVALFLISLVPYSYVEPGTHGRLWTGAHRLFGAVEHLQLANSYGLFRRMTGLGGRPEVVLEGSYDGHHWTEIEFMYKPGNLSRPPPVVVPHQPRLDWQMWFAALGPHTHSPWFTSLVLRLLQGKEPVIRLVQSQVARYPFHKQPPTYVRAQRYKYWFSQPGEQGQWWRRQWVEEFFPSVSLGDPTLETLLRQFGLQEKSPPRTRSANSTLAQALHWTRSQLSPLEAPALLWGLLMAVGAVRFVQALLAPCSLRSSPLAPVSGEKRRPASQKDSGAASEQATAAPNPCSSSSRTTRRKK

SEQ ID NO: 897310 - protein, 743 aa, Homo sapiens
MAGSRLPRQLFLQGVAAVFMFAFASLYTQIPGLYGPEGILPARRTLRPQGKGRWQQLWETPTLLWEAPRLGLDTAQGLELLSLLGALVALGALLLSPLRHPVIYLLLWAAYLSACQVGQVFLYFQWDSLLLETGFLAVLVAPLRPASHRKEAPQGRQAGALPHEDLPFWLVRWLLFRLMFASGVVKLTSRCPAWWGLTALTYHYETQCLPTPAAWFAHHLPVWLHKLSVVATFLIEIAVPPLFFAPIRRLRLAAFYSQVLLQVLIIITGNYNFFNLMTLVLTTALLDDQHLAAEPGHGSRKKTATSWPKALLATLSLLLELAVYGLLAYGTVHYFGLEVDWQQRTIHSRTTFTFHQFSQWLKTLTLPTVWLGVASLVWELLSALWRWTQVRGWLRKLSAVVQLSLVGTATVALFLISLVPYSYVEPGTHGRLWTGAHRLFGAVEHLQLANSYGLFRRMTGLGGRPEVVLEGSYDGHHWTEIEFMYKPGNLSRPPPVVVPHQPRLDWQMWFAALGPHTHSPWFTSLVLRLLQGKEPGAERAWGVWSGLGWSGVGRGGAGRVTVGATLMPLAAVIRLVQSQVARYPFHKQPPTYVRAQRYKYWFSQPGEQGQWWRRQWVEEFFPSVSLGDPTLETLLRQFGLQEKSPPRTRSANSTLAQALHWTRSQLSPLEAPALLWGLLMAVGAVRFVQALLAPCSLRSSPLAPVSGEKRRPASQKDSGAASEQATAAPNPCSSSSRTTRRKK

SEQ ID NO: 897311 - protein, 720 aa, Homo sapiens; identical to SEQ ID NO: 897298

SEQ ID NO: 897312 - protein, 720 aa, Homo sapiens; identical to SEQ ID NO: 897298

SEQ ID NO: 897313 - protein, 434 aa, Homo sapiens
LLAGRMPSGAYRPGICVSREAKQDMKTAATPWRRVRGPGARLSLLLELAVYGLLAYGTVHYFGLEVDWQQRTIHSRTTFTFHQFSQWLKTLTLPTVWLGVASLVWELLSALWRWTQVRGWLRKLSAVVQLSLVGTATVALFLISLVPYSYVEPGTHGRLWTGAHRLFGAVEHLQLANSYGLFRRMTGLGGRPEVVLEGSYDGHHWTEIEFMYKPGNLSRPPPVVVPHQPRLDWQMWFAALGPHTHSPWFTSLVLRLLQGKEPVIRLVQSQVARYPFHKQPPTYVRAQRYKYWFSQPGEQGQWWRRQWVEEFFPSVSLGDPTLETLLRQFGLQEKSPPRTRSANSTLAQALHWTRSQLSPLEAPALLWGLLMAVGAVRFVQALLAPCSLRSSPLAPVSGEKRRPASQKDSGAASEQATAAPNPCSSSSRTTRRKK

SEQ ID NO: 897314 - protein, 524 aa, Homo sapiens
MAGSRLPRQLFLQGVAAVFMFAFASLYTQIPGLYGPEGILPARRTLRPQGKGRWQQLWETPTLLWEAPRLGLDTAQGLELLSLLGALVALGALLLSPLRHPVIYLLLWAAYLSACQVGQVFLYFQWDSLLLETGFLAVLVAPLRPASHRKEAPQGRQAGALPHEDLPFWLVRWLLFRLMFASGVVKLTSRCPAWWGLTALTYHYETQCLPTPAAWFAHHLPVWLHKLSVVATFLIEIAVPPLFFAPIRRLRLAAFYSQVLLQVLIIITGNYNFFNLMTLVLTTALLDDQHLAAEPGHGSRKKTATSWPKALLATLSLLLELAVYGLLAYGTVHYFGLEVDWQQRTIHSRTTFTFHQFSQWLKTLTLPTVWLGVASLVWELLSALWRWTQVRGWLRKLSAVVQLSLVGTATVALFLISLVPYSYVEPGTHGRLWTGAHRLFGAVEHLQLANSYGLFRRMTGLGGRPEVVLEGSYDGHHWTEIEFMYKPGNLSRPPPVVVPHQPRLDWQMWFGNPWGQNNGIRAGG

SEQ ID NO: 897315 - protein, 79 aa, Homo sapiens
GGSASPDFLPSPAALTYHYETQCLPTPAAWFAHHLPVWLHKLSVVATFLIEIAVPPLFFAPIRRLRLAAFYSQVGEGRS

SEQ ID NO: 897316 - protein, 1187 aa, Homo sapiens
MADPAAPTPAAPAPAQAPAPAPEAVPAPAAAPVPAPAPASDSASGPSSDSGPEAGSQRLLFSHDLVSGRYRGSVHFGLVRLIHGEDSDSEGEEEGRGSSGCSEAGGAGHEEGRASPLRRGYVRVQWYPEGVKQHVKETKLKLEDRSVVPRDVVRHMRSTDSQCGTVIDVNIDCAVKLIGTNCIIYPVNSKDLQHIWPFMYGDYIAYDCWLGKVYDLKNQIILKLSNGARCSMNTEDGAKLYDVCPHVSDSGLFFDDSYGFYPGQVLIGPAKIFSSVQWLSGVKPVLSTKSKFRVVVEEVQVVELKVTWITKSFCPGGTDSVSPPPSVITQENLGRVKRLGCFDHAQRQLGERCLYVFPAKVEPAKIAWECPEKNCAQGEGSMAKKVKRLLKKQVVRIMSCSPDTQCSRDHSMEDPDKKGESKTKSEAESASPEETPDGSASPVEMQDEGAEEPHEAGEQLPPFLLKEGRDDRLHSAEQDADDEAADDTDDTSSVTSSASSTTSSQSGSGTSRKKSIPLSIKNLKRKHKRKKNKITRDFKPGDRVAVEVVTTMTSADVMWQDGSVECNIRSNDLFPVHHLDNNEFCPGDFVVDKRVQSCPDPAVYGVVQSGDHIGRTCMVKWFKLRPSGDDVELIGEEEDVSVYDIADHPDFRFRTTDIVIRIGNTEDGAPHKEDEPSVGQVARVDVSSKVEVVWADNSKTIILPQHLYNIESEIEESDYDSVEGSTSGASSDEWEDDSDSWETDNGLVEDEHPKIEEPPIPPLEQPVAPEDKGVVISEEAATAAVQGAVAMAAPMAGLMEKAGKDGPPKSFRELKEAIKILESLKNMTVEQLLTGSPTSPTVEPEKPTREKKFLDDIKKLQENLKKTLDNVAIVEEEKMEAVPDVERKEDKPEGQSPVKAEWPSETPVLCQQCGGKPGVTFTSAKGEVFSVLEFAPCESALAWSSPSPAFSGLLFVSPDLGAGWLVPSPDPSYCPRANHFPVVVTVLRPAAASGKSVGVLTCPARLADGAPGPLHEGLTILFPPLANHSFKKIEFQPPEAKKFFSTVRKEMALLATSLPEGIMVKTFEDRMASRLGMGRCRCAVWAPSPRGHQPWVPKPPGLTGTCEDTHPPTFYRGGHRLSQVRADSAVCPGQMVLSFLPPLKNYFLGRAQWLTPVIPALWEAEVGGSRGQEIETILANTVKPRLH

SEQ ID NO: 897317 - protein, 1292 aa, Homo sapiens [sequence omitted]

SEQ ID NO: 897318 - protein, 1292 aa, Homo sapiens [sequence omitted]

SEQ ID NO: 897319 - protein, 729 aa, Homo sapiens
IRLKILFSLSELIQTLEYLAVVLSDRSSTGILQSCPDPAVYGVVQSGDHIGRTCMVKWFKLRPSGDDVELIGEEEDVSVYDIADHPDFRFRTTDIVIRIGNTEDGAPHKEDEPSVGQVARVDVSSKVEVVWADNSKTIILPQHLYNIESEIEESDYDSVEGSTSGASSDEWEDDSDSWETDNGLVEDEHPKIEEPPIPPLEQPVAPEDKGVVISEEAATAAVQGAVAMAAPMAGLMEKAGKDGPPKSFRELKEAIKILESLKNMTVEQLLTGSPTSPTVEPEKPTREKKFLDDIKKLQENLKKTLDNVAIVEEEKMEAVPDVERKEDKPEGQSPVKAEWPSETPVLCQQCGGKPGVTFTSAKGEVFSVLEFAPSNHSFKKIEFQPPEAKKFFSTVRKEMALLATSLPEGIMVKTFEDRMDLFSALIKGPTRTPYEDGLYLFDIQLPNIYPAVPPHFCYLSQCSGRLNPNLYDNGKVCVSLLGTWIGKGTERWTSKSSLLQVLISIQGLILVNEPYYNEAGFDSDRGLQEGYENSRCYNEMALIRVVQSMTQLVRRPPEVFEQEIRQHFSTGGWRLVNRIESWLETHALLEKAQALPNGVPKASSSPEPPAVAELSDSGQQEPEDGGPAPGEASQGSDSEGGAQSLASASRDHTDQTSETAPDASVPPSVKPKKRRKSYRSFLPEKSGYPDIGFPLFPLSKGFIKSIRGVLTQFRAALLEAGMPECTEDK

SEQ ID NO: 897320 - protein, 514 aa, Homo sapiens
MLYKCWGRMMVFELSAHTTSTLLLTPDGPPKSFRELKEAIKILESLKNMTVEQLLTGSPTSPTVEPEKPTREKKFLDDIKKLQENLKKTLDNVAIVEEEKMEAVPDVERKEDKPEGQSPVKAEWPSETPVLCQQCGGKPGVTFTSAKGEVFSVLEFAPSNHSFKKIEFQPPEAKKFFSTVRKEMALLATSLPEGIMVKTFEDRMDLFSALIKGPTRTPYEDGLYLFDIQLPNIYPAVPPHFCYLSQCSGRLNPNLYDNGKVCVSLLGTWIGKGTERWTSKSSLLQVLISIQGLILVNEPYYNEAGFDSDRGLQEGYENSRCYNEMALIRVVQSMTQLVRRPPEVFEQEIRQHFSTGGWRLVNRIESWLETHALLEKAQALPNGVPKASSSPEPPAVAELSDSGQQEPEDGGPAPGEASQGSDSEGGAQSLASASRDHTDQTSETAPDASVPPSVKPKKRRKSYRSFLPEKSGYPDIGFPLFPLSKGFIKSIRGVLTQFRAALLEAGMPECTEDK

SEQ ID NO: 897321 - protein, 1381 aa, Homo sapiens
MADPAAPTPAAPAPAQAPAPAPEAVPAPAAAPVPAPAPASDSASGPSSDSGPEAGSQRLLFSHDLVSGRYRGSVHFGLVRLIHGEDSDSEGEEEGRGSSGCSEAGGAGHEEGRASPLRRGYVRVQWYPEGVKQHVKETKLKLEDRSVVPRDVVRHMRSTDSQCGTVIDVNIDCAVKLIGTNCIIYPVNSKDLQHIWPFMYGDYIAYDCWLGKVYDLKNQIILKLSNGARCSMNTEDGAKLYDVCPHVSDSGLFFDDSYGFYPGQVLIGPAKIFSSVQWLSGVKPVLSTKSKFRVVVEEVQVVELKVTWITKSFCPGGTDSVSPPPSVITQENLGRVKRLGCFDHAQRQLGERCLYVFPAKVEPAKIAWECPEKNCAQGEGSMAKKVKRLLKKQVVRIMSCSPDTQCSRDHSMEDPDKKGESKTKSEAESASPEETPDGSASPVEMQDEGAEEPHEAGEQLPPFLLKEGRDDRLHSAEQDADDEAADDTDDTSSVTSSASSTTSSQSGSGTSRKKSIPLSIKNLKRKHKRKKNKITRDFKPGDRVAVEVVTTMTSADVMWQDGSVECNIRSNDLFPVHHLDNNEFCPGDFVVDKRVQSCPDPAVYGVVQSGDHIGRTCMVKWFKLRPSGDDVELIGEEEDVSVYDIADHPDFRFRTTDIVIRIGNTEDGAPHKEDEPSVGQVARVDVSSKVEVVWADNSKTIILPQHLYNIESEIEESDYDSVEGSTSGASSDEWEDDSDSWETDNGLVEDEHPKIEEPPIPPLEQPVAPEDKGVVISEEAATAAVQGAVAMAAPMAGLMEKAGKDGPPKSFRELKEAIKILESLKNMTVEQLLTGSPTSPTVEPEKPTREKKFLDDIKKLQENLKKTLDNVAIVEEEKMEAVPDVERKEDKPEGQSPVKAEWPSETPVLCQQCGGKPGVTFTSAKGEVFSVLEFAPCESALAWSSPSPAFSGLLFVSPDLGAGWLVPSPDPSYCPRANHFPVVVTVLRPAAASGKSVGVLTCPARLADGAPGPLHEGLTILFPPLANHSFKKIEFQPPEAKKFFSTVRKEMALLATSLPEGIMVKTFEDRMDLFSALIKGPTRTPYEDGLYLFDIQLPNIYPAVPPHFCYLSQCSGRLNPNLYDNGKVCVSLLGTWIGKGTERWTSKSSLLQVLISIQGLILVNEPYYNEAGFDSDRGLQEGYENSRCYNEMALIRVVQSMTQLVRRPPEVFEQEIRQHFSTGGWRLVNRIESWLETHALLEKAQALPNGVPKASSSPEPPAVAELSDSGQQEPEDGGPAPGEASQGSDSEGGAQSLASASRDHTDQTSETAPDASVPPSVKPKKRRKSYRSFLPEKSGYPDIGFPLFPLSKGFIKSIRGVLTQFRAALLEAGMPECTEDK

SEQ ID NO: 897322 - protein, 1292 aa, Homo sapiens [sequence omitted]

SEQ ID NO: 897323 - protein, 1292 aa, Homo sapiens [sequence omitted]

SEQ ID NO: 897324 - protein, 248 aa, Homo sapiens
CPVCVQGTERWTSKSSLLQVLISIQGLILVNEPYYNEAGFDSDRGLQEGYENSRCYNEMALIRVVQSMTQLVRRPPEVFEQEIRQHFSTGGWRLVNRIESWLETHALLEKAQALPNGVPKASSSPEPPAVAELSDSGQQEPEDGGPAPGEASQGSDSEGGAQSLASASRDHTDQTSETAPDASVPPSVKPKKRRKSYRSFLPEKSGYPDIGFPLFPLSKGFIKSIRGVLTQFRAALLEAGMPECTEDK

SEQ ID NO: 897325 - protein, 128 aa, Homo sapiens
MALIRVVQSMTQLVRRPPEVFEQEIRQHFSTGGWRLVNRIESWLETHALLEKAQALPNGVPKASSSPEPPAVAELSDSGQQEPEDGGPAPGEASQGSDSEGGAQSLASASRDHTDQTSETAPDASVPP

SEQ ID NO: 897326 - protein, 369 aa, Homo sapiens
MVWAPLGPPRTDCLTLLHTPSKDSPKMSLEWLVAWSWSLDGLRDCIATGIQSVRDCDTTAVITVACLLVLFVWYCYHVGREQPRPYVSVNSLMQAADANGLQNGYVYCQSPECVRCTHNEGLNQKLYHNLQEYAKRYSWSGMGRIHKGIREQGRYLNSRPSIQKPEVFFLPDLPTTPYFSRDAQKHDVEVLERNFQTILCEFETLYKAFSNCSLPQGWKMNSTPSGEWFTFYLVNQGVCVPRNCRKCPRTYRLLGSLRTCIGNNVFGNACISVLSPGTVITEHYGPTNIRIRCHLGLKTPNGCELVVGGEPQCWAEGRCLLFDDSFLHAAFHEGSAEDGPRVVFMVDLWHPNVAAAERQALDFIFAPGR

SEQ ID NO: 897327 - protein, 369 aa, Homo sapiens; identical to SEQ ID NO: 897326

SEQ ID NO: 897328 - protein, 369 aa, Homo sapiens; identical to SEQ ID NO: 897326

SEQ ID NO: 897329 - protein, 117 aa, Homo sapiens
MAHGWFSWWICGIQTSQRPNGRLLISSLLRDDESISHAGVGEKGRGGAWADCGPVQSLPVLFPCSETCLSGKLLFGILYHVGSLFPLVIVNGNFSACISLDFFFFLPIICFRDSFLA

SEQ ID NO: 897330 - protein, 211 aa, Homo sapiens
MTFRSMFPPHRTAVSEDESVFGECFKDLYGRHKEYLSSLVGTDFEMTVPGALRLFVNGEVVSAQGYEYDNLYVHFFVELPTAHWSSPAFQQLSGVTQTCTTKSLAMDKVAHFSYPFTFEAFFLHEDESSDALPEWPVLYCEVLSLDFWQRYRVEGYGAVVLPATPGNRSSLPFCGPHALGPKNKTNTRMLLVRGGDNWELEMFGLKEFLFL

SEQ ID NO: 897331 - protein, 478 aa, Homo sapiens
RLRCQENRAARFPAQSRRVAAVMAETVWSTDTGEAVYRSRDPVRNLRLRVHLQRITSSNFLHYQPAAELGKDLIDLATFRPQPTASGHRPEEDEEEEIVIGWQEKLFSQFEVDLYQNETACQSPLDYQYRQEILKLENSGGKKNRRIFTYTDSDRYTNLEEHCQRMTTAASEVPSFLVERMANVRRRRQDRRGMEGGILKSRIVTWEPSEEFVRNNHVINTPLQTMHIMADLGPYKKLGYKKYEHVLCTLKVDSNGVITVKPDFTGLKGPYRIETEGEKQELWKYTIDNVSPHAQPEEEERERRVFKDLYGRHKEYLSSLVGTDFEMTVPGALRLFVNGEVVSAQGYEYDNLYVHFFVELPTAHWSSPAFQQLSGVTQTCTTKSLAMDKVAHFSYPFTFEAFFLHEDESSDALPEWPVLYCEVLSLDFWQRYRVEGYGAVVLPATPGPSWNRAPFRKGCGVCWTVWKGSASRVPFTMC

SEQ ID NO: 897332 - protein, 601 aa, Homo sapiens
RLRCQENRAARFPAQSRRVAAVMAETVWSTDTGEAVYRSRDPVRNLRLRVHLQRITSSNFLHYQPAAELGKDLIDLATFRPQPTASGHRPEEDEEEEIVIGWQEKLFSQFEVDLYQNETACQSPLDYQYRQEILKLENSGGKKNRRIFTYTDSDRYTNLEEVLGSMWPCPDGVHRAACFSQHCQRMTTAASEVPSFLVERMANVRRRRQDRRGMEGGILKSRIVTWEPSEEFVRNNHVINTPLQTMHIMADLGPYKKLGYKKYEHVLCTLKVDSNGVITVKPDFTGLKGPYRIETEGEKQELWKYTIDNVSPHAQPEEEERERRVFKDLYGRHKEYLSSLVGTDFEMTVPGALRLFVNGEVVSAQGYEYDNLYVHFFVELPTAHWSSPAFQQLSGVTQTCTTKSLAMDKVAHFSYPFTFEAFFLHEDESSDALPEWPVLYCEVLSLDFWQRYRVEGYGAVVLPATPGSHTLTVSTWRPVELGTVAELRRFFIGGSLELEDLSYVRIPGSFKGERLSRFGLRTETTGTVTFRLHCLQQSRAFMESSSLQKRMRSVLDRLEGFSQQSSIHNVLEAFRRARRRMQEARESLPQDLVSPSGTLVS

SEQ ID NO: 897333 - protein, 544 aa, Homo sapiens
RLRCQENRAARFPAQSRRVAAVMAETVWSTDTGEAVYRSRDPVRNLRLRVHLQRITSSNFLHYQPAAELGKDLIDLATFRPQPTASGHRPEEDEEEEIVIGWQEKLFSQFEVDLYQNETACQSPLDYQYRQEILKLENSGGKKNRRIFTYTDSDRYTNLEEHCQRMTTAASEVPSFLVERMANVRRRRQDRRGMEGGILKSRIVTWEPSEEFVRNNHVINTPLQTMHIMADLGPYKKLGYKKYEHVLCTLKVDSNGVITVKPDFTGLKGPYRIETEGEKQELWKYTIDNVSPHAQPEEEERERRVFKDLYGRHKEYLSSLVGTDFEMTVPGALRLFVNGEVVSAQGYEYDNLYVHFFVELPTAHWSSPAFQQLSGVTQTCTTKSLAMDKVAHFSYPFTFEAFFLHEDESSDALPEWPVLYCEVLSLDFWQRYRVEGYGAVVLPATPGSHTLTVSTWRPVELGTVAELRRFFIGGSLELEDLSYVRIPGSFKKWSLSSSKTKEGRKVDGERVLNPQPVSLSLFPGKPHSTAWGLLRLRYELFLSK

SEQ ID NO: 897334 - protein, 492 aa, Homo sapiens
RLRCQENRAARFPAQSRRVAAVMAETVWSTDTGEAVYRSRDPVRNLRLRVHLQRITSSNFLHYQPAAELGKDLIDLATFRPQPTASGHRPEEDEEEEIVIGWQEKLFSQFEVDLYQNETACQSPLDYQYRQEILKLENSGGKKNRRIFTYTDSDRYTNLEEHCQRMTTAASEVPSFLVERMANVRRRRQDRRGMEGGILKSRIVTWEPSEEFVRNNHVINTPLQTMHIMADLGPYKKLGYKKYEHVLCTLKVDSNGVITVKPDFTGLKGPYRIETEGEKQELWKYTIDNVSPHAQPEEEERERRVFKDLYGRHKEYLSSLVGTDFEMTVPGALRLFVNGEVVSAQGYEYDNLYVHFFVELPTAHWSSPAFQQLSGVTQTCTTKSLAMDKVAHFSYPFTFEAFFLHEDESSDALPEWPVLYCEVLSLDFWQRYRVEGYGAVVLPATPGNRSSLPFCGPHALGPKNKTNTRMLLVRGGDNWELEMFGLKEFLFL

SEQ ID NO: 897335 - protein, 187 aa, Homo sapiens
RLRCQENRAARFPAQSRRVAAVMAETVWSTDTGEAVYRSRDPVRNLRLRVHLQRITSSNFLHYQPAAELGKDLIDLATFRPQPTASGHRPEEDEEEEIVIGWQEKLFSQFEVDLYQNETACQSPLDYQYRQEILKLENSGGKKNRRIFTYTDSDRYTNLEEHCQRMTTAAKMEPFIFQDQRRKEGGR

SEQ ID NO: 897336 - protein, 176 aa, Homo sapiens
RLRCQENRAARFPAQSRRVAAVMAETVWSTDTGEAVYRSRDPVRNLRLRVHLQRITSSNFLHYQPAAELGKDLIDLATFRPQPTASGHRPEEDEEEEIVIGWQEKLFSQFEVDLYQNETACQSPLDYQYRQEILKLENSGGKKNRRIFTYTDSDRYTNLEEVLFFLGSHSFHLCFL

SEQ ID NO: 897337 - protein, 581 aa, Homo sapiens
RLRCQENRAARFPAQSRRVAAVMAETVWSTDTGEAVYRSRDPVRNLRLRVHLQRITSSNFLHYQPAAELGKDLIDLATFRPQPTASGHRPEEDEEEEIVIGWQEKLFSQFEVDLYQNETACQSPLDYQYRQEILKLENSGGKKNRRIFTYTDSDRYTNLEEHCQRMTTAASEVPSFLVERMANVRRRRQDRRGMEGGILKSRIVTWEPSEEFVRNNHVINTPLQTMHIMADLGPYKKLGYKKYEHVLCTLKVDSNGVITVKPDFTGLKGPYRIETEGEKQELWKYTIDNVSPHAQPEEEERERRVFKDLYGRHKEYLSSLVGTDFEMTVPGALRLFVNGEVVSAQGYEYDNLYVHFFVELPTAHWSSPAFQQLSGVTQTCTTKSLAMDKVAHFSYPFTFEAFFLHEDESSDALPEWPVLYCEVLSLDFWQRYRVEGYGAVVLPATPGSHTLTVSTWRPVELGTVAELRRFFIGGSLELEDLSYVRIPGSFKGERLSRFGLRTETTGTVTFRLHCLQQSRAFMESSSLQKRMRSVLDRLEGFSQQSSIHNVLEAFRRARRRMQEARESLPQDLVSPSGTLVS

SEQ ID NO: 897338 - protein, 356 aa, Homo sapiens
MHIMADLGPYKKLGYKKYEHVLCTLKVDSNGVITVKPDFTGLKGPYRIETEGEKQELWKYTIDNVSPHAQPEEEERERRVFKDLYGRHKEYLSSLVGTDFEMTVPGALRLFVNGEVVSAQGYEYDNLYVHFFVELPTAHWSSPAFQQLSGVTQTCTTKSLAMDKVAHFSYPFTFEAFFLHEDESSDALPEWPVLYCEVLSLDFWQRYRVEGYGAVVLPATPGSHTLTVSTWRPVELGTVAELRRFFIGGSLELEDLSYVRIPGSFKGERLSRFGLRTETTGTVTFRLHCLQQSRAFMESSSLQKRMRSVLDRLEGFSQQSSIHNVLEAFRRARRRMQEARESLPQDLVSPSGTLVS

SEQ ID NO: 897339 - protein, 517 aa, Homo sapiens
RLRCQENRAARFPAQSRRVAAVMAETVWSTDTGEAVYRSRDPVRNLRLRVHLQRITSSNFLHYQPAAELGKDLIDLATFRPQPTASGHRPEEDEEEEIVIGWQEKLFSQFEVDLYQNETACQSPLDYQYRQEILKLENSGGKKNRRIFTYTDSDRYTNLEEHCQRMTTAASEVPSFLVERMANVRRRRQDRRGMEGGILKSRIVTWEPSEEFVRNNHVINTPLQTMHIMADLGPYKKLGYKKYEHVLCTLKVDSNGVITVKPDFTGLKGPYRIETEGEKQELWKYTIDNVSPHAQPEEEERERRVFKDLYGRHKEYLSSLVGTDFEMTVPGALRLFVNGEVVSAQGYEYDNLYVHFFVELPTAHWSSPAFQQLSGVTQTCTTKSLAMITLSLATRRTDSKGGLAHPMTLLFKDKVAHFSYPFTFEAFFLHEDESSDALPEWPVLYCEVLSLDFWQRYRVEGYGAVVLPATPGNRSSLPFCGPHALGPKNKTNTRMLLVRGGDNWELEMFGLKEFLFL

SEQ ID NO: 897340 - protein, 454 aa, Homo sapiens
RLRCQENRAARFPAQSRRVAAVMAETVWSTDTGEAVYRSRDPVRNLRLRVHLQRITSSNFLHYQPAAELGKDLIDLATFRPQPTASGHRPEEDEEEEIVIGWQEKLFSQFEVDLYQNETACQSPLDYQYRQEILKLENSGGKKNRRIFTYTDSDRYTNLEEHCQRMTTAASEVPSFLVERMANVRRRRQDRRGMEGGILKSRIVTWEPSEEFVRNNHVINTPLQTMHIMADLGPYKKLGYKKYEHVLCTLKVDSNGVITVKPDFTGLKGPYRIETEGEKQELWKYTIDNVSPHAQPEEEERERRVFKDLYGRHKEYLSSLVGTDFEMTVPGALRLFVNGEVVSAQGYEYDNLYVHFFVELPTAHWSSPAFQQLSGVTQTCTTKSLAMDKVAHFSYPFTFEAFFLHEDESSDALPEWPVLYCEVLSLDFWQRYRVEGYGAVVLPATPATMTWPWH

SEQ ID NO: 897341 - protein, 741 aa, Homo sapiens
AARGQSAPGVGLAVRPSEVVGWEEIRSHTRGGGLSCCRRRLCRRRECGVGTGAAAAATPGIFVASSRPFCPAAFPQSALPTPLRPGAPASISRSLSTTHTAPPIMDPGSGGGGGGGGGGGSSSGSSSSDSAPDCWDQADMEAPGPGPCGGGGSLAAAAEAQRENLSAAFSRQLNVNAKPFVPNVHAAEFVPSFLRCPAAPPPPAGGAANNHGAGSGAGGRAAPVESSQEEQSLCEGSNSAVSMELSEPIVENGETEMSPEESWEHKEEISEAEPGGGSLGDGRPPEESAHEMMEEEEEIPKPKSVVAPPGAPKKEHVNVVFIGHVDAGKSTIGGQIMYLTGMVDKRTLEKYEREAKEKNRETWYLSWALDTNQEERDKGKTVEVGRAYFETEKKHFTILDAPGHKSFVPNMIGGASQADLAVLVISARKGEFETGFEKGGQTREHAMLAKTAGVKHLIVLINKMDDPTVNWSNERYEECKEKLVPFLKKVGFNPKKDIHFMPCSGLTGANLKEQSDFCPWYIGLPFIPYLDNLPNFNRSVDGPIRLPIVDKYKDMGTVVLGKLESGSICKGQQLVMMPNKHNVEVLGILSDDVETDTVAPGENLKIRLKGIEEEEILPGFILCDPNNLCHSGRTFDAQIVIIEHKSIICPGYNAVLHIHTCIEEVEITALICLVDKKSGEKSKTRPRFVKQDQVCIARLRTAGTICLETFKDFPQMGRFTLRDEGKTIAIGKVLKLVPEKD

SEQ ID NO: 897342 - protein, 198 aa, Homo sapiens
MELSEPIVENGETEMSPEESWEHKEEISEAEPGGGSLGDGRPPEESAHEMMEEEEEIPKPKSVVAPPGAPKKEHVNVVFIGHVDAGKSTIGGQIMYLTGMVDKRTLEKYEREAKKNTYQHPTRKHGWGALGPRERFKNQSLVAARAPDVKYTLANVGRKEPAHCKGAGSPKKTAGTQPSDTPEGPRQAAKRARSENAR

SEQ ID NO: 897343 - protein, 741 aa, Homo sapiens; identical to SEQ ID NO: 897341

SEQ ID NO: 897344 - protein, 830 aa, Homo sapiens
AARGQSAPGVGLAVRPSEVVGWEEIRSHTRGGGLSCCRRRLCRRRECGVGTGAAAAATPGIFVASSRPFCPAAFPQSALPTPLRPGAPASISRSLSTTHTAPPIMDPGSGGGGGGGGGGGSSSGSSSSDSAPDCWDQADMEAPGPGPCGGGGSLAAAAEAQRENLSAAFSRQLNVNAKPFVPNVHAAEFVPSFLRCPAAPPPPAGGAANNHGAGSGAGGRAAPVESSQEEQSLCEGSNSAVSMELSEPIVENGETEMSPEESWEHKEEISEAEPGGGSLGDGRPPEESAHEMMEEEEEIPKPKSVVAPPGAPKKEHVNVVFIGHVDAGKSTIGGQIMYLTGMVDKRTLEKYEREAKEKNRETWYLSWALDTNQEERDKGKTVEVGRAYFETEKKHFTILDAPGHKSFVPNMIGGASQADLAVLVISARKGEFETGFEKGGQTREHAMLAKTAGVKHLIVLINKMDDPTVNWSNERYEECKEKLVPFLKKVGFNPKKDIHFMPCSGLTGANLKEQSDFCPWYIGLPFIPYLDNLPNFNRSVDGPIRLPIVDKYKDMGTVVLGKLESGSICKGQQLVMMPNKHNVEVLGILSDDVETDTVAPGENLKIRLKGIEEEEILPGFILCDPNNLCHSGRTFDAQIVIIEHKSIICPGYNAVLHIHTCIEEVEITALICLVDKKSGEKSKTRPRFVKQDQVCIARLRTAGTICLETFKDFPQMGRFTLRDEGKTIAIGKVLKLVPEKDYSIFLMTLHNTVRKIDCRSLPGSRERLSIFLMTLHNTVRKIDCRSLLHTAFSYFLPIDKPLPIFCKEEIHSKSPHYVSFLILRALLCHC

SEQ ID NO: 897345 - protein, 741 aa, Homo sapiens; identical to SEQ ID NO: 897341

SEQ ID NO: 897346 - protein, 741 aa, Homo sapiens; identical to SEQ ID NO: 897341

SEQ ID NO: 897347 - protein, 463 aa, Homo sapiens
MQKYSENLCKIKTKRVGLSVYCLEIEVTNSKVLLSNKPMYFFFCELKIFEICDNRMSKVPKLYTVQVVHCNEVTHICWLHKLQVLLSQYGTLNCDVVQQLPASSQLIRCEYFGLDLQPDAVLQPKKKVEPMIKNCSQDEPGKKSAKLPWRSAGTLVMTGITPGSLMTITHNSTLAPFLTGMDFLMDCYFMDDSFIALGRGFKVVKGKIRSFITGLNIQATFNFKTLCEKCGYSTIALILGWLNVIFIGWLTLSNCAINPFTDIGKEENNQWIQGTIIYLQIIGFYFLQLTFSVILADAIWYILDLVSFVERSRHGSILLSKCNCTCTKDLTSFTFSSQLVRLGFIVNEYGIERIEKCFYFPVVIPWIPFDPVYYQFSSGRFGSTFGGFWLYDILDFNILELLSLPFNKYTSHIPLILCFLETIMLAELFTKDYYKGLKVWEWRLIKTFMFSNIREKQVGTTSD

SEQ ID NO: 897348 - protein, 741 aa, Homo sapiens; identical to SEQ ID NO: 897341

SEQ ID NO: 897349 - protein, 728 aa, Homo sapiens
AARGQSAPGVGLAVRPSEVVGWEEIRSHTRGGGLSCCRRRLCRRRECGVGTGAAAAATPGIFVASSRPFCPAAFPQSALPTPLRPGAPASISRSLSTTHTAPPIMDPGSGGGGGGGGGGGSSSGSSSSDSAPDCWDQADMEAPGPGPCGGGGSLAAAAEAQRENLSAAFSRQLNVNAKPFVPNVHAAEFVPSFLRCPAAPPPPAGGAANNHGAGSGAGGRAAPVESSQEEQSLCEGSNSAVSMELSEPIVENGETEMSPEESWEHKEEISEAEPGGGSLGDGRPPEESAHEMMEEEEEIPKPKSVVAPPGAPKKEHVNVVFIGHVDAGKSTIGGQIMYLTGMVDKRTLEKYEREAKEKNRETWYLSWALDTNQEERDKGKTVEVGRAYFETEKKHFTILDAPGHKSFVPNMIGGASQADLAVLVISARKGEFETGFEKGGQTREHAMLAKTAGVKHLIVLINKMDDPTVNWSNERYEECKEKLVPFLKKVGFNPKKDIHFMPCSGLTGANLKEQSDFCPWYIGLPFIPYLDNLPNFNRSVDGPIRLPIVDKYKDMGTVVLGKLESGSICKGQQLVMMPNKHNVEVLGILSDDVETDTVAPGENLKIRLKGIEEEEILPGFILCDPNNLCHSGRTFDAQIVIIEHKSIICPGYNAVLHIHTCIEEVEITALICLVDKKSGEKSKTRPRFVKQDQVCIARLRTAGTICLETFKDFPQMGRFTLRDEGKSF

SEQ ID NO: 897350 - protein, 435 aa, Homo sapiens
AARGQSAPGVGLAVRPSEVVGWEEIRSHTRGGGLSCCRRRLCRRRECGVGTGAAAAATPGIFVASSRPFCPAAFPQSALPTPLRPGAPASISRSLSTTHTAPPIMDPGSGGGGGGGGGGGSSSGSSSSDSAPDCWDQADMEAPGPGPCGGGGSLAAAAEAQRENLSAAFSRQLNVNAKPFVPNVHAAEFVPSFLRCPAAPPPPAGGAANNHGAGSGAGGRAAPVESSQEEQSLCEGSNSAVSMELSEPIVENGETEMSPEESWEHKEEISEAEPGGGSLGDGRPPEESAHEMMEEEEEIPKPKSVVAPPGAPKKEHVNVVFIGHVDAGKSTIGGQIMYLTGMVDKRTLEKYEREAKEKNRETWYLSWALDTNQEERDKGKTVEVGRAYFETEKKHFTILDAPGHKSFVPNMIGGASQADLAVLVRKTFPVHLYIC

SEQ ID NO: 897351 - protein, 202 aa, Homo sapiens
AARGQSAPGVGLAVRPSEVVGWEEIRSHTRGGGLSCCRRRLCRRRECGVGTGAAAAATPGIFVASSRPFCPAAFPQSAGAGGRAAPVESSQEEQSLCEGSNSAVSMELSEPIVENGETEMSPEESWEHKEEISEAEPGGGSLGDGRPPEESAHEMMEEEEEIPKPKSVVAPPGAPKKEHVNVVFIGHVDAWQSTHWRTNNVF

SEQ ID NO: 897352 - protein, 741 aa, Homo sapiens; identical to SEQ ID NO: 897341

SEQ ID NO: 897353 - protein, 627 aa, Homo sapiens
AARGQSAPGVGLAVRPSEVVGWEEIRSHTRGGGLSCCRRRLCRRRECGVGTGAAAAATPGIFVASSRPFCPAAFPQSALPTPLRPGAPASISRSLSTTHTAPPIMDPGSGGGGGGGGGGGSSSGSSSSDSAPDCWDQADMEAPGPGPCGGGGSLAAAAEAQRENLSAAFSRQLNVNAKPFVPNVHAAEFVPSFLRCPAAPPPPAGGAANNHGAGSGAGGRAAPVESSQEEQSLCEGSNSAVSMELSEPIVENGETEMSPEESWEHKEEISEAEPGGGSLGDGRPPEESAHEMMEEEEEIPKPKSVVAPPGAPKKEHVNVVFIGHVDAGKSTIGGQIMYLTGMVDKRTLEKYEREAKEKNRETWYLSWALDTNQEERDKGKTVEVGRAYFETEKKHFTILDAPGHKSFVPNMIGGASQADLAVLVISARKGEFETGFEKGGQTREHAMLAKTAGVKHLIVLINKMDDPTVNWSNERYEECKEKLVPFLKKVGFNPKKDIHFMPCSGLTGANLKEQSDFCPWYIGLPFIPYLDNLPNFNRSVDGPIRLPIVDKYKDMGTVVLGKLESGSICKGQQLVMMPNKHNVEVLGILSDDVETDTVAPGENLKIRLKGIEEEEIPAELLKMFGID

SEQ ID NO: 897354 - protein, 202 aa, Homo sapiens
  misc_feature (190)..(190): Xaa can be any naturally occurring amino acid
MRCLSLHCVPPRGSPLVPRSAVNPLKWTVDKTSCVTGPRFKRSLSPVLAELDRSARTTDLSVKTKDVWEIPRESLQLIKRLGNGQFGEVWMGTWNGNTKVAIKTLKPGTMSPESFLEEAQIMKKLKHDKLVQLYAVVSEEPIYIVRADRSARTNYEMLKEEHEVAVLGAPQNPAPPTSTVIHIRSETSVXDHVVWSLFNTLF

SEQ ID NO: 897355 - protein, 537 aa, Homo sapiens
MGCVQCKDKEATKLTEERDGSLNQSSGYRYGTDPTPQHYPSFGVTSIPNYNNFHAAGGQGLTVFGGVNSSSHTGTLRTRGGTGVTLFVALYDYEARTEDDLSFHKGEKFQILNSSEGDWWEARSLTTGETGYIPSNYVAPVDSIQAEEWYFGKLGRKDAERQLLSFGNPRGTFLIRESETTKGAYSLSIRDWDDMKGDHVKHYKIRKLDNGGYYITTRAQFETLQQLVQHYSERAAGLCCRLVVPCHKGMPRLTDLSVKTKDVWEIPRESLQLIKRLGNGQFGEVWMGTWNGNTKVAIKTLKPGTMSPESFLEEAQIMKKLKHDKLVQLYAVVSEEPIYIVTEYMNKGSLLDFLKDGEGRALKLPNLVDMAAQVAAGMAYIERMNYIHRDLRSANILVGNGLICKIADFGLARLIEDNEYTARQGAKFPIKWTAPEAALYGRFTIKSDVWSFGILLTELVTKGRVPYPGMNNREVLEQVERGYRMPCPQDCPISLHELMIHCWKKDPEERPTFEYLQSFLEDYFTATEPQYQPGENL

SEQ ID NO: 897356 - protein, 537 aa, Homo sapiens; identical to SEQ ID NO: 897355

SEQ ID NO: 897357 - protein, 537 aa, Homo sapiens; identical to SEQ ID NO: 897355

SEQ ID NO: 897358 - protein, 534 aa, Homo sapiens
MGCVQCKDKEATKLTEERDGSLNQSSGYRYGTDPTPQHYPSFGVTSIPNYNNFHAAGGQGLTVFGGVNSSSHTGTLRTRGGTGVTLFVALYDYEARTEDDLSFHKGEKFQILNSSEGDWWEARSLTTGETGYIPSNYVAPVDSIQAEEWYFGKLGRKDAERQLLSFGNPRGTFLIRESETTKGAYSLSIRDWDDMKGDHVKHYKIRKLDNGGYYITTRAQFETLQQLVQHYSEKADGLCFNLTVIASSCTPQTSGLAKDAWEVARRSLCLEKKLGQGCFAEVWLGTWNGNTKVAIKTLKPGTMSPESFLEEAQIMKKLKHDKLVQLYAVVSEEPIYIVTEYMNKGSLLDFLKDGEGRALKLPNLVDMAAQVAAGMAYIERMNYIHRDLRSANILVGNGLICKIADFGLARLIEDNEYTARQGAKFPIKWTAPEAALYGRFTIKSDVWSFGILLTELVTKGRVPYPGMNNREVLEQVERGYRMPCPQDCPISLHELMIHCWKKDPEERPTFEYLQSFLEDYFTATEPQYQPGENL

SEQ ID NO: 897359 - protein, 311 aa, Homo sapiens
MGCVQCKDKEATKLTEERDGSLNQSSGYRYGTDPTPQHYPSFGVTSIPNYNNFHAAGGQGLTVFGGVNSSSHTGTLRTRGGTGVTLFVALYDYEARTEDDLSFHKGEKFQILNSSEGDWWEARSLTTGETGYIPSNYVAPVDSIQAEEWYFGKLGRKDAERQLLSFGNPRGTFLIRESETTKGAYSLSIRDWDDMKGDHVKHYKIRKLDNGGYYITTRAQFETLQQLVQHYSERAAGLCCRLVVPCHKGMPRLTDLSVKTKDVWEIPRESLQLIKRLGNGQFGEVWMGMLRLNYSLISFPVWKIPNTKDGR

SEQ ID NO: 897360 - protein, 471 aa, Homo sapiens
ISPCVIISLLVNFVSAGVTLFVALYDYEARTEDDLSFHKGEKFQILNSSEGDWWEARSLTTGETGYIPSNYVAPVDSIQAEEWYFGKLGRKDAERQLLSFGNPRGTFLIRESETTKGAYSLSIRDWDDMKGDHVKHYKIRKLDNGGYYITTRAQFETLQQLVQHYSERAAGLCCRLVVPCHKGMPRLTDLSVKTKDVWEIPRESLQLIKRLGNGQFGEVWMGTWNGNTKVAIKTLKPGTMSPESFLEEAQIMKKLKHDKLVQLYAVVSEEPIYIVTEYMNKGSLLDFLKDGEGRALKLPNLVDMAAQVAAGMAYIERMNYIHRDLRSANILVGNGLICKIADFGLARLIEDNEYTARQGAKFPIKWTAPEAALYGRFTIKSDVWSFGILLTELVTKGRVPYPGMNNREVLEQVERGYRMPCPQDCPISLHELMIHCWKKDPEERPTFEYLQSFLEDYFTATEPQYQPGENL

SEQ ID NO: 897361 - protein, 343 aa, Homo sapiens
MKGDHVKHYKIRKLDNGGYYITTRAQFETLQQLVQHYSERAAGLCCRLVVPCHKGMPRLTDLSVKTKDVWEIPRESLQLIKRLGNGQFGEVWMGTWNGNTKVAIKTLKPGTMSPESFLEEAQIMKKLKHDKLVQLYAVVSEEPIYIVTEYMNKGSLLDFLKDGEGRALKLPNLVDMAAQVAAGMAYIERMNYIHRDLRSANILVGNGLICKIADFGLARLIEDNEYTARQGAKFPIKWTAPEAALYGRFTIKSDVWSFGILLTELVTKGRVPYPGMNNREVLEQVERGYRMPCPQDCPISLHELMIHCWKKDPEERPTFEYLQSFLEDYFTATEPQYQPGENL

SEQ ID NO: 897362 - protein, 482 aa, Homo sapiens
MGCVQCKDKEATKLTEERDGSLNQSSGYRYGTDPTPQHYPSFGVTSIPNYNNFHAAGGQGLTVFGGVNSSSHTGTLRTRGGTGVTLFVALYDYEARTEDDLSFHKGEKFQILNSSEGDWWEARSLTTGETGYIPSNYVAPVDSIQAEEWYFGKLGRKDAERQLLSFGNPRGTFLIRESETTKGAYSLSIRDWDDMKGDHVKHYKIRKLDNGGYYITTRAQFETLQQLVQHYSGTWNGNTKVAIKTLKPGTMSPESFLEEAQIMKKLKHDKLVQLYAVVSEEPIYIVTEYMNKGSLLDFLKDGEGRALKLPNLVDMAAQVAAGMAYIERMNYIHRDLRSANILVGNGLICKIADFGLARLIEDNEYTARQGAKFPIKWTAPEAALYGRFTIKSDVWSFGILLTELVTKGRVPYPGMNNREVLEQVERGYRMPCPQDCPISLHELMIHCWKKDPEERPTFEYLQSFLEDYFTATEPQYQPGENL

SEQ ID NO: 897363 - protein, 147 aa, Homo sapiens
LKDRKCEKNALKETLKTKQLTIQRIPGLMWNHLARAKFPIKWTAPEAALYGRFTIKSDVWSFGILLTELVTKGRVPYPGMNNREVLEQVERGYRMPCPQDCPISLHELMIHCWKKDPEERPTFEYLQSFLEDYFTATEPQYQPGENL

SEQ ID NO: 897364 - protein, 478 aa, Homo sapiens
MGCVQCKDKEATKLTEERDGSLNQSSGYRYGTDPTPQHYPSFGVTSIPNYNNFHAAGGQGLTVFGGVNSSSHTGTLRTRGGTGVTLFVALYDYEARTEDDLSFHKGEKFQILNSSEGDWWEARSLTTGETGYIPSNYVAPVDSIQAEEWYFGKLGRKDAERQLLSFGNPRGTFLIRESETTKGAYSLSIRDWDDMKGDHVKHYKIRKLDNGGYYITTRAQFETLQQLVQHYSERAAGLCCRLVVPCHKGMPRLTDLSVKTKDVWEIPRESLQLIKRLGNGQFGEVWMGTWNGNTKVAIKTLKPGTMSPESFLEEAQIMKKLKHDKLVQLYAVVSEEPIYIVTEYMNKGSLLDFLKDGEGRALKLPNLVDMAAQVAAGMAYIERMNYIHRDLRSANILVGNGLICKIADFGLARLIEDNEYTARQGAKFPIKWTAPEAALYGRFTIKSDVWSFGILLTELVTKGRVPYPGKSRASQTWA

SEQ ID NO: 897365 - protein, 378 aa, Homo sapiens
MGCVQCKDKEATKLTEERDGSLNQSSGYRYGTDPTPQHYPSFGVTSIPNYNNFHAAGGQGLTVFGGVNSSSHTGTLRTRGGTGVTLFVALYDYEARTEDDLSFHKGEKFQILNSSEGDWWEARSLTTGETGYIPSNYVAPVDSIQAEEWYFGKLGRKDAERQLLSFGNPRGTFLIRESETTKGAYSLSIRDWDDMKGDHVKHYKIRKLDNGGYYITTRAQFETLQQLVQHYSERAAGLCCRLVVPCHKGMPRLTDLSVKTKDVWEIPRESLQLIKRLGNGQFGEVWMGTWNGNTKVAIKTLKPGTMSPESFLEEAQIMKKLKHDKLVQLYAVVSEEPIYIVTEYMNKGSLLDFLKDGEGRALKLPNLVDMAAQVGPAG

SEQ ID NO: 897366 - protein, 311 aa, Homo sapiens; identical to SEQ ID NO: 897359

SEQ ID NO: 897367 - protein, 277 aa, Homo sapiens [sequence omitted]

SEQ ID NO: 897368 - protein, 158 aa, Homo sapiens
MGCVQCKDKEATKLTEERDGSLNQSSGYRYGTDPTPQHYPSFGVTSIPNYNNFHAAGGQGLTVFGGVNSSSHTGTLRTRGGTGVTLFVALYDYEARTEDDLSFHKGEKFQILNSSEGDWWEARSLTTGETGYIPSNYVAPVDSIQAEEYVSFCFHLTT

SEQ ID NO: 897369 - protein, 537 aa, Homo sapiens; identical to SEQ ID NO: 897355

SEQ ID NO: 897370 - protein, 537 aa, Homo sapiens; identical to SEQ ID NO: 897355

SEQ ID NO: 897371 - protein, 537 aa, Homo sapiens; identical to SEQ ID NO: 897355

SEQ ID NO: 897372 - protein, 537 aa, Homo sapiens; identical to SEQ ID NO: 897355

SEQ ID NO: 897373 - protein, 519 aa, Homo sapiens
MGCVQCKDKEATGTDPTPQHYPSFGVTSIPNYNNFHAAGGQGLTVFGGVNSSSHTGTLRTRGGTGVTLFVALYDYEARTEDDLSFHKGEKFQILNSSEGDWWEARSLTTGETGYIPSNYVAPVDSIQAEEWYFGKLGRKDAERQLLSFGNPRGTFLIRESETTKGAYSLSIRDWDDMKGDHVKHYKIRKLDNGGYYITTRAQFETLQQLVQHYSERAAGLCCRLVVPCHKGMPRLTDLSVKTKDVWEIPRESLQLIKRLGNGQFGEVWMGTWNGNTKVAIKTLKPGTMSPESFLEEAQIMKKLKHDKLVQLYAVVSEEPIYIVTEYMNKGSLLDFLKDGEGRALKLPNLVDMAAQVAAGMAYIERMNYIHRDLRSANILVGNGLICKIADFGLARLIEDNEYTARQGAKFPIKWTAPEAALYGRFTIKSDVWSFGILLTELVTKGRVPYPGMNNREVLEQVERGYRMPCPQDCPISLHELMIHCWKKDPEERPTFEYLQSFLEDYFTATEPQYQPGENL

SEQ ID NO: 897374 - protein, 232 aa, Homo sapiens
MSPESFLEEAQIMKKLKHDKLVQLYAVVSEEPIYIVTEYMNKGSLLDFLKDGEGRALKLPNLVDMAAQVAAGMAYIERMNYIHRDLRSANILVGNGLICKIADFGLARLIEDNEYTARQGAKFPIKWTAPEAALYGRFTIKSDVWSFGILLTELVTKGRVPYPGMNNREVLEQVERGYRMPCPQDCPISLHELMIHCWKKDPEERPTFEYLQSFLEDYFTATEPQYQPGENL

SEQ ID NO: 897375 - protein, 253 aa, Homo sapiens [sequence omitted]

SEQ ID NO: 897376 - protein, 85 aa, Homo sapiens
NIKEAIASLYPNTTTSGMNNREVLEQVERGYRMPCPQDCPISLHELMIHCWKKDPEERPTFEYLQSFLEDYFTATEPQYQPGENL

SEQ ID NO: 897377 - protein, 387 aa, Homo sapiens
MGCVQCKDKEATKLTEERDGSLNQSSGYRYGTDPTPQHYPSFGVTSIPNYNNFHAAGGQGLTVFGGVNSSSHTGTLRTRGGTGVTLFVALYDYEARTEDDLSFHKGEKFQILNSSEGDWWEARSLTTGETGYIPSNYVAPVDSIQAEEWYFGKLGRKDAERQLLSFGNPRGTFLIRESETTKGAYSLSIRDWDDMKGDHVKHYKIRKLDNGGYYITTRAQFETLQQLVQHYSERAAGLCCRLVVPCHKGMPRLTDLSVKTKDVWEIPRESLQLIKRLGNGQFGEVWMGTWNGNTKVAIKTLKPGTMSPESFLEEAQIMKKLKHDKLVQLYAVVSEEPIYIVTEYMNKGWATPLLSPAHSALRGCLGERNGSFLLATFLVSAWVKYSH

SEQ ID NO: 897378 - protein, 158 aa, Homo sapiens
MGCVQCKDKEATKLTEERDGSLNQSSGYRYGTDPTPQHYPSFGVTSIPNYNNFHAAGGQGLTVFGGVNSSSHTGTLRTRGGTGVTLFVALYDYEARTEDDLSFHKGEKFQILNSSEGDWWEARSLTTGETGYIPSNYVAPVDSIQAEELWKMHCIDVM

SEQ ID NO: 897379 - protein, 158 aa, Homo sapiens; identical to SEQ ID NO: 897368

SEQ ID NO: 897380 - protein, 761 aa, Homo sapiens
MALPALGLDPWSLLGLFLFQLLQLLLPTTTAGGGGQGPMPRVRYYAGDERRALSFFHQKGLQDFDTLLLSGDGNTLYVGAREAILALDIQDPGVPRLKNMIPWPASDRKKSECAFKKKSNETQCFNFIRVLVSYNVTHLYTCGTFAFSPACTFIELQDSYLLPISEDKVMEGKGQSPFDPAHKHTAVLVDGMLYSGTMNNFLGSEPILMRTLGSQPVLKTDNFLRWLHHDASFVAAIPSTQVVYFFFEETASEFDFFERLHTSRVARVCKNDVGGEKLLQKKWTTFLKAQLLCTQPGQLPFNVIRHAVLLPADSPTAPHIYAVFTSQWQVGGTRSSAVCAFSLLDIERVFKGKYKELNKETSRWTTYRGPETNPRPGSCSVGPSSDKALTFMKDHFLMDEQVVGTPLLVKSGVEYTRLAVETAQGLDGHSHLVMYLGTTTGSLHKAVVSGDSSAHLVEEIQLFPDPEPVRNLQLAPTQGAVFVGFSGGVWRVPRANCSVYESCVDCVLARDPHCAWDPESRTCCLLSAPNLNSWKQDMERGNPEWACASGPMSRSLRPQSRPQIIKEVLAVPNSILELPCPHLSALASYYWSHGPAAVPEASSTVYNGSLLLIVQDGVGGLYQCWATENGFSYPVISYWVDSQDQTLALDPELAGIPREHVKVPLTRVSGGAALAAQQSYWPHFVTVTVLFALVLSGALIILVASPLRALRARGKVQGCETLRPGEKAPLSREQHLQSPKECRTSASDVDADNNCLGTEVA

SEQ ID NO: 897381 - protein, 146 aa, Homo sapiens
MQGSAPSCFPYQSCTADSQEVFPEVWALGVCTRRGTRQQLRPHGSATTRMVIRRVATTSSIRLATTSSTRIYLKKFGLSACAATTSSIQTSGLPGVWTLGVCMHTPSIHNRRIIAVDEVVAAHAESPNPLVTHVRMDEVVRQQIRT

SEQ ID NO: 897382 - protein, 761 aa, Homo sapiens; identical to SEQ ID NO: 897380

SEQ ID NO: 897383 - protein, 370 aa, Homo sapiens
MKDHFLMDEQVVGTPLLVKSGVEYTRLAVETAQGLDGHSHLVMYLGTTTGSLHKAVVSGDSSAHLVEEIQLFPDPEPVRNLQLAPTQGAVFVGFSGGVWRVPRANCSVYESCVDCVLARDPHCAWDPESRTCCLLSAPNLNSWKQDMERGNPEWACASGPMSRSLRPQSRPQIIKEVLAVPNSILELPCPHLSALASYYWSHGPAAVPEASSTVYNGSLLLIVQDGVGGLYQCWATENGFSYPVISYWVDSQDQTLALDPELAGIPREHVKVPLTRVSGGAALAAQQSYWPHFVTVTVLFALVLSGALIILVASPLRALRARGKVQGCETLRPGEKAPLSREQHLQSPKECRTSASDVDADNNCLGTEVA

SEQ ID NO: 897384 - protein, 224 aa, Homo sapiens [sequence omitted]

SEQ ID NO: 897385 - protein, 136 aa, Homo sapiens
MALPALGLDPWSLLGLFLFQLLQLLLPTTTAGGGGQGPMPRVRYYAGKCPTAGSVGIAIESWRWVEEGERNRGGEEMDMEKQGHRERCQGETEDLGERETQPETEVQKERKATGEQIEENRWPRGQGHASSSSPCW

SEQ ID NO: 897386 - protein, 402 aa, Homo sapiens
MALPALGLDPWSLLGLFLFQLLQLLLPTTTAGGGGQGPMPRVRYYAGDERRALSFFHQKGLQDFDTLLLSGDGNTLYVGAREAILALDIQDPGVPRLKNMIPWPASDRKKSECAFKKKSNETQCFNFIRVLVSYNVTHLYTCGTFAFSPACTFIELQDSYLLPISEDKVMEGKGQSPFDPAHKHTAVLVDGMLYSGTMNNFLGSEPILMRTLGSQPVLKTDNFLRWLHHDASFVAAIPSTQVVYFFFEETASEFDFFERLHTSRVARVCKNDVGGEKLLQKKWTTFLKAQLLCTQPGQLPFNVIRHAVLLPADSPTAPHIYAVFTSQWQVGGTRSSAVCAFSLLDIERVFKGKYKELNKETSRWTTYRGPETNPRPGSVSTTPHTEHSLHIHNVHEKTPIMA

SEQ ID NO: 897387 - protein, 328 aa, Homo sapiens [sequence omitted]

SEQ ID NO: 897388 - protein, 761 aa, Homo sapiens; identical to SEQ ID NO: 897380

SEQ ID NO: 897389 - protein, 739 aa, Homo sapiens
MIPWPASDRKKSECAFKKKSNETQCFNFIRVLVSYNVTHLYTCGTFAFSPACTFIVSSLVPSAQAPKHPFSHLPTTFLCSSGKLWPSRCRTLMNFLAPDQFPSMSLSLPSSSPSFPRCETLAFWPPSLSPHLELQDSYLLPISEDKVMEGKGQSPFDPAHKHTAVLVDGMLYSGTMNNFLGSEPILMRTLGSQPVLKTDNFLRWLHHDASFVAAIPSTQVVYFFFEETASEFDFFERLHTSRVARVCKNDVGGEKLLQKKWTTFLKAQLLCTQPGQLPFNVIRHAVLLPADSPTAPHIYAVFTSQWQVGGTRSSAVCAFSLLDIERVFKGKYKELNKETSRWTTYRGPETNPRPGSCSVGPSSDKALTFMKDHFLMDEQVVGTPLLVKSGVEYTRLAVETAQGLDGHSHLVMYLGTTTGSLHKAVVSGDSSAHLVEEIQLFPDPEPVRNLQLAPTQGAVFVGFSGGVWRVPRANCSVYESCVDCVLARDPHCAWDPESRTCCLLSAPNLNSWKQDMERGNPEWACASGPMSRSLRPQSRPQIIKEVLAVPNSILELPCPHLSALASYYWSHGPAAVPEASSTVYNGSLLLIVQDGVGGLYQCWATENGFSYPVISYWVDSQDQTLALDPELAGIPREHVKVPLTRVSGGAALAAQQSYWPHFVTVTVLFALVLSGALIILVASPLRALRARGKVQGCETLRPGEKAPLSREQHLQSPKECRTSASDVDADNNCLGTEVA

SEQ ID NO: 897390 - protein, 957 aa, Homo sapiens
DTQRSLPELVRLEEGTWEALELPGDSLWLSMALPALGLDPWSLLGLFLFQLLQLLLPTTTAGGGGQGPMPRVRYYAGKCPTAGSVGIAIESWRWVEEGERNRGGEEMDMEKQGHRERCQGETEDLEKERHSQKQKSKRKEKPLESRLRKTGGHGARGTLLPVLHVGDERRALSFFHQKGLQDFDTLLLSGDGNTLYVGAREAILALDIQDPGVPRLKNMIPWPASDRKKSECAFKKKSNETQCFNFIRVLVSYNVTHLYTCGTFAFSPACTFIVSSLVPSAQAPKHPFSHLPTTFLCSSGKLWPSRCRTLMNFLAPDQFPSMSLSLPSSSPSFPRCETLAFWPPSLSPHLELQDSYLLPISEDKVMEGKGQSPFDPAHKHTAVLVDGMLYSGTMNNFLGSEPILMRTLGSQPVLKTDNFLRWLHHDASFVAAIPSTQVVYFFFEETASEFDFFERLHTSRVARVCKNDVGGEKLLQKKWTTFLKAQLLCTQPGQLPFNVIRHAVLLPADSPTAPHIYAVFTSQWQVGGTRSSAVCAFSLLDIERVFKGKYKELNKETSRWTTYRGPETNPRPGSCSVGPSSDKALTFMKDHFLMDEQVVGTPLLVKSGVEYTRLAVETAQGLDGHSHLVMYLGTTTGSLHKAVVSGDSSAHLVEEIQLFPDPEPVRNLQLAPTQGAVFVGFSGGVWRVPRANCSVYESCVDCVLARDPHCAWDPESRTCCLLSAPNLNSWKQDMERGNPEWACASGPMSRSLRPQSRPQIIKEVLAVPNSILELPCPHLSALASYYWSHGPAAVPEASSTVYNGSLLLIVQDGVGGLYQCWATENGFSYPVISYWVDSQDQTLALDPELAGIPREHVKVPLTRVSGGAALAAQQSYWPHFVTVTVLFALVLSGALIILVASPLRALRARGKVQGCETLRPGEKAPLSREQHLQSPKECRTSASDVDADNNCLGTEVA

SEQ ID NO: 897391 - protein, 761 aa, Homo sapiens; identical to SEQ ID NO: 897380

SEQ ID NO: 897392 - protein, 248 aa, Homo sapiens
MALPALGLDPWSLLGLFLFQLLQLLLPTTTAGGGGQGPMPRVRYYAGDERRALSFFHQKGLQDFDTLLLSGDGNTLYVGAREAILALDIQDPGVPRLKNMIPWPASDRKKSECAFKKKSNETQCFNFIRVLVSYNVTHLYTCGTFAFSPACTFIELQDSYLLPISEDKVMEGKGQSPFDPAHKHTAVLVDGMLYSGTMNNFLGSEPILMRTLGSQPVLKTDNFLRWLHHDASFAHHNPTPRSVYVQIT

SEQ ID NO: 897393 - protein, 285 aa, Homo sapiens
MPGRSSSNSGSTGFISFSGVESALSSLKNFQACINSGMDTASSVALDLVESQTEVSSEYSMDKAMVEFATLDRQLNHYVKAVQSTINHVKEERPEKIPDLKLLVEKKFLALQSKNSDADFQNNEKFVQFKQQLKELKKQCGLQADREADGTEGVDEDIIVTQSQTNFTCPITKEEMKKPVKNKVCGHTYEEDAIVRMIESRQKRKKKAYAFNGCKHTFRSPIYPDVALRGWEPTEKSPSVEGLLGTAASPPRVGKGPHGARLWGSSVTYPQPVVLKPKGRAPALV

SEQ ID NO: 897394 - protein, 281 aa, Homo sapiens
SGVSTPPSRRRSSSIRSPGPGAGQTPTSAPDSPGGHMTEAAGSREGHHVTTRRRRLRTQEPALTFQRQAKGAEERAFKNCAIVDFFTESSTLLEEGNLSPKTEDTYLPHILSPAVFGGPGTNFKMPGRSSSNSGSTGFISFSGVESALSSLKNFQACINSGMDTASSVALDLVESQTEVSSEYSMDKAMVEFATLDRQLNHYVKAVQSTINHVKEERPEKIPDLKLLVEKKFLALQSKNSDADFQNNEKFVQFKQQLKELKKQCKSTCFALVRLFEIRELT

SEQ ID NO: 897395 - protein, 247 aa, Homo sapiens
MPGRSSSNSGSTGFISFSGVESALSSLKNFQACINSGMDTASSVALDLVESQTEVSSEYSMDKAMVEFATLDRQLNHYVKAVQSTINHVKEERPEKIPDLKLLVEKKFLALQSKNSDADFQNNEKFVQFKQQLKELKKQCGLQADREADGTEGVDEDIIVTQSQTNFTCPITKEEMKKPVKNKVCGHTYEEDAIVRMIESRQKRKKKAYCPQIGCSHTDIRKSDLIQDEALRRAIENHNKKRHRHSE

SEQ ID NO: 897396 - protein, 247 aa, Homo sapiens; identical to SEQ ID NO: 897395

SEQ ID NO: 897397 - protein, 247 aa, Homo sapiens; identical to SEQ ID NO: 897395

SEQ ID NO: 897398 - protein, 285 aa, Homo sapiens; identical to SEQ ID NO: 897393

SEQ ID NO: 897399 - protein, 157 aa, Homo sapiens
MPGRSSSNSGSTGFISFSGVESALSSLKNFQACINSGMDTASSVALDLVESQTEVSSEYSMDKAMVEFATLDRQLNHYVKAVQSTINHVKEERPEKIPDLKLLVEKKFLALQSKNSDADFQNNEKFVQFKQQLKELKKQCKSTCFALVRLFEIRELT

SEQ ID NO: 897400 - protein, 264 aa, Homo sapiens
RLGTSRVAGKEVGLGRGNWGATRRRQLGLPESSTLLEEGNLSPKTEDTYLPHILSPAVFGGPGTNFKMPGRSSSNSGSTGFISFSGVESALSSLKNFQACINSGMDTASSVALDLVESQTEVSSEYSMDKAMVEFATLDRQLNHYVKAVQSTINHVKEERPEKIPDLKLLVEKKFLALQSKNSDADFQNNEKFVQFKQQLKELKKQCKSHACVWSAFELGTDDDSPVLIIKCYLLVNPSRGKGGTVWHWAQRLWKQSQGKPRVW

SEQ ID NO: 897401 - protein, 247 aa, Homo sapiens; identical to SEQ ID NO: 897395

SEQ ID NO: 897402 - protein, 247 aa, Homo sapiens; identical to SEQ ID NO: 897395

SEQ ID NO: 897403 - protein, 247 aa, Homo sapiens; identical to SEQ ID NO: 897395

SEQ ID NO: 897404 - protein, 135 aa, Homo sapiens
MPGRSSSNSGSTGFISFSGVESALSSLKNFQACINSGMDTASSVALDLVESQTEVSSEYSMDKAMVEFATLDRQLNHYVKAVQSTINHVPWGSTDPRGAETLSGREGLAFFLSRRLALPTRAPASLLFFCAVNQK

SEQ ID NO: 897405 - protein, 302 aa, Homo sapiens
MKAPGRLVLIILCSVVFSAVYILLCCWAGLPLCLATCLDHHFPTGSRPTVPGPLHFSGYSSVPDGKPLVREPCRSCAVVSSSGQMLGSGLGAEIDSAECVFRMNQAPTVGFEADVGQRSTLRVVSHTSVPLLLRNYSHYFQKARDTLYMVWGQGRHMDRVLGGRTYRTLLQLTRMYPGLQVYTFTERMMAYCDQIFQDETGKNRRQSGSFLSTGWFTMILALELCEEIVVYGMVSDSYCREKSHPSVPYHYFEKGRLDECQMYLAHEQAPRSAHRFITEKAVFSRWAKKRPIVFAHPSWRTE

SEQ ID NO: 897406 - protein, 302 aa, Homo sapiens; identical to SEQ ID NO: 897405

SEQ ID NO: 897407 - protein, 302 aa, Homo sapiens; identical to SEQ ID NO: 897405

SEQ ID NO: 897408 - protein, 302 aa, Homo sapiens; identical to SEQ ID NO: 897405

SEQ ID NO: 897409 - protein, 216 aa, Homo sapiens
MKAPGRLVLIILCSVVFSAVYILLCCWAGLPLCLATCLDHHFPTGSRPTVPGPLHFSGYSSVPDGKPLVREPCRSCAVVSSSGQMLGSGLGAEIDSAECVFRMNQAPTVGFEADVGQRSTLRVVSHTSVPLLLRNYSHYFQKARDTLYMVWGQGRHMDRVLGGRTYRTLLQLTRMYPGLQVYTFTERMMAYCDQIFQDETGKNRLVMRLREVHEQM

SEQ ID NO: 897410 - protein, 218 aa, Homo sapiens
MLGSGLGAEIDSAECVFRMNQAPTVGFEADVGQRSTLRVVSHTSVPLLLRNYSHYFQKARDTLYMVWGQGRHMDRVLGGRTYRTLLQLTRMYPGLQVYTFTERMMAYCDQIFQDETGKNRRQSGSFLSTGWFTMILALELCEEIVVYGMVSDSYCREKSHPSVPYHYFEKGRLDECQMYLAHEQAPRSAHRFITEKAVFSRWAKKRPIVFAHPSWRTE

SEQ ID NO: 897411 - protein, 159 aa, Homo sapiens
MAFGGSPHLQVCQVAFVPGADGPQLTSIMTLCQSWSSLPSRPYHLLVPHFSGWPPWLGQPRAWGSLVKGPWSCDCRGRIRNVRVNVCFLEKKKHTKHNTVGAAQPPGKVSRPLVWGAPHTSKYPAKRSHRPRQQRGLTKTRGRGSPPRSARLKAAQTPG

SEQ ID NO: 897412 - protein, 138 aa, Homo sapiens
ASISGPESSSLQEAEQDSNPGSRDLLLPYVSWPPQGSGVGLHEPMGLARGGQGRRQGVAGGEWGSVPPQPCSPPRREKSHPSVPYHYFEKGRLDECQMYLAHEQAPRSAHRFITEKAVFSRWAKKRPIVFAHPSWRTE

SEQ ID NO: 897413 - protein, 112 aa, Homo sapiens
MKAPVSGKKEDFQGTQRPRLAEQLSSLSTPGPTATSDLPTAEQRRAEWPQSPTLFLQTVWPQAGGIHSAVSVPCYPCKTEVTLRAHQAKPTWNWGCEVQFSRSCLYCRSPGL

SEQ ID NO: 897414 - protein, 302 aa, Homo sapiens; identical to SEQ ID NO: 897405

SEQ ID NO: 897415 - protein, 302 aa, Homo sapiens; identical to SEQ ID NO: 897405

SEQ ID NO: 897416 - protein, 302 aa, Homo sapiens; identical to SEQ ID NO: 897405

SEQ ID NO: 897417 - protein, 266 aa, Homo sapiens [sequence omitted]

SEQ ID NO: 897418 - protein, 177 aa, Homo sapiens
MLGSGLGAEIDSAECVFRMNQAPTVGFEADVGQRSTLRVVSHTSVPLLLRNYSHYFQKARDTLYMVWGQGRHMDRVLGGRTYRTLLQLTRMYPGLQVYTFTERMMAYCDQIFQDETGKNRRQSGSFLSTGWFTMILALELCEEIVVYGMVSDSYCRGKKHPSMLTLIEKAGNRCNVP

SEQ ID NO: 897419 - protein, 90 aa, Homo sapiens
PTATRSSRTRRARTGEPGACLLGSLWQLGPSFSGSLLSIRGCSVRPGRSALMEADMVLPSNGGQEAEGMSLRKLSHRSRIPDGVEGCQAF

SEQ ID NO: 897420 - protein, 1375 aa, Homo sapiens [sequence omitted]

SEQ ID NO: 897421 - protein, 1353 aa, Homo sapiens
MEGDRVAGRPVLSSLPVLLLLQLLMLRAAALHPDELFPHGESWGDQLLQEGDDESSAVVKLANPLHFYEARFSNLYVGTNGIISTQDFPRETQYVDYDFPTDFPAIAPFLADIDTSHGRGRVLYREDTSPAVLGLAARYVRAGFPRSARFTPTHAFLATWEQVGAYEEVKRGALPSGELNTFQAVLASDGSDSYALFLYPANGLQFLGTRPKESYNVQLQLPARVGFCRGEADDLKSEGPYFSLTSTEQSVKNLYQLSNLGIPGVWAFHIGSTSPLDNVRPAAVGDLSAAHSSVPLGRSFSHATALESDYNEDNLDYYDVNEEEAEYLPGEPEEALNGHSSIDVSFQSKVDTKPLEESSTLDPHTKEGTSLGEVGGPDLKGQVEPWDERETRSPAPPEVDRDSLAPSWETPPPYPENGSIQPYPDGGPVPSEMDVPPAHPEEEIVLRSYPASGHTTPLSRGTYEVGLEDNIGSNTEVFTYNAANKETCEHNHRQCSRHAFCTDYATGFCCHCQSKFYGNGKHCLPEGAPHRVNGKVSGHLHVGHTPVHFTDVDLHAYIVGNDGRAYTAISHIPQPAAQALLPLTPIGGLFGWLFALEKPGSENGFSLAGAAFTHDMEVTFYPGEETVRITQTAEGLDPENYLSIKTNIQGQVPYVPANFTAHISPYKELYHYSDSTVTSTSSRDYSLTFGAINQTWSYRIHQNITYQVCRHAPRHPSFPTTQQLNVDRVFALYNDEERVLRFAVTNQIGPVKEDSDPTPVNPCYDGSHMCDTTARCHPGTGVDYTCECASGYQGDGRNCVDENECATGFHRCGPNSVCINLPGSYRCECRSGYEFADDRHTCILITPPANPCEEAVIPVLLLGRPGVFTMEAARSAVPACLVMPAMGTSALFSCRCQPGYYGDGFQCIPDSTSSLTPCEQQQRHAQAQYAYPGARFHIPQCDEQGNFLPLQCHGSTGFCWCVDPDGHEVPGTQTPPGSTPPHCGPSPEPTQRPPTICERWRENLLEHYGGTPRDDQYVPQCDDLGHFIPLQCHGKSDFCWCVDKDGREVQGTRSQPGTTPACIPTVAPPMVRPTPRPDVTPPSVGTFLLYTQGQQIGYLPLNGTRLQKDAAKTLLSLHGSIIVGIDYDCRERMVYWTDVAGRTISRAGLELGAEPETIVNSGLISPEGLAIDHIRRTMYWTDSVLDKIESALLDGSERKVLFYTDLVNPRAIAVDPIRGNLYWTDWNREAPKIETSSLDGENRRILINTDIGLPNGLTFDPFSKLLCWADAGTKKLECTLPDGTGRRVIQNNLKYPFSIVSYADHFYHTDWRRDGVVSVNKHSGQFTDEYLPEQRSHLYGITAVYPYCPTGRK

SEQ ID NO: 897422 - protein, 1402 aa, Homo sapiens
MEGDRVAGRPVLSSLPVLLLLQLLMLRAAALHPDELFPHGESWGDQLLQEGDDESSAVVKLANPLHFYEARFSNLYVGTNGIISTQDFPRETQYVDYDFPTDFPAIAPFLADIDTSHGRGRVLYREDTSPAVLGLAARYVRAGFPRSARFTPTHAFLATWEQVGAYEEVKRGALPSGELNTFQAVLASDGSDSYALFLYPANGLQFLGTRPKESYNVQLQLPARVGFCRGEADDLKSEGPYFSLTSTEQSVKNLYQLSNLGIPGVWAFHIGSTSPLDNVRPAAVGDLSAAHSSVPLGRSFSHATALESDYNEDNLDYYDVNEEEAEYLPGEPEEALNGHSSIDVSFQSKVDTKPLEGRISPPDSDLSSPLHPTPTYWPFYPETESSTLDPHTKEGTSLGEVGGPDLKGQVEPWDERETRSPAPPEVDRDSLAPSWETPPPYPENGSIQPYPDGGPVPSEMDVPPAHPEEEIVLRSYPASGHTTPLSRGTYEVGLEDNIGSNTEVFTYNAANKETCEHNHRQCSRHAFCTDYATGFCCHCQSKFYGNGKHCLPEGAPHRVNGKVSGHLHVGHTPVHFTDVDLHAYIVGNDGRAYTAISHIPQPAAQALLPLTPIGGLFGWLFALEKPGSENGFSLAGAAFTHDMEVTFYPGEETVRITQTAEGLDPENYLSIKTNIQGQVPYVPANFTAHISPYKELYHYSDSTVTSTSSRDYSLTFGAINQTWSYRIHQNITYQVCRHAPRHPSFPTTQQLNVDRVFALYNDEERVLRFAVTNQIGPVKEDSDPTPVNPCYDGSHMCDTTARCHPGTGVDYTCECASGYQGDGRNCVDENECATGFHRCGPNSVCINLPGSYRCECRSGYEFADDRHTCILITPPANPCEDGSHTCAPAGQARCVHHGGSTFSCACLPGYAGDGHQCTDVDECSENRCHPAATCYNTPGSFSCRCQPGYYGDGFQCIPDSTSSLTPCEQQQRHAQAQYAYPGARFHIPQCDEQGNFLPLQCHGSTGFCWCVDPDGHEVPGTQTPPGSTPPHCGPSPEPTQRPPTICERWRENLLEHYGGTPRDDQYVPQCDDLGHFIPLQCHGKSDFCWCVDKDGREVQGTRSQPGTTPACIPTVAPPMVRPTPRPDVTPPSVGTFLLYTQGQQIGYLPLNGTRLQKDAAKTLLSLHGSIIVGIDYDCRERMVYWTDVAGRTISRAGLELGAEPETIVNSGLISPEGLAIDHIRRTMYWTDSVLDKIESALLDGSERKVLFYTDLVNPRAIAVDPIRGNLYWTDWNREAPKIETSSLDGENRRILINTDIGLPNGLTFDPFSKLLCWADAGTKKLECTLPDGTGRRVIQNNLKYPFSIVSYADHFYHTDWRRDGVVSVNKHSGQFTDEYLPEQRSHLYGITAVYPYCPTGRK

SEQ ID NO: 897423 - protein, 1375 aa, Homo sapiens [sequence omitted]

SEQ ID NO: 897424 - protein, 1382 aa, Homo sapiens
MEGDRVAGRPVLSSLPVLLLLQLLMLRAAALHPDELFPHGESWGDQLLQEGDDESSAVVKLANPLHFYEARFSNLYVGTNGIISTQDFPRETQYVDYDFPTDFPAIAPFLADIDTSHGRGRVLYREDTSPAVLGLAARYVRAGFPRSARFTPTHAFLATWEQVGAYEEVKRGALPSGELNTFQAVLASDGSDSYALFLYPANGLQFLGTRPKESYNVQLQLPARVGFCRGEADDLKSEGPYFSLTSTEQSVKNLYQLSNLGIPGVWAFHIGSTSPLDNVRPAAVGDLSAAHSSVPLGRSFSHATALESDYNEDNLDYYDVNEEEAEYLPGEPEEALNGHSSIDVSFQSKVDTKPLEESSTLDPHTKEGTSLGEVGGPDLKGQVEPWDERETRSPAPPEVDRDSLAPSWETPPPYPENGSIQPYPDGGPVPSEMDVPPAHPEEEIVLRSYPASGHTTPLSRGTYEVGLEDNIGSNTEVFTYNAANKETCEHNHRQCSRHAFCTDYATGFCCHCQSKFYGNGKHCLPEGAPHRVNGKVSGHLHVGHTPVHFTDVDLHAYIVGNDGRAYTAISHIPQPAAQALLPLTPIGGLFGWLFALEKPGSENGFSLAGAAFTHDMEVTFYPGEETVRITQTAEGLDPENYLSIKTNIQGQVPYVPANFTAHISPYKELYHYSDSTVTSTSSRDYSLTFGAINQTWSYRIHQNITYQVCRHAPRHPSFPTTQQLNVDRVFALYNDEERVLRFAVTNQIGPVKEDSDPTPVNPCYDGSHMCDTTARCHPGTGVDYTCECASGYQGDGRNCVDENECATGFHRCGPNSVCINLPGSYRCECRSGYEFADDRHTCILITPPANPCEDGSHTCAPAGQARCVHHGGSTFSCACLPGYAGDGHQCTDVDECSENRCHPAATCYNTPGSFSCRCQPGYYGDGFQCIPDSTSSLTPCEQQQRHAQAQYAYPGARFHIPQCDEQGNFLPLQCHGSTGFCWCVDPDGHEVPGTQTPPGSTPPHCGPSPEPTQRPPTICERWRENLLEHYGGTPRDDQYVPQCDDLGHFIPLQCHGKSDFCWCVDKDGREVQGTRSQPGTTPACIPTVAPPMVRPTPRPDVTPPSVGTFLLYTQGQQIGYLPLNGTRLQKDAAKTLLSLHGSIIVGIDYDCRERMVYWTDVAGRTISRAGLELGAEPETIVNSGLISPEGLAIDHIRRTMYWTDSVLDKIESALLDGSERKVLFYTDLVNPRAIAVDPIRGNLYWTDWNREAPKIETSSLDGENRRILINTDIGLPNGLTFDPFSKLLCWADAGTKKLECTLPDGTGRRVIQNNLKYPFSIVSYADHFYHTDWRRDGVVSVNKHSGQFTDEYLPEQRSHLYGITAVYPYCPTGGSSTVFKEA

SEQ ID NO: 897425 - protein, 868 aa, Homo sapiens
MEGDRVAGRPVLSSLPVLLLLQLLMLRAAALHPDELFPHGESWGDQLLQEGDDESSAVVKLANPLHFYEARFSNLYVGTNGIISTQDFPRETQYVDYDFPTDFPAIAPFLADIDTSHGRGRVLYREDTSPAVLGLAARYVRAGFPRSARFTPTHAFLATWEQVGAYEEVKRGALPSGELNTFQAVLASDGSDSYALFLYPANGLQFLGTRPKESYNVQLQLPARVGFCRGEADDLKSEGPYFSLTSTEQSVKNLYQLSNLGIPGVWAFHIGSTSPLDNVRPAAVGDLSAAHSSVPLGRSFSHATALESDYNEDNLDYYDVNEEEAEYLPGEPEEALNGHSSIDVSFQSKVDTKPLEESSTLDPHTKEGTSLGEVGGPDLKGQVEPWDERETRSPAPPEVDRDSLAPSWETPPPYPENGSIQPYPDGGPVPSEMDVPPAHPEEEIVLRSYPASGHTTPLSRGTYEVGLEDNIGSNTEVFTYNAANKETCEHNHRQCSRHAFCTDYATGFCCHCQSKFYGNGKHCLPEGAPHRVNGKVSGHLHVGHTPVHFTDVDLHAYIVGNDGRAYTAISHIPQPAAQALLPLTPIGGLFGWLFALEKPGSENGFSLAGAAFTHDMEVTFYPGEETVRITQTAEGLDPENYLSIKTNIQGQVPYVPANFTAHISPYKELYHYSDSTVTSTSSRDYSLTFGAINQTWSYRIHQNITYQVCRHAPRHPSFPTTQQLNVDRVFALYNDEERVLRFAVTNQIGPVKEDSDPTPVNPCYDGSHMCDTTARCHPGTGVDYTCECASGYQGDGRNCVDENECATGFHRCGPNSVCINLPGSYRCECRSGYEFADDRHTCICEFQNHFPVWPKWCSLILLFNLSVF

SEQ ID NO: 897426 - protein, 1327 aa, Homo sapiens [sequence omitted]

SEQ ID NO: 897427 - protein, 974 aa, Homo sapiens
MEGDRVAGRPVLSSLPVLLLLQLLMLRAAALHPDELFPHGESWGDQLLQEGDDESSAVVKLANPLHFYEARFSNLYVGTNGIISTQDFPRETQYVDYDFPTDFPAIAPFLADIDTSHGRGRVLYRGAPHRVNGKVSGHLHVGHTPVHFTDVDLHAYIVGNDGRAYTAISHIPQPAAQALLPLTPIGGLFGWLFALEKPGSENGFSLAGAAFTHDMEVTFYPGEETVRITQTAEGLDPENYLSIKTNIQGQVPYVPANFTAHISPYKELYHYSDSTVTSTSSRDYSLTFGAINQTWSYRIHQNITYQVCRHAPRHPSFPTTQQLNVDRVFALYNDEERVLRFAVTNQIGPVKEDSDPTPVNPCYDGSHMCDTTARCHPGTGVDYTCECASGYQGDGRNCVDENECATGFHRCGPNSVCINLPGSYRCECRSGYEFADDRHTCILITPPANPCEDGSHTCAPAGQARCVHHGGSTFSCACLPGYAGDGHQCTDVDECSENRCHPAATCYNTPGSFSCRCQPGYYGDGFQCIPDSTSSLTPCEQQQRHAQAQYAYPGARFHIPQCDEQGNFLPLQCHGSTGFCWCVDPDGHEVPGTQTPPGSTPPHCGPSPEPTQRPPTICERWRENLLEHYGGTPRDDQYVPQCDDLGHFIPLQCHGKSDFCWCVDKDGREVQGTRSQPGTTPACIPTVAPPMVRPTPRPDVTPPSVGTFLLYTQGQQIGYLPLNGTRLQKDAAKTLLSLHGSIIVGIDYDCRERMVYWTDVAGRTISRAGLELGAEPETIVNSGLISPEGLAIDHIRRTMYWTDSVLDKIESALLDGSERKVLFYTDLVNPRAIAVDPIRGNLYWTDWNREAPKIETSSLDGENRRILINTDIGLPNGLTFDPFSKLLCWADAGTKKLECTLPDGTGRRVIQNNLKYPFSIVSYADHFYHTDWRRDGVVSVNKHSGQFTDEYLPEQRSHLYGITAVYPYCPTGRK

SEQ ID NO: 897428 - protein, 154 aa, Homo sapiens
MLPTTGYMAILLQSGFLTYSNLYWTDWNREAPKIETSSLDGENRRILINTDIGLPNGLTFDPFSKLLCWADAGTKKLECTLPDGTGRRVIQNNLKYPFSIVSYADHFYHTDWRRDGVVSVNKHSGQFTDEYLPEQRSHLYGITAVYPYCPTGRK

SEQ ID NO: 897429 - protein, 80 aa, Homo sapiens
TSHGRGRVLYREDTSPAVLGLAARYVRAGFPRSARFTPTHAFLATWEQVGAYEEVKRGALPSGEVSDQGYLTAEEIEGWA

SEQ ID NO: 897430 - protein, 847 aa, Homo sapiens
MSFSEMNRRTLAFRGGGLVTASGGGSTNNNAGGEASAWPPQPQPRQPPPTAPPALQPPNGRGADEEVELEGLEPQDLEASAGPAAGAAEEAKELLLPQDAGGPTSLGGGAGGPLLAERNRRTLAFRGGGGGGLGNNGSSRGRPETSVWPLRHFNGRGPATVDLELDALEGKELMQDGASLSDSTEDEEEGASLGDGSGAEGGSCSSSRRSGGDGGDEVEGSGVGAGEGETVQHFPLARPKSLMQKLQCSFQTSWLKDFPWLRYSKDTGLMSCGWCQKTPADGGSVDLPPVGHDELSRGTRNYKKTLLLRHHVSTEHKLHEANAPESEIPSEEGYCDFNSRPNENSYCYQLLRQLNEQRKKGILCDVSIVVSGKIFKAHKNILVAGSRFFKTLYCFSNKESPNQNNTTHLDIAAVQGFSVILDFLYSGNLVLTSQNAIEVMTVASYLQMSEVVQTCRNFIKDALNISIKSEAPESVVVDYNNRKPVNRDGLSSSRDQKIASFWATRNLTNLASNVKIENDGCNVDEGQIENYQMNDSSWVQDGSPEMAENESEGQTKVFIWNNMGSQGIQETGKTRRKNQTTKRFIYNIPPNNETNLEDCSVMQPPVAYPEENTLLIKEEPDLDGALLSGPDGDRNVNANLLAEAGTSQDGGDAGTSHDFKYGLMPGPSNDFKYGLLPESWPKQETWENGESSLIMNKLKCPHCSYVAKYRRTLKRHLLIHTGVRSFSCDICGKLFTRREHVKRHSLVHKKDKKYKCMVCKKIFMLAASVGIRHGSRRYGVCVDCADKSQPGGQEGVDQGQDTEFPRDEEYEENEVGEADEELVDDGEDQNDPSRWDESGEVCMSLDD

SEQ ID NO: 897431 - protein, 847 aa, Homo sapiens; identical to SEQ ID NO: 897430

SEQ ID NO: 897432 - protein, 847 aa, Homo sapiens; identical to SEQ ID NO: 897430

SEQ ID NO: 897433 - protein, 847 aa, Homo sapiens; identical to SEQ ID NO: 897430

SEQ ID NO: 897434 - protein, 229 aa, Homo sapiens
HSPASHRKITHPSTPAEETYNLGRQVLPLSAVTYFQKSGPGLLPAPATQSASVAGTLQNSLCSQVTKKKRANMLVLLAGIFVVHIATVIMLFVSTIANVWLVSNTVDASVGLWKNCTNISCSDSLSYASEDALKTVQAFMILSIIFCVIALLVFVFQLFTMEKGNRFFLSGATTLVCWLCILVGVSIYTSHYANRDGTQYHHGYSYILGWICFCFSFIIGVLYLVLRKK

SEQ ID NO: 897435 - protein, 66 aa, Homo sapiens
SFPSLAVVVHFEMFALKRSFAIRVRLHNNLEIQSVQPMAAQVMSVLTPGGHFGTATHYSEHAFCTD

SEQ ID NO: 897436 - protein, 229 aa, Homo sapiens; identical to SEQ ID NO: 897434

SEQ ID NO: 897437 - protein, 73 aa, Homo sapiens
RSPPDVPTWSDHLLGTLPIPLHRWEGDLFTMENLGDGQSPVETSHTAVPHGDLMPWSLLGLLLKAKAALLEFL

SEQ ID NO: 897438 - protein, 229 aa, Homo sapiens; identical to SEQ ID NO: 897434

SEQ ID NO: 897439 - protein, 233 aa, Homo sapiens
HSPASHRKITHPSTPAEETYNLGRQVLPLSAVTYFQKSGPGLLPAPATQSASVAGTLQNSLCSQVTKKKRANMLVLLAGIFVVHIATVIMLFVSTIANVWLVSNTVDASVGLWKNCTNISCSDSLSYASEDALKTVQAFMILSIIFCVIALLVFVFQLFTMEKGNRFFLSGATTLVCCEYLMGRLQFTLLSPSYHGCFWQLEQISTWFSETSLCNFLLWLFVLLWRTLDCCLG

SEQ ID NO: 897440 - protein, 229 aa, Homo sapiens
KHGEKKPPITHPSTPAEETYNLGRQVLPLSAVTYFQKSGPGLLPAPATQSASVAGTLQNSLCSQVTKKKRANMLVLLAGIFVVHIATVIMLFVSTIANVWLVSNTVDASVGLWKNCTNISCSDSLSYASEDALKTVQAFMILSIIFCVIALLVFVFQLFTMEKGNRFFLSGATTLVCWLCILVGVSIYTSHYANRDGTQYHHGYSYILGWICFCFSFIIGVLYLVLRKK

SEQ ID NO: 897441 - protein, 229 aa, Homo sapiens; identical to SEQ ID NO: 897434

SEQ ID NO: 897442 - protein, 229 aa, Homo sapiens; identical to SEQ ID NO: 897434

SEQ ID NO: 897443 - protein, 134 aa, Homo sapiens
HSPASHRKITHPSTPAEETYNLGRQVLPLSAVTYFQKSGPGLLPAPATQSASVAGTLQNSLCSQVTKKKRANMLVLLAGIFVVHIATVIMLFVSTIANVWLVSNTVDASVGLWKNCTNISCSDSLSYASEAVGR

SEQ ID NO: 897444 - protein, 104 aa, Homo sapiens
VWLVSNTVDASVGLWKNCTNISCSDSLSYASEGIYKDIDPVLTIGVVRECSAPGVTSCPCSPRPVSTDALKTVQAFMILSIIFCVIALLVFVFQLFTMEKGNRF

SEQ ID NO: 897445 - protein, 465 aa, Homo sapiens
MRKGIQPALEQYLVTAGGGEGAAVVAAAAAASMDKRALLASPGFAAAAAAAAAPGAYIQILTTNTSTTSCSSSLQSGAVAAGPLLPSAPGAEQTAGSLLYTTPHGPSSRAGLLQQPPALGRGGSGGGGGPPAKRRLELGESGHQYLSDGLKTPKGKGRAALRSPDSPKTPKSPSEKTRYDTSLGLLTKKFIQLLSQSPDGVLDLNKAAEVLKVQKRRIYDITNVLEGIHLIKKKSKNNVQWMGCSLSEDGGMLAQCQGLSKEVTELSQEEKKLDELIQSCTLDLKLLTEDSENQRLAYVTYQDIRKISGLKDQTVIVVKAPPETRLEVPDSIESLQIHLASTQGPIEVYLCPEETETHSPMKTNNQDHNGNIPKPASKDLASTNSGHSDCSVSMGNLSPLASPANLLQQTEDQIPSNLEGPFVNLLPPLLQEDYLLSLGEEEGISDLFDAYDLEKLPLVEDFMCS

SEQ ID NO: 897446 - protein, 465 aa, Homo sapiens; identical to SEQ ID NO: 897445

SEQ ID NO: 897447 - protein, 74 aa, Homo sapiens
ISSCLADWRWLHRVSPSRMISRVAVRRGEGCSCEVALGAAVEAPLTVWETIYAKLFPISHIYLIWLAASASSFV

SEQ ID NO: 897448 - protein, 157 aa, Homo sapiens
SPPRVGYKTRSSFCVPPPDCLRGGPPLPPLFCARPPIVIPPWGSVLLSPGVFPHVPPRCGCNTLFLPRVPFFVPPGRLFFGAPLYRHPFSPQNARARVRALCRRFPRGRYLRSPPRALRARARGGGASARAGPPPLFFFFFFFFFFLVFIFVVRVDL

SEQ ID NO: 897449 - protein, 181 aa, Homo sapiens
AGSRDDRGVGGRGEALDGGGSGAPPSVSQTESRAGTMSAYPKSYNPFDDDGEDEGARPAPWRDARDLPDGPDAPADRQQYLRQEVLRRAEATAASTSRSLALMYESEKVGVASSEELARQRGVLERTEKMVDKMDQDLKISQKHINSIKSVFGGLVNYFKSKPVETPPEQNGTLTSQPNNR

SEQ ID NO: 897450 - protein, 294 aa, Homo sapiens
AGSRDDRGVGGRGEALDGGGSGAPPSVSQTESRAGTMSAYPKSYNPFDDDGEDEGARPAPWRDARDLPDGPDAPADRQQYLRQEVLRRAEATAASTSRSLALMYESEKVGVASSEELARQRGVLERTEKMVDKMDQDLKISQKHINSIKSVFGGLVNYFKSKPVETPPEQNGTLTSQPNNRLKEAISTSKEQEAKYQASHPNLRKLDDTDPVPRGAGSAMSTDAYPKNPHLRAYHQKIDSNLDELSMGLGRLKDIALGMQTEIEEQDDILDRLTTKVDKLDVNIKSTERKVRQL

SEQ ID NO: 897451 - protein, 165 aa, Homo sapiens
MVDKMDQDLKISQKHINSIKSVFGGLVNYFKSKPVETPPEQNGTLTSQPNNRLKEAISTSKEQEAKYQASHPNLRKLDDTDPVPRGAGSAMSTDAYPKNPHLRAYHQKIDSNLDELSMGLGRLKDIALGMQTEIEEQDDILDRLTTKVDKLDVNIKSTERKVRQL

SEQ ID NO: 897452 - protein, 294 aa, Homo sapiens; identical to SEQ ID NO: 897450

SEQ ID NO: 897453 - protein, 122 aa, Homo sapiens
RGQYFPLQSAAYKQLVSKEQEAKYQASHPNLRKLDDTDPVPRGAGSAMSTDAYPKNPHLRAYHQKIDSNLDELSMGLGRLKDIALGMQTEIEEQDDILDRLTTKVDKLDVNIKSTERKVRQL

SEQ ID NO: 897454 - protein, 44 aa, Homo sapiens
WLPWGRVTESYNATASRFPQELARQRGVLERTEKMVDKMDQDLK

SEQ ID NO: 897455 - protein, 294 aa, Homo sapiens; identical to SEQ ID NO: 897450

SEQ ID NO: 897456 - protein, 162 aa, Homo sapiens
AVVFLLESPYITGHVRLSTAVGLVNYFKSKPVETPPEQNGTLTSQPNNRLKEAISTSKEQEAKYQASHPNLRKLDDTDPVPRGAGSAMSTDAYPKNPHLRAYHQKIDSNLDELSMGLGRLKDIALGMQTEIEEQDDILDRLTTKVDKLDVNIKSTERKVRQL

SEQ ID NO: 897457 - protein, 294 aa, Homo sapiens; identical to SEQ ID NO: 897450

SEQ ID NO: 897458 - protein, 260 aa, Homo sapiens
AGSRDDRGVGGRGEALDGGGSGAPPSVSQTESRAGTMSAYPKSYNPFDDDGEDEGARPAPWRDARDLPDGPDAPADRQQYLRQEVLRRAEATAASTSRSLALMYESEKVGVASSEELARQRGVLERTEKMVDKMDQDLKISQKHINSIKSVFGGLVNYFKSKPVETPPEQNGTLTSQPNNRLKEAISTSKEQEAKYQASHPNLRKLDDTDPVPRGAGSAMSTDAYPKNPHLRAYHQKIDSNLDLKISQKHINSIKGVFGG

SEQ ID NO: 897459 - protein, 342 aa, Homo sapiens
EFAAASTASVATADETERLKRAGVRGLLFHQLHGDDMASASSSRAGVALPFEKSQLTLKVVSAKPKVHNRQPRINSYVEVAVDGLPSETKKTGKRIGSSELLWNEIIILNVTAQSHLDLKVWSCHTLRNELLGTASVNLSNVLKNNGGKMENMQLTLNLQTENKGSVVSGGELTIFLDGPTVDLGNVPNGSALTDGSQLPSRDSSGTAVAPENRHQPPSTNCFGGRSRTHRHSGASARTTPATGEQSPGARSRHRQPVKNSGHSGLANGTVNDEPTTATDPEEPSVVGVTSPPAAPLSVTPNPNTTSLPAPATPAEGEEPSTSGTQQLPAAAQAPDALPAGE

SEQ ID NO: 897460 - protein, 906 aa, Homo sapiens
EFAAASTASVATADETERLKRAGVRGLLFHQLHGDDMASASSSRAGVALPFEKSQLTLKVVSAKPKVHNRQPRINSYVEVAVDGLPSETKKTGKRIGSSELLWNEIIILNVTAQSHLDLKVWSCHTLRNELLGTASVNLSNVLKNNGGKMENMQLTLNLQTENKGSVVSGGELTIFLDGPTVDLGNVPNGSALTDGSQLPSRDSSGTAVAPENRHQPPSTNCFGGRSRTHRHSGASARTTPATGEQSPGARSRHRQPVKNSGHSGLANGTVNDEPTTATDPEEPSVVGVTSPPAAPLSVTPNPNTTSLPAPATPAEGEEPSTSGTQQLPAAAQAPDALPAGWEQRELPNGRVYYVDHNTKTTTWERPLPPGWEKRTDPRGRFYYVDHNTRTTTWQRPTAEYVRNYEQWQSQRNQLQGAMQHFSQRFLYQSSSASTDHDPLGPLPPGWEKRQDNGRVYYVNHNTRTTQWEDPRTQGMIQEPALPPGWEMKYTSEGVRYFVDHNTRTTTFKDPRPGFESGTKQGSPGAYDRSFRWKYHQFRFLCHSNALPSHVKISVSRQTLFEDSFQQIMNMKPYDLRRRLYIIMRGEEGLDYGGIAREWFFLLSHEVLNPMYCLFEYAGKNNYCLQINPASSINPDHLTYFRFIGRFIAMALYHGKFIDTGFTLPFYKRMLNKRPTLKDLESIDPEFYNSIVWIKENNLEECGLELYFIQDMEILGKVTTHELKEGGESIRVTEENKEEYIMLLTDWRFTRGVEEQTKAFLDGFNEVAPLEWLRYFDEKELELMLCGMQEIDMSDWQKSTIYRHYTKNSKQIQWFWQVVKEMDNEKRIRLLQFVTGTCRLPVGGFAELIGSNGPQKFCIDKVGKETWLPRSHTCFNRLDLPPYKSYEQLREKLLYAIEETEGFGQE

SEQ ID NO: 897461 - protein, 870 aa, Homo sapiens
MASASSSRAGVALPFEKSQLTLKVVSAKPKVHNRQPRINSYVEVAVDGLPSETKKTGKRIGSSELLWNEIIILNVTAQSHLDLKVWSCHTLRNELLGTASVNLSNVLKNNGGKMENMQLTLNLQTENKGSVVSGGELTIFLDGPTVDLGNVPNGSALTDGSQLPSRDSSGTAVAPENRHQPPSTNCFGGRSRTHRHSGASARTTPATGEQSPGARSRHRQPVKNSGHSGLANGTVNDEPTTATDPEEPSVVGVTSPPAAPLSVTPNPNTTSLPAPATPAEGEEPSTSGTQQLPAAAQAPDALPAGWEQRELPNGRVYYVDHNTKTTTWERPLPPGWEKRTDPRGRFYYVDHNTRTTTWQRPTAEYVRNYEQWQSQRNQLQGAMQHFSQRFLYQSSSASTDHDPLGPLPPGWEKRQDNGRVYYVNHNTRTTQWEDPRTQGMIQEPALPPGWEMKYTSEGVRYFVDHNTRTTTFKDPRPGFESGTKQGSPGAYDRSFRWKYHQFRFLCHSNALPSHVKISVSRQTLFEDSFQQIMNMKPYDLRRRLYIIMRGEEGLDYGGIAREWFFLLSHEVLNPMYCLFEYAGKNNYCLQINPASSINPDHLTYFRFIGRFIAMALYHGKFIDTGFTLPFYKRMLNKRPTLKDLESIDPEFYNSIVWIKENNLEECGLELYFIQDMEILGKVTTHELKEGGESIRVTEENKEEYIMLLTDWRFTRGVEEQTKAFLDGFNEVAPLEWLRYFDEKELELMLCGMQEIDMSDWQKSTIYRHYTKNSKQIQWFWQVVKEMDNEKRIRLLQFVTGTCRLPVGGFAELIGSNGPQKFCIDKVGKETWLPRSHTCFNRLDLPPYKSYEQLREKLLYAIEETEGFGQE

SEQ ID NO: 897462 - protein, 744 aa, Homo sapiens
MIVGEGLGGELTIFLDGPTVDLGNVPNGSALTDGSQLPSRDSSGTAVAPENRHQPPSTNCFGGRSRTHRHSGASARTTPATGEQSPGARSRHRQPVKNSGHSGLANGTVNDEPTTATDPEEPSVVGVTSPPAAPLSVTPNPNTTSLPAPATPAEGEEPSTSGTQQLPAAAQAPDALPAGWEQRELPNGRVYYVDHNTKTTTWERPLPPGWEKRTDPRGRFYYVDHNTRTTTWQRPTAEYVRNYEQWQSQRNQLQGAMQHFSQRFLYQSSSASTDHDPLGPLPPGWEKRQDNGRVYYVNHNTRTTQWEDPRTQGMIQEPALPPGWEMKYTSEGVRYFVDHNTRTTTFKDPRPGFESGTKQGSPGAYDRSFRWKYHQFRFLCHSNALPSHVKISVSRQTLFEDSFQQIMNMKPYDLRRRLYIIMRGEEGLDYGGIAREWFFLLSHEVLNPMYCLFEYAGKNNYCLQINPASSINPDHLTYFRFIGRFIAMALYHGKFIDTGFTLPFYKRMLNKRPTLKDLESIDPEFYNSIVWIKENNLEECGLELYFIQDMEILGKVTTHELKEGGESIRVTEENKEEYIMLLTDWRFTRGVEEQTKAFLDGFNEVAPLEWLRYFDEKELELMLCGMQEIDMSDWQKSTIYRHYTKNSKQIQWFWQVVKEMDNEKRIRLLQFVTGTCRLPVGGFAELIGSNGPQKFCIDKVGKETWLPRSHTCFNRLDLPPYKSYEQLREKLLYAIEETEGFGQE

SEQ ID NO: 897463 - protein, 906 aa, Homo sapiens; identical to SEQ ID NO: 897460

SEQ ID NO: 897464 - protein, 335 aa, Homo sapiens
MASASSSRAGVALPFEKSQLTLKVVSAKPKVHNRQPRINSYVEVAVDGLPSETKKTGKRIGSSELLWNEIIILNVTAQSHLDLKVWSCHTLRNELLGTASVNLSNVLKNNGGKMENMQLTLNLQTENKGSVVSGGELTIFLDGPTVDLGNVPNGSALTDGSQLPSRDSSGTAVAPENRHQPPSTNCFGGRSRTHRHSGASARTTPATGEQSPGARSRHRQPVKNSGHSGLANGTVNDEPTTATDPEEPSVVGVTSPPAAPLSVTPNPNTTSLPAPATPAEGEEPSTSGTQQLPAAAQAPDALPAGWEQRELPNGRVYYVDHNTKTTTWERPLPPG

SEQ ID NO: 897465 - protein, 371 aa, Homo sapiens
EFAAASTASVATADETERLKRAGVRGLLFHQLHGDDMASASSSRAGVALPFEKSQLTLKVVSAKPKVHNRQPRINSYVEVAVDGLPSETKKTGKRIGSSELLWNEIIILNVTAQSHLDLKVWSCHTLRNELLGTASVNLSNVLKNNGGKMENMQLTLNLQTENKGSVVSGGELTIFLDGPTVDLGNVPNGSALTDGSQLPSRDSSGTAVAPENRHQPPSTNCFGGRSRTHRHSGASARTTPATGEQSPGARSRHRQPVKNSGHSGLANGTVNDEPTTATDPEEPSVVGVTSPPAAPLSVTPNPNTTSLPAPATPAEGEEPSTSGTQQLPAAAQAPDALPAGWEQRELPNGRVYYVDHNTKTTTWERPLPPG

SEQ ID NO: 897466 - protein, 759 aa, Homo sapiens
EFAAASTASVATADETERLKRAGVRGLLFHQLHGDDMASASSSRAGVALPFEKSQLTLKVVSAKPKVHNRQPRINSYVEVAVDGLPSETKKTGKRIGSSELLWNEIIILNVTAQSHLDLKVWSCHTLRNELLGTASVNLSNVLKNNGGKMENMQLTLNLQTENKGSVVSGGELTIFLDGPTVDLGNVPNGSALTDGSQLPSRDSSGTAVAPENRHQPPSTNCFGGRSRTHRHSGASARTTPATGEQSPGARSRHRQPVKNSGHSGLANGTVNDEPTTATDPEEPSVVGVTSPPAAPLSVTPNPNTTSLPAPATPAEGEEPSTSGTQQLPAAAQAPDALPAGWEQRELPNGRVYYVDHNTKTTTWERPLPPGWEKRTDPRGRFYYVDHNTRTTTWQRPTAEYVRNYEQWQSQRNQLQGAMQHFSQRFLYQSSSASTDHDPLGPLPPGWEKRQDNGRVYYVNHNTRTTQWEDPRTQGMIQEPALPPGWEMKYTSEGVRYFVDHNTRTTTFKDPRPGFESGTKQGSPGAYDRSFRWKYHQFRFLCHSNALPSHVKISVSRQTLFEDSFQQIMNMKPYDLRRRLYIIMRGEEGLDYGGIAREWFFLLSHEVLNPMYCLFEYAGKNNYCLQINPASSINPDHLTYFRFIGRFIAMALYHGKFIDTGFTLPFYKRMLNKRPTLKDLESIDPEFYNSIVWIKENNLEECGLELYFIQDMEILGKVTTHELKEGGESIRVTEENKEEYIIPSTRFQGFKERSCFRKR

SEQ ID NO: 897467 - protein, 88 aa, Homo sapiens
MLLGCMSSKSLMGSAETKPHFEDPASNHQGPEGGASPSPFSSRVSRMIQEPALPPGWEMKYTSEGVRYFVDHNTRTTTFKDPRPGFES

SEQ ID NO: 897468 - protein, 870 aa, Homo sapiens; identical to SEQ ID NO: 897461

SEQ ID NO: 897469 - protein, 748 aa, Homo sapiens
  misc_feature (1)..(1): Xaa can be any naturally occurring amino acid
XIGLLCETGLYGGELTIFLDGPTVDLGNVPNGSALTDGSQLPSRDSSGTAVAPENRHQPPSTNCFGGRSRTHRHSGASARTTPATGEQSPGARSRHRQPVKNSGHSGLANGTVNDEPTTATDPEEPSVVGVTSPPAAPLSVTPNPNTTSLPAPATPAEGEEPSTSGTQQLPAAAQAPDALPAGWEQRELPNGRVYYVDHNTKTTTWERPLPPGWEKRTDPRGRFYYVDHNTRTTTWQRPTAEYVRNYEQWQSQRNQLQGAMQHFSQRFLYQSSSASTDHDPLGPLPPGWEKRQDNGRVYYVNHNTRTTQWEDPRTQGMIQEPALPPGWEMKYTSEGVRYFVDHNTRTTTFKDPRPGFESGTKQGSPGAYDRSFRWKYHQFRFLCHSNALPSHVKISVSRQTLFEDSFQQIMNMKPYDLRRRLYIIMRGEEGLDYGGIAREWFFLLSHEVLNPMYCLFEYAGKNNYCLQINPASSINPDHLTYFRFIGRFIAMALYHGKFIDTGFTLPFYKRMLNKRPTLKDLESIDPEFYNSIVWIKENNLEECGLELYFIQDMEILGKVTTHELKEGGESIRVTEENKEEYIMLLTDWRFTRGVEEQTKAFLDGFNEVAPLEWLRYFDEKELELMLCGMQEIDMSDWQKSTIYRHYTKNSKQIQWFWQVVKEMDNEKRIRLLQFVTGTCRLPVGGFAELIGSNGPQKFCIDKVGKETWLPRSHTCFNRLDLPPYKSYEQLREKLLYAIEETEGFGQE

SEQ ID NO: 897470 - protein, 431 aa, Homo sapiens
MIQEPALPPGWEMKYTSEGVRYFVDHNTRTTTFKDPRPGFESGTKQGSPGAYDRSFRWKYHQFRFLCHSNALPSHVKISVSRQTLFEDSFQQIMNMKPYDLRRRLYIIMRGEEGLDYGGIAREWFFLLSHEVLNPMYCLFEYAGKNNYCLQINPASSINPDHLTYFRFIGRFIAMALYHGKFIDTGFTLPFYKRMLNKRPTLKDLESIDPEFYNSIVWIKENNLEECGLELYFIQDMEILGKVTTHELKEGGESIRVTEENKEEYIMLLTDWRFTRGVEEQTKAFLDGFNEVAPLEWLRYFDEKELELMLCGMQEIDMSDWQKSTIYRHYTKNSKQIQWFWQVVKEMDNEKRIRLLQFVTGTCRLPVGGFAELIGSNGPQKFCIDKVGKETWLPRSHTCFNRLDLPPYKSYEQLREKLLYAIEETEGFGQE

SEQ ID NO: 897471 - protein, 930 aa, Homo sapiens
EFAAASTASVATADETERLKRAGVRGLLFHQLHGDDMASASSSRAGVALPFEKSQLTLKVVSAKPKVHNRQPRINSYVEVAVDGLPSETKKTGKRIGSSELLWNEIIILNVTAQSHLDLKVWSCHTLRNELLGTASVNLSNVLKNNGGKMENMQLTLNLQTENKGSVVSGGELTIFLDGPTVDLGNVPNGSALTDGSQLPSRDSSGTAVAPENRHQPPSTNCFGGRSRTHRHSGASARTTPATGEQSPGARSRHRQPVKNSGHSGLANGTVNDEPTTATDPEEPSVVGVTSPPAAPLSVTPNPNTTSLPAPATPAEGEEPSTSGTQQLPAAAQAPDALPAGWEQRELPNGRVYYVDHNTKTTTWERPLPPGWEKRTDPRGRFYYVDHNTRTTTWQRPTAEYVRNYEQWQSQRNQLQGAMQHFSQRFLYQSSSASTDHDPLGPLPPGWEKRQDNGRVYYVNHNTRTTQWEDPRTQGMIQEPALPPGWEMKYTSEGVRYFVDHNTRTTTFKDPRPGFESGTKQGSPGAYDRSFRWKYHQFRFLCHSNALPSHVKISVSRQTLFEDSFQQIMNMKPYDLRRRLYIIMRGEEGLDYGGIAREWFFLLSHEVLNPMYCLFEYAGKNNYCLQINPASSINPDHLTYFRFIGRFIAMALYHGKFIDTGFTLPFYKRMLNKRPTLKDLESIDPEFYNSIVWIKENNLEECGLELYFIQDMEILGKVTTHELKEGGESIRVTEENKEEYIMLLTDWRFTRGVEEQTKAFLDGFNEVAPLEWLRYFDEKELELMLCGMQEIDMSDWQKSTIYRHYTKNSKQIQWFWQVVKEMDNEKRIRLLQFVTGTCRLPVGGFAELIGSNGPQKFCIDKVGKETWLPRSHTCFNRLDLPPYKSYEQLREKLLYAIEETEGFGQGCRRGRRPPGLVRRGDWPLGVAVRD

SEQ ID NO: 897472 - protein, 758 aa, Homo sapiens
EFAAASTASVATADETERLKRAGVRGLLFHQLHGDDMASASSSRAGVALPFEKSQLTLKVVSAKPKVHNRQPRINSYVEVAVDGLPSETKKTGKRIGSSELLWNEIIILNVTAQSHLDLKVWSCHTLRNELLGTASVNLSNVLKNNGGKMENMQLTLNLQTENKGSVVSGGELTIFLDGPTVDLGNVPNGSALTDGSQLPSRDSSGTAVAPENRHQPPSTNCFGGRSRTHRHSGASARTTPATGEQSPGARSRHRQPVKNSGHSGLANGTVNDEPTTATDPEEPSVVGVTSPPAAPLSVTPNPNTTSLPAPATPAEGEEPSTSGTQQLPAAAQAPDALPAGWEQRELPNGRVYYVDHNTKTTTWERPLPPGWEKRTDPRGRFYYVDHNTRTTTWQRPTAEYVRNYEQWQSQRNQLQGAMQHFSQRFLYQSSSASTDHDPLGPLPPGWEKRQDNGRVYYVNHNTRTTQWEDPRTQGMIQEPALPPGWEMKYTSEGVRYFVDHNTRTTTFKDPRPGFESGTKQGSPGAYDRSFRWKYHQFRFLCHSNALPSHVKISVSRQTLFEDSFQQIMNMKPYDLRRRLYIIMRGEEGLDYGGIAREWFFLLSHEVLNPMYCLFEYAGKNNYCLQINPASSINPDHLTYFRFIGRFIAMALYHGKFIDTGFTLPFYKRMLNKRPTLKDLESIDPEFYNSIVWIKENNLEECGLELYFIQDMEILGKVTTHELKEGGESIRVTEENKEEYIMLTGVHVCSCVCVRTCI

SEQ ID NO: 897473 - protein, 759 aa, Homo sapiens; identical to SEQ ID NO: 897466

SEQ ID NO: 897474 - protein, 103 aa, Homo sapiens
FSLKLTQGMSHCAWPANAFCAEYTSFRHCQVLFCLSSNSPLEYRGMMTTSPARPDSSWSHPAPTPGQLTTAGSSSRLTRGPRGPGISLGPGCGFYKTVSFMTS

SEQ ID NO: 897475 - protein, 574 aa, Homo sapiens
  misc_feature (425)..(425): Xaa can be any naturally occurring amino acid
CPGSIVQGVCGCCYTCASQRNESCGGTFGIYGTCDRGLRCVIRPPLNGDSLTEYEAGVCEEEKPDCSKARCEVQFSPRCPEDSVLIEGYAPPGECCPLPSRCVCNPAGCLRKVCQPGNLNILVSKASGKPGECCDLYECKPVFGVDCRTVECPPVQQTACPPDSYETQVRLTADGCCTLPTRCECLSGLCGFPVCEVGSTPRIVSRGDGTPGKCCDVFECVNDTKPACVFNNVEYYDGDMFRMDNCRFCRCQGGVAICFTAQCGEINCERYYVPEGECCPVCEDPVYPFNNPAGCYANGLILAHGDRWREDDCTFCQCVNGERHCVATVCGQTCTNPVKVPGECCPVCEEPTIITVDPPACGELSNCTLTGKDCINGFKRDHNGCRTCQCINTEELCSERKQGCTLNCPFGFLTDAQNCEICECXPRPKKCRPIICDKYCPLGLLKNKHGCDICRCKKCPELSCSKICPLGFQQDSHGCLICKCREALLQLGHHPVGHLSHRGMVIIIKMRRAGHDGSPGNGSGLNGRETVFALINWPGAEPGRNHPYTCDVIATRQSTRGANPVNLTWTPEEP

SEQ ID NO: 897476 - protein, 107 aa, Homo sapiens
PGEHRAGRLRLLLHVRQPEERELRRHLRDLRNLRPGAALCHPPPAQWRLPHRVRSGRLRSCGVLNLRLLSALLLISKRNKWSPKWSRCDSRERSATIHSEVPGPYSG

SEQ ID NO: 897477 - protein, 202 aa, Homo sapiens
CPGSIVQGVCGCCYTCASQRNESCGGTFGIYGTCDRGLRCVIRPPLNGDSLTEYEAGVCEEEKPDCSKARCEVQFSPRCPEDSVLIEGYAPPGECCPLPSRCVCNPAGCLRKVCQPGNLNILVSKASGKPGECCDLYECKPVFGVDCRTVECPPVQQTACPPDSYETQVRLTADGCCTLPTRCECLSGLCGFPVCEVGSTSC

SEQ ID NO: 897478 - protein, 309 aa, Homo sapiens
MPRHCSAAGCCTRDTRETRNRGISFHRLPKKDNPRRGLWLANCQRLDPSGQGLWDPASEYIYFCSKHFEEDCFELVGISGYHRLKEGAVPTIFESFSKLRRTTKTKGHSYPPGPPEVSRLRRCRKRCSEGRGPTTPFSPPPPADVTCFPVEEASAPATLPASPAGRLEPGLSSPFSDLLGPLGAQADEAGCSAQPSPERQPSPLEPRPVSPSAYMLRLPPPAGAYIQNEHSYQVGSALLWKRRAEAALDALDKAQRQLQACKRREQRLRLRLTKLQQERAREKRAQADARQTLKEHVQDFAMQLSSSMA

SEQ ID NO: 897479 - protein, 309 aa, Homo sapiens; identical to SEQ ID NO: 897478

SEQ ID NO: 897480 - protein, 106 aa, Homo sapiens
MPRHCSAAGCCTRDTRETRNRGISFHRLPKKDNPRRGLWLANCQRLDPSGQGLWDPASEYIYFCSKHFEEDCFELVGIRWASLPADAGVGCGAPGGLGQLQVMEVP

SEQ ID NO: 897481 - protein, 126 aa, Homo sapiens
MSPAFLWKRPQHLPLCRPPQLGGWSLALAAPFQTYWAPWVPRQMKQAAAPSLHQSGSPPLSNHGQSPPQRICCACPHPPEPTSRMNTATRWAAPYSGSGEPRQPLMPLTRPSASCRPASGGSSGCG

SEQ ID NO: 897482 - protein, 126 aa, Homo sapiens; identical to SEQ ID NO: 897481

SEQ ID NO: 897483 - protein, 126 aa, Homo sapiens; identical to SEQ ID NO: 897481

SEQ ID NO: 897484 - protein, 126 aa, Homo sapiens; identical to SEQ ID NO: 897481

SEQ ID NO: 897485 - protein, 171 aa, Homo sapiens
RQLPAREDGKVAGAEASSTGKQVTQQVELEPGLSSPFSDLLGPLGAQADEAGCSAQPSPERQPSPLEPRPVSPSAYMLRLPPPAGAYIQNEHSYQVGSALLWKRRAEAALDALDKAQRQLQACKRREQRLRLRLTKLQQERAREKRAQADARQTLKEHVQDFAMQLSSSMA

SEQ ID NO: 897486 - protein, 948 aa, Homo sapiens
YGESIVANSEICLSRSTGSQCSLGPGGRYGIIGRVHAKYSGGPLYAQSLNIGRESQERRTVLYIEHRYVCSECNQLYGSLEEVLMHQNSHVPQQHFELVGVADPGVTVATDTASGTGLYQTLVQESQYQCLECGQLLMSPSQLLEHQELHLKMMAPQEAVPAEPSPKAPPLSSSTIHYECVDCKALFASQELWLNHRQTHLRATPTKAPAPVVLGSPVVLGPPVGQARVAVEHSYRKAEEGGEGATVPSAAATTTEVVTEVELLLYKCSECSQLFQLPADFLEHQATHFPAPVPESQEPALQQEVQASSPAEVPVSQPDPLPASDHSYELRNGEAIGRDRRGRRARRNNSGEAGGAATQELFCSACDQLFLSPHQLQQHLRSHREGVFKCPLCSRVFPSPSSLDQHLGDHSSESHFLCVDCGLAFGTEALLLAHRRAHTPNPLHSCPCGKTFVNLTKFLYHRRTHGVGGVPLPTTPVPPEEPVIGFPEPAPAETGEPEAPEPPVSEETSAGPAAPGTYRCLLCSREFGKALQLTRHQRFVHRLERRHKCSICGKMFKKKSHVRNHLRTHTGERPFPCPDCSKPFNSPANLARHRLTHTGERPYRCGDCGKAFTQSSTLRQHRLVHAQHFPYRCQECGVRFHRPYRLLMHRYHHTGEYPYKCRECPRSFLLRRLLEVHQLVVHAGRQPHRCPSCGAAFPSSLRLREHRCAAAAAQAPRRFECGTCGKKVGSAARLQAHEAAHAAAGPGEVLAKEPPAPRAPRATRAPVASPAALGSTATASPAAPARRRGLECSECKKLFSTETSLQVHRRIHTGERPYPCPDCGKAFRQSTHLKDHRRLHTGERPFACEVCGKAFAISMRLAEHRRIHTGERPYSCPDCGKSYRSFSNLWKHRKTHQQQHQAAVRQQLAEAEAAVGLAVMETAVEALPLVEAIEIYPLAEAEGVQISG

SEQ ID NO: 897487 - protein, 921 aa, Homo sapiens
PTADPARGQPGGGRAGAAAQGLAAAMTEESEETVLYIEHRYVCSECNQLYGSLEEVLMHQNSHVPQQHFELVGVADPGVTVATDTASGTGLYQTLVQESQYQCLECGQLLMSPSQLLEHQELHLKMMAPQEAVPAEPSPKAPPLSSSTIHYECVDCKALFASQELWLNHRQTHLRATPTKAPAPVVLGSPVVLGPPVGQARVAVEHSYRKAEEGGEGATVPSAAATTTEVVTEVELLLYKCSECSQLFQLPADFLEHQATHFPAPVPESQEPALQQEVQASSPAEVPVSQPDPLPASDHSYELRNGEAIGRDRRGRRARRNNSGEAGGAATQELFCSACDQLFLSPHQLQQHLRSHREGVFKCPLCSRVFPSPSSLDQHLGDHSSESHFLCVDCGLAFGTEALLLAHRRAHTPNPLHSCPCGKTFVNLTKFLYHRRTHGVGGVPLPTTPVPPEEPVIGFPEPAPAETGEPEAPEPPVSEETSAGPAAPGTYRCLLCSREFGKALQLTRHQRFVHRLERRHKCSICGKMFKKKSHVRNHLRTHTGERPFPCPDCSKPFNSPANLARHRLTHTGERPYRCGDCGKAFTQSSTLRQHRLVHAQHFPYRCQECGVRFHRPYRLLMHRYHHTGEYPYKCRECPRSFLLRRLLEVHQLVVHAGRQPHRCPSCGAAFPSSLRLREHRCAAAAAQAPRRFECGTCGKKVGSAARLQAHEAAHAAAGPGEVLAKEPPAPRAPRATRAPVASPAALGSTATASPAAPARRRGLECSECKKLFSTETSLQVHRRIHTGERPYPCPDCGKAFRQSTHLKDHRRLHTGERPFACEVCGKAFAISMRLAEHRRIHTGERPYSCPDCGKSYRSFSNLWKHRKTHQQQHQAAVRQQLAEAEAAVGLAVMETAVEALPLVEAIEIYPLAEAEGVQISG

SEQ ID NO: 897488 - protein, 853 aa, Homo sapiens
MTEESEETVLYIEHRYVCSECNQLYGSLEEVLMHQNSHVPQQHFELVGVADPGVTVATDTASGTGLYQTLVQESQYQCLECGQLLMSPSQLLEHQELHLKMMAPQEAVPAEPSPKAPPLSSSTIHYECVDCKALFASQELWLNHRQTHLRATPTKAPAPVVLGSPVVLGPPVGQARVAVEHSYRKAEEGGEGATVPSAAATTTEVVTEVELLLYKCSECSQLFQLPADFLEHQATHFPAPVPESQEPALQQEVQASSPAEVPVSQPDPLPASDHSYELRNGEAIGRDRRGRRARRNNSGEAGGAATQELFCSACDQLFLSPHQLQQHLRSHREGVFKCPLCSRVFPSPSSLDQHLGDHSSESHFLCVDCGLAFGTEALLLAHRRAHTPNPLHSCPCGKTFVNLTKFLYHRRTHGVGGVPLPTTPVPPEEPVIGFPEPAPAETGEPEAPEPPVSEETSAGPAAPGTYRCLLCSREFGKALQLTRHQRFVHRLERRHKCSICGKMFKKKSHVRNHLRTHTGERPFPCPDCSKPFNSPANLARHRLTHTGERPYRCGDCGKAFTQSSTLRQHRLVHAQHFPYRCQECGVRFHRPYRLLMHRYHHTGEYPYKCRECPRSFLLRRLLEVHQLVVHAGRQPHRCPSCGAAFPSSLRLREHRCAAAAAQAPRRFECGTCGKKVGSAARLQAHEAAHAAAGPGEVLAKEPPAPRAPRATRAPVASPAALGSTATASPAAPARRRGLECSECKKLFSTETSLQVHRRIHTGERPYPCPDCGKAFRQSTHLKDHRRLHTGERPFACEVCGKAFAISMRLAEHRRIHTGERPYSCPDWESPSLTLSPRHTHISLATLKRALAAM

SEQ ID NO: 897489 - protein, 603 aa, Homo sapiens [sequence omitted]

SEQ ID NO: 897490 - protein, 896 aa, Homo sapiens
MTEESEETVLYIEHRYVCSECNQLYGSLEEVLMHQNSHVPQQHFELVGVADPGVTVATDTASGTGLYQTLVQESQYQCLECGQLLMSPSQLLEHQELHLKMMAPQEAVPAEPSPKAPPLSSSTIHYECVDCKALFASQELWLNHRQTHLRATPTKAPAPVVLGSPVVLGPPVGQARVAVEHSYRKAEEGGEGATVPSAAATTTEVVTEVELLLYKCSECSQLFQLPADFLEHQATHFPAPVPESQEPALQQEVQASSPAEVPVSQPDPLPASDHSYELRNGEAIGRDRRGRRARRNNSGEAGGAATQELFCSACDQLFLSPHQLQQHLRSHREGVFKCPLCSRVFPSPSSLDQHLGDHSSESHFLCVDCGLAFGTEALLLAHRRAHTPNPLHSCPCGKTFVNLTKFLYHRRTHGVGGVPLPTTPVPPEEPVIGFPEPAPAETGEPEAPEPPVSEETSAGPAAPGTYRCLLCSREFGKALQLTRHQRFVHRLERRHKCSICGKMFKKKSHVRNHLRTHTGERPFPCPDCSKPFNSPANLARHRLTHTGERPYRCGDCGKAFTQSSTLRQHRLVHAQHFPYRCQECGVRFHRPYRLLMHRYHHTGEYPYKCRECPRSFLLRRLLEVHQLVVHAGRQPHRCPSCGAAFPSSLRLREHRCAAAAAQAPRRFECGTCGKKVGSAARLQAHEAAHAAAGPGEVLAKEPPAPRAPRATRAPVASPAALGSTATASPAAPARRRGLECSECKKLFSTETSLQVHRRIHTGERPYPCPDCGKAFRQSTHLKDHRRLHTGERPFACEVCGKAFAISMRLAEHRRIHTGERPYSCPDCGKSYRSFSNLWKHRKTHQQQHQAAVRQQLAEAEAAVGLAVMETAVEALPLVEAIEIYPLAEAEGVQISG

SEQ ID NO: 897491 - protein, 986 aa, Homo sapiens
MPRATWANSKERSWAESERGPRDTGNGGSKAERHIQEIETGRGGDRAKAHRRQRMRLRGTERASLGPGRRLGDSRGTDMPGARAQGLAAAMTEESEETVLYIEHRYVCSECNQLYGSLEEVLMHQNSHVPQQHFELVGVADPGVTVATDTASGTGLYQTLVQESQYQCLECGQLLMSPSQLLEHQELHLKMMAPQEAVPAEPSPKAPPLSSSTIHYECVDCKALFASQELWLNHRQTHLRATPTKAPAPVVLGSPVVLGPPVGQARVAVEHSYRKAEEGGEGATVPSAAATTTEVVTEVELLLYKCSECSQLFQLPADFLEHQATHFPAPVPESQEPALQQEVQASSPAEVPVSQPDPLPASDHSYELRNGEAIGRDRRGRRARRNNSGEAGGAATQELFCSACDQLFLSPHQLQQHLRSHREGVFKCPLCSRVFPSPSSLDQHLGDHSSESHFLCVDCGLAFGTEALLLAHRRAHTPNPLHSCPCGKTFVNLTKFLYHRRTHGVGGVPLPTTPVPPEEPVIGFPEPAPAETGEPEAPEPPVSEETSAGPAAPGTYRCLLCSREFGKALQLTRHQRFVHRLERRHKCSICGKMFKKKSHVRNHLRTHTGERPFPCPDCSKPFNSPANLARHRLTHTGERPYRCGDCGKAFTQSSTLRQHRLVHAQHFPYRCQECGVRFHRPYRLLMHRYHHTGEYPYKCRECPRSFLLRRLLEVHQLVVHAGRQPHRCPSCGAAFPSSLRLREHRCAAAAAQAPRRFECGTCGKKVGSAARLQAHEAAHAAAGPGEVLAKEPPAPRAPRATRAPVASPAALGSTATASPAAPARRRGLECSECKKLFSTETSLQVHRRIHTGERPYPCPDCGKAFRQSTHLKDHRRLHTGERPFACEVCGKAFAISMRLAEHRRIHTGERPYSCPDCGKSYRSFSNLWKHRKTHQQQHQAAVRQQLAEAEAAVGLAVMETAVEALPLVEAIEIYPLAEAEGVQISG

SEQ ID NO: 897492 - protein, 712 aa, Homo sapiens
MTEESEETVLYIEHRYVCSECNQLYGSLEEVLMHQNSHVPQQHFELVGVADPGVTVATDTASGTGLYQTLVQESQYQCLECGQLLMSPSQLLEHQELHLKMMAPQEAVPAEPSPKAPPLSSSTIHYECVDCKALFASQELWLNHRQTHLRATPTKAPAPVVLGSPVVLGPPVGQARVAVEHSYRKAEEGGEGATVPSAAATTTEVVTEVELLLYKCSECSQLFQLPADFLEHQATHFPAPVPESQEPALQQEVQASSPAEVPVSQPDPLPASDHSYELRNGEAIGRDRRGRRARRNNSGEAGGAATQELFCSACDQLFLSPHQLQQHLRSHREGVFKCPLCSRVFPSPSSLDQHLGDHSSESHFLCVDCGLAFGTEALLLAHRRAHTPNPLHSCPCGKTFVNLTKFLYHRRTHGVGGVPLPTTPVPPEEPVIGFPEPAPAETGEPEAPEPPVSEETSAGPAAPGTYRCLLCSREFGKALQLTRHQRFVHRLERRHKCSICGKMFKKKSHVRNHLRTHTGERPFPCPDCSKPFNSPANLARHRLTHTGERPYRCGDCGKAFTQSSTLRQHRLVHAQHFPYRCQECGVRFHRPYRLLMHRYHHTGEYPYKCRECPRSFLLRRLLEVHQLVVHAGQPTCHPGVATLLMGSEPVERAQPRVEGAGQNGHCDEPKGLEWRESWISRPTRMAQLALKEDPPPGKEESHKAQSKGQPPG

SEQ ID NO: 897493 - protein, 304 aa, Homo sapiens
MVRGWVAHHTGEYPYKCRECPRSFLLRRLLEVHQLVVHAGRQPHRCPSCGAAFPSSLRLREHRCAAAAAQAPRRFECGTCGKKVGSAARLQAHEAAHAAAGPGEVLAKEPPAPRAPRATRAPVASPAALGSTATASPAAPARRRGLECSECKKLFSTETSLQVHRRIHTGERPYPCPDCGKAFRQSTHLKDHRRLHTGERPFACEVCGKAFAISMRLAEHRRIHTGERPYSCPDCGKSYRSFSNLWKHRKTHQQQHQAAVRQQLAEAEAAVGLAVMETAVEALPLVEAIEIYPLAEAEGVQISG

SEQ ID NO: 897494 - protein, 444 aa, Homo sapiens
VLIYLSPALDAQESMGSVNLSLIFIIALGSIAGILFVTMIFVAIKCKRDNKEIRTYNCRIAEYSYGHQKKSSKKKKISKNDIRLVPRDVEETDKMNVVSCSSLTSSLNYFDYHQQTLPLGCRRSESTFLNVENQNTRNTSANHIYHHSFNSQGPQQPDLIINGVPLPETENYSFDSNYVNSRAHLIKSSSTFKDLEGNSLKDSGHEESDQTDSEHDVQRSLYCDTAVNDVLNTSVTSMGSQMPDHDQNEGFHCREECRILGHSDRCWMPRNPMPIRSKSPEHVRNIIALSIEATAADVEAYDDCGPTKRTFATFGKDVSDHPAEERPTLKGKRTVDVTICSPKVNSVIREAGNGCEAISPVTSPLHLKSSLPTKPSVSYTIALAPPARDLEQYVNNVNNGPTRPSEAEPRGADSEKVMHEVSPILKEGRNKESPGVKRLKDIVL

SEQ ID NO: 897495 - protein, 491 aa, Homo sapiens
VLIYLSPALDAQESMGSVNLSLIFIIALGSIAGILFVTMIFVAIKCKRDNKEIRTYNCSNCLTITCLLGCFIKGQNSKCLHCISVSPISEEQDKKTEEKVSLRGKRIAEYSYGASKEIKQEEKISKNDIRLVPRDVEETDKMNVVSCSSLTSSLNYFDYHQQTLPLGCRRSESTFLNVENQNTRNTSANHIYHHSFNSQGPQQPDLIINGVPLPETENYSFDSNYVNSRAHLIKSSSTFKDLEGNSLKDSGHEESDQTDSEHDVQRSLYCDTAVNDVLNTSVTSMGSQMPDHDQNEGFHCREECRILGHSDRCWMPRNPMPIRSKSPEHVRNIIALSIEATAADVEAYDDCGPTKRTFATFGKDVSDHPAEERPTLKGKRTVDVTICSPKVNSVIREAGNGCEAISPVTSPLHLKSSLPTKPSVSYTIALAPPARDLEQYVNNVNNGPTRPSEAEPRGADSEKVMHEVSPILKEGRNKESPGVKRLKDIVL

SEQ ID NO: 897496 - protein, 491 aa, Homo sapiens; identical to SEQ ID NO: 897495

SEQ ID NO: 897497 - protein, 164 aa, Homo sapiens
MASPHQEPKPGDLIEIFRLGYEHWALYIGDGYVIHLAPPSEYPGAGSSSVFSVLSNSAEVKRERLEDVVGGCCYRVNNSLDHEYQPRPVEVIISSAKEMVGQKMKYSIVSRNCEHFVTQLRYGKSRCKQVEKAKVEVGVATALGILVVAGCSFAIRRYQKKATA

SEQ ID NO: 897498 - protein, 156 aa, Homo sapiens
MASPHQEPKPGDLIEIFRLGYEHWALYIGDGYVIHLAPPSEYPGAGSSSVFSVLSNSAEVKRERLEDVVGGCCYRVNNSLDHEYQPRPVEVIISSAKEMVGQKMKYSIVSRNCEHFVTQLRYGKSRCKQVRTSLDNPSPSAWGWTHGAVQPGDHCE

SEQ ID NO: 897499 - protein, 164 aa, Homo sapiens; identical to SEQ ID NO: 897497

SEQ ID NO: 897500 - protein, 164 aa, Homo sapiens; identical to SEQ ID NO: 897497

SEQ ID NO: 897501 - protein, 215 aa, Homo sapiens
GCKWVSLTAVPTSDKPTICKTRIQVPSSPYNFATSMSLPHSREAHPLCLLLWDGNSLILFVIGKPLRGVLGVQLGVLPGKPQQHPSLQVHPKLGAQASSSVFSVLSNSAEVKRERLEDVVGGCCYRVNNSLDHEYQPRPVEVIISSAKEMVGQKMKYSIVSRNCEHFVTQLRYGKSRCKQVEKAKVEVGVATALGILVVAGCSFAIRRYQKKATA

SEQ ID NO: 897502 - protein, 160 aa, Homo sapiens
MKNTDKNKTKHRHTHRKNTKTAQDKKNQKQHEHGTERTHPRRKTKDRTTQPGSGARHTSSGGEGGRGPAGAEPTGVNSSRGAAHETGEGRGAAEEGGGTETRHGTREAKSKRAGGGKPRARGDRTATRRRSDARQRTAHPPPKETEHERRRRETAQTTKG

SEQ ID NO: 897503 - protein, 100 aa, Homo sapiens
MSTGPTAATGSNRRLQQTQNQVDEVVDIMRVNVDKVLERDQKLSELDDRADALQAGASQFETSAAKLKRKYWWKNCEMWAIGITVLVIFIIIIIVWVVSS

SEQ ID NO: 897504 - protein, 160 aa, Homo sapiens; identical to SEQ ID NO: 897502

SEQ ID NO: 897505 - protein, 160 aa, Homo sapiens; identical to SEQ ID NO: 897502

SEQ ID NO: 897506 - protein, 340 aa, Homo sapiens
MQRKKKREEDDQQKTTKQTYTRTTTTSDQTDNRRGRYQEKDQEKNDQKNEENRQAQKTTRTVEDKHTTDTNKRREKGSRGGSTATENRTKERAKQRKGAARQRQHTRQRTTAPGDRRGERAREREGRTKTRNQREQRRDSRQDERQKKAQSIEQTKMQSSKRVRGRSGLSARARSHARRGHGTEPKQERGQRGPRRGDRSGDGTNTTEQARGRRGESSRVRQRRQRDRRRSRQKHRDRGNGGEQEQRENGSGKKRDETGQTSTKKDRNMHTRRGERHGKATKATKQGKDGGRNSEPPTRKERAERRDDETARDTHTRGASGSQQADEENETQRRAEHAST

SEQ ID NO: 897507 - protein, 160 aa, Homo sapiens; identical to SEQ ID NO: 897502

SEQ ID NO: 897508 - protein, 100 aa, Homo sapiens; identical to SEQ ID NO: 897503

SEQ ID NO: 897509 - protein, 100 aa, Homo sapiens; identical to SEQ ID NO: 897503

SEQ ID NO: 897510 - protein, 215 aa, Homo sapiens
MPAFNRLFPLASLVLIYWVSVCFPVCVEVPSETEAVQGNPMKLRCISCMKREEVEATTVVEWFYRPEGGKDFLIYEYRNGHQEVESPFQGRLQWNGSKDLQDVSITVLNVTLNDSGLYTCNVSREFEFEAHRPFVKTTRLIPLRVTEEAGEDFTSVVSEIMMYILLVFLTLWLLIEMIYCYRKVSKAEEAAQENASDYLAIPSENKENSAVPVEE

SEQ ID NO: 897511 - protein, 215 aa, Homo sapiens; identical to SEQ ID NO: 897510

SEQ ID NO: 897512 - protein, 215 aa, Homo sapiens; identical to SEQ ID NO: 897510

SEQ ID NO: 897513 - protein, 116 aa, Homo sapiens
IILGLGICKLNWRFFFIKIYIVPALSLLPILNPLPVCPSLTTMIVYILISCEATAKGGRNGHFLVVVNALLDSFIQSIVEKFSHNPVLASEPEMPSLGPGPKIKQTRGTCSVYTGK

SEQ ID NO: 897514 - protein, 128 aa, Homo sapiens
MMTAVSLTTRPQESVAFEDVAVYFTTKEWAIMVPAERALYRDVMLENYEAVAFVVPPTSKPALVSHLEQGKESCFTQPQGVLSRNDWRAGWIGYLELRRYTYLAKAVLRRIVSKIFRNRQCWEDRRKA

SEQ ID NO: 897515 - protein, 97 aa, Homo sapiens
PFSPRAAEASTANAVSRAPPPADASRAGKGCGLSPKAPVSPMFNLYMHQNDSEALVRAALVANGDLACHSGSRACPVRRDDCGLHPFRSQGGCRPGP

SEQ ID NO: 897516 - protein, 170 aa, Homo sapiens
TDTVCVCVCVCVCVCVCVLPPSCANWIWAIIDNDYSPQNHHDTINPAPDVQQISPLLDIKVPQWLTDNRLLKYQVLLEIPQVTVEWCSTLIPASLLPLPGEDDSTHSCCEILNQIYARWEDLKDQPLDNLVKIWFSDGSSFVQNETIYAGYTEAKALSLGTSGQLAKLIF

SEQ ID NO: 897517 - protein, 74 aa, Homo sapiens
LMDLSLHSSLSPKAPVSPMFNLYMHQNDSEALVRAALVANGDLACHSGSRACPVRRDDCGLHPFRSQGGCRPGP

SEQ ID NO: 897518 - protein, 384 aa, Homo sapiens
MAATASPQPLATEDADSENSSFYYYDYLDEVAFMLCRKDAVVSFGKVFLPVFYSLIFVLGLSGNLLLLMVLLRYVPRRRMVEIYLLNLAISNLLFLVTLPFWGISVAWHWVFGSFLCKMVSTLYTINFYSGIFFISCMSLDKYLEIVHAQPYHRLRTRAKSLLLATIVWAVSLAVSIPDMVFVQTHENPKGVWNCHADFGGHGTIWKLFLRFQQNLLGFLLPLLAMIFFYSRIGCVLVRLRPAGQGRALKIAAALVVAFFVLWFPYNLTLFLHTLLDLQVFGNCEVSQHLDYALQVTESIAFLHCCFSPILYAFSSHRFRQYLKAFLAAVLGWHLAPGTAQASLSSCSESSILTAQEEMTGMNDLGERQSENYPNKEDVGNKSA

SEQ ID NO: 897519 - protein, 424 aa, Homo sapiens
FPEEEAPGAAALLPGLWWTFSSKSFWLRTTGRRDWAFPSNMAATASPQPLATEDADSENSSFYYYDYLDEVAFMLCRKDAVVSFGKVFLPVFYSLIFVLGLSGNLLLLMVLLRYVPRRRMVEIYLLNLAISNLLFLVTLPFWGISVAWHWVFGSFLCKMVSTLYTINFYSGIFFISCMSLDKYLEIVHAQPYHRLRTRAKSLLLATIVWAVSLAVSIPDMVFVQTHENPKGVWNCHADFGGHGTIWKLFLRFQQNLLGFLLPLLAMIFFYSRIGCVLVRLRPAGQGRALKIAAALVVAFFVLWFPYNLTLFLHTLLDLQVFGNCEVSQHLDYALQVTESIAFLHCCFSPILYAFSSHRFRQYLKAFLAAVLGWHLAPGTAQASLSSCSESSILTAQEEMTGMNDLGERQSENYPNKEDVGNKSA

SEQ ID NO: 897520 - protein, 97 aa, Homo sapiens; identical to SEQ ID NO: 897515

SEQ ID NO: 897521 - protein, 451 aa, Homo sapiens [sequence omitted]

SEQ ID NO: 897522 - protein, 128 aa, Homo sapiens; identical to SEQ ID NO: 897514

SEQ ID NO: 897523 - protein, 97 aa, Homo sapiens; identical to SEQ ID NO: 897515

SEQ ID NO: 897524 - protein, 97 aa, Homo sapiens; identical to SEQ ID NO: 897515

SEQ ID NO: 897525 - protein, 124 aa, Homo sapiens
MAATASPQPLATEDADSENSSFYYYDYLDEVAFMLCRKDAVVSFGKVFLPVFYSLIFVLGLSGNLLLLMVLLRYVPRRRMVEIYLLNLAISNLLFLVTLPFWGISVAWHWVFGSFLCKMAVENY

SEQ ID NO: 897526 - protein, 79 aa, Homo sapiens
LTVSWLFPVEKSWAPSLFPGTRYDIEFHDYACTLGYNPPGGRTSIVSFFVLPTEPVGDLHTGALQSVLIELLKAASLQS

SEQ ID NO: 897527 - protein, 128 aa, Homo sapiens; identical to SEQ ID NO: 897514

SEQ ID NO: 897528 - protein, 232 aa, Homo sapiens
GAWRVWSTGSRAWGGQGVESGSYSGGCRAQGSRVRPAQVQSAPPRPQQPLVRSGAPSLSQRATWAMAAVALASGTRLGLVLELLPGQPALPRARRESVTFEDVAVYFSENEWIGLGPAQRALYRDVMLENYGAVASLAAFPFPKPALISQLERGETPWCSVPRGALDGEAPRGISSGEILKLPGATIWSLRIKPIPKKTVTKQRETRSLVTSFEPLDQALPEAELPQNFSAM

SEQ ID NO: 897529 - protein, 251 aa, Homo sapiens
  misc_feature (208)..(208): Xaa can be any naturally occurring amino acid
  misc_feature (246)..(246): Xaa can be any naturally occurring amino acid
FPEEEAPGAAALLPGLWWTFSSKSFWLRTTGRRDWAFPSNMAATASPQPLATEDADSENSSFYYYDYLDEVAFMLCRKDAVVSFGKVFLPVFYSLIFVLGLSGNLLLLMVLLRYVPRRRMVEIYLLNLAISNLLFLVTLPFWGISVAWHWVFGSFLCKMVSTLYTINFYSGIFFISCMSLDKYLEIVHAQPYHRLRTRAKSLLLATNXLMGLVVPLGPGSSNPPGIMGFFLVYKNHHLKKFPKRGXFVWKT

SEQ ID NO: 897530 - protein, 384 aa, Homo sapiens; identical to SEQ ID NO: 897518

SEQ ID NO: 897531 - protein, 384 aa, Homo sapiens; identical to SEQ ID NO: 897518

SEQ ID NO: 897532 - protein, 407 aa, Homo sapiens [sequence omitted]

SEQ ID NO: 897533 - protein, 128 aa, Homo sapiens; identical to SEQ ID NO: 897514

SEQ ID NO: 897534 - protein, 192 aa, Homo sapiens
GAWRVWSTGSRAWGGQGVESGSYSGGCRAQGSRVRPAQVQSAPPRPQQPLVRSGAPSLSQRATWAMAAVALASGTRLGLVLELLPGQPALPRARRESVTFEDVAVYFSENEWIGLGPAQRALYRDVMLENYGAVASLAAFPFPKPALISQLERGETPWCSVPRGALDGEAPRGISSAPETFTFTQKGIKEVR

SEQ ID NO: 897535 - protein, 97 aa, Homo sapiens; identical to SEQ ID NO: 897515

SEQ ID NO: 897536 - protein, 97 aa, Homo sapiens; identical to SEQ ID NO: 897515

SEQ ID NO: 897537 - protein, 191 aa, Homo sapiens
MIFVNNLYSALKKGGWGMAAAMVPGRSESWERGEPGRPALYFCGSIRGGREDRTLYERIVSRLRRFGTVLTEHVAAAELGARGEEAAGGDRLIHEQDLEWLQQADVVVAEVTQPSLGVGYELGRAVAFNKRILCLFRPQSGRVLSAMIRGAADGSRFQVWDYEEGEVEALLDRYFEADPPGQVAASPDPTT

SEQ ID NO: 897538 - protein, 170 aa, Homo sapiens [sequence omitted]

SEQ ID NO: 897539 - protein, 165 aa, Homo sapiens
MIFVNNLYSALKKGGWGMAAAMVPGRSESWERGEPGRPALYFCGSIRGGREDRTLYERIVSRLRRFGTVLTEHVAAAELGARGEEAAGGDRLIHEQDLEWLQQADVVVAEVTQPSLGVGYELGRAVAFNKRILCLFRPQSGRGEHPKPPSWLSMDPALSSFPGGL

SEQ ID NO: 897540 - protein, 197 aa, Homo sapiens
MIFVNNLYSALKKGGWGMAAAMVPGRSESWERGEPGRPALYFCGSIRGGREDRTLYERIVSRLRRFGTVLTEHVAAAELGARGEEAAGGDRLIHEQDLEWLQQADVVVAEVTQPSLGVGYELGRAVAFNKRILCLFRPQSGRVLSAMIRGAADGSRFQVWDYEEAATCPGGSASKYRSSRASTSPSSEVDAAANLVV

SEQ ID NO: 897541 - protein, 121 aa, Homo sapiens [sequence omitted]

SEQ ID NO: 897542 - protein, 191 aa, Homo sapiens; identical to SEQ ID NO: 897537

SEQ ID NO: 897543 - protein, 1125 aa, Homo sapiens
MFCVESLRERMFLEHELNLAPSRESGDLAVSCGQWPIPGSCPDWTLSSRRMPAPGAAVEVGNASLWSPRSLRRRQGDQPSPRTCSAPPTPSASPPAQLCRIPASRHSTSSGPCTTWCPPVTVTEDYLRSFRPYHTTDDLRMSSLPPLGLDPATAAAYYHPSYLAPHPFPHPAFRMDDSYCLSALRSPFYPIPTPGSLPPLHPSAMHLHLSGVRYPPELSHSSLAALHSERMSGLSAERLQMDEELRREREREREREREREADREREKEREREREKEREQEKEREREKERERELERQREQRAREKELLAAKALEPSFLPVAELHGLRGHATEERGKPSEQLTPTRAEKLKDAGLQAPKPVQHPLHPVPTPHHTVPSLISNHGIFSLPSSSAATALLIQRTNEEEKWLARQRRLRQEKEDRQSQVSEFRQQVLEQHLDMGRPPVPAEAEHRPESTTRPGPNRHEPGGRDPPQHFGGPPPLISPKPQLHAAPTALWNPVSLMDNTLETRRAESHSLHSHPAAFEPSRQAAVPLVKVERVFCPEKAEEGPRKREPAPLDKYQPPPPPPREGGSLEHQPFLPGPGPFLAELEKSTQTILGQQRASLPQAATFGELSGPLKPGSPYRPPVPRAPDPAYIYDEFLQQRRRLVSKLDLEERRRREAQEKGYYYDLDDSYDESDEEEVRAHLRCVAEQPPLKLDTSSEKLEFLQLFGLTTQQQKEELVAQKRRKRRRMLRERSPSPPTIQSKRQTPSPRLALSTRYSPDEMNNSPNFEEKKKFLTIFNLTHISAEKRKDKERLVEMLRAMKQKALSAAVADSLTNSPRDSPAVSLSEPATQQASLDVEKPVGVAASLSDIPKAAEPGKLEQVRPQELSRVQELAPASGEKARLSEAPGGKKSLSMLHYIRGAAPKDIPVPLSHSTNGKSKPWEPFVAEEFAHQFHESVLQSTQKALQKHKGSVAVLSAEQNHKVDTSVHYNIPELQSSSRAPPPQHNGQQEPPTARKGPPTQELDRDSEEEEEEDDEDGEDEEEVPKRKWQGIEAVFEAYQEHIEEQNLERQVLQTQCRRLEARHYSLSLTAEQLSHSVAELRSQKQKMVSERERLQAELDHLRKCLALPAMHWPRGYLKGYPR

SEQ ID NO: 897544 - protein, 1182 aa, Homo sapiens
PRVRNYSVRPRPQGGAPPVSWRVVRGSSTPAPCQDRPASAGSSLSSESSPVSSPATNHSSPASTPKRVPMGPIIVPPGGHSVPSTPPVVTIAPTKTVNGVWRSESRQDAGSRSSSGGRERLIVEPPLPQEKAGGPAIPSHLLSTPYPFGLSPSSVVQDSRFPPLNLQRPVHHVVPPSTVTEDYLRSFRPYHTTDDLRMSSLPPLGLDPATAAAYYHPSYLAPHPFPHPAFRMDDSYCLSALRSPFYPIPTPGSLPPLHPSAMHLHLSGVRYPPELSHSSLAALHSERMSGLSAERLQMDEELRREREREREREREREADREREKEREREREKEREQEKEREREKERERELERQREQRAREKELLAAKALEPSFLPVAELHGLRGHATEERGKPSEQLTPTRAEKLKDAGLQAPKPVQHPLHPVPTPHHTVPSLISNHGIFSLPSSSAATALLIQRTNEEEKWLARQRRLRQEKEDRQSQVSEFRQQVLEQHLDMGRPPVPAEAEHRPESTTRPGPNRHEPGGRDPPQHFGGPPPLISPKPQLHAAPTALWNPVSLMDNTLETRRAESHSLHSHPAAFEPSRQAAVPLVKVERVFCPEKAEEGPRKREPAPLDKYQPPPPPPREGGSLEHQPFLPGPGPFLAELEKSTQTILGQQRASLPQAATFGELSGPLKPGSPYRPPVPRAPDPAYIYDEFLQQRRRLVSKLDLEERRRREAQEKGYYYDLDDSYDESDEEEVRAHLRCVAEQPPLKLDTSSEKLEFLQLFGLTTQQQKEELVAQKRRKRRRMLRERSPSPPTIQSKRQTPSPRLALSTRYSPDEMNNSPNFEEKKKFLTIFNLTHISAEKRKDKERLVEMLRAMKQKALSAAVADSLTNSPRDSPAVSLSEPATQQASLDVEKPVGVAASLSDIPKAAEPGKLEQVRPQELSRVQELAPASGEKARLSEAPGGKKSLSMLHYIRGAAPKDIPVPLSHSTNGKSKPWEPFVAEEFAHQFHESVLQSTQKALQKHKGSVAVLSAEQNHKVDTSVHYNIPELQSSSRAPPPQHNGQQEPPTARKGPPTQELDRDSEEEEEEDDEDGEDEEEVPKRKWQGIEAVFEAYQEHIEEQNLERQVLQTQCRRLEARHYSLSLTAEQLSHSVAELRSQKQKMVSERERLQAELDHLRKCLALPAMHWPRGYLKGYPR

SEQ ID NO: 897545 - protein, 325 aa, Homo sapiens
MKQKALSAAVADSLTNSPRDSPAVSLSEPATQQASLDVEKPVGVAASLSDIPKAAEPGKLEQVRPQELSRVQELAPASGEKARLSEAPGGKKSLSMLHYIRGAAPKDIPVPLSHSTNGKSKPWEPFVAEEFAHQFHESVLQSTQKALQKHKGSVAVLSAEQNHKVDTSVHYNIPELQSSSRAPPPQHNGQQEPPTARKGPPTQELDRDSEEEEEEDDEDGEDEEEVPKRKWQGIEAVFEAYQEHIEEQNLERQVLQTQCRRLEARHYSLSLTAEQLSHSVAELRSQKQKMVSERERLQAELDHLRKCLALPAMHWPRGYLKGYPR

SEQ ID NO: 897546 - protein, 1125 aa, Homo sapiens; identical to SEQ ID NO: 897543

SEQ ID NO: 897547 - protein, 1125 aa, Homo sapiens; identical to SEQ ID NO: 897543

SEQ ID NO: 897548 - protein, 1125 aa, Homo sapiens; identical to SEQ ID NO: 897543

SEQ ID NO: 897549 - protein, 1125 aa, Homo sapiens; identical to SEQ ID NO: 897543

SEQ ID NO: 897550 - protein, 1095 aa, Homo sapiens
MFCVESLRERMFLEHELNLAPSRESGDLAVSCGQWPIPGSCPDWTLSSRRMPAPGAAVEVGNASLWSPRSLRRRQGDQPSPRTCSAPPTPSASPPAQLCRIPASRHSTSSGPCTTWCPPVTVTEDYLRSFRPYHTTDDLRMSSLPPLGLDPATAAAYYHPSYLAPHPFPHPAFRMDDSYCLSALRSPFYPIPTPGSLPPLHPSAMHLHLSGVRYPPELSHSSLAALHSERMSGLSAERLQMDEELRREREREREREREREADREREKEREREREKEREQEKEREREKERERELERQREQRAREKELLAAKALEPSFLPVAELHGLRGHATEERGKPSEQLTPTRAEKLKDAGLQAPKPVQHPLHPVPTPHHTVPSLISNHGIFSLPSSSAATALLIQRTNEEEKWLARQRRLRQEKEDRQSQVSEFRQQVLEQHLDMGRPPVPAEAEHRPESTTRPGPNRHEPGGRDPPQHFGGPPPLISPKPQLHAAPTALWNPVSLMDNTLETRRAESHSLHSHPAAFEPSRQAAVPLVKVERVFCPEKAEEGPRKREPAPLDKYQPPPPPPREGGSLEHQPFLPGPGPFLAELEKSTQTILGQQRASLPQAATFGELSGPLKPGSPYRPPVPRAPDPAYIYDEFLQQRRRLVSKLDLEERRRREAQEKGYYYDLDDSYDESDEEEVRAHLRCVAEQPPLKLDTSSEKLEFLQLFGLTTQQQKEELVAQKRRKRRRMLRERSPSPPTIQSKRQTPSPRLALSTRYSPDEMNNSPNFEEKKKFLTIFNLTHISAEKRKDKERLVEMLRAMKQKALSAAVADSLTNSPRDSPAVSLSEPATQQASLDVEKPVGVAASLSDIPKAAEPGKLEQVRPQELSRVQELAPASGEKARLSEAPGGKKSLSMLHYIRGAAPKDIPVPLSHSTNGKSKPWEPFVAEEFAHQFHESVLQSTQKALQKHKGSVAVLSAEQNHKVDTSVHYNIPELQSSSRAPPPQHNGQQEPPTARKGPPTQELDRDSEEEEEEDDEDGEDEEEVPKRKWQGIEAVFEAYQEHIEEQNLERQVLQTQCRRLEARHYSLSLTAEQLSHSVAVSWEGMETFKHATF

SEQ ID NO: 897551 - protein, 115 aa, Homo sapiens
IPKAAEPGKLEQVRPQELSRVQELAPASGEKARLSEAPGGKKSLSMLHYIRGAAPKDIPVPLSHSTNGKSKPWEPFVAEEFAHQFHESVLQSTQKALQKHKGNEAASPCSALGCG

SEQ ID NO: 897552 - protein, 1157 aa, Homo sapiens
QHVSAEVELRGPGMKGSSLSSESSPVSSPATNHSSPASTPKRVPMGPIIVPPGGHSVPSTPPVVTIAPTKTVNGVWRSESRQDAGSRSSSGGRERLIVEPPLPQEKAGGPAIPSHLLSTPYPFGLSPSSVVQDSRFPPLNLQRPVHHVVPPSTVTEDYLRSFRPYHTTDDLRMSSLPPLGLDPATAAAYYHPSYLAPHPFPHPAFRMDDSYCLSALRSPFYPIPTPGSLPPLHPSAMHLHLSGVRYPPELSHSSLAALHSERMSGLSAERLQMDEELRREREREREREREREADREREKEREREREKEREQEKEREREKERERELERQREQRAREKELLAAKALEPSFLPVAELHGLRGHATEERGKPSEQLTPTRAEKLKDAGLQAPKPVQHPLHPVPTPHHTVPSLISNHGIFSLPSSSAATALLIQRTNEEEKWLARQRRLRQEKEDRQSQVSEFRQQVLEQHLDMGRPPVPAEAEHRPESTTRPGPNRHEPGGRDPPQHFGGPPPLISPKPQLHAAPTALWNPVSLMDNTLETRRAESHSLHSHPAAFEPSRQAAVPLVKVERVFCPEKAEEGPRKREPAPLDKYQPPPPPPREGGSLEHQPFLPGPGPFLAELEKSTQTILGQQRASLPQAATFGELSGPLKPGSPYRPPVPRAPDPAYIYDEFLQQRRRLVSKLDLEERRRREAQEKGYYYDLDDSYDESDEEEVRAHLRCVAEQPPLKLDTSSEKLEFLQLFGLTTQQQKEELVAQKRRKRRRMLRERSPSPPTIQSKRQTPSPRLALSTRYSPDEMNNSPNFEEKKKFLTIFNLTHISAEKRKDKERLVEMLRAMKQKALSAAVADSLTNSPRDSPAVSLSEPATQQASLDVEKPVGVAASLSDIPKAAEPGKLEQVRPQELSRVQELAPASGEKARLSEAPGGKKSLSMLHYIRGAAPKDIPVPLSHSTNGKSKPWEPFVAEEFAHQFHESVLQSTQKALQKHKGSVAVLSAEQNHKVDTSVHYNIPELQSSSRAPPPQHNGQQEPPTARKGPPTQELDRDSEEEEEEDDEDGEDEEEVPKRKWQGIEAVFEAYQEHIEEQNLERQVLQTQCRRLEARHYSLSLTAEQLSHSVAELRSQKQKMVSERERLQAELDHLRKCLALPAMHWPRGYLKGYPR

SEQ ID NO: 897553 - protein, 1154 aa, Homo sapiens
MFGLKPPLYFLPGSSLSSESSPVSSPATNHSSPASTPKRVPMGPIIVPPGGHSVPSTPPVVTIAPTKTVNGVWRSESRQDAGSRSSSGGRERLIVEPPLPQEKAGGPAIPSHLLSTPYPFGLSPSSVVQDSRFPPLNLQRPVHHVVPPSTVTEDYLRSFRPYHTTDDLRMSSLPPLGLDPATAAAYYHPSYLAPHPFPHPAFRMDDSYCLSALRSPFYPIPTPGSLPPLHPSAMHLHLSGVRYPPELSHSSLAALHSERMSGLSAERLQMDEELRREREREREREREREADREREKEREREREKEREQEKEREREKERERELERQREQRAREKELLAAKALEPSFLPVAELHGLRGHATEERGKPSEQLTPTRAEKLKDAGLQAPKPVQHPLHPVPTPHHTVPSLISNHGIFSLPSSSAATALLIQRTNEEEKWLARQRRLRQEKEDRQSQVSEFRQQVLEQHLDMGRPPVPAEAEHRPESTTRPGPNRHEPGGRDPPQHFGGPPPLISPKPQLHAAPTALWNPVSLMDNTLETRRAESHSLHSHPAAFEPSRQAAVPLVKVERVFCPEKAEEGPRKREPAPLDKYQPPPPPPREGGSLEHQPFLPGPGPFLAELEKSTQTILGQQRASLPQAATFGELSGPLKPGSPYRPPVPRAPDPAYIYDEFLQQRRRLVSKLDLEERRRREAQEKGYYYDLDDSYDESDEEEVRAHLRCVAEQPPLKLDTSSEKLEFLQLFGLTTQQQKEELVAQKRRKRRRMLRERSPSPPTIQSKRQTPSPRLALSTRYSPDEMNNSPNFEEKKKFLTIFNLTHISAEKRKDKERLVEMLRAMKQKALSAAVADSLTNSPRDSPAVSLSEPATQQASLDVEKPVGVAASLSDIPKAAEPGKLEQVRPQELSRVQELAPASGEKARLSEAPGGKKSLSMLHYIRGAAPKDIPVPLSHSTNGKSKPWEPFVAEEFAHQFHESVLQSTQKALQKHKGSVAVLSAEQNHKVDTSVHYNIPELQSSSRAPPPQHNGQQEPPTARKGPPTQELDRDSEEEEEEDDEDGEDEEEVPKRKWQGIEAVFEAYQEHIEEQNLERQVLQTQCRRLEARHYSLSLTAEQLSHSVAELRSQKQKMVSERERLQAELDHLRKCLALPAMHWPRGYLKGYPR

SEQ ID NO: 897554 - protein, 122 aa, Homo sapiens
MLLCLKPSLLLPQRWGQSHSSPGVKLASAEKVGCIVSKKGLFVSFYFPAKFSSKQQVLGAHKATQRLFPGKALSYLKIKPIHKLKVAFYYSVGSMYRALCIHSFTPTRLLLQWVGFSYRRKF

SEQ ID NO: 897555 - protein, 122 aa, Homo sapiens; identical to SEQ ID NO: 897554

SEQ ID NO: 897556 - protein, 1125 aa, Homo sapiens; identical to SEQ ID NO: 897543

SEQ ID NO: 897557 - protein, 1125 aa, Homo sapiens; identical to SEQ ID NO: 897543

SEQ ID NO: 897558 - protein, 708 aa, Homo sapiens
MFCVESLRERMFLEHELNLAPSRESGDLAVSCGQWPIPGSCPDWTLSSRRMPAPGAAVEVGNASLWSPRSLRRRQGDQPSPRTCSAPPTPSASPPAQLCRIPASRHSTSSGPCTTWCPPVTVTEDYLRSFRPYHTTDDLRMSSLPPLGLDPATAAAYYHPSYLAPHPFPHPAFRMDDSYCLSALRSPFYPIPTPGSLPPLHPSAMHLHLSGVRYPPELSHSSLAALHSERMSGLSAERLQMDEELRREREREREREREREADREREKEREREREKEREQEKEREREKERERELERQREQRAREKELLAAKALEPSFLPVAELHGLRGHATEERGKPSEQLTPTRAEKLKDAGLQAPKPVQHPLHPVPTPHHTVPSLISNHGIFSLPSSSAATALLIQRTNEEEKWLARQRRLRQEKEDRQSQVSEFRQQVLEQHLDMGRPPVPAEAEHRPESTTRPGPNRHEPGGRDPPQHFGGPPPLISPKPQLHAAPTALWNPVSLMDNTLETRRAESHSLHSHPAAFEPSRQAAVPLVKVERVFCPEKAEEGPRKREPAPLDKYQPPPPPPREGGSLEHQPFLPGPGPFLAELEKSTQTILGQQRASLPQAATFGELSGPLKPGSPYRPPVPRAPDPAYIYDEFLQQRRRLVSKLDLEERRRREAQEKGYYYDLDDSYDESDEEEVRAHLRCVAEQPPLKLDTSSEVLGSPPHGH

SEQ ID NO: 897559 - protein, 219 aa, Homo sapiens
MVKYFLGQSVLRSSWDQVFAAFWQRYPNPYSKHVLTEDIVHREVTPDQKLLSRRLLTKTNRMPRWAERLFPANVAHSVYVLEDSIVDPQNQTMTTFTWNINHARLMVVEERCVYCVNSDNSGWTEIRREAWVSSSLFGVSRAVQEFGLARFKSNVTKTMKGFEYILAKLQGEAPSKTLVETAKEAKEKAKETALAATEKAKDLASKAATKKQQQQQQFV

SEQ ID NO: 897560 - protein, 219 aa, Homo sapiens; identical to SEQ ID NO: 897559

SEQ ID NO: 897561 - protein, 82 aa, Homo sapiens
  misc_feature (7)..(7): Xaa can be any naturally occurring amino acid
TIKTATXNSLHKYPNPSTPRGKKKKALPASETPKAAESAEPPGKAKEAKEKAKETALAATEKAKDLASKAATKKQQQQQQFV

SEQ ID NO: 897562 - protein, 219 aa, Homo sapiens; identical to SEQ ID NO: 897559

SEQ ID NO: 897563 - protein, 208 aa, Homo sapiens
MVKYFLGQSVLRSSWDQVFAAFWQRYPNPYSKHVLTEDIVHREVTPDQKLLSRRLLTKTNRMPRWAERLFPANVAHSVYVLEDSIVDPQNQTMTTFTWNINHARLMVVEERCVYCVNSDNSGWTEIRREAWVSSSLFGVSRAVQEFGLARFKSNVTKTMKGFEYILAKLQGEAPSKTLVETAKEAKEKERLEYEKQAPPGPKRRVGSF

SEQ ID NO: 897564 - protein, 208 aa, Homo sapiens
MVKYFLGQSVLRSSWDQVFAAFWQRYPNPYSKHVLTEDIVHREVTPDQKLLSRRLLTKTNRMPRWAERLFPANVAHSVYVLEDSIVDPQNQTMTTFTWNINHARLMVVEERCVYCVNSDNSGWTEIRREAWVSSSLFGVSRAVQEFGLARFKSNVTKTMKGFEYILAKLQAKEAKEKAKETALAATEKAKDLASKAATKKQQQQQQFV

SEQ ID NO: 897565 - protein, 194 aa, Homo sapiens
MVKYFLGQSVLRSSWDQVFAAFWQRYPNPYSKHVLTEDIVHREVTPDQKLLSRRLLTKTNRMPRWAERLFPANVAHSVYVLEDSIVDPQNQTMTTFTWNINHARLMVVEERCVYCVNSDNSGWTEIRREAWVSSSLFGVSRAVQEFGLARFKSNVTKTGISGQAAGKALPTGGHAGAREGRNGRPPAGPKGPRA

SEQ ID NO: 897566 - protein, 145 aa, Homo sapiens
MVKYFLGQSVLRSSWDQVFAAFWQRYPNPYSKHVLTEDIVHREVTPDQKLLSRRLLTKTNRMPRWAERLFPANVAHSVYVLEDSIVDPQNQTMTTFTWNINHARLMVVEERCVYCVNSDNSGWTEIRREAWVSSSLFGVSRAVQL

SEQ ID NO: 897567 - protein, 112 aa, Homo sapiens [sequence omitted]

SEQ ID NO: 897568 - protein, 85 aa, Homo sapiens
  misc_feature (8)..(9): Xaa can be any naturally occurring amino acid
SSVGFSYXXAVHELGFAPTHPPCPMKGFEYILAKLQGEAPSKTLVETAKEAKEKAKETALAATEKAKDLASKAATKKQQQQQQFV

SEQ ID NO: 897569 - protein, 219 aa, Homo sapiens; identical to SEQ ID NO: 897559

SEQ ID NO: 897570 - protein, 249 aa, Homo sapiens
MVKYFLGQSVLRSSWDQVFAAFWQRYPNPYSKHVLTEDIVHREVTPDQKLLSRRLLTKTNRMPRWAERLFPANVAHSVYVLEDSIVDPQNQTMTTFTWNINHARLMVVEERCVYCVNSDNSGWTEIRREAWVSSSLFGVSRAVQEFGLARFKSNVTKTMKGFEYILAKLQGEAPSKTLVETAKEAKEKAKETALAATEKAKDLASKAATKKQQQQQQFVSTPPRPEVGSPCLLLSFLNKSAGGVLWWGA

SEQ ID NO: 897571 - protein, 219 aa, Homo sapiens; identical to SEQ ID NO: 897559

SEQ ID NO: 897572 - protein, 249 aa, Homo sapiens; identical to SEQ ID NO: 897570

SEQ ID NO: 897573 - protein, 299 aa, Homo sapiens
MVKYFLGQSVLRSSWDQVFAAFWQRYPNPYSKHVLTEDIVHREVTPDQKLLSRRLLTKTNRMPRWAERLFPANVAHSVYVLEDSIVDPQNQTMTTFTWNINHARLMVVEERCVYCVNSDNSGWTEIRREAWVSSSLFGVSRAVQEFGLARFKSNVTKTMKGFEYILAKLQRDNLGMVFPGIVLKGSHLPFRDRARPLPKHLLRQPRKPRRRQRRRHWQLQRRPRTSPARRPPRSSSSSNSLCSQSTTTTAPQTARLSPSALPSLYFIIKNQLPALSAVYVVGCGDAVWHLQYTKHMIHV

SEQ ID NO: 897574 - protein, 256 aa, Homo sapiens
MVKYFLGQSVLRSSWDQVFAAFWQRYPNPYSKHVLTEDIVHREVTPDQKLLSRRLLTKTNRMPRWAERLFPANVAHSVYVLEDSIVDPQNQTMTTFTWNINHARLMVVEERCVYCVNSDNSGWTEIRREAWVSSSLFGVSRAVQVSSVLGLLGLWDPVLSVSGLGWGQWATSVSFHSHLMPEFGLARFKSNVTKTMKGFEYILAKLQGEAPSKTLVETAKEAKEKAKETALAATEKAKDLASKAATKKQQQQQQFV

SEQ ID NO: 897575 - protein, 192 aa, Homo sapiens
MVKYFLGQSVLRSSWDQVFAAFWQRYPNPYSKHVLTEDIVHREVTPDQKLLSRRLLTKTNRMPRWAERLFPANVAHSVYVLEDSIVDPQNQTMTTFTWNINHARLMVVEERCVYCVNSDNSGWTEIRREAWVSSSLFGVSRAVQCSSVVVGCSGLCRPRCFSMFGAWAGGHVGQSHHCCFLFELGYLLLEVQ

SEQ ID NO: 897576 - protein, 107 aa, Homo sapiens
VYCVNSDNSGWTEIRREAWVSSSLFGVSRAVQEFGLARFKSNVTKTMKGFEYILAKLQGEAPSKTLVETAKEAKEKAKETALAATEKAKDLASKAATKKQQQQQQFV

SEQ ID NO: 897577 - protein, 1150 aa, Homo sapiens
MAAALGPPEVIAQLENAAKVLMAPPSMVNNEQRQHAEHIFLSFRKSKSPFAVCKHILETSKVDYVLFQAATAIMEAVVREWILLEKGSIESLRTFLLTYVLQRPNLQKYVREQILLAVAVIVKRGSLDKSIDCKSIFHEVSQLISSGNPTVQTLACSILTALLSEFSSSSKTSNIGLSMEFHGNCKRVFQEEDLRQIFMLTVEVLQEFSRRENLNAQMSSVFQRYLALANQVLSWNFLPPNLGRHYIAMFESSQNVLLKPTESWRETLLDSRVMELFFTVHRKIREDSDMAQDSLQCLAQLASLHGPIFPDEGSQVDYLAHFIEGLLNTINGIEIEDSEAVGISSIISNLITVFPRNVLTAIPSELFSSFVNCLTHLTCSFGRSAALEEVLDKDDMVYMEAYDKLLESWLTLVQDDKHFHKGFFTQHAVQVFNSYIQCHLAAPDGTRNLTANGVASREEEEISELQEDDRDQFSDQLASVGMLGRIAAEHCIPLLTSLLEERVTRLHGQLQRHQQQLLASPGSSTVDNKMLDDLYEDIHWLILVTGYLLADDTQGETPLIPPEIMEYSIKHSSEVDINTTLQILGSPGEKASSIPGYNRTDSVIRLLSAILRVSEVESRAIRADLTHLLSPQMGKDIVWFLKRWAKTYLLVDEKLYDQISLPFSTAFGADTEGSQWIIGYLLQKVISNLSVWSSEQDLANDTVQLLVTLVERRERANLVIQCENWWNLAKQFASRSPPLNFLSSPVQRTLMKALVLGGFAHMDTETKQQYWTEVLQPLQQRFLRVINQENFQQMCQQEEVKQEITATLEALCGIAEATQIDNVAILFNFLMDFLTNCIGLMEVYKNTPETVNLIIEVFVEVAHKQICYLGESKAMNLYEACLTLLQVYSKNNLGRQRIDVTAEEEQYQDLLLIMELLTNLLSKEFIDFSDTDEVFRGHEPGQAANRSVSAADVVLYGVNLILPLMSQDLLKFPTLCNQYYKLITFICEIFPEKIPQLPEDLFKSLMYSLELGMTSMSSEVCQLCLEALTPLAEQCAKAQETDSPLFLATRHFLKLVFDMLVLQKHNTEMTTAAGEAFYTLVCLHQAEYSELVETLLSSQQDPVIYQRLADAFNKLTASSTPPTLDRKQKMAFLKSLEEFMANVGGLLCVK

SEQ ID NO: 897578 - protein, 1150 aa, Homo sapiens; identical to SEQ ID NO: 897577

SEQ ID NO: 897579 - protein, 1150 aa, Homo sapiens; identical to SEQ ID NO: 897577

SEQ ID NO: 897580 - protein, 170 aa, Homo sapiens
MAAALGPPEVIAQLENAAKVLMAPPSMVNNEQRQHAEHIFLSFRKSKSPFAVCKHILETSKVDYVLFQAATAIMEAVVREWILLEKGSIESLRTFLLTYVLQRPNLQKYVREQILLAVAVIVKRGSLDKSIDCKSIFHEVSQLISSGNPTVVSVLFVFININNLYFLLHK

SEQ ID NO: 897581 - protein, 1150 aa, Homo sapiens; identical to SEQ ID NO: 897577

SEQ ID NO: 897582 - protein, 755 aa, Homo sapiens [sequence omitted]

SEQ ID NO: 897583 - protein, 247 aa, Homo sapiens
MAAALGPPEVIAQLENAAKVLMAPPSMVNNEQRQHAEHIFLSFRKSKSPFAVCKHILETSKVDYVLFQAATAIMEAVVREWILLEKGSIESLRTFLLTYVLQRPNLQKYVREQILLAVAVIVKRGSLDKSIDCKSIFHEVSQLISSGNPTVQTLACSILTALLSEFSSSSKTSNIGLSMEFHGNCKRVFQEEDLRQIFMLTVEVLQEFSRRENLNAQMSSVFQRYLALANQVLSWNFLPPNSNWIIE

SEQ ID NO: 897584 - protein, 423 aa, Homo sapiens [sequence omitted]

SEQ ID NO: 897585 - protein, 423 aa, Homo sapiens [sequence omitted]

SEQ ID NO: 897586 - protein, 117 aa, Homo sapiens
MGSTKHWGEWLLNLKVAPAGVFGVAFLARVALVFYGVFQDRTLHVRYTDIDYQVFTDAARFVTEGRSPYLRATYRYTPLLGWLLTPNIYLSELFGKFLFISCDLLPTPNSEIVRYRA

SEQ ID NO: 897587 - protein, 423 aa, Homo sapiens [sequence omitted]

SEQ ID NO: 897588 - protein, 239 aa, Homo sapiens
MQEVGVGLYPSISLLNHSCDPNCSIVFNGPHLLLRAVRDIEVGEELTICYLDMLMTSEERRKQLRDQYCFECDCFRCQTQDKDADMLTGDEQVWKEVQESLKKIEELKAHWKWEQVLAMCQAIISSNSERLPDINIYQLKVLDCAMDACINLGLLEEALFYGTRTMEPYRIFFPGSHPVRGVQVMKVGKLQLHQGMFPQAMKNLRLAFDIMRVTHGREHSLIEDLILLLEECDANIRAS

SEQ ID NO: 897589 - protein, 82 aa, Homo sapiens
KLKLYEFHVSSFWIFFPGSHPVRGVQVMKVGKLQLHQGMFPQAMKNLRLAFDIMRVTHGREHSLIEDLILLLEECDANIRAS

SEQ ID NO: 897590 - protein, 209 aa, Homo sapiens
MQEVGVGLYPSISLLNHSCDPNCSIVFNGPHLLLRAVRDIEVGEELTICYLDMLMTSEERRKQLRDQYCFECDCFRCQTQDKDADMLTGDEQVWKEVQESLKKIEELKAHWKWEQVLAMCQAIISSNSERLPDINIYQLKVLDCAMDACINLGLLEEALFYGTRTMEPYRIFFPGSHPVRGVQVMKVGKLQLHQGMFPQAMKNLRLVGI

SEQ ID NO: 897591 - protein, 87 aa, Homo sapiens
FNNRFVYILQIKNRFRVTIFFPGSHPVRGVQVMKVGKLQLHQGMFPQAMKNLRLAFDIMRVTHGREHSLIEDLILLLEECDANIRAS

SEQ ID NO: 897592 - protein, 404 aa, Homo sapiens
MIIAHCSRELLGSRDPPTTCPNLDYSVREQRKEKLMRCSQCRVAKYCSAKCQKKAWPDHKRECKCLKSCKPRYPPDSVRLLGRVVFKLMDGAPSESEKLYSFYDLESNINKLTEDKKEGLRQLVMTFQHFMREEIQDASQLPPAFDLFEAFAKVICNSFTICNAEMQEVGVGLYPSISLLNHSCDPNCSIVFNGPHLLLRAVRDIEVGEELTICYLDMLMTSEERRKQLRDQYCFECDCFRCQTQDKDADMLTGDEQVWKEVQESLKKIEELKAHWKWEQVLAMCQAIISSNSERLPDINIYQLKVLDCAMDACINLGLLEEALFYGTRTMEPYRIFFPGSHPVRGVQVMKVGKLQLHQGMFPQAMKNLRLAFDIMRVTHGREHSLIEDLILLLEECDANIRAS

SEQ ID NO: 897593 - protein, 369 aa, Homo sapiens
MRCSQCRVAKYCSAKCQKKAWPDHKRECKCLKSCKPRYPPDSVRLLGRVVFKLMDGAPSESEKLYSFYDLESNINKLTEDKKEGLRQLVMTFQHFMREEIQDASQLPPAFDLFEAFAKVICNSFTICNAEMQEVGVGLYPSISLLNHSCDPNCSIVFNGPHLLLRAVRDIEVGEELTICYLDMLMTSEERRKQLRDQYCFECDCFRCQTQDKDADMLTGDEQVWKEVQESLKKIEELKAHWKWEQVLAMCQAIISSNSERLPDINIYQLKVLDCAMDACINLGLLEEALFYGTRTMEPYRIFFPGSHPVRGVQVMKVGKLQLHQGMFPQAMKNLRLAFDIMRVTHGREHSLIEDLILLLEECDANIRAS

SEQ ID NO: 897594 - protein, 460 aa, Homo sapiens
CARRAQARGSRQPVRRPLLDAGSRLRCRSCGRMEPLKVEKFATANRGNGLRAVTPLRPGELLFRSDPLAYTVCKGSRGVVCDRCLLGKEKLMRCSQCRVAKYCSAKCQKKAWPDHKRECKCLKSCKPRYPPDSVRLLGRVVFKLMDGAPSESEKLYSFYDLESNINKLTEDKKEGLRQLVMTFQHFMREEIQDASQLPPAFDLFEAFAKVICNSFTICNAEMQEVGVGLYPSISLLNHSCDPNCSIVFNGPHLLLRAVRDIEVGEELTICYLDMLMTSEERRKQLRDQYCFECDCFRCQTQDKDADMLTGDEQVWKEVQESLKKIEELKAHWKWEQVLAMCQAIISSNSERLPDINIYQLKVLDCAMDACINLGLLEEALFYGTRTMEPYRIFFPGSHPVRGVQVMKVGKLQLHQGMFPQAMKNLRLAFDIMRVTHGREHSLIEDLILLLEECDANIRAS

SEQ ID NO: 897595 - protein, 460 aa, Homo sapiens; identical to SEQ ID NO: 897594

SEQ ID NO: 897596 - protein, 460 aa, Homo sapiens; identical to SEQ ID NO: 897594

SEQ ID NO: 897597 - protein, 423 aa, Homo sapiens
CARRAQARGSRQPVRRPLLDAGSRLRCRSCGRMEPLKVEKFATANRGNGLRAVTPLRPGELLFRSDPLAYTVCKGSRGVVCDRCLLGKEKLMRCSQCRVAKYCSAKCQKKAWPDHKRECKCLKSCKPRYPPDSVRLLGRVVFKLMDGAPSESEKLYSFYDLESNINKLTEDKKEGLRQLVMTFQHFMREEIQDASQLPPAFDLFEAFAKVICNSFTICNAEMQEVGVGLYPSISLLNHSCDPNCSIVFNGPHLLLRAVRDIEVGEEDADMLTGDEQVWKEVQESLKKIEELKAHWKWEQVLAMCQAIISSNSERLPDINIYQLKVLDCAMDACINLGLLEEALFYGTRTMEPYRIFFPGSHPVRGVQVMKVGKLQLHQGMFPQAMKNLRLAFDIMRVTHGREHSLIEDLILLLEECDANIRAS

SEQ ID NO: 897598 - protein, 239 aa, Homo sapiens; identical to SEQ ID NO: 897588

SEQ ID NO: 897599 - protein, 460 aa, Homo sapiens; identical to SEQ ID NO: 897594

SEQ ID NO: 897600 - protein, 300 aa, Homo sapiens
MRLSTQRFCEPTAAHWKTRLGLIFQIIYSACSEIDAQDTKQPLDTSAKNVICNSFTICNAEMQEVGVGLYPSISLLNHSCDPNCSIVFNGPHLLLRAVRDIEVGEELTICYLDMLMTSEERRKQLRDQYCFECDCFRCQTQDKDADMLTGDEQVWKEVQESLKKIEELKAHWKWEQVLAMCQAIISSNSERLPDINIYQLKVLDCAMDACINLGLLEEALFYGTRTMEPYRIFFPGSHPVRGVQVMKVGKLQLHQGMFPQAMKNLRLAFDIMRVTHGREHSLIEDLILLLEECDANIRAS

SEQ ID NO: 897601 - protein, 239 aa, Homo sapiens; identical to SEQ ID NO: 897588

SEQ ID NO: 897602 - protein, 276 aa, Homo sapiens
CCGGCARDILFFFVFGAPRPPLRGLVICNSFTICNAEMQEVGVGLYPSISLLNHSCDPNCSIVFNGPHLLLRAVRDIEVGEELTICYLDMLMTSEERRKQLRDQYCFECDCFRCQTQDKDADMLTGDEQVWKEVQESLKKIEELKAHWKWEQVLAMCQAIISSNSERLPDINIYQLKVLDCAMDACINLGLLEEALFYGTRTMEPYRIFFPGSHPVRGVQVMKVGKLQLHQGMFPQAMKNLRLAFDIMRVTHGREHSLIEDLILLLEECDANIRAS

SEQ ID NO: 897603 - protein, 395 aa, Homo sapiens
CARRAQARGSRQPVRRPLLDAGSRLRCRSCGRMEPLKVEKFATANRGNGLRAVTPLRPGELLFRSDPLAYTVCKGSRGVVCDRCLLGKEKLMRCSQCRVAKYCSAKCQKKAWPDHKRECKCLKSCKPRYPPDSVRLLGRVVFKLMDGAPSESEKLYSFYDLESNINKLTEDKKEGLRQLVMTFQHFMREEIQDASQLPPAFDLFEAFAKVICNSFTICNAEMQEVGVGLYPSISLLNHSCDPNCSIVFNGPHLLLRAVRDIEVGEELTICYLDMLMTSEERRKQLRDQYCFECDCFRCQTQDKDADMLTGDEQVWKEVQESLKKIEELKAHWKWEQVLAMCQAIISSNSERLPDINIYQLKVLDCAMDACINLGLLEEALFYGTRTMEPYRLLIL

SEQ ID NO: 897604 - protein, 460 aa, Homo sapiens; identical to SEQ ID NO: 897594

SEQ ID NO: 897605 - protein, 375 aa, Homo sapiens
CARRAQARGSRQPVRRPLLDAGSRLRCRSCGRMEPLKVEKFATANRGNGLRAVTPLRPGELLFRSDPLAYTVCKGSRGVVCDRCLLGKEKLMRCSQCRVAKYCSAKCQKKAWPDHKRECKCLKSCKPRYPPDSVRLLGRVVFKLMDGAPSESEKLYSFYDLESNINKLTEDKKEGLRQLVMTFQHFMREEIQDASQLPPAFDLFEAFAKVICNSFTICNAEMQEVGVGLYPSISLLNHSCDPNCSIVFNGPHLLLRAVRDIEVGEELTICYLDMLMTSEERRKQLRDQYCFECDCFRCQTQDKDADMLTGDEQVWKEVQESLKKIEELKAHWKWEQVLAMCQAIISSNSERLPDINIYQLKVLDCAMDACMLLIL

SEQ ID NO: 897606 - protein, 391 aa, Homo sapiens
CARRAQARGSRQPVRRPLLDAGSRLRCRSCGRMEPLKVEKFATANRGNGLRAVTPLRPGELLFRSDPLAYTVCKGSRGVVCDRCLLGKEKLMRCSQCRVAKYCSAKCQKKAWPDHKRECKCLKSCKPRYPPDSVRLLGRVVFKLMDGAPSESEKLYSFYDLESNINKLTEDKKEGLRQLVMTFQHFMREEIQDASQLPPAFDLFEAFAKVICNSFTICNAEMQEVGVGLYPSISLLNHSCDPNCSIVFNGPHLLLRAVRDIEVGEELTICYLDMLMTSEERRKQLRDQYCFECDCFRCQTQDKDADMLTGDEQVWKEVQESLKKIEELKAHWKWEQVLAMCQAIISSNSERLPDINIYQLKVLDCAMDACINLGLLEEALFYGTRTMEPYS

SEQ ID NO: 897607 - protein, 114 aa, Homo sapiens
  misc_feature (14)..(14): Xaa can be any naturally occurring amino acid
LPHPQGLQQNLKYXGPLDWKLKKTRKESSFKKLSSICPDSWCCFRIFFPGSHPVRGVQVMKVGKLQLHQGMFPQAMKNLRLAFDIMRVTHGREHSLIEDLILLLEECDANIRAS

SEQ ID NO: 897608 - protein, 90 aa, Homo sapiens
  misc_feature (6)..(6): Xaa can be any naturally occurring amino acid
ILTTRXYTTTLATTIGEFWLPIFFPGSHPVRGVQVMKVGKLQLHQGMFPQAMKNLRLAFDIMRVTHGREHSLIEDLILLLEECDANIRAS

SEQ ID NO: 897609 - protein, 236 aa, Homo sapiens
TGDQAPSAQEPACLLLLFMVPGLSPDFAPRSEWASIAERSQAAEAGISETVICNSFTICNAEMQEVGVGLYPSISLLNHSCDPNCSIVFNGPHLLLRAVRDIEVGEELTICYLDMLMTSEERRKQLRDQYCFECDCFRCQTQDKDADMLTGDEQVWKEVQESLKKIEELKAHWKWEQVLAMCQAIISSNSERLPDINIYQLKVLDCAMDACINLGLLEEALFYGTRTMEPYRLLIL

SEQ ID NO: 897610 - protein, 188 aa, Homo sapiens
CARRAQARGSRQPVRRPLLDAGSRLRCRSCGRMEPLKVEKFATANRGNGLRAVTPLRPGELLFRSDPLAYTVCKGSRGVVCDRCLLGKEKLMRCSQCRVAKYCSAKCQKKAWPDHKRECKCLKSCKPRYPPDSVRLLGRVVFKLMDGAPSESDNTCKSPQHLFPTLLNLTINHVYHKKVQPVNGSRLR

SEQ ID NO: 897611 - protein, 411 aa, Homo sapiens
WILEIPPLLLLSCLAVIKLFLCCNTPTVLRVLAFLGSRKEKLMRCSQCRVAKYCSAKCQKKAWPDHKRECKCLKSCKPRYPPDSVRLLGRVVFKLMDGAPSESEKLYSFYDLESNINKLTEDKKEGLRQLVMTFQHFMREEIQDASQLPPAFDLFEAFAKVICNSFTICNAEMQEVGVGLYPSISLLNHSCDPNCSIVFNGPHLLLRAVRDIEVGEELTICYLDMLMTSEERRKQLRDQYCFECDCFRCQTQDKDADMLTGDEQVWKEVQESLKKIEELKAHWKWEQVLAMCQAIISSNSERLPDINIYQLKVLDCAMDACINLGLLEEALFYGTRTMEPYRIFFPGSHPVRGVQVMKVGKLQLHQGMFPQAMKNLRLAFDIMRVTHGREHSLIEDLILLLEECDANIRAS

SEQ ID NO: 897612 - protein, 82 aa, Homo sapiens
PCVNDSLNIHRYTIFFPGSHPVRGVQVMKVGKLQLHQGMFPQAMKNLRLAFDIMRVTHGREHSLIEDLILLLEECDANIRAS

SEQ ID NO: 897613 - protein, 231 aa, Homo sapiens
MRLSTQRFCEPTAAHWKTRLGLIFQIIYSACSEIDAQDTKQPLDTSAKNVICNSFTICNAEMQEVGVGLYPSISLLNHSCDPNCSIVFNGPHLLLRAVRDIEVGEELTICYLDMLMTSEERRKQLRDQYCFECDCFRCQTQDKDADMLTGDEQVWKEVQESLKKIEELKAHWKWEQVLAMCQAIISSNSERLPDINIYQLKVLDCAMDACINLGLLEEALFYGTRTMEPYS

SEQ ID NO: 897614 - protein, 460 aa, Homo sapiens; identical to SEQ ID NO: 897594

SEQ ID NO: 897615 - protein, 391 aa, Homo sapiens; identical to SEQ ID NO: 897606

SEQ ID NO: 897616 - protein, 486 aa, Homo sapiens
CARRAQARGSRQPVRRPLLDAGSRLRCRSCGRMEPLKVEKFATANRGNGLRAVTPLRPGELLFRSDPLAYTVCKGSRGVVCDRCLLGKEKLMRCSQCRVAKYCSAKCQKKAWPDHKRECKCLKSCKPRYPPDSVRLLGRVVFKLMDGAPSESEKLYSFYDLESNINKLTEDKKEGLRQLVMTFQHFMREEIQDASQLPPAFDLFEAFAKRWGLAMLPRLVFNSWYQVIFLPQPHKVICNSFTICNAEMQEVGVGLYPSISLLNHSCDPNCSIVFNGPHLLLRAVRDIEVGEELTICYLDMLMTSEERRKQLRDQYCFECDCFRCQTQDKDADMLTGDEQVWKEVQESLKKIEELKAHWKWEQVLAMCQAIISSNSERLPDINIYQLKVLDCAMDACINLGLLEEALFYGTRTMEPYRIFFPGSHPVRGVQVMKVGKLQLHQGMFPQAMKNLRLAFDIMRVTHGREHSLIEDLILLLEECDANIRAS

SEQ ID NO: 897617 - protein, 239 aa, Homo sapiens; identical to SEQ ID NO: 897588

SEQ ID NO: 897618 - protein, 460 aa, Homo sapiens; identical to SEQ ID NO: 897594

SEQ ID NO: 897619 - protein, 460 aa, Homo sapiens; identical to SEQ ID NO: 897594

SEQ ID NO: 897620 - protein, 437 aa, Homo sapiens
WILEIPPLLLLSCLAVIKLFLCCNTPTVLRVLAFLGSRKEKLMRCSQCRVAKYCSAKCQKKAWPDHKRECKCLKSCKPRYPPDSVRLLGRVVFKLMDGAPSESEKLYSFYDLESNINKLTEDKKEGLRQLVMTFQHFMREEIQDASQLPPAFDLFEAFAKRWGLAMLPRLVSSSWYQVIFLPQPHKVICNSFTICNAEMQEVGVGLYPSISLLNHSCDPNCSIVFNGPHLLLRAVRDIEVGEELTICYLDMLMTSEERRKQLRDQYCFECDCFRCQTQDKDADMLTGDEQVWKEVQESLKKIEELKAHWKWEQVLAMCQAIISSNSERLPDINIYQLKVLDCAMDACINLGLLEEALFYGTRTMEPYRIFFPGSHPVRGVQVMKVGKLQLHQGMFPQAMKNLRLAFDIMRVTHGREHSLIEDLILLLEECDANIRAS

SEQ ID NO: 897621 - protein, 270 aa, Homo sapiens
MALLYARPVRPPLHPKPVRVICNSFTICNAEMQEVGVGLYPSISLLNHSCDPNCSIVFNGPHLLLRAVRDIEVGEELTICYLDMLMTSEERRKQLRDQYCFECDCFRCQTQDKDADMLTGDEQVWKEVQESLKKIEELKAHWKWEQVLAMCQAIISSNSERLPDINIYQLKVLDCAMDACINLGLLEEALFYGTRTMEPYRIFFPGSHPVRGVQVMKVGKLQLHQGMFPQAMKNLRLAFDIMRVTHGREHSLIEDLILLLEECDANIRAS

SEQ ID NO: 897622 - protein, 239 aa, Homo sapiens; identical to SEQ ID NO: 897588

SEQ ID NO: 897623 - protein, 391 aa, Homo sapiens; identical to SEQ ID NO: 897606

SEQ ID NO: 897624 - protein, 409 aa, Homo sapiens
CARRAQARGSRQPVRRPLLDAGSRLRCRSCGRMEPLKVEKFATANRGNGLRAVTPLRPGELLFRSDPLAYTVCKGSRGVVCDRCLLGKEKLMRCSQCRVAKYCSAKCQKKAWPDHKRECKCLKSCKPRYPPDSVRLLGRVVFKLMDGAPSESEKLYSFYDLESNINKLTEDKKEGLRQLVMTFQHFMREEIQDASQLPPAFDLFEAFAKVICNSFTICNAEMQEVGVGLYPSISLLNHSCDPNCSIVFNGPHLLLRAVRDIEVGEELTICYLDMLMTSEERRKQLRDQYCFECDCFRCQTQDKDADMLTGDEQVWKEVQESLKKIEELKAHWKWEQVLAMCQAIISSNSERLPDINIYQLKVLDCAMDACINLGLLEEALFYGTRTMEPYRIFFPGSHPVRGVQVMKES

SEQ ID NO: 897625 - protein, 133 aa, Homo sapiens
MQEVGVGLYPSISLLNHSCDPNCSIVFNGPHLLLRAVRDIEVGEEDADMLTGDEQVWKEVQESLKKIEELKAHWKWEQVLAMCQAIISSNSERLPDINIYQLKVLDCAMDACINLGLLEEALFYGTRTMEPYS

SEQ ID NO: 897626 - protein, 84 aa, Homo sapiens
LIHTLLPPPPKQKSWIFFPGSHPVRGVQVMKVGKLQLHQGMFPQAMKNLRLAFDIMRVTHGREHSLIEDLILLLEECDANIRAS

SEQ ID NO: 897627 - protein, 133 aa, Homo sapiens; identical to SEQ ID NO: 897625

SEQ ID NO: 897628 - protein, 687 aa, Homo sapiens
MTPQSLLQTTLFLLSLLFLVQGAHGRGHREDFRFCSQRNQTHRSSLHYKPTPDLRISIENSEEALTVHAPFPAAHPASRSFPDPRGLYHFCLYWNRHAGRLHLLYGKRDFLLSDKASSLLCFQHQEESLAQGPPLLATSVTSWWSPQNISLPSAASFTFSFHSPPHTAAHNASVDMCELKRDLQLLSQFLKHPQKASRRPSAAPASQQLQSLESKLTSVRFMGDMVSFEEDRINATVWKLQPTAGLQDLHIHSRQEEEQSEIMEYSVLLPRTLFQRTKGRSGEAEKRLLLVDFSSQALFQDKNSSQVLGEKVLGIVVQNTKVANLTEPVVLTFQHQLQPKNVTLQCVFWVEDPTLSSPGHWSSAGCETVRRETQTSCFCNHLTYFAVLMVSSVEVDAVHKHYLSLLSYVGCVVSALACLVTIAAYLCSRRKPRDYTIKVHMNLLLAVFLLDTSFLLSEPVALTGSEAGCRASAIFLHFSLLTCLSWMGLEGYNLYRLVVEVFGTYVPGYLLKLSAMGWGFPIFLVTLVALVDVDNYGPIILAVHRTPEGVIYPSMCWIRDSLVSYITNLGLFSLVFLFNMAMLATMVVQILRLRPHTQKWSHVLTLLGLSLVLGLPWALIFFSFASGTFQLVVLYLFSIITSFQGFLIFIWYWSMRLQARGGPSPLKSNSDSARLPISSGSTSSSRI

SEQ ID NO: 897629 - protein, 687 aa, Homo sapiens; identical to SEQ ID NO: 897628

SEQ ID NO: 897630 - protein, 693 aa, Homo sapiens
MTPQSLLQTTLFLLSLLFLVQGAHGRGHREDFRFCSQRNQTHRSSLHYKPTPDLRISIENSEEALTVHAPFPAAHPASRSFPDPRGLYHFCLYWNRHAGRLHLLYGKRDFLLSDKASSLLCFQHQEESLAQGPPLLATSVTSWWSPQNISLPSAASFTFSFHSPPHTAAHNASVDMCELKRDLQLLSQFLKHPQKASRRPSAAPASQQLQSLESKLTSVRFMGDMVSFEEDRINATVWKLQPTAGLQDLHIHSRQEEEQSEIMEYSVLLPRTLFQRTKGRSGEAEKRLLLVDFSSQALFQDKNSSQVLGEKVLGIVVQNTKVANLTEPVVLTFQHQLQPKNVTLQCVFWVEDPTLSSPGHWSSAGCETVRRETQTSCFCNHLTYFAVLMVSSVEVDAVHKHYLSLLSYVGCVVSALACLVTIAAYLCSRVPLPCRRKPRDYTIKVHMNLLLAVFLLDTSFLLSEPVALTGSEAGCRASAIFLHFSLLTCLSWMGLEGYNLYRLVVEVFGTYVPGYLLKLSAMGWGFPIFLVTLVALVDVDNYGPIILAVHRTPEGVIYPSMCWIRDSLVSYITNLGLFSLVFLFNMAMLATMVVQILRLRPHTQKWSHVLTLLGLSLVLGLPWALIFFSFASGTFQLVVLYLFSIITSFQGFLIFIWYWSMRLQARGGPSPLKSNSDSARLPISSGSTSSSRI

SEQ ID NO: 897631 - protein, 687 aa, Homo sapiens; identical to SEQ ID NO: 897628

SEQ ID NO: 897632 - protein, 687 aa, Homo sapiens; identical to SEQ ID NO: 897628

SEQ ID NO: 897633 - protein, 687 aa, Homo sapiens; identical to SEQ ID NO: 897628

SEQ ID NO: 897634 - protein, 512 aa, Homo sapiens
MCELKRDLQLLSQFLKHPQKASRRPSAAPASQQLQSLESKLTSVRFMGDMVSFEEDRINATVWKLQPTAGLQDLHIHSRQEEEQSEIMEYSVLLPRTLFQRTKGRSGEAEKRLLLVDFSSQALFQDKNSSQVLGEKVLGIVVQNTKVANLTEPVVLTFQHQLQPKNVTLQCVFWVEDPTLSSPGHWSSAGCETVRRETQTSCFCNHLTYFAVLMVSSVEVDAVHKHYLSLLSYVGCVVSALACLVTIAAYLCSRRKPRDYTIKVHMNLLLAVFLLDTSFLLSEPVALTGSEAGCRASAIFLHFSLLTCLSWMGLEGYNLYRLVVEVFGTYVPGYLLKLSAMGWGFPIFLVTLVALVDVDNYGPIILAVHRTPEGVIYPSMCWIRDSLVSYITNLGLFSLVFLFNMAMLATMVVQILRLRPHTQKWSHVLTLLGLSLVLGLPWALIFFSFASGTFQLVVLYLFSIITSFQGFLIFIWYWSMRLQARGGPSPLKSNSDSARLPISSGSTSSSRI

SEQ ID NO: 897635 - protein, 512 aa, Homo sapiens; identical to SEQ ID NO: 897634

SEQ ID NO: 897636 - protein, 386 aa, Homo sapiens
GRVGRRTRGSTHASAVQNTKVANLTEPVVLTFQHQLQPKNVTLQCVFWVEDPTLSSPGHWSSAGCETVRRETQTSCFCNHLTYFAVLMVSSVEVDAVHKHYLSLLSYVGCVVSALACLVTIAAYLCSRRKPRDYTIKVHMNLLLAVFLLDTSFLLSEPVALTGSEAGCRASAIFLHFSLLTCLSWMGLEGYNLYRLVVEVFGTYVPGYLLKLSAMGWGFPIFLVTLVALVDVDNYGPIILAVHRTPEGVIYPSMCWIRDSLVSYITNLGLFSLVFLFNMAMLATMVVQILRLRPHTQKWSHVLTLLGLSLVLGLPWALIFFSFASGTFQLVVLYLFSIITSFQGFLIFIWYWSMRLQARGGPSPLKSNSDSARLPISSGSTSSSRI

SEQ ID NO: 897637 - protein, 201 aa, Homo sapiens [sequence omitted]

SEQ ID NO: 897638 - protein, 693 aa, Homo sapiens; identical to SEQ ID NO: 897630

SEQ ID NO: 897639 - protein, 693 aa, Homo sapiens; identical to SEQ ID NO: 897630

SEQ ID NO: 897640 - protein, 693 aa, Homo sapiens; identical to SEQ ID NO: 897630

SEQ ID NO: 897641 - protein, 108 aa, Homo sapiens
MGPRADLQGQSPGGGEALCQEHSSSSPTSEPRPPPSLSPPVLPPSSLGFSSSPRASLLLRSQLGVPDSNAVFWGVVSRSCLVSAVNVCLLHKPRPAPEPGSVPMRGLG

SEQ ID NO: 897642 - protein, 194 aa, Homo sapiens [sequence omitted]

SEQ ID NO: 897643 - protein, 153 aa, Homo sapiens
MTPQSLLQTTLFLLSLLFLVQGAHGRGHREDFRFCSQRNQTHRSSLHYKPTPDLRISIENSEEALTVHAPFPAAHPASRSFPDPRGLYHFCLYWNRHAGRLHLLYGKQLLELQGQGAIIPAWESWKTSCRSQRSILTLKMGRMFFLRTNSFVF

SEQ ID NO: 897644 - protein, 693 aa, Homo sapiens; identical to SEQ ID NO: 897630

SEQ ID NO: 897645 - protein, 687 aa, Homo sapiens; identical to SEQ ID NO: 897628

SEQ ID NO: 897646 - protein, 687 aa, Homo sapiens; identical to SEQ ID NO: 897628

SEQ ID NO: 897647 - protein, 687 aa, Homo sapiens; identical to SEQ ID NO: 897628

SEQ ID NO: 897648 - protein, 619 aa, Homo sapiens
  misc_feature (9)..(9): Xaa can be any naturally occurring amino acid
LVRPGVNGXIVDPGRPRGLYHFCLYWNRHAGRLHLLYGKRDFLLSDKASSLLCFQHQEESLAQGPPLLATSVTSWWSPQNISLPSAASFTFSFHSPPHTAAHNASVDMCELKRDLQLLSQFLKHPQKASRRPSAAPASQQLQSLESKLTSVRFMGDMVSFEEDRINATVWKLQPTAGLQDLHIHSRQEEEQSEIMEYSVLLPRTLFQRTKGRSGEAEKRLLLVDFSSQALFQDKNSSQVLGEKVLGIVVQNTKVANLTEPVVLTFQHQLQPKNVTLQCVFWVEDPTLSSPGHWSSAGCETVRRETQTSCFCNHLTYFAVLMVSSVEVDAVHKHYLSLLSYVGCVVSALACLVTIAAYLCSRRKPRDYTIKVHMNLLLAVFLLDTSFLLSEPVALTGSEAGCRASAIFLHFSLLTCLSWMGLEGYNLYRLVVEVFGTYVPGYLLKLSAMGWGFPIFLVTLVALVDVDNYGPIILAVHRTPEGVIYPSMCWIRDSLVSYITNLGLFSLVFLFNMAMLATMVVQILRLRPHTQKWSHVLTLLGLSLVLGLPWALIFFSFASGTFQLVVLYLFSIITSFQGFLIFIWYWSMRLQARGGPSPLKSNSDSARLPISSGSTSSSRI

SEQ ID NO: 897649 - protein, 421 aa, Homo sapiens
LTYCSEKNKTQMIYRNEAEKRLLLVDFSSQALFQDKNSSQVLGEKVLGIVVQNTKVANLTEPVVLTFQHQLQPKNVTLQCVFWVEDPTLSSPGHWSSAGCETVRRETQTSCFCNHLTYFAVLMVSSVEVDAVHKHYLSLLSYVGCVVSALACLVTIAAYLCSRRKPRDYTIKVHMNLLLAVFLLDTSFLLSEPVALTGSEAGCRASAIFLHFSLLTCLSWMGLEGYNLYRLVVEVFGTYVPGYLLKLSAMGWGFPIFLVTLVALVDVDNYGPIILAVHRTPEGVIYPSMCWIRDSLVSYITNLGLFSLVFLFNMAMLATMVVQILRLRPHTQKWSHVLTLLGLSLVLGLPWALIFFSFASGTFQLVVLYLFSIITSFQGFLIFIWYWSMRLQARGGPSPLKSNSDSARLPISSGSTSSSRI

SEQ ID NO: 897650 - protein, 693 aa, Homo sapiens; identical to SEQ ID NO: 897630

SEQ ID NO: 897651 - protein, 114 aa, Homo sapiens
MKQRCGLVAHCLWPPSPAQPQASQPQTLESPTTMERWAVAMVDGLPGWAFELALGTTRLSLSSHGTQKCAAMLPRVLSPHLSQPSWRPGLSLQPLGPALIAGGQALDLEGLAHP

SEQ ID NO: 897652 - protein, 693 aa, Homo sapiens; identical to SEQ ID NO: 897630

SEQ ID NO: 897653 - protein, 687 aa, Homo sapiens; identical to SEQ ID NO: 897628

SEQ ID NO: 897654 - protein, 196 aa, Homo sapiens
MTPQSLLQTTLFLLSLLFLVQGAHGRGHREDFRFCSQRNQTHRSSLHYKPTPDLRISIENSEEALTVHAPFPAAHPASRSFPDPRGLYHFCLYWNRHAGRLHLLYGKRDFLLSDKASSLLCFQHQEESLAQGPPLLATSVTSWWSPQNISLPSAASFTFSFHSKATSRRREQLGSGLEAGKAKCKVDWALGVCNAE

SEQ ID NO: 897655 - protein, 194 aa, Homo sapiens [sequence omitted]

SEQ ID NO: 897656 - protein, 125 aa, Homo sapiens
MASASGAMAKHEQILVLDPPTDLKFKGPFTDVVTTNLKLRNPSDRKVCFKVKTTAPRRYCVRPNSGIIDPGSTVTVSVMLQPFDYDPNEKSKHKFMVQTIFAPPNTSDMEAVVSIEEEFVLGSGV

SEQ ID NO: 897657 - protein, 242 aa, Homo sapiens [sequence omitted]

SEQ ID NO: 897658 - protein, 242 aa, Homo sapiens [sequence omitted]

SEQ ID NO: 897659 - protein, 249 aa, Homo sapiens
MASASGAMAKHEQILVLDPPTDLKFKGPFTDVVTTNLKLRNPSDRKVCFKVKTTAPRRYCVRPNSGIIDPGSTVTVSVMLQPFDYDPNEKSKHKFMVQTIFAPPNTSDMEAVWKEAKPDELMDSKLRCVFEMPNENDKLNDMEPSKAVPLNASKQDGPMPKPHSVSLNDTETRKLMEECKRLQGEMMKLSEENRHLRDEGLRLRKVAHSDKPGSTSTASFRDNVTSPLPSLLVVIAAIFIGFFLGKFIL

SEQ ID NO: 897660 - protein, 249 aa, Homo sapiens; identical to SEQ ID NO: 897659

SEQ ID NO: 897661 - protein, 173 aa, Homo sapiens
ASDDLVRYNLSSSRQFIFLCVQRHIGFAFNDLLRLENTIKTNCSATGQVVYYQIITSRCQLHIESFMKFINKELFFLCGFNKSSRIVQSLVNVILIIPLNFICCCYLLKYDLFRLLIPLIQEMPRGIPWGNGASYSVNFSSFTFANIMAEFFLSLVRQLLTEFFILTILSHGI

SEQ ID NO: 897662 - protein, 217 aa, Homo sapiens
MASASGAMAKHEQILVLDPPTDLKFKGPFTDVVTTNLKLRNPSDRKVCFKVKTTAPRRYCVRPNSGIIDPGSTVTVSVMLQPFDYDPNEKSKHKFMVQTIFAPPNTSDMEAVWKEAKPDELMDSKLRCVFEMPNENDKLGITPPGNAPTVTSMSSINNTVATPASYHTKDDPRGLSVLKQEKQKNDMYLSNWSLNASNQMDLCPTVVTYDPNKELLV

SEQ ID NO: 897663 - protein, 249 aa, Homo sapiens; identical to SEQ ID NO: 897659

SEQ ID NO: 897664 - protein, 249 aa, Homo sapiens; identical to SEQ ID NO: 897659

SEQ ID NO: 897665 - protein, 152 aa, Homo sapiens
YYYKIQRPSTLLRLENTIKTNCSATGQVVYYQIITSRCQLHIESFMKFINKELFFLCGFNKSSRIVQSLVNVILIIPLNFICCCYLLKYDLFRLLIPLIQEMPRGIPWGNGASYSVNFSSFTFANIMAEFFLSLVRQLLTEFFILTILSHGI

SEQ ID NO: 897666 - protein, 242 aa, Homo sapiens [sequence omitted]

SEQ ID NO: 897667 - protein, 404 aa, Homo sapiens
EEESRVWPGTFPAKRRAEPKTKQTTSERLGAGLTAAGLASRAKAFRRVGFWVVDRGGRAVCGRAETRGAMATFVSELEAAKKNLSEALGDNVKQYWANLKLWFKQKISKEEFDLEAHRLLTQDNVHSHNDFLLAILTRCQILVSTPDGAGSLPWPGGSAAKPGKPKGKKKLSSVRQKFDHRFQPQNPLSGAQQFVAKDPQDDDDLKLCSHTMMLPTRGQLEGRMIVTAYEHGLDNVTEEAVSAVVYAVENHLKDILTSVVSRRKAYRLRDGHFKYAFGSNVTPQPYLKNSVVAYNNLIESPPAFTAPCAGQNPASHPPPDDAEQQAALLLACSGDTLPASLPPVNMYDLFEALQVHREVIPTHTVYALNIERIITKLWHPNHEELQQDKVHRQRLAAKEGLLLC

SEQ ID NO: 897668 - protein, 193 aa, Homo sapiens
MMLPTRGQLEGRMIVTAYEHGLDNVTEEAVSAVVYAVENHLKDILTSVVSRRKAYRLRDGHFKYAFGSNVTPQPYLKNSVVAYNNLIESPPAFTAPCAGQNPASHPPPDDAEQQAALLLACSGDTLPASLPPVNMYDLFEALQVHREVIPTHTVYALNIERIITKLWHPNHEELQQDKVHRQRLAAKEGLLLC

SEQ ID NO: 897669 - protein, 404 aa, Homo sapiens; identical to SEQ ID NO: 897667

SEQ ID NO: 897670 - protein, 363 aa, Homo sapiens
EEESRVWPGTFPAKRRAEPKTKQTTSERLGAGLTAAGLASRAKAFRRVGFWVVDRGGRAVCGRAETRGAMATFVSELEAAKKNLSEALGDNVKQYWANLKLWFKQKISKEEFDLEAHRLLTQDNVHSHNDFLLAILTRCQILVSTPDGAGSLPWPGGSAAKPGKPKGKKKLSSVRQKFDHRFQPQNPLSGAQQFVAKDPQDDDDLKLCSHTMMLPTRGQLEGRMIVTAYEHGLDNVTEEAVSAVVYAVENHLKDILTSVVSRRKAYRLRDGHFKYAFGSNVTPQPYLKNSVVAYNNLIESPPAFTAPCAGQNPASHPPPDDAEQQAALLLACSGDTLPASLPPVNMYDLFEALQVSLGSLKFT

SEQ ID NO: 897671 - protein, 397 aa, Homo sapiens
LRNSGGLEPLVELLRSKNDEVRKHASWAVMVCAGDELTANELCRLGALDILEEVNVSGTRKNKFSEAAYNKLLNNNLSLKYSQTGYLSSSNIINDGFYDYGRINPGTKLLPLKELCLQEPSDLRAVLLINSKSYVSPPSSMEDKSDVGYGRSISSSSSLRRSSKEKNKKNSYHFSAGFGSPIEDKSEPASGRNTVLSKSATKEKGWRKSKGKKEEEKVKEEEEVMVVPKFVGEGSSDKEWCPPSDPDFSMYVYEVTKSILPITNIKEQIEDLAKYVAEKMGGKIPKEKLPDFSWELHISELKFQLKSNVIPIGHVKKGIFYHRALLFKALADRIGIGCSLVRGEYGRAWNEVMLQNDSRKGVIGGLPAPEMYVIDLMFHPGGLMKLRSREADLYRFI

SEQ ID NO: 897672 - protein, 278 aa, Homo sapiens
LRNSGGLEPLVELLRSKNDEVRKHASWAVMVCAGDELTANELCRLGALDILEEVNVSGTRKNKFSEAAYNKLLNNNLSLKYSQTGYLSSSNIINDGFYDYGRINPGTKLLPLKELCLQEPSDLRAVLLINSKSYVSPPSSMEDKSDVGYGRSISSSSSLRRSSKEKNKKNSYHFSAGFGSPIEDKSEPASGRNTVLSKSATKEKGWRKSKGKKEEEKVKEEEEVMVVPKFVGEGSSDKEWCPPSDPDFSMYVYEVTKSILPITNIKEQIEDLAKSYVH

SEQ ID NO: 897673 - protein, 213 aa, Homo sapiens
LRNSGGLEPLVELLRSKNDEVRKHASWAVMVCAGDELTANELCRLGALDILEEVNVSGTRKNKFSEAAYNKLLNNNLSLKYSQTGYLSSSNIINDGFYDYGRINPGTKLLPLKELCLQEPSDLRAVLLINSKSYVSPPSSMEDKSDVGYGRSISSSSSLRRSSKEKNKKNSYHFSAGFGSPIEDKSEPASGRNTVLSKSATKEKGWSSLPTSR

SEQ ID NO: 897674 - protein, 906 aa, Homo sapiens
IWDSYFYLAVIFINQLCLQLEMFTPSKKKKVLEKYGDMRVTMGCEIFSMWQNLGEHKLHFIPALIGPFLEVTLIPQPDLRNVMIPIFHDMMDWEQRRSGNFKQVEAKLIDKLDSLMSEGKGDETYRELFNSILLKKIERETWRESGVSLIATVTRLMERLLDYSNFYKTELNKEEMYIRYIHKLYDLHLKAQNFTEAAYTLLLYDELLEWSDRPLREFLTYPMQTEWQRKEHLHLTIIQNFDRGKCWENGIILCRKIAEQYESYYDYRNLSKMRMMEASLYDKIMDQQRLEPEFFRVGFYGKKFPFFLRNKEFVCRGHDYERLEAFQQRMLNEFPHAIAMQHANQPDETIFQAEAQYLQIYAVTPIPESQEVLQREGVPDNIKSFYKVNHIWKFRYDRPFHKGTKDKENEFKSLWVERTSLYLVQSLPGISRWFEVEKREVVEMSPLENAIEVLENKNQQLKTLISQCQTRQMQNINPLTMCLNGVIDAAVNGGVSRYQEAFFVKEYILSHPEDGEKIARLRELMLEQAQILEFGLAVHEKFVPQDMRPLHKKLVDQFFVMKSSLGIQEFSACMQASPVHFPNGSPRVCRNSAPASVSPDGTRVIPRRSPLSYPAVNRYSSSSLSSQASAEVSNITGQSESSDEVFNMQPSPSTSSLSSTHSASPNVTSSAPSSARASPLLSDKHKHSRENSCLSPRERPCSAIYPTPVEPSQRMLFNHIGDGALPRSDPNLSAPEKASPARHTTSVSPSPAGRSPLKGSVQSFTPSPVEYHSPGLISNSPVLSGSYSSGISSLSRCSTSETSGFENQVNEQSAPLPVPVPVPVPSYGGEEPVRKESKTPPPYSVYERTLRRPVPLPHSLSIPVTSEPPALPPKPLAARSSHLENGARRTDPGPRPRPLPRKVSQL

SEQ ID NO: 897675 - protein, 825 aa, Homo sapiens
IWDSYFYLAVIFINQLCLQLEMFTPSKKKKVLEKYGDMRVTMGCEIFSMWQNLGEHKLHFIPALIGPFLEVTLIPQPDLRNVMIPIFHDMMDWEQRRSGNFKQVEAKLIDKLDSLMSEGKGDETYRELFNSILLKKIERETWRESGVSLIATVTRLMERLLDYSNFYKTELNKEEMYIRYIHKLYDLHLKAQNFTEAAYTLLLYDELLEWSDRPLREFLTYPMQTEWQRKEHLHLTIIQNFDRGKCWENGIILCRKIAEQYESYYDYRNLSKMRMMEASLYDKIMDQQRLEPEFFRVGFYGKKFPFFLRNKEFVCRGHDYERLEAFQQRMLNEFPHAIAMQHANQPDETIFQAEAQYLQIYAVTPIPESQEVLQREGVPDNIKSFYKVNHIWKFRYDRPFHKGTKDKENEFKSLWVERTSLYLVQSLPGISRWFEVEKREVVEMSPLENAIEVLENKNQQLKTLISQCQTRQMQNINPLTMCLNGVIDAAVNGGVSRYQEAFFVKEYILSHPEDGEKIARLRELMLEQAQILEFGLAVHEKFVPQDMRPLHKKLVDQFFVMKSSLGIQEFSACMQASPVHFPNGSPRVCRNSAPASVSPDGTRVIPRRSPLSYPAVNRYSSSSLSSQASAEVSNITGQSESSDEVFNMQPSPSTSSLSSTHSASPNVTSSAPSSARGQCQSVGKTEGAQENLLVLGTVASCHTFRLSPPNRCSTTTMLMILSLLLFPASPLLSDKHKHSRENSCLSPRERPCSAIYPTPVEPSQRMLFNHIGDGALPRSDPNLSAPEKAVNPTPSSWSLDSGKEAKNMSDSGKLISPPVPPRPTQ

SEQ ID NO: 897676 - protein, 765 aa, Homo sapiens
MAGKWRFINCYCNSSNGEVVRLQNFYKTELNKEEMYIRYIHKLYDLHLKAQNFTEAAYTLLLYDELLEWSDRPLREFLTYPMQTEWQRKEHLHLTIIQNFDRGKCWENGIILCRKIAEQYESYYDYRNLSKMRMMEASLYDKIMDQQRLEPEFFRVGFYGKKFPFFLRNKEFVCRGHDYERLEAFQQRMLNEFPHAIAMQHANQPDETIFQAEAQYLQIYAVTPIPESQEVLQREGVPDNIKSFYKVNHIWKFRYDRPFHKGTKDKENEFKSLWVERTSLYLVQSLPGISRWFEVEKREVVEMSPLENAIEVLENKNQQLKTLISQCQTRQMQNINPLTMCLNGVIDAAVNGGVSRYQEAFFVKEYILSHPEDGEKIARLRELMLEQAQILEFGLAVHEKFVPQDMRPLHKKLVDQFFVMKSSLGIQEFSACMQASPVHFPNGSPRVCRNSAPASVSPDGTRVIPRRSPLSYPAVNRYSSSSLSSQASAEVSNITGQSESSDEVFNMQPSPSTSSLSSTHSASPNVTSSAPSSARASPLLSDKHKHSRENSCLSPRERPCSAIYPTPVEPSQRMLFNHIGDGALPRSDPNLSAPEKASPARHTTSVSPSPAGRSPLKGSVQSFTPSPVEYHSPGLISNSPVLSGSYSSGISSLSRCSTSETSGFENQVNEQSAPLPVPVPVPVPSYGGEEPVRKESKTPPPYSVYERTLRRPVPLPHSLSIPVTSEPPALPPKPLAARSSHLENGARRTDPGPRPRPLPRKVSQL

SEQ ID NO: 897677 - protein, 241 aa, Homo sapiens
MLMILSLLLFPASPLLSDKHKHSRENSCLSPRERPCSAIYPTPVEPSQRMLFNHIGDGALPRSDPNLSAPEKASPARHTTSVSPSPAGRSPLKGSVQSFTPSPVEYHSPGLISNSPVLSGSYSSGISSLSRCSTSETSGFENQVNEQSAPLPVPVPVPVPSYGGEEPVRKESKTPPPYSVYERTLRRPVPLPHSLSIPVTSEPPALPPKPLAARSSHLENGARRTDPGPRPRPLPRKVSQL

SEQ ID NO: 897678 - protein, 775 aa, Homo sapiens
IWDSYFYLAVIFINQLCLQLEMFTPSKKKKVLEKYGDMRVTMGCEIFSMWQNLGEHKLHFIPALIGPFLEVTLIPQPDLRNVMIPIFHDMMDWEQRRSGNFKQVEAKLIDKLDSLMSEGKGDETYRELFNSILLKKIERETWRESGVSLIATVTRLMERLLDYSNFYKTELNKEEMYIRYIHKLYDLHLKAQNFTEAAYTLLLYDELLEWSDRPLREFLTYPMQTEWQRKEHLHLTIIQNFDRGKCWENGIILCRKIAEQYESYYDYRNLSKMRMMEASLYDKIMDQQRLEPEFFRVGFYGKKFPFFLRNKEFVCRGHDYERLEAFQQRMLNEFPHAIAMQHANQPDETIFQAEAQYLQIYAVTPIPESQEVLQREGVPDNIKSFYKVNHIWKFRYDRPFHKGTKDKENEFKSLWVERTSLYLVQSLPGISRWFEVEKREVVEMSPLENAIEVLENKNQQLKTLISQCQTRQMQNINPLTMCLNGVIDAAVNGGVSRYQEAFFVKEYILSHPEDGEKIARLRELMLEQAQILEFGLAVHEKFVPQDMRPLHKKLVDQFFVMKSSLGIQEFSACMQASPVHFPNGSPRVCRNSAPASVSPDGTRVIPRRSPLSYPAVNRYSSSSLSSQASAEVSNITGQSESSDEVFNMQPSPSTSSLSSTHSASPNVTSSAPSSARASPLLSDKHKHSRENSCLSPRERPCSAIYPTPVEPSQRMLFNHIGDGALPRSDPNLSAPEKAVNPTPSSWSLDSGKEAKNMSDSGKLISPPVPPRPTQT

SEQ ID NO: 897679 - protein, 92 aa, Homo sapiens
MTKLEEHLEGIVNIFHQYSVRKGHFDTLSKGELKQLLTKELANTIKNIKDKAVIDEIFQGLDANQDEQVDFQEFISLVAIALKAAHYHTHKE

SEQ ID NO: 897680 - protein, 92 aa, Homo sapiens; identical to SEQ ID NO: 897679

SEQ ID NO: 897681 - protein, 299 aa, Homo sapiens
MSSIKIECVLPENCRCGESPVWEEVSNSLLFVDIPAKKVCRWDSFTKQVQRVTMDAPVSSVALRQSGGYVATIGTKFCALNWKEQSAVVLATVDNDKKNNRFNDGKVDPAGRYFAGTMAEETAPAVLERHQGALYSLFPDHHVKKYFDQVDISNGLDWSLDHKIFYYIDSLSYSVDAFDYDLQTGQISNRRSVYKLEKEEQIPDGMCIDAEGKLWVACYNGGRVIRLDPVTGKRLQTVKLPVDKTTSCCFGGKNYSEMYVTCARDGMDPEGLLRQPEAGGIFKITGLGVKGIAPYSYAG

SEQ ID NO: 897682 - protein, 299 aa, Homo sapiens; identical to SEQ ID NO: 897681

SEQ ID NO: 897683 - protein, 191 aa, Homo sapiens
MSSIKIECVLPENCRCGESPVWEEVSNSLLFVDIPAKKVCRWDSFTKQVQRVTMDAPVSSVALRQSGGYVATIGTKFCALNWKEQSAVVLATVDNDKKNNRFNDGKVDPAGRYFAGTMAEETAPAVLERHQGALYSLFPDHHVKKYFDQVDISNGLDWSLDHKIFYYIDSLQPQKCLQARKGRTNPRWNVY

SEQ ID NO: 897684 - protein, 224 aa, Homo sapiens
MADEQEIMCKLESIKEIRNKTLQMEKIKARLKAEFEALESEERHLKEYKQEMDLLLQEKMAHVEELRLIHADINVMENTIKQSENDLNKLLESTRRLHDEYKPLKEHVDALRMTLGLQRLPDLCEEEEKLSLDYFEKQKAEWQTEPQEPPIPESLAAAAAAAQQLQVARKQDTRQTATFRQQPPPMKACLSCHQQIHRNAPICPLCKAKSRSRNPKKPKRKQDE

SEQ ID NO: 897685 - protein, 268 aa, Homo sapiens
  misc_feature (1)..(2): Xaa can be any naturally occurring amino acid
XXRNIRLGTRLGGQARRRWLHCVYCIPWLVYLYISRDVKLTVKSMADEQEIMCKLESIKEIRNKTLQMEKIKARLKAEFEALESEERHLKEYKQEMDLLLQEKMAHVEELRLIHADINVMENTIKQSENDLNKLLESTRRLHDEYKPLKEHVDALRMTLGLQRLPDLCEEEEKLSLDYFEKQKAEWQTEPQEPPIPESLAAAAAAAQQLQVARKQDTRQTATFRQQPPPMKACLSCHQQIHRNAPICPLCKAKSRSRNPKKPKRKQDE

SEQ ID NO: 897686 - protein, 268 aa, Homo sapiens; identical to SEQ ID NO: 897685
  misc_feature (1)..(2): Xaa can be any naturally occurring amino acid

SEQ ID NO: 897687 - protein, 133 aa, Homo sapiens
MADEQEIMCKLESIKEIRNKTLQMEKIKARLKAEFEALESEERHLKEYKQEMDLLLQEKMAHVEELRLIHADINVMENTIKQSENDLNKLLESTRRLHDEYKPLKEHVDALRMTLGLQRLPDLCEEEEKLSLE

SEQ ID NO: 897688 - protein, 229 aa, Homo sapiens
  misc_feature (2)..(4): Xaa can be any naturally occurring amino acid
GXXXKHTARYEAGWCFLLFANCRNKTLQMEKIKARLKAEFEALESEERHLKEYKQEMDLLLQEKMAHVEELRLIHADINVMENTIKQSENDLNKLLESTRRLHDEYKPLKEHVDALRMTLGLQRLPDLCEEEEKLSLDYFEKQKAEWQTEPQEPPIPESLAAAAAAAQQLQVARKQDTRQTATFRQQPPPMKACLSCHQQIHRNAPICPLCKAKSRSRNPKKPKRKQDE

SEQ ID NO: 897689 - protein, 226 aa, Homo sapiens
HLRLGRGPCKSDRGQARRRWLHCVYCIPWLVYLYISRDVKLTVKSMADEQEIMCKLESIKEIRNKTLQMEKIKARLKAEFEALESEERHLKEYKQEMDLLLQEKMAHVEELRLIHADINVMENTIKQSENDLNKLLESTRRLHDEYKPLKEHVDALRMTLGLQRLPDLCEEEEKLSLDYFERQQPPPMKACLSCHQQIHRNAPICPLCKAKSRSRNPKKPKRKQDE

SEQ ID NO: 897690 - protein, 83 aa, Homo sapiens
TSSLSLVSAEFEALESEERHLKEYKQEMDLLLQEKMAHVEELRLIHADINVMENTIKQSENDLNNPTALLSTKARFPGKVTRR

SEQ ID NO: 897691 - protein, 201 aa, Homo sapiens
MEKIKARLKAEFEALESEERHLKEYKQEMDLLLQEKMAHVEELRLIHADINVMENTIKQSENDLNKLLESTRRLHDEYKPLKEHVDALRMTLGLQRLPDLCEEEEKLSLDYFEKQKAEWQTEPQEPPIPESLAAAAAAAQQLQVARKQDTRQTATFRQQPPPMKACLSCHQQIHRNAPICPLCKAKSRSRNPKKPKRKQDE

SEQ ID NO: 897692 - protein, 269 aa, Homo sapiens
TIRLGRGPCKSDRGQARRRWLHCVYCIPWLVYLYISRDVKLTVKSMADEQEIMCKLESIKEIRNKTLQMEKIKARLKAEFEALESEERHLKEYKQEMDLLLQEKMAHVEELRLIHADINVMENTIKQSENDLNKLLESTRRLHDEYKPLKEHVDALRMTLGLQRLPDLCEEEEKLSLDYFEKQKAEWQTEPQEPPIPESLAAAAAAAQQLQVARKQDTRQTATFRQQPPPMKACLSCHQQIHRNAPICPLCKAKSRSRNPKKPKRKQDE

SEQ ID NO: 897693 - protein, 201 aa, Homo sapiens; identical to SEQ ID NO: 897691

SEQ ID NO: 897694 - protein, 201 aa, Homo sapiens; identical to SEQ ID NO: 897691

SEQ ID NO: 897695 - protein, 268 aa, Homo sapiens; identical to SEQ ID NO: 897685
  misc_feature (1)..(2): Xaa can be any naturally occurring amino acid

SEQ ID NO: 897696 - protein, 453 aa, Homo sapiens
STAAPPSCERLRARERKSKRARERATGTRPTPPLSPTARSACLSTPPDSTRPGPCAGTAQSSGAVQAASGLSGAPPRPQTKAWPAAPARCALAPRLPSSSPLIPPRAWLGALRPAAKFPGRQRRLRLASAMAAELSMGPELPTSPLAMEYVNDFDLLKFDVKKEPLGRAERPGRPCTRLQPAGSVSSTPLSTPCSSVPSSPSFSPTEQKTHLEDLYWMASNYQQMNPEALNLTPEDAVEALIGSHPVPQPLQSFDSFRGAHHHHHHHHPHPHHAYPGAGVAHDELGPHAHPHHHHHHQASPPPSSAASPAQQLPTSHPGPGPHATASATAAGGNGSVEDRFSDDQLVSMSVRELNRHLRGFTKDEVIRLKQKRRTLKNRGYAQSCRYKRVQQKHHLENEKTQLIQQVEQLKQEVSRLARERDAYKVKCEKLANSGFREAGSTSDSPSSPEFFL

SEQ ID NO: 897697 - protein, 453 aa, Homo sapiens; identical to SEQ ID NO: 897696

SEQ ID NO: 897698 - protein, 453 aa, Homo sapiens; identical to SEQ ID NO: 897696

SEQ ID NO: 897699 - protein, 303 aa, Homo sapiens
SVSPHRSALRVCSVPGWLQERPGRPCTRLQPAGSVSSTPLSTPCSSVPSSPSFSPTEQKTHLEDLYWMASNYQQMNPEALNLTPEDAVEALIGSHPVPQPLQSFDSFRGAHHHHHHHHPHPHHAYPGAGVAHDELGPHAHPHHHHHHQASPPPSSAASPAQQLPTSHPGPGPHATASATAAGGNGSVEDRFSDDQLVSMSVRELNRHLRGFTKDEVIRLKQKRRTLKNRGYAQSCRYKRVQQKHHLENEKTQLIQQVEQLKQEVSRLARERDAYKVKCEKLANSGFREAGSTSDSPSSPEFFL

SEQ ID NO: 897700 - protein, 519 aa, Homo sapiens
DPAPLGAPLWSDFSSTFRQETGHSLSPASCLPQRDLSIFPEANRPGLRGDHCACLSFLFWSRGRPGSLPKGGCALSGRRSGRAGAGRTPAPVVTGANAAGRLQPAGEQACRCWWRHGLLSVERGAAPPAAKRHGPLPGLGSPAAATQQVRGHLGGLHSEGCVQGPGALAPERLTAHSCPAESQEYLEDVLEELTYGPAPDLVIINSCLWDLSRYGRCSMESYRENLERVFVRMDQVLPDSCLLVWNMAMPLGERITGGFLLPELQPLAGSLRRDVVEGNFYSATLAGDHCFDVLDLHFHFRHAVQHRHRDGVHWDQHAHRHLSHLLLTHVADAWGVELPKRGYPPDPWIEDWAEMNHPFQGSHRQTPDFGEHLALLPPPPSSLPPPMPFPYPLPQPSPPPLFPPLPQDTPFFPGQPFPPHEFFNYNPVEDFSMPPHLGCGPGVNFVPGPLPPPIPGPNPHGQHWGPVVHRGMPRYVPNSPYHVRRMGGPCRQRLRHSERLIHTYKLDRRPPAHSGTWPG

SEQ ID NO: 897701 - protein, 161 aa, Homo sapiens
SLCGARNLWGWVSTISSWLRSSSQTGASSCKSGGCLRTPLFQQYPYLPHSSVPDSGPGGFGRAPPTLSMGGPCRQRLRHSERLIHTSVLARTLSLWGKLSLWGTLSLWGEREGPCLTATGPLVSCSLSILFSPQCSRAAVEPMMKTTCFWQPCCAPVPPQR

SEQ ID NO: 897702 - protein, 454 aa, Homo sapiens
MVFCLSSEEPRRPLRSDMVHFQASEVQQLLHNKFVVILGDSIQRAVYKDLVLLLQKDSLLTAAQLKAKGELSFEQDQLVAGGQLGELHNGTQYREVRQFCSGSGHHLVRFYFLTRVYSEYLEDVLEELTYGPAPDLVIINSCLWDLSRYGRCSMESYRENLERVFVRMDQVLPDSCLLVWNMAMPLGERITGGFLLPELQPLAGSLRRDVVEGNFYSATLAGDHCFDVLDLHFHFRHAVQHRHRDGVHWDQHAHRHLSHLLLTHVADAWGVELPKRGYPPDPWIEDWAEMNHPFQGSHRQTPDFGEHLALLPPPPSSLPPPMPFPYPLPQPSPPPLFPPLPQDTPFFPGQPFPPHEFFNYNPVEDFSMPPHLGCGPGVNFVPGPLPPPIPGPNPHGQHWGPVVHRGMPRYVPNSPYHVRRMGGPCRQRLRHSERLIHTYKLDRRPPAHSGTWPG

SEQ ID NO: 897703 - protein, 400 aa, Homo sapiens
MVFCLSSEEPRRPLRSDMVHFQASEVQQLLHNKFVVILGDSIQRAVYKDLVLLLQKDSLLTAAQLKAKGELSFEQDQLVAGGQLGELHNGTQYREVRQFCSGSGHHLVRFYFLTRVYSEYLEDVLEELTYGPAPDLVIINSCLWDLSRYGRCSMESYRENLERVFVRMDQVLPDSCLLVWNMAMPLGERITGGFLLPELQPLAGSLRRDVVEGNFYSATLAGDHCFDVLDLHFHFRHAVQHRHRDGVHWDQHAHRHLSHLLLTHVADAWGVELPKRGYPPDPWIEDWAEMNHPFQGSHRQTPDFGEHLALLPPPPSSLPPPMPFPYPLPQPSPPPLFPPLPQDTPFFPGQPFPPHEFFNYNPVEDFSMPPHLGRCFCSSPTLLYLPLPSLLCLGELRGVG

SEQ ID NO: 897704 - protein, 437 aa, Homo sapiens
MVHFQASEVQQLLHNKFVVILGDSIQRAVYKDLVLLLQKDSLLTAAQLKAKGELSFEQDQLVAGGQLGELHNGTQYREVRQFCSGSGHHLVRFYFLTRVYSEYLEDVLEELTYGPAPDLVIINSCLWDLSRYGRCSMESYRENLERVFVRMDQVLPDSCLLVWNMAMPLGERITGGFLLPELQPLAGSLRRDVVEGNFYSATLAGDHCFDVLDLHFHFRHAVQHRHRDGVHWDQHAHRHLSHLLLTHVADAWGVELPKRGYPPDPWIEDWAEMNHPFQGSHRQTPDFGEHLALLPPPPSSLPPPMPFPYPLPQPSPPPLFPPLPQDTPFFPGQPFPPHEFFNYNPVEDFSMPPHLGCGPGVNFVPGPLPPPIPGPNPHGQHWGPVVHRGMPRYVPNSPYHVRRMGGPCRQRLRHSERLIHTYKLDRRPPAHSGTWPG

SEQ ID NO: 897705 - protein, 377 aa, Homo sapiens
MVFCLSSEEPRRPLRSDMVHFQASEVQQLLHNKFVVILGDSKYLEDVLEELTYGPAPDLVIINSCLWDLSRYGRCSMESYRENLERVFVRMDQVLPDSCLLVWNMAMPLGERITGGFLLPELQPLAGSLRRDVVEGNFYSATLAGDHCFDVLDLHFHFRHAVQHRHRDGVHWDQHAHRHLSHLLLTHVADAWGVELPKRGYPPDPWIEDWAEMNHPFQGSHRQTPDFGEHLALLPPPPSSLPPPMPFPYPLPQPSPPPLFPPLPQDTPFFPGQPFPPHEFFNYNPVEDFSMPPHLGCGPGVNFVPGPLPPPIPGPNPHGQHWGPVVHRGMPRYVPNSPYHVRRMGGPCRQRLRHSERLIHTYKLDRRPPAHSGTWPG

SEQ ID NO: 897706 - protein, 119 aa, Homo sapiens
GSVAEAKKPTAGGWGYSQLAGCGTGMLHREGQPYGLGLNGQCSIGFLVQPQSPTVTGAAWCSSPRAPSLGLWWRLLRAPLPLVLRHCSPSHLNCNTLLQNLCFHVNTLVPACTQRGHHG

SEQ ID NO: 897707 - protein, 119 aa, Homo sapiens; identical to SEQ ID NO: 897706

SEQ ID NO: 897708 - protein, 315 aa, Homo sapiens
MVFCLSSEEPRRPLRSDMVHFQASEVQQLLHNKFVVILGDSIQRAVYKDLVLLLQKDSLLTAAQLKAKGELSFEQDQLVAGGQLGELHNGTQYREVRQFCSGSGHHLVRFYFLTRVYSEYLEDVLEELTYGPAPDLVIINSCLWDLSRYGRCSMESYRENLERVFVRMDQVLPDSCLLVWNMAMPLGERITGGFLLPELQPLAGSLRRDVVEGNFYSATLAGDHCFDVLDLHFHFRHAVQHRHRDGVHWDQHAHRHLSHLLLTHVADAWGVELPKRGYPPGEPYHKWGGSDALGPSEDRAQKQNGTQPLKGSRGP

SEQ ID NO: 897709 - protein, 127 aa, Homo sapiens
RGEAAAAAITTVGSLTWLPPRDPSPYLGFAPAKWAQPWLLRPVAATSIALLSLRALGVAQGGTWVNGSGSCERRSPRRRGLRRRRGHRDARMESAGRWAVHRRLTWTHGLCGAGALQNRLADWGAGT

SEQ ID NO: 897710 - protein, 127 aa, Homo sapiens; identical to SEQ ID NO: 897709

SEQ ID NO: 897711 - protein, 428 aa, Homo sapiens
DPAPLGAPLWSDFSSTFRQETGHSLSPASCLPQRDLSIFPEANRPGLRGDHCACLSFLFWSRGRPGSLPKGGCALSGRRSGRAGAGRTPAPVVTGANAAGRLQPAGEQACRCWWRHGLLSVERGAAPPAAKRHGPLPGLGSPAAATQQVRGHLGGLHSEGCVQGPGALAPERLTAHSCPAESQEYLEDVLEELTYGPAPDLVIINSCLWDLSRYGRCSMESYRENLERVFVRMDQVLPDSCLLVWNMAMPLGERITGGFLLPELQPLAGSLRRDVVEGNFYSATLAGDHCFDVLDLHFHFRHAVQHRHRDGVHWDQHAHRHLSHLLLTHEFFNYNPVEDFSMPPHLGCGPGVNFVPGPLPPPIPGPNPHGQHWGPVVHRGMPRYVPNSPYHVRRMGGPCRQRLRHSERLIHTYKLDRRPPAHSGTWPG

SEQ ID NO: 897712 - protein, 102 aa, Homo sapiens
GSVAEAKKPTAGGWGYSQLAGCGTGMLHREGQPYGLGLNGQCSIGFLVQPQSPTVTGAAWCSSPRAPSLGLWWRLLRAPPTLPPLSSPVECWSHSLGKSGEK

SEQ ID NO: 897713 - protein, 301 aa, Homo sapiens
MESYRENLERVFVRMDQVLPDSCLLVWNMAMPLGERITGGFLLPELQPLAGSLRRDVVEGNFYSATLAGDHCFDVLDLHFHFRHAVQHRHRDGVHWDQHAHRHLSHLLLTHVADAWGVELPKRGYPPDPWIEDWAEMNHPFQGSHRQTPDFGEHLALLPPPPSSLPPPMPFPYPLPQPSPPPLFPPLPQDTPFFPGQPFPPHEFFNYNPVEDFSMPPHLGCGPGVNFVPGPLPPPIPGPNPHGQHWGPVVHRGMPRYVPNSPYHVRRMGGPCRQRLRHSERLIHTYKLDRRPPAHSGTWPG

SEQ ID NO: 897714 - protein, 415 aa, Homo sapiens
YARLLALTRVCWPLRASAGPYARLLALTRGELSFEQDQLVAGGQLGELHNGTQYREVRQFCSGSGHHLVRFYFLTRVYSEYLEDVLEELTYGPAPDLVIINSCLWDLSRYGRCSMESYRENLERVFVRMDQVLPDSCLLVWNMAMPLGERITGGFLLPELQPLAGSLRRDVVEGNFYSATLAGDHCFDVLDLHFHFRHAVQHRHRDGVHWDQHAHRHLSHLLLTHVADAWGVELPKRGYPPDPWIEDWAEMNHPFQGSHRQTPDFGEHLALLPPPPSSLPPPMPFPYPLPQPSPPPLFPPLPQDTPFFPGQPFPPHEFFNYNPVEDFSMPPHLGCGPGVNFVPGPLPPPIPGPNPHGQHWGPVVHRGMPRYVPNSPYHVRRMGGPCRQRLRHSERLIHTYKLDRRPPAHSGTWPG

SEQ ID NO: 897715 - protein, 363 aa, Homo sapiens
MVFCLSSEEPRRPLRSDMVHFQASEVQQLLHNKFVVILGDSIQRAVYKDLVLLLQKDSLLTAAQLKAKGELSFEQDQLVAGGQLGELHNGTQYREVRQFCSGSGHHLVRFYFLTRVYSEYLEDVLEELTYGPAPDLVIINSCLWDLSRYGRCSMESYRENLERVFVRMDQVLPDSCLLVWNMAMPLGERITGGFLLPELQPLAGSLRRDVVEGNFYSATLAGDHCFDVLDLHFHFRHAVQHRHRDGVHWDQHAHRHLSHLLLTHEFFNYNPVEDFSMPPHLGCGPGVNFVPGPLPPPIPGPNPHGQHWGPVVHRGMPRYVPNSPYHVRRMGGPCRQRLRHSERLIHTYKLDRRPPAHSGTWPG

SEQ ID NO: 897716 - protein, 344 aa, Homo sapiens
APEDPSGLCISYALCAHQFKETAPDLVIINSCLWDLSRYGRCSMESYRENLERVFVRMDQVLPDSCLLVWNMAMPLGERITGGFLLPELQPLAGSLRRDVVEGNFYSATLAGDHCFDVLDLHFHFRHAVQHRHRDGVHWDQHAHRHLSHLLLTHVADAWGVELPKRGYPPDPWIEDWAEMNHPFQGSHRQTPDFGEHLALLPPPPSSLPPPMPFPYPLPQPSPPPLFPPLPQDTPFFPGQPFPPHEFFNYNPVEDFSMPPHLGCGPGVNFVPGPLPPPIPGPNPHGQHWGPVVHRGMPRYVPNSPYHVRRMGGPCRQRLRHSERLIHTYKLDRRPPAHSGTWPG

SEQ ID NO: 897717 - protein, 286 aa, Homo sapiens
RWDSRLVDRTPCFQTLLRSVALRGCTFSLQLQPLAGSLRRDVVEGNFYSATLAGDHCFDVLDLHFHFRHAVQHRHRDGVHWDQHAHRHLSHLLLTHVADAWGVELPKRGYPPDPWIEDWAEMNHPFQGSHRQTPDFGEHLALLPPPPSSLPPPMPFPYPLPQPSPPPLFPPLPQDTPFFPGQPFPPHEFFNYNPVEDFSMPPHLGCGPGVNFVPGPLPPPIPGPNPHGQHWGPVVHRGMPRYVPNSPYHVRRMGGPCRQRLRHSERLIHTYKLDRRPPAHSGTWPG

SEQ ID NO: 897718 - protein, 119 aa, Homo sapiens; identical to SEQ ID NO: 897706

SEQ ID NO: 897719 - protein, 191 aa, Homo sapiens
GNELEVSIMMVVEALCELHCPEAIQGIAVWSSSIVGKHLLWINSVAQQAEGRFEKASVEYQEHLCAMTGVDCCISSFDKSVLTLASAGCKSASLKHCLNGESRKSVLSKPTDSSPEVINYLGNKACECYISTADWAAVQEWQNAIHDLKKSTSSTSLNLKADFNYIKSLSSFESWKIGQRPGKFEWSPEKF

SEQ ID NO: 897720 - protein, 212 aa, Homo sapiens
GNELEVSIMMVVEALCELHCPEAIQGIAVWSSSIVGKHLLWINSVAQQAEGRFEKASVEYQEHLCAMTGVDCCISSFDKSVLTLASAGCKSASLKHCLNGESRKSVLSKPTDSSPEVINYLGNKACECYISTADWAAVQEWQNAIHDLKKSTSSTSLNLKADFNYIKSLSSFESGKFVECTEQLELLPGENINLLAGGSKEKIDMKKLLRNM

SEQ ID NO: 897721 - protein, 212 aa, Homo sapiens; identical to SEQ ID NO: 897720

SEQ ID NO: 897722 - protein, 212 aa, Homo sapiens; identical to SEQ ID NO: 897720

SEQ ID NO: 897723 - protein, 212 aa, Homo sapiens; identical to SEQ ID NO: 897720

SEQ ID NO: 897724 - protein, 75 aa, Homo sapiens
FFETETHSVTQAGVQWHDFGSLQPPPPEFKQLSCLILRSTWDYRCVPPCPAHFCILSRDGISPCWPGWSQTPGLN

SEQ ID NO: 897725 - protein, 75 aa, Homo sapiens; identical to SEQ ID NO: 897724

SEQ ID NO: 897726 - protein, 121 aa, Homo sapiens
ETESHSVTQARVQWHDLGSLQPPPPRFKRFLSLSLLSSWDYRHMPPCPDNFCIFSRGGVSPYWPSWSRTPDMIRTPRPPNVLGLPPDSFSQSFMFWSYDIVFCCHMTDLFLLNVRYLLKNV

SEQ ID NO: 897727 - protein, 298 aa, Homo sapiens
MVKLSIVLTPQFLSHDQGQLTKELQQHVKSVTCPCEYLRKVINTLADHHHRGTDFGGSPWLHVIIAFPTSYKVVITLWIVYLWVSLLKTIFWSRNGHDGSTDVQQRAWRSNRRRQEGLRSICMHTKKRVSSFRGNKIVLKDVITLRRHVETKVRAKIRKRKVTTKINHHDKINGKRKTARKQKMFQRAQELRRRAEDYHKCKIPPSARKALCNWVRMAAAEHRHSSGLPYWPYLTAETLKNRMGHQPPPPTQQHSITDNSLSLKTPPECLLTPLPPSADDNLKTPPECVLTPLPPSAD

SEQ ID NO: 897728 - protein, 234 aa, Homo sapiens
CTRGSRTRVSLPSGQLTLWVSLLKTIFWSRNGHDGSTDVQQRAWRSNRRRQEGLRSICMHTKKRVSSFRGNKIVLKDVITLRRHVETKVRAKIRKRKVTTKINHHDKINGKRKTARKQKMFQRAQELRRRAEDYHKCKIPPSARKALCNWVRMAAAEHRHSSGLPYWPYLTAETLKNRMGHQPPPPTQQHSITDNSLSLKTPPECLLTPLPPSADDNLKTPPECVLTPLPPSAD

SEQ ID NO: 897729 - protein, 212 aa, Homo sapiens; identical to SEQ ID NO: 897720

SEQ ID NO: 897730 - protein, 212 aa, Homo sapiens; identical to SEQ ID NO: 897720

SEQ ID NO: 897731 - protein, 75 aa, Homo sapiens; identical to SEQ ID NO: 897724

SEQ ID NO: 897732 - protein, 212 aa, Homo sapiens; identical to SEQ ID NO: 897720

SEQ ID NO: 897733 - protein, 212 aa, Homo sapiens; identical to SEQ ID NO: 897720

SEQ ID NO: 897734 - protein, 212 aa, Homo sapiens; identical to SEQ ID NO: 897720

SEQ ID NO: 897735 - protein, 72 aa, Homo sapiens
FEKASVEYQEHLCAMTGVDCCISSFDKSVLTLASAGCKSASLKHCLNGERSAFLNKAKVIVIYFVLMILSCF

SEQ ID NO: 897736 - protein, 117 aa, Homo sapiens
MKSSDIDQDLFTDSYCKVCSAQLISESQRVAHYESRKHASKVRLYYMLHPRDGGCPAKRLRSENGSDADMVDKNKCCTLCNMSFTSAVVADSHYQGKIHAKRLKLLLGEKTPLKTTV

SEQ ID NO: 897737 - protein, 229 aa, Homo sapiens
MKSSDIDQDLFTDSYCKVCSAQLISESQRVAHYESRKHASKVRLYYMLHPRDGGCPAKRLRSENGSDADMVDKNKCCTLCNMSFTSAVVADSHYQGKIHAKRLKLLLGEKTPLKTTATPLSPLKPPRMDTAPVVASPYQRRDSDRYCGLCAAWFNNPLMAQQHYDGKKHKKNAARVALLEQLGTTLDMGELRGLRRNYRCTICSVSLNSIEQYHAHLKGSKHQTNLKNK

SEQ ID NO: 897738 - protein, 102 aa, Homo sapiens
MQAKSDCITCFTPGMEGVLPRGSGQKMEVMPTWWIRTSAAHSATCHSLEQGPLRRDQVCQFLCLQRDEAPRATPYSTRGKGVGWEESILLFWKAHSRPTNLL

SEQ ID NO: 897739 - protein, 229 aa, Homo sapiens; identical to SEQ ID NO: 897737

SEQ ID NO: 897740 - protein, 206 aa, Homo sapiens
MKSSDIDQDLFTDSYCKVCSAQLISESQRVAHYESRKHASKVRLYYMLHPRDGGCPAKRLRSENGSDADMVDKNKCCTLCNMSFTSAVVADSHYQGKIHAKRLKLLLGEKTPLKTTATPLSPLKPPRMDTAPVVASPYQRRDSDRYCGLCAAWFNNPLMPCMDQLGSGWGCPVSLTTIGNPSSCVSNFWTPTVFHQELRWQQLSEQ

SEQ ID NO: 897741 - protein, 297 aa, Homo sapiens
MYAQPVTNTKEVKWQKVLYERQPFPDNYVDRRFLEELRKNIHARKYQYWAVVFESSVVIQQLCSVCVFVVIWWYMDEGLLAPHWLLGTGLASSLIGYVLFDLIDGGEGRKKSGQTRWADLKSALVFITFTYGFSPVLKTLTESVSTDTIYAMSVFMLLGHLIFFDYGANAAIVSSTLSLNMAIFASVCLASRLPRSLHAFIMVTFAIQIFALWPMLQKKLKACTPRSYVGVTLLFAFSAVGGLLSISAVGAVLFALLLMSISCLCPFYLIRLQLFKENIHGPWDEAEIKEDLSRFLS

SEQ ID NO: 897742 - protein, 40 aa, Homo sapiens
MINLCICFLKGEDGEKNRKLLADIRGHKMSSSFVQMTFSC

SEQ ID NO: 897743 - protein, 297 aa, Homo sapiens; identical to SEQ ID NO: 897741

SEQ ID NO: 897744 - protein, 297 aa, Homo sapiens; identical to SEQ ID NO: 897741

SEQ ID NO: 897745 - protein, 283 aa, Homo sapiens
  misc_feature (277)..(278): Xaa can be any naturally occurring amino acid
  misc_feature (281)..(281): Xaa can be any naturally occurring amino acid
MYAQPVTNTKEVKWQKVLYERQPFPDNYVDRRFLEELRKNIHARKYQYWAVVFESSVVIQQLCSVCVFVVIWWYMDEGLLAPHWLLGTGLASSLIGYVLFDLIDGGEGRKKSGQTRWADLKSALVFITFTYGFSPVLKTLTESVSTDTIYAMSVFMLLGHLIFFDYGANAAIVSSTLSLNMAIFASVCLASRLPRSLHAFIMVTFAIQIFALWPMLQKKLKACTPRSYVGVTLLFAFSAVGGLLSISAVGAAHALGAAMRWERPCVGSGGSSRVGLXXRGXQP

SEQ ID NO: 897746 - protein, 297 aa, Homo sapiens; identical to SEQ ID NO: 897741

SEQ ID NO: 897747 - protein, 297 aa, Homo sapiens; identical to SEQ ID NO: 897741

SEQ ID NO: 897748 - protein, 210 aa, Homo sapiens
MYAQPVTNTKEVKWQKVLYERQPFPDNYVDRRFLEELRKNIHARKYQYWAVVFESSVVIQQLCSVCVFVVIWWYMDEGLLAPHWLLGTGLASSLIGYVLFDLIDGGEGRKKSGQTRWADLKSALVFITFTYGFSPVLKTLTESVSTDTIYAMSVFMLLGHLIFFDYGANAAIVSSTLSFHSNSGQFIIALTEVQVVLVLYERFEIETSLG

SEQ ID NO: 897749 - protein, 673 aa, Homo sapiens
MADPAAGPPPSEGEESTVRFARKGALRQKNVHEVKNHKFTARFFKQPTFCSHCTDFIWGFGKQGFQCQVCCFVVHKRCHEFVTFSCPGADKGPASDDPRSKHKFKIHTYSSPTFCDHCGSLLYGLIHQGMKCDTCMMNVHKRCVMNVPSLCGTDHTERRGRIYIQAHIDRDVLIVLVRDAKNLVPMDPNGLSDPYVKLKLIPDPKSESKQKTKTIKCSLNPEWNETFRFQLKESDKDRRLSVEIWDWDLTSRNDFMGSLSFGISELQKASVDGWFKLLSQEEGEYFNVPVPPEGSEANEELRQKFERAKISQGTKVPEEKTTNTVSKFDNNGNRDRMKLTDFNFLMVLGKGSFGKVMLSERKGTDELYAVKILKKDVVIQDDDVECTMVEKRVLALPGKPPFLTQLHSCFQTMDRLYFVMEYVNGGDLMYHIQQVGRFKEPHAVFYAAEIAIGLFFLQSKGIIYRDLKLDNVMLDSEGHIKIADFGMCKENIWDGVTTKTFCGTPDYIAPEIIAYQPYGKSVDWWAFGVLLYEMLAGQAPFEGEDEDELFQSIMEHNVAYPKSMSKEAVAICKGLMTKHPGKRLGCGPEGERDIKEHAFFRYIDWEKLERKEIQPPYKPKACGRNAENFDRFFTRHPPVLTPPDQEVIRNIDQSEFEGFSFVNSEFLKPEVKS

SEQ ID NO: 897750 - protein, 673 aa, Homo sapiens; identical to SEQ ID NO: 897749

SEQ ID NO: 897751 - protein, 632 aa, Homo sapiens
HRFWAQGSSDGPNRYNDLWGPSSVLGEFSSASRCRMNRWHAPLTLAPSVVSLGFQDPRSKHKFKIHTYSSPTFCDHCGSLLYGLIHQGMKCDTCMMNVHKRCVMNVPSLCGTDHTERRGRIYIQAHIDRDVLIVLVRDAKNLVPMDPNGLSDPYVKLKLIPDPKSESKQKTKTIKCSLNPEWNETFRFQLKESDKDRRLSVEIWDWDLTSRNDFMGSLSFGISELQKASVDGWFKLLSQEEGEYFNVPVPPEGSEANEELRQKFERAKISQGTKVPEEKTTNTVSKFDNNGNRDRMKLTDFNFLMVLGKGSFGKVMLSERKGTDELYAVKILKKDVVIQDDDVECTMVEKRVLALPGKPPFLTQLHSCFQTMDRLYFVMEYVNGGDLMYHIQQVGRFKEPHAVFYAAEIAIGLFFLQSKGIIYRDLKLDNVMLDSEGHIKIADFGMCKENIWDGVTTKTFCGTPDYIAPEIIAYQPYGKSVDWWAFGVLLYEMLAGQAPFEGEDEDELFQSIMEHNVAYPKSMSKEAVAICKGLMTKHPGKRLGCGPEGERDIKEHAFFRYIDWEKLERKEIQPPYKPKACGRNAENFDRFFTRHPPVLTPPDQEVIRNIDQSEFEGFSFVNSEFLKPEVKS

SEQ ID NO: 897752 - protein, 683 aa, Homo sapiens
MADPAAGPPPSEGEESTVRFARKGALRQKNVHEVKNHKFTARFFKQPTFCSHCTDFIWGFGKQGFQCQVCCFVVHKRCHEFVTFSCPGADKGPASDDPRSKHKFKIHTYSSPTFCDHCGSLLYGLIHQGMKCDTCMMNVHKRCVMNVPSLCGTDHTERRGRIYIQAHIDRDVLIVLVRDAKNLVPMDPNGLSDPYVKLKLIPDPKSESKQKTKTIKCSLNPEWNETFRFQLKESDKDRRLSVEIWDWDLTSRNDFMGSLSFGISELQKASVDGWFKLLSQEEGEYFNVPVPPEGSEANEELRQKFERAKISQGTKVPEEKTTNTVSKFDNNGNRDRMKLTDFNFLMVLGKGSFGKVMLSERKGTDELYAVKILKKDVVIQDDDVECTMVEKRVLALPGKPPFLTQLHSCFQTMDRLYFVMEYVNGGDLMYHIQQVGRFKEPHAVFYAAEIAIGLFFLQSKGIIYRDLKLDNVMLDSEGHIKIADFGMCKENIWDGVTTKTFCGTPDYIAPEIIAYQPYGKSVDWWAFGVLLYEMLAGQAPFEGEDEDELFQSIMEHNVAYPKSMSKEAVAICKGLMTKHPGKRLGCGPEGERDIKEHAFFRYIDWEKLERKEIQPPYKPKAVSSPFSLTAGYSHTRYSCLCLMFSKCSLRGRRQCVYWNMGVCIHTYAQNHWLLRWTFSIGPA

SEQ ID NO: 897753 - protein, 671 aa, Homo sapiens
MADPAAGPPPSEGEESTVRFARKGALRQKNVHEVKNHKFTARFFKQPTFCSHCTDFIWGFGKQGFQCQVCCFVVHKRCHEFVTFSCPGADKGPASDDPRSKHKFKIHTYSSPTFCDHCGSLLYGLIHQGMKCDTCMMNVHKRCVMNVPSLCGTDHTERRGRIYIQAHIDRDVLIVLVRDAKNLVPMDPNGLSDPYVKLKLIPDPKSESKQKTKTIKCSLNPEWNETFRFQLKESDKDRRLSVEIWDWDLTSRNDFMGSLSFGISELQKASVDGWFKLLSQEEGEYFNVPVPPEGSEANEELRQKFERAKISQGTKVPEEKTTNTVSKFDNNGNRDRMKLTDFNFLMVLGKGSFGKVMLSERKGTDELYAVKILKKDVVIQDDDVECTMVEKRVLALPGKPPFLTQLHSCFQTMDRLYFVMEYVNGGDLMYHIQQVGRFKEPHAVFYAAEIAIGLFFLQSKGIIYRDLKLDNVMLDSEGHIKIADFGMCKENIWDGVTTKTFCGTPDYIAPEIIAYQPYGKSVDWWAFGVLLYEMLAGQAPFEGEDEDELFQSIMEHNVAYPKSMSKEAVAICKGLMTKHPGKRLGCGPEGERDIKEHAFFRYIDWEKLERKEIQPPYKPKARDKRDTSNFDKEFTRQPVELTPTDKLFIMNLDQNEFAGFSYTNPEFVINV

SEQ ID NO: 897754 - protein, 326 aa, Homo sapiens
GKGAFGKGRALRNTLGGDELYAVKILKKDVVIQDDDVECTMVEKRVLALPGKPPFLTQLHSCFQTMDRLYFVMEYVNGGDLMYHIQQVGRFKEPHAVFYAAEIAIGLFFLQSKGIIYRDLKLDNVMLDSEGHIKIADFGMCKENIWDGVTTKTFCGTPDYIAPEIIAYQPYGKSVDWWAFGVLLYEMLAGQAPFEGEDEDELFQSIMEHNVAYPKSMSKEAVAICKGLMTKHPGKRLGCGPEGERDIKEHAFFRYIDWEKLERKEIQPPYKPKACGRNAENFDRFFTRHPPVLTPPDQEVIRNIDQSEFEGFSFVNSEFLKPEVKS

SEQ ID NO: 897755 - protein, 283 aa, Homo sapiens
MADPAAGPPPSEGEESTVRFARKGALRQKNVHEVKNHKFTARFFKQPTFCSHCTDFIWGFGKQGFQCQVCCFVVHKRCHEFVTFSCPGADKGPASDDPRSKHKFKIHTYSSPTFCDHCGSLLYGLIHQGMKCDTCMMNVHKRCVMNVPSLCGTDHTERRGRIYIQAHIDRDVLIVLVRDAKNLVPMDPNGLSDPYVKLKLIPDPKSESKQKTKTIKCSLNPEWNETFRFQLKESDKDRRLSVEIWDWDLTSRNDFMGSLSFGISELQKASVDGWNPWKSLLCG

SEQ ID NO: 897756 - protein, 116 aa, Homo sapiens
RCRTGPRSSWKSSSATTTRVLEPATSTHCSRLSRRSRTCGVTSPTWRPMGWCPACKPRPPHGGHSHTATPPDSGTRPTSLLAAPLGSRPPADSAPKAPPTLTTPLGGAALCSSPPD

SEQ ID NO: 897757 - protein, 101 aa, Homo sapiens
  misc_feature (64)..(64): Xaa can be any naturally occurring amino acid
VELVVKNPLCPLGQTVQSELFRSRLDSYVRSLPFFSAGLAEATYLKSQENSCLPGALPNLCQLXGPHCKPPHPHPLSLSLSLSKKKKMGVQKKQSQKIYEG

SEQ ID NO: 897758 - protein, 750 aa, Homo sapiens
VLCGERYNDLEKHICSVKHDDVYFDHFHPCAALTTDIIEKYGFPPDLTLTPQESIQLYDTMAQVWETWPRAQELCPEEFILFKNKIVIKKLDARKYEENLKAELTNWIKNGQVKKVKRVLKNLSPDSLSSSKDMVKMFPLLVEKLRQMDKLPAIFFLFKNDDVGKRAGSVCTFLEKTETKSHPHTECHSYVFAIDEVLEKVRKTQKRITKKNPKKAEKLERKKVYRAEYINFLENLKILEISEDCTYADVKALHTEITRNKDSTLDRVLPRVRFTRHGKELKALAQRGIGYHHSSMYFKEKEFVEILFVKGLIRVVTATETLALGIHMPCKSVVFAQDSVYLDALNYRQMSGRAGRRGQDLLGNVYFFDIPLPKIKRLLASSVPELRGQFPLSITLVLRLMLLASKGDDPEDAKAKVLSVLKHSLLSFKRRRAMETLKLYFLFSLQLLIKEDYLNKKGNPKKFAGLASYLHGHEPSNLVFVNFLKRGLFHNLCKPAWKGSQQFSQDVMEKLVLVLANLFGRKYIPAKFQNANLSFSQSKVILAELPEDFKAALYEYNLAVMKDFASFLLIASKSVNMKKEHQLPLSRIKFTGKECEDSQLVSHLMSCKKGRVAISPFVCLSGNTDNDLLRPETINQVILRTVGVSGTQAPLLWPWKLDNRGRRMPLNAYVLNFYKHNCLTRLDQKNGMRVGQLLKCLKDFAFNIQAISDSLSELCENKRDNVVLAFKQLSQTFYEKLQEMQIQMSQNHLE

SEQ ID NO: 897759 - protein, 216 aa, Homo sapiens
VLCGERYNDLEKHICSVKHDDVYFDHFHPCAALTTDIIEKYGFPPDLTLTPQESIQLYDTMAQVWETWPRAQELCPEEFILFKNKIVIKKLDARKYEENLKAELTNWIKNGQVKKVKRVLKNLSPDSLSSSKDMVKMFPLLVEKLRQMDKLPAIFFLFKNDDVGKRAGSVCTFLEKTETKSHPHTECHSYVFAIDEVLEKVRKTQKRITKKKPKEG

SEQ ID NO: 897760 - protein, 179 aa, Homo sapiens
KVRLVRGWFKSAEGSVWDHIEVSDDEDETHPNIDTASLFRWRHQARVERMEQFQKEKEELDRGCRECKRKVAECQRKLKELEVAEGGKAELERLQAEAQQLRKEERSWEQKLEEMRKKEKSMPWNVDTLSKDGFSKSMVNTKPEKTEEDSEEVREQKHKTFVEQIRETDQALWHASPLG

SEQ ID NO: 897761 - protein, 209 aa, Homo sapiens
MLRRWDDSQKYLSDNVHLVCEETANYLVIWCIDLEVEEKCALMEQVAHQTIVMQFILELAKSLKVDPRACFRQFFTKIKTADRQYMEGFNDELEAFKERVRGRAKLRIEKAMKEYEEEERKKRLGPGGLDPVEVYESLPEELQKCFDVKDVQMLQDAISKMDPTDAKYHMQRCIDSGLWVPNSKASEAKEGEEAGPGDPLLEGCSQDGR

SEQ ID NO: 897762 - protein, 209 aa, Homo sapiens; identical to SEQ ID NO: 897761

SEQ ID NO: 897763 - protein, 169 aa, Homo sapiens
MVDYSVWDHIEVSDDEDETHPNIDTASLFRWRHQARVERMEQFQKEKEELDRGCRECKRKVAECQRKLKELEVAEGGKAELERLQAEAQQLRKEERSWEQKLEEMRKKEKSMPWNVDTLSKDGFSKSMVNTKPEKTEEDSEEVREQKHKTFVEQIRETDQALWHASPLG

SEQ ID NO: 897764 - protein, 169 aa, Homo sapiens; identical to SEQ ID NO: 897763

SEQ ID NO: 897765 - protein, 209 aa, Homo sapiens; identical to SEQ ID NO: 897761

SEQ ID NO: 897766 - protein, 209 aa, Homo sapiens; identical to SEQ ID NO: 897761

SEQ ID NO: 897767 - protein, 173 aa, Homo sapiens
MVDYSVWDHIEVSDDEDETHPNIDTASLFRWRHQARVERMEQFQKEKEELDRGCRECKRKVAECQRKLKELEVAEGGKAELERLQAEAQQLRKEERSWEQKLEEMRKKEKSMPWNVDTLSKDGFSKSMVNTKPEKTEEDSEEVRVPSQGAGSRHWALFSLFVCCLCLLFGKQQ

SEQ ID NO: 897768 - protein, 118 aa, Homo sapiens
MVDYSVWDHIEVSDDEDETHPNIDTASLFRWRHQARVERMEQFQKEKEELDRGCRECKRKVAECQRKLKELEVAEGGKAELERLQAEAQQLRKERRQVLGTHYWKAVPKTGDEKDVSV

SEQ ID NO: 897769 - protein, 169 aa, Homo sapiens; identical to SEQ ID NO: 897763

SEQ ID NO: 897770 - protein, 209 aa, Homo sapiens; identical to SEQ ID NO: 897761

SEQ ID NO: 897771 - protein, 209 aa, Homo sapiens; identical to SEQ ID NO: 897761

SEQ ID NO: 897772 - protein, 169 aa, Homo sapiens; identical to SEQ ID NO: 897763

SEQ ID NO: 897773 - protein, 209 aa, Homo sapiens; identical to SEQ ID NO: 897761

SEQ ID NO: 897774 - protein, 209 aa, Homo sapiens; identical to SEQ ID NO: 897761

SEQ ID NO: 897775 - protein, 141 aa, Homo sapiens
ALRSLAPAHSPSHPTTEHGKYQAREDGGGLRGGEGAETQDLRGTNTRNRSSTLVSGACGLWGARSRQALCLQGPPAPCQHLPTGMLRRWDDSQKYLSDNVHLVCEETANYLVIWCIDLEVEEVSGAFPGTVKRRCHEAATW

SEQ ID NO: 897776 - protein, 349 aa, Homo sapiens
MEDPQSKEPAGEAVAPALLESPRPEGGEEPPRPSPEETQQCKFDGQETKGSKFITSSASDFSDPVYKEIAITNGCINRMSKEELRAKLSEFKLETRGVKDVLKKRLKNYYKKQKLMLKESNFADSYYDYICIIDFEATCEEGNPPEFVHEIIEFPVVLLNTHTLEIEDTFQQYVRPEINTQLSDFCISLTGITQDQVDRADTFPQVLKKVIDWMKLKELGTKYKYSLLTDGSWDMSKFLNIQCQLSRLKYPPFAKKWINIRKSYGNFYKVPRSQTKLTIMLEKLGMDYDGRPHCGLDDSKNIARIAVRMLQDGCELRINEKMHAGQLMSVSSSLPIEGTPPPQMPHFRK

SEQ ID NO: 897777 - protein, 82 aa, Homo sapiens
MYLSVFKAIKIHWAFCHHVKMDTAWYALITFPFLILTVIAVFALAVLFYTQKSGKVLNSILPPKQNKIHGLGYNSEVFSTYF

SEQ ID NO: 897778 - protein, 104 aa, Homo sapiens
  misc_feature (4)..(4): Xaa can be any naturally occurring amino acid
KRVXIGKILPSEKAVVTEPAKGEEAFQMSEVDEESGLKDSEPERKRKKTEDSSSGKSVASDVPEGEKAMTNHCKSTRHKQNTEKFMAKQRKEKEQNEAEERSSR

SEQ ID NO: 897779 - protein, 349 aa, Homo sapiens; identical to SEQ ID NO: 897776

SEQ ID NO: 897780 - protein, 234 aa, Homo sapiens
MLKESNFADSYYDYICIIDFEATCEEGNPPEFVHEIIEFPVVLLNTHTLEIEDTFQQYVRPEINTQLSDFCISLTGITQDQVDRADTFPQVLKKVIDWMKLKELGTKYKYSLLTDGSWDMSKFLNIQCQLSRLKYPPFAKKWINIRKSYGNFYKVPRSQTKLTIMLEKLGMDYDGRPHCGLDDSKNIARIAVRMLQDGCELRINEKMHAGQLMSVSSSLPIEGTPPPQMPHFRK

SEQ ID NO: 897781 - protein, 304 aa, Homo sapiens
MEDPQSKEPAGEAVAPALLESPRPEGGEEPPRPSPEETQQCKFDGQETKGSKFITSSASDFSDPVYKEIAITNGCINRMSKEELRAKLSEFKLETRGVKDVLKKRLKNYYKKQKLMLKESNFADSYYDYICIIDFEATCEEGNPPEFVHEIIEFPVVLLNTHTLEIEDTFQQYVRPEINTQLSDFCISLTGITQDQVDRADTFPQVLKKVIDWMKLKELGTKYKYSLLTDGSWDMSKFLNIQCQLSRLKYPPFAKKWINIRKSYGNFYKRKRKGPGVATGKPQLVWEGNLTCDASGRLCKLLGD

SEQ ID NO: 897782 - protein, 125 aa, Homo sapiens
  misc_feature (4)..(4): Xaa can be any naturally occurring amino acid
KRVXIGKILPSEKAVVTEPAKGEEAFQMSEVDEESGLKDSEPERKRKKTEDSSSGKSVASDVPEELDFLVPKAGFFCPICSLFYSGEKAMTNHCKSTRHKQNTEKFMAKQRKEKEQNEAEERSSR

SEQ ID NO: 897783 - protein, 154 aa, Homo sapiens
MEDPQSKEPAGEAVAPALLESPRPEGGEEPPRPSPEETQQCKFDGQETKEIAITNGCINRMSKEELRAKLSEFKLETRGVKDVLKKRLKNYYKKQKLMLKESNFADSYYDYICIIDFEATCEEGNPPEFVHEIIEFPVVLLNTHTLEIVSEFLY

SEQ ID NO: 897784 - protein, 298 aa, Homo sapiens
MEDPQSKEPAGEAVAPALLESPRPEGGEEPPRPSPEETQQCKFDGQETKGSKFITSSASDFSDPVYKEIAITNGCINRMSKEELRAKLSEFKLETRGVKDVLKKRLKNYYKKQKLMLKESNFADSYYDYICIIDFEATCEEGNPPEFVHEIIEFPVVLLNTHTLEIEDTFQQYVRPEINTQLSDFCISLTGITQDQVDRADTFPQVLKKVIDWMKLKELGTKYKYSLLTDGSWDMSKFLNIQCQLSRLKYPPFAKKWINIRKSYGNFYKGEHPHPRDACSPGGSRGRESCGCGRYAFV

SEQ ID NO: 897785 - protein, 111 aa, Homo sapiens
AGEAVAPALLESPRPEGGEEPPRPSPEVRSRPAPGCWRQLPRPQSALGTPFFSGVPQKVQLCALGPQPLPRCPAPWLYPRVGVLEPPQGRITLWEGGNRQDQFCLQWVNRF

SEQ ID NO: 897786 - protein, 957 aa, Homo sapiens
MAHYITFLCMVLVLLLQNSVLAEDGEVRSSCRTAPTDLVFILDGSYSVGPENFEIVKKWLVNITKNFDIGPKFIQVGVVQYSDYPVLEIPLGSYDSGEHLTAAVESILYLGGNTKTGKAIQFALDYLFAKSSRFLTKIAVVLTDGKSQDDVKDAAQAARDSKITLFAIGVGSETEDAELRAIANKPSSTYVFYVEDYIAISKIREVMKQKLCEESVCPTRIPVAARDERGFDILLGLDVNKKVKKRIQLSPKKIKGYEVTSKVDLSELTSNVFPEGLPPSYVFVSTQRFKVKKIWDLWRILTIDGRPQIAVTLNGVDKILLFTTTSVINGSQVVTFANPQVKTLFDEGWHQIRLLVTEQDVTLYIDDQQIENKPLHPVLGILINGQTQIGKYSGKEETVQFDVQKLRIYCDPEQNNRETACEIPGFNGECLNGPSDVGSTPAPCICPPGKPGLQGPKGDPGLPGNPGYPGQPGQDGKPGYQGIAGTPGVPGSPGIQGARGLPGYKGEPGRDGDKGDRGLPGFPGLHGMPGSKGEMGAKGDKGSPGFYGKKGAKGEKGNAGFPGLPGPAGEPGRHGKDGLMGSPGFKGEAGSPGAPGQDGTRGEPGIPGFPGNRGLMGQKGEIGPPGQQGKKGAPGMPGLMGSNGSPGQPGTPGSKGSKGEPGIQGMPGASGLKGEPGATGSPGEPGYMGLPGIQGKKGDKGNQGEKGIQGQKGENGRQGIPGQQGIQGHHGAKGERGEKGEPGVRGAIGSKGESGVDGLMGPAGPKGQPGDPGPQGPPGLDGKPGREFSEQFIRQVCTDVIRAQLPVLLQSGRIRNCDHCLSQHGSPGIPGPPGPIGPEGPRGLPGLPGRDGVPGLVGVPGRPGVRGLKGLPGRNGEKGSQGFGYPGEQGPPGPPGPEGPPGISKEGPPGDPGLPGKDGDHGKPGIQGQPGPPGICDPSLCFSVIARRDPFRKGPNY

SEQ ID NO: 897787 - protein, 342 aa, Homo sapiens [sequence omitted]

SEQ ID NO: 897788 - protein, 840 aa, Homo sapiens
MAHYITFLCMVLVLLLQNSVLAEDGEVRSSCRTAPTDLVFILDGSYSVGPENFEIVKKWLVNITKNFDIGPKFIQVGVVQYSDYPVLEIPLGSYDSGEHLTAAVESILYLGGNTKTGKAIQFALDYLFAKSSRFLTKIAVVLTDGKSQDDVKDAAQAARDSKITLFAIGVGSETEDAELRAIANKPSSTYVFYVEDYIAISKIREVMKQKLCEESVCPTRIPVAARDERGFDILLGLDVNKKVKKRIQLSPKKIKGYEVTSKVDLSELTSNVFPEGLPPSYVFVSTQRFKVKKIWDLWRILTIDGRPQIAVTLNGVDKILLFTTTSVINGSQVVTFANPQVKTLFDEGWHQIRLLVTEQDVTLYIDDQQIENKPLHPVLGILINGQTQIGKYSGKEETVQFDVQKLRIYCDPEQNNRETACEIPGFNGECLNGPSDVGSTPAPCICPPGKPGLQGPKGDPGLPGNPGYPGQPGQDGKPGYQGIAGTPGVPGSPGIQGARGLPGYKGEPGRDGDKGDRGLPGFPGLHGMPGSKGEMGAKGDKGSPGFYGKKGAKGEKGNAGFPGLPGPAGEPGRHGKDGLMGSPGFKGEAGSPGAPGQDGTRGEPGIPGFPGNRGLMGQKGEIGPPGQQGKKGAPGMPGLMGSNGSPGQPGTPGSKGSKGEPGIQGMPGASGLKGEPGATGSPGEPGYMGLPGIQGKKGDKGNQGEKGIQGQKGENGRQGIPGQQGIQGHHGAKGERGEKGEPGVRGAIGSKGESGVDGLMGPAGPKGQPGDPGPQGPPGLDGKPGREFSEQFIRQVCTDVIRDHGKPGIQGQPGPPGICDPSLCFSVIARRDPFRKGPNY

SEQ ID NO: 897789 - protein, 957 aa, Homo sapiens; identical to SEQ ID NO: 897786

SEQ ID NO: 897790 - protein, 701 aa, Homo sapiens
MAHYITFLCMVLVLLLQNSVLAEDGEVRSSCRTAPTDLVFILDGSYSVGPENFEIVKKWLVNITKNFDIGPKFIQVGVVQYSDYPVLEIPLGSYDSGEHLTAAVESILYLGGNTKTGKAIQFALDYLFAKSSRFLTKIAVVLTDGKSQDDVKDAAQAARDSKITLFAIGVGSETEDAELRAIANKPSSTYVFYVEDYIAISKIREVMKQKLCEESVCPTRIPVAARDERGFDILLGLDVNKKVKKRIQLSPKKIKGYEVTSKVDLSELTSNVFPEGLPPSYVFVSTQRFKVKKIWDLWRILTIDGRPQIAVTLNGVDKILLFTTTSVINGSQVVTFANPQVKTLFDEGWHQIRLLVTEQDVTLYIDDQQIENKPLHPVLGILINGQTQIGKYSGKEETVQFDVQKLRIYCDPEQNNRETACEIPGFNGECLNGPSDVGSTPAPCICPPGKPGLQGPKGDPGLPGNPGYPGQPGQDGKPGYQGIAGTPGVPGSPGIQGARGLPGYKGEPGRDGDKGDRGLPGFPGLHGMPGSKGEMGAKGDKGSPGFYGKKGAKGEKGNAGFPGLPGPAGEPGRHGKDGLMGSPGFKGEAGSPGAPGQDGTRGEPGIPGFPGNRGLMGQKGEIGPPGQQGKKGAPGMPGLMGSNGSPGQPGTPGSKGSKGEPGIQGMPGASGLKGEPGATGSPGEPGYMGLPGIQGKKVCIG

SEQ ID NO: 897791 - protein, 957 aa, Homo sapiens; identical to SEQ ID NO: 897786

SEQ ID NO: 897792 - protein, 355 aa, Homo sapiens
MEGIPGFPGNRGLMGQKGEIGPPGQQGKKGAPGMPGLMGSNGSPGQPGTPGSKGSKGEPGIQGMPGASGLKGEPGATGSPGEPGYMGLPGIQGKKGDKGNQGEKGIQGQKGENGRQGIPGQQGIQGHHGAKGERGEKGEPGVRGAIGSKGESGVDGLMGPAGPKGQPGDPGPQGPPGLDGKPGREFSEQFIRQVCTDVIRAQLPVLLQSGRIRNCDHCLSQHGSPGIPGPPGPIGPEGPRGLPGLPGRDGVPGLVGVPGRPGVRGLKGLPGRNGEKGSQGFGYPGEQGPPGPPGPEGPPGISKEGPPGDPGLPGKDGDHGKPGIQGQPGPPGICDPSLCFSVIARRDPFRKGPNY

SEQ ID NO: 897793 - protein, 540 aa, Homo sapiens
MAHYITFLCMVLVLLLQNSVLAEDGEVRSSCRTAPTDLVFILDGSYSVGPENFEIVKKWLVNITKNFDIGPKFIQVGVVQYSDYPVLEIPLGSYDSGEHLTAAVESILYLGGNTKTGKAIQFALDYLFAKSSRFLTKIAVVLTDGKSQDDVKDAAQAARDSKITLFAIGVGSETEDAELRAIANKPSSTYVFYVEDYIAISKIREVMKQKLCEESVCPTRIPVAARDERGFDILLGLDVNKKVKKRIQLSPKKIKGYEVTSKVDLSELTSNVFPEGLPPSYVFVSTQRFKVKKIWDLWRILTIDGRPQIAVTLNGVDKILLFTTTSVINGSQVVTFANPQVKTLFDEGWHQIRLLVTEQDVTLYIDDQQIENKPLHPVLGILINGQTQIGKYSGKEETVQFDVQKLRIYCDPEQNNRETACEIPGFNGECLNGPSDVGSTPAPCICPPGKPGLQGPKGYQGIAGTPGVPGSPGIQGARGLPGYKGEPGRDGDKGDRGLPGFPGLHGMPGSKGEMGAKGDKGSPGFYGKKGSIDHTTKYSY

SEQ ID NO: 897794 - protein, 669 aa, Homo sapiens
TTTPAPEPAAVPAAEELCLPLHLTRARRPAACAPAQPASPPGARPVAALHARGEPSALAGTEGPAAVMLSAIYTVLAGLLFLPLLVNLCCPYFFQDIGYFLKVAAVGRRVRSYGQRRPARTILRAFLEKARQTPHKPFLLFRDETLTYAQVDRRSNQVARALHDHLGLRQGDCVALLMGNEPAYVWLWLGLVKLGCAMACLNYNIRAKSLLHCFQCCGAKVLLVSPELQAAVEEILPSLKKDDVSIYYVSRTSNTDGIDSFLDKVDEVSTEPIPESWRSEVTFSTPALYIYTSGTTGLPKAAMITHQRIWYGTGLTFVSGLKADDVIYITLPFYHSAALLIGIHGCIVAGATLALRTKFSASQFWDDCRKYNVTVIQYIGELLRYLCNSPQKPNDRDHKVRLALGNGLRGDVWRQFVKRFGDICIYEFYAATEGNIGFMNYARKVGAVGRVNYLQKKIITYDLIKYDVEKDEPVRDENGYCVRVPKGEVGLLVCKITQLTPFNGYAGAKAQTEKKKLRDVFKKGDLYFNSGDLLMVDHENFIYFHDRVGDTFRWKGENVATTEVADTVGLVDFVQEVNVYGVHVPDHEGRIGMASIKMKASYARPRFLRIQDTIEITGTFKHRKMTLVEEGFNPAVIKDALYFLDDTAKMYVPMTEDIYNAISAKTLKL

SEQ ID NO: 897795 - protein, 687 aa, Homo sapiens
TTTPAPEPAAVPAAEELCLPLHLTRARRPAACAPAQPASPPGARPVAALHARGEPSALAGTEGPAAVMLSAIYTVLAGLLFLPLLVNLCCPYFFQDIGYFLKVAAVGRRVRSYGQRRPARTILRAFLEKARQTPHKPFLLFRDETLTYAQVDRRSNQVARALHDHLGLRQGDCVALLMGNEPAYVWLWLGLVKLGCAMACLNYNIRAKSLLHCFQCCGAKVLLVSPELQAAVEEILPSLKKDDVSIYYVSRTSNTDGIDSFLDKVDEVSTEPIPESWRSEVTFSTPALYIYTSGTTGLPKAAMITHQRIWYGTGLTFVSGLKADDVIYITLPFYHSAALLIGIHGCIVAGATLALRTKFSASQFWDDCRKYNVTVIQYIGELLRYLCNSPQKPNDRDHKVRLALGNGLRGDVWRQFVKRFGDICIYEFYAATEGNIGFMNYARKVGAVGRVNYLQKKIITYDLIKYDVEKDEPVRDENGYCVRVPKGEVGLLVCKITQLTPFNGYAGAKAQTEKKKLRDVFKKGDLYFNSGDLLMVDHENFIYFHDRVGDTFRWKGENVATTEVADTVGLVDFVQEVNVYGVHVPDHEGRIGMASIKMKENHEFDGKKLFQHIADYLPSYARPRFLRIQDTIEITGTFKHRKMTLVEEGFNPAVIKDALYFLDDTAKMYVPMTEDIYNAISAKTLKL

SEQ ID NO: 897796 - protein, 118 aa, Homo sapiens
VNRSPYIPGLLSPLGTSSLLPCRQACRACLWPREGRGPRICVHRHLGEEKEQETTPHRVKQETTTTSCKNPAKKTKESQSAACQRGRKNARMENLNASKQKGILDRGCFSLSKNLKRT

SEQ ID NO: 897797 - protein, 328 aa, Homo sapiens
LRCRAGEPRLGPEWGARRGGATRRGWRRDQKPLPQAEPTSAGTRAQGRGGGGGDCSGWTMAASAGAGAVIAAPDSRRWLWSVLAAALGLLTAGVSALEVYTPKEIFVANGTQGKLTCKFKSTSTTGGLTSVSWSFQPEGADTTVSFFHYSQGQVYLGNYPPFKDRISWAGDLDKKDASINIENMQFIHNGTYICDVKNPPDIVVQPGHIRLYVVEKENLPVFPVWVVVGIVTAVVLGLTLLISMILAVLYRRKNSKRDYTGCSTSESLSPVKQAPRKSPSDTEGLVKSLPSGSHQGPVIYAQLDHSGGHHSDKINKSESVVYADIRKN

SEQ ID NO: 897798 - protein, 261 aa, Homo sapiens
LRCRAGEPRLGPEWGARRGGATRRGWRRDQKPLPQAEPTSAGTRAQGRGGGGGDCSGWTMAASAGAGAVIAAPDSRRWLWSVLAAALGLLTAGVSALEVYTPKEIFVANGTQGKLTCKFKSTSTTGGLTSVSWSFQPEGADTTVSFFHYSQGQVYLGNYPPFKDRISWAGDLDKKDASINIENMQFIHNGTYICDVKNPPDIVVQPGHIRLYVVEKENLPVFPVWVVVGIVTAVVLGLTLLISMILAVLYRRKNSKRDYTG

SEQ ID NO: 897799 - protein, 268 aa, Homo sapiens
LRCRAGEPRLGPEWGARRGGATRRGWRRDQKPLPQAEPTSAGTRAQGRGGGGGDCSGWTMAASAGAGAVIAAPDSRRWLWSVLAAALGLLTAGVSALEVYTPKEIFVANGTQGKLTCKFKSTSTTGGLTSVSWSFQPEGADTTVSFFHYSQGQVYLGNYPPFKDRISWAGDLDKKDASINIENMQFIHNGTYICDVKNPPDIVVQPGHIRLYVVEKENLPVFPVWVVVGIVTAVVLGLTLLISMILAVLYRRKNSKRDYTGAQSYMHS

SEQ ID NO: 897800 - protein, 328 aa, Homo sapiens; identical to SEQ ID NO: 897797

SEQ ID NO: 897801 - protein, 74 aa, Homo sapiens
SLGGLGILLILSDIRITPQAPRKSPSDTEGLVKSLPSGSHQGPVIYAQLDHSGGHHSDKINKSESVVYADIRKN

SEQ ID NO: 897802 - protein, 178 aa, Homo sapiens
LRCRAGEPRLGPEWGARRGGATRRGWRRDQKPLPQAEPTSAGTRAQGRGGGGGDCSGWTMAASAGAGAVIAAPDSRRWLWSVLAAALGLLTAGVSALEVYTPKEIFVANGTQGKLTCKFKSTSTTGGLTSVSWSFQPEGADTTVSGPVIYAQLDHSGGHHSDKINKSESVVYADIRKN

SEQ ID NO: 897803 - protein, 328 aa, Homo sapiens; identical to SEQ ID NO: 897797

SEQ ID NO: 897804 - protein, 328 aa, Homo sapiens; identical to SEQ ID NO: 897797

SEQ ID NO: 897805 - protein, 328 aa, Homo sapiens; identical to SEQ ID NO: 897797

SEQ ID NO: 897806 - protein, 188 aa, Homo sapiens
LRCRAGEPRLGPEWGARRGGATRRGWRRDQKPLPQAEPTSAGTRAQGRGGGGGDCSGWTMAASAGAGAVIAAPDSRRWLWSVLAAALGLLTAGVSALEVYTPKEIFVANGTQGKLTCKFKSTSTTGGLTSVSWSFQPEGADTTVSFFHYSQGQVYLGNYPPFKDRISWAGDLDKKDASINTGSSYQDD

SEQ ID NO: 897807 - protein, 328 aa, Homo sapiens; identical to SEQ ID NO: 897797

SEQ ID NO: 897808 - protein, 328 aa, Homo sapiens; identical to SEQ ID NO: 897797

SEQ ID NO: 897809 - protein, 328 aa, Homo sapiens; identical to SEQ ID NO: 897797

SEQ ID NO: 897810 - protein, 328 aa, Homo sapiens; identical to SEQ ID NO: 897797

SEQ ID NO: 897811 - protein, 328 aa, Homo sapiens; identical to SEQ ID NO: 897797

SEQ ID NO: 897812 - protein, 328 aa, Homo sapiens; identical to SEQ ID NO: 897797

SEQ ID NO: 897813 - protein, 328 aa, Homo sapiens; identical to SEQ ID NO: 897797

SEQ ID NO: 897814 - protein, 145 aa, Homo sapiens
MQFIHNGTYICDVKNPPDIVVQPGHIRLYVVEKENLPVFPVWVVVGIVTAVVLGLTLLISMILAVLYRRKNSKRDYTGCSTSESLSPVKQAPRKSPSDTEGLVKSLPSGSHQGPVIYAQLDHSGGHHSDKINKSESVVYADIRKN

SEQ ID NO: 897815 - protein, 558 aa, Homo sapiens
MSRTELPSPPSVWFEAEFFHHILHWTPIPNQSESTCYEVALLRYGIESWNSISNCSQTLSYDLTAVTLDLYHSNGYRARVRAVDGSRHSNWTVTNTRFSVDEVTLTVGSVNLEIHNGFILGKIQLPRPKMAPANDTYESIFSHFREYEIAIRKVPGNFTFTHKKVKHENFSLLTSGEVGEFCVQVKPSVASRSNKGMWSKEECISLTRQYFTVTNVIIFFAFVLLLSGALAYCLALQLYVRRRKKLPSVLLFKKPSPFIFISQRPSPETQDTIHPLDEEAFLKVSPELKNLDLHGSTDSGFGSTKPSLQTEEPQFLLPDPHPQADRTLGNGEPPVLGDSCSSGSSNSTDSGICLQEPSLSPSTGPTWEQQVGSNSRGQDDSGIDLVQNSEGRAGDTQGGSALGHHSPPEPEVPGEEDPAAVAFQGYLRQTRCAEEKATKTGCLEEESPLTDGLGPKFGRCLVDEAGLHPPALAKGYLKQDPLEMTLASSGAPTGQWNQPTEEWSLLALSSCSDLGISDWSFAHDLAPLGCVAAPGGLLGSFNSDLVTLPLISSLQSSE

SEQ ID NO: 897816 - protein, 384 aa, Homo sapiens
MVPDSGQWISWDQSPMSRITVPHGDRPQTHLSGPADFTVTNVIIFFAFVLLLSGALAYCLALQLYVRRRKKLPSVLLFKKPSPFIFISQRPSPETQDTIHPLDEEAFLKVSPELKNLDLHGSTDSGFGSTKPSLQTEEPQFLLPDPHPQADRTLGNGEPPVLGDSCSSGSSNSTDSGICLQEPSLSPSTGPTWEQQVGSNSRGQDDSGIDLVQNSEGRAGDTQGGSALGHHSPPEPEVPGEEDPAAVAFQGYLRQTRCAEEKATKTGCLEEESPLTDGLGPKFGRCLVDEAGLHPPALAKGYLKQDPLEMTLASSGAPTGQWNQPTEEWSLLALSSCSDLGISDWSFAHDLAPLGCVAAPGGLLGSFNSDLVTLPLISSLQSSE

SEQ ID NO: 897817 - protein, 105 aa, Homo sapiens
IHNGFILGKIQLPRPKMAPANDTYESIFSHFREYEIAIRKVPGNFTVWGSPRPQGQNSLGFPVPWAGSTLVCHWELCLWTKGRVWDGGWAEEGVETTSALRAMLL

SEQ ID NO: 897818 - protein, 603 aa, Homo sapiens
QSQPKGSWRRAGRLRSGPGRCGAPRMLPCLVVLLAALLSLRLGSDAHGTELPSPPSVWFEAEFFHHILHWTPIPNQSESTCYEVALLRYGIESWNSISNCSQTLSYDLTAVTLDLYHSNGYRARVRAVDGSRHSNWTVTNTRFSVDEVTLTVGSVNLEIHNGFILGKIQLPRPKMAPANDTYESIFSHFREYEIAIRKVPGNFTFTHKKVKHENFSLLTSGEVGEFCVQVKPSVASRSNKGMWSKEECISLTRQYFTVTNVIIFFAFVLLLSGALAYCLALQLYVRRRKKLPSVLLFKKPSPFIFISQRPSPETQDTIHPLDEEAFLKVSPELKNLDLHGSTDSGFGSTKPSLQTEEPQFLLPDPHPQADRTLGNGEPPVLGDSCSSGSSNSTDSGICLQEPSLSPSTGPTWEQQVGSNSRGQDDSGIDLVQNSEGRAGDTQGGSALGHHSPPEPEVPGEEDPAAVAFQGYLRQTRCAEEKATKTGCLEEESPLTDGLGPKFGRCLVDEAGLHPPALAKGYLKQDPLEMTLASSGAPTGQWNQPTEEWSLLALSSCSDLGISDWSFAHDLAPLGCVAAPGGLLGSFNSDLVTLPLISSLQSSE

SEQ ID NO: 897819 - protein, 395 aa, Homo sapiens
QSQPKGSWRRAGRLRSGPGRCGAPRMLPCLVVLLAALLSLRLGSDAHGTELPSPPSVWFEAEFFHHILHWTPIPNQSESTCYEVALLRYGIESWNSISNCSQTLSYDLTAVTLDLYHSNGYRARVRAVDGSRHSNWTVTNTRFSVDEVTLTVGSVNLEIHNGFILGKIQLPRPKMAPANDTYESIFSHFREYEIAIRKVPGNFTFTHKKVKHENFSLLTSGEVGEFCVQVKPSVASRSNKGMWSKEECISLTRQYFTVTNVIIFFAFVLLLSGALAYCLALQLYVRRRKKLPSVLLFKKPSPFIFISQRPSPETQDTSPHRASGAGSLSLEDLKVYIFWTLKHIIMDSLRGDKGSRDPGWGFQLRTHPSGGYLWHPSANISLSPTNGVASPWGTC

SEQ ID NO: 897820 - protein, 365 aa, Homo sapiens
KEALREAVFVTSEASLKNLCQMSQAVLDEDLFNFLQAHWFTCELLWYMHVRKGLLACNTYMDSLDIVTSKVSSLFREQQSLLDCILCFVDYIDFFNTKGLKNLPTPPPKLKRARPASMPLKSKKAFGICGESLTSLPAEETKPDAQQVQVQQQSQVPPSQVGMLDTLHQSGSELAYKLCHNEWEVVQNSTHLVDMAGSSVDVQLLEDSHQVSKDGCSCSCSFQQWYHLPCRHILALLHTSQQPVGEAMVCRRWQKKYQYLLGPNGELQDRGMVPNTGQPEKQGRNDMIQDLSRELANLLMQTEGPELEERYSTLRKIVDIWAGPSQPSELFQQPGDFKDVGRLPFLWGKQEEGEGFPPATAVMHY

SEQ ID NO: 897821 - protein, 466 aa, Homo sapiens
MGWITEDLIRRNAEHNDCVIFSLEELSLHQQEIERLEHIDKWCRDLKILYLQNNLIGKIENVSKLKKLEYLNLALNNIEKIENLEGCEELAKLDLTVNFIGELSSIKNLQHNIHLKELFLMGNPCASFDHYREFVVATLPQLKWLDGKEIEPSERIKALQDYSVIEPQIREQEKDHCLKRAKLKEEAQRKHQEEDKNEDKRSNAGFDGRWYTDINATLSSLESKDHLQAPDTEEHNTKKLDNSEDDLEFWNKPCLFTPESRLETLRHMEKQRKKQEKLSEKKKKVKPPRTLITEDGKALNVNEPKIDFSLKDNEKQIILDLAVYRYMDTSLIDVDVQPTYVRVMIKGKPFQLVLPAEVKPDSSSAKRSQTTGHLVICMPKVGEVITGGQRAFKSMKTTSDRSREQTNTRSKHMEKLEVDPSKHSFPDVTNIVQEKKHTPRRRPEPKIIPSEEDPTFEDNPEVPPLI

SEQ ID NO: 897822 - protein, 446 aa, Homo sapiens
MGWITEDLIRRNAEHNDCVIFSLEELSLHQQEIERLEHIDKWCRDLKILYLQNNLIGKIENVSKLKKLEYLNLALNNIEKIENLEGCEELAKLDLTVNFIGELSSIKNLQHNIHLKELFLMGNPCASFDHYREFVVATLPQLKWLDGKEIEPSERIKALQDYSVIEPQIREQEKDHCLKRAKLKEEAQRKHQEEDKNEDKRSNAGFDGRWYTDINATLSSLESKDHLQAPDTEEHNTKKLDNSEDDLEFWNKPCLFTPESRLETLRHMEKQRKKQEKLSEKKKKVKPPRTLITEDGKALNVNEPKYMDTSLIDVDVQPTYVRVMIKGKPFQLVLPAEVKPDSSSAKRSQTTGHLVICMPKVGEVITGGQRAFKSMKTTSDRSREQTNTRSKHMEKLEVDPSKHSFPDVTNIVQEKKHTPRRRPEPKIIPSEEDPTFEDNPEVPPLI

SEQ ID NO: 897823 - protein, 418 aa, Homo sapiens
MGWITEDLIRRNAEHNDCVIFSLEELSLHQQEIERLEHIDKWCRDLKILYLQNNLIGKIENVSKLKKLEYLNLALNNIEKIENLEGCEELAKLDLTVNFIGELSSIKNLQHNIHLKELFLMGNPCASFDHYREFVVATLPQLKWLDGKEIEPSERIKALQDYSVIEPQIREQEKDHCLKRAKLKEEAQRKHQEEDKNEDKRSNAGFDGRWYTDINATLSSLESKDHLQAPDTEEHNTKKLDNSEDDLEFWNKPCLFTPESRLETLRHMEKQRKKQEKLSEKKKKVKPPRTLITEDGKALNVNEPKIDFSLKDNEKQIILDLAVYRYMDTSLIDVDVQPTYVRVMIKGKPFQLVLPAEVKPDSSSAKRSQTTGHLVICMPKGANQLMRKALLSLFMSLKQLQHSFPLFLYVFNLSKFFT

SEQ ID NO: 897824 - protein, 466 aa, Homo sapiens; identical to SEQ ID NO: 897821

SEQ ID NO: 897825 - protein, 245 aa, Homo sapiens
LTTLSCISENVSKLKKLEYLNLALNNIEKIENLEGCEELAKLDLTVNFIGELSSIKNLQHNIHLKELFLMGNPCASFDHYREFVVATLPQLKWLDGKEIEPSERIKALQDYSVIEPQIREQEKDHCLKRAKLKEEAQRKHQEEDKNEDKRSNAGFDGRWYTDINATLSSLESKDHLQAPDTEEHNTKKLDNSEDDLEFWNKPCLFTPESRLETLRHMEKQRKKQEKLRDYHTCLTYPTVLLRKSD

SEQ ID NO: 897826 - protein, 466 aa, Homo sapiens; identical to SEQ ID NO: 897821

SEQ ID NO: 897827 - protein, 466 aa, Homo sapiens; identical to SEQ ID NO: 897821

SEQ ID NO: 897828 - protein, 82 aa, Homo sapiens
  misc_feature (16)..(16): Xaa can be any naturally occurring amino acid
VSLSLSLSLSLSLSLXEKLKEKKLTPITYPQGLAMAKEIGAVKYLECSALTQRGLKTVFDEAIRAVLCPPPVKKRKRKCLLL

SEQ ID NO: 897829 - protein, 192 aa, Homo sapiens
MQAIKCVVVGDGAVGKTCLLISYTTNAFPGEYIPTVFDNYSANVMVDGKPVNLGLWDTAGQEDYDRLRPLSYPQTDVFLICFSLVSPASFENVRAKWYPEVRHHCPNTPIILVGTKLDLRDDKDTIEKLKEKKLTPITYPQGLAMAKEIGAVKYLECSALTQRGLKTVFDEAIRAVLCPPPVKKRKRKCLLL

SEQ ID NO: 897830 - protein, 192 aa, Homo sapiens; identical to SEQ ID NO: 897829

SEQ ID NO: 897831 - protein, 192 aa, Homo sapiens; identical to SEQ ID NO: 897829

SEQ ID NO: 897832 - protein, 192 aa, Homo sapiens; identical to SEQ ID NO: 897829

SEQ ID NO: 897833 - protein, 192 aa, Homo sapiens; identical to SEQ ID NO: 897829

SEQ ID NO: 897834 - protein, 192 aa, Homo sapiens; identical to SEQ ID NO: 897829

SEQ ID NO: 897835 - protein, 192 aa, Homo sapiens; identical to SEQ ID NO: 897829

SEQ ID NO: 897836 - protein, 225 aa, Homo sapiens
MQAIKCVVVGDGAVGKTCLLISYTTNAFPGEYIPTVLSLLPRMECCDAISAHCSVCLLGSSDSLPQPPSFDNYSANVMVDGKPVNLGLWDTAGQEDYDRLRPLSYPQTDVFLICFSLVSPASFENVRAKWYPEVRHHCPNTPIILVGTKLDLRDDKDTIEKLKEKKLTPITYPQGLAMAKEIGAVKYLECSALTQRGLKTVFDEAIRAVLCPPPVKKRKRKCLLL

SEQ ID NO: 897837 - protein, 192 aa, Homo sapiens; identical to SEQ ID NO: 897829

SEQ ID NO: 897838 - protein, 192 aa, Homo sapiens; identical to SEQ ID NO: 897829

SEQ ID NO: 897839 - protein, 178 aa, Homo sapiens
RYYLLLLNSRPRRHGKPVNLGLWDTAGQEDYDRLRPLSYPQTVGETYGKDITSRGKDKPIADVFLICFSLVSPASFENVRAKWYPEVRHHCPNTPIILVGTKLDLRDDKDTIEKLKEKKLTPITYPQGLAMAKEIGAVKYLECSALTQRGLKTVFDEAIRAVLCPPPVKKRKRKCLLL

SEQ ID NO: 897840 - protein, 173 aa, Homo sapiens
KQRLKACALPATLTYYARRGWHPMKHLLGSGGGTALQTCCAEPGPTQRWPLSYPQTDVFLICFSLVSPASFENVRAKWYPEVRHHCPNTPIILVGTKLDLRDDKDTIEKLKEKKLTPITYPQGLAMAKEIGAVKYLECSALTQRGLKTVFDEAIRAVLCPPPVKKRKRKCLLL

SEQ ID NO: 897841 - protein, 192 aa, Homo sapiens; identical to SEQ ID NO: 897829

SEQ ID NO: 897842 - protein, 167 aa, Homo sapiens
ISHNTDPARYSESTSATRQQMKGEDAQPQEMASTSFPRASGPSPEFRQHGDSDGKRGSPQNLPIEHHFACKECVGITSDVTNTPIILVGTKLDLRDDKDTIEKLKEKKLTPITYPQGLAMAKEIGAVKYLECSALTQRGLKTVFDEAIRAVLCPPPVKKRKRKCLLL

SEQ ID NO: 897843 - protein, 155 aa, Homo sapiens
MQAIKCVVVGDGAVGKTCLLISYTTNAFPGEYIPTVFDNYSANVMVDGKPVNLGLWDTAGQEDYDRLRPLSYPQTDVFLICFSLVSPASFENVRAKWYPEVRHHCPNTPIILVGTKLDLRDDKDTIEKLKEKKLTPITYPQGLAMAKEIVAVKYL

SEQ ID NO: 897844 - protein, 192 aa, Homo sapiens; identical to SEQ ID NO: 897829

SEQ ID NO: 897845 - protein, 192 aa, Homo sapiens; identical to SEQ ID NO: 897829

SEQ ID NO: 897846 - protein, 192 aa, Homo sapiens; identical to SEQ ID NO: 897829

SEQ ID NO: 897847 - protein, 192 aa, Homo sapiens; identical to SEQ ID NO: 897829

SEQ ID NO: 897848 - protein, 192 aa, Homo sapiens; identical to SEQ ID NO: 897829

SEQ ID NO: 897849 - protein, 188 aa, Homo sapiens
  misc_feature (3)..(3): Xaa can be any naturally occurring amino acid
MLXEEGDGAVGKTCLLISYTTNAFPGEYIPTVFDNYSANVMVDGKPVNLGLWDTAGQEDYDRLRPLSYPQTDVFLICFSLVSPASFENVRAKWYPEVRHHCPNTPIILVGTKLDLRDDKDTIEKLKEKKLTPITYPQGLAMAKEIGAVKYLECSALTQRGLKTVFDEAIRAVLCPPPVKKRKRKCLLL

SEQ ID NO: 897850 - protein, 211 aa, Homo sapiens
MQAIKCVVVGDGAVGKTCLLISYTTNAFPGEYIPTVFDNYSANVMVDGKPVNLGLWDTAGQEDYDRLRPLSYPQTVGETYGKDITSRGKDKPIADVFLICFSLVSPASFENVRAKWYPEVRHHCPNTPIILVGTKLDLRDDKDTIEKLKEKKLTPITYPQGLAMAKEIGAVKYLECSALTQRGLKTVFDEAIRAVLCPPPVKKRKRKCLLL

SEQ ID NO: 897851 - protein, 157 aa, Homo sapiens
VWSVGVWSVLVLCSVWSCGGVWSCGQEDYDRLRPLSYPQTDVFLICFSLVSPASFENVRAKWYPEVRHHCPNTPIILVGTKLDLRDDKDTIEKLKEKKLTPITYPQGLAMAKEIGAVKYLECSALTQRGLKTVFDEAIRAVLCPPPVKKRKRKCLLL

SEQ ID NO: 897852 - protein, 167 aa, Homo sapiens
MVDGKPVNLGLWDTAGQEDYDRLRPLSYPQTVGETYGKDITSRGKDKPIADVFLICFSLVSPASFENVRAKWYPEVRHHCPNTPIILVGTKLDLRDDKDTIEKLKEKKLTPITYPQGLAMAKEIGAVKYLECSALTQRGLKTVFDEAIRAVLCPPPVKKRKRKCLLL

SEQ ID NO: 897853 - protein, 288 aa, Homo sapiens
MQAIKCVVVGDGAVGKTCLLISYTTNAFPGEYIPTVFDNYSANVMVDGKPVNLGLWDTAGQEDYDRLRPLSYPQTDVFLICFSLVSPASFENVRAKWYPEVRHHCPNTPIILVGTKLDLRDDKDTIEKLKEKKLTPITYPQGLAMAKEIGMESCVFPPPCTSFIVVTETGVQSGKGGCVSPTQGLVYSWGTSWQGPVGLNVSVGRWKQGWEPAEGARAPGAASRWWCDQKRVGSSVHCRVVVFPVGAVKYLECSALTQRGLKTVFDEAIRAVLCPPPVKKRKRKCLLL

SEQ ID NO: 897854 - protein, 68 aa, Homo sapiens
AAAYYYYYCSEFKLLTMYGDMAKEIGAVKYLECSALTQRGLKTVFDEAIRAVLCPPPVKKRKRKCLLL

SEQ ID NO: 897855 - protein, 123 aa, Homo sapiens
LRERRGRERRGRERPRPEPGSGGAGAGEGRPDVSGAAISCFSAVFLSFGWWPLPGIGFQSAEGEAAWTAAPAPSAPPPASRAPVRRAPSPPLPISAPCRRRRGPASGPDAGHQVCGGGRRSCR

SEQ ID NO: 897856 - protein, 375 aa, Homo sapiens
MEDEMPKTLYVGNLSRDVTEALILQLFSQIGPCKNCKMIMDTAGNDPYCFVEFHEHRHAAAALAAMNGRKIMGKEVKVNWATTPSSQKKDTSNHFHVFVGDLSPEITTEDIKAAFAPFGRISDARVVKDMATGKSKGYGFVSFFNKWDAENAIQQMGGQWLGGRQIRTNWATRKPPAPKSTYESNTKQLSYDEVVNQSSPSNCTVYCGGVTSGLTEQLMRQTFSPFGQIMEIRVFPDKGYSFVRFNSHESAAHAIVSVNGTTIEGHVVKCYWGKETLDMINPVQQQNQIGYPQPYGQWGQWYGNAQQIGQYMPNGWQVPAYGMYGQAWNQQGFNQTQSSAPWMGPNYGVQPPQGQNGSMLPNQPSGYRVAGYETQ

SEQ ID NO: 897857 - protein, 386 aa, Homo sapiens
MEDEMPKTLYVGNLSRDVTEALILQLFSQIGPCKNCKMIMDTAGNDPYCFVEFHEHRHAAAALAAMNGRKIMGKEVKVNWATTPSSQKKDTSSSTVVSTQRSQDHFHVFVGDLSPEITTEDIKAAFAPFGRISDARVVKDMATGKSKGYGFVSFFNKWDAENAIQQMGGQWLGGRQIRTNWATRKPPAPKSTYESNTKQLSYDEVVNQSSPSNCTVYCGGVTSGLTEQLMRQTFSPFGQIMEIRVFPDKGYSFVRFNSHESAAHAIVSVNGTTIEGHVVKCYWGKETLDMINPVQQQNQIGYPQPYGQWGQWYGNAQQIGQYMPNGWQVPAYGMYGQAWNQQGFNQTQSSAPWMGPNYGVQPPQGQNGSMLPNQPSGYRVAGYETQ

SEQ ID NO: 897858 - protein, 214 aa, Homo sapiens
MEDEMPKTLYVGNLSRDVTEALILQLFSQIGPCKNCKMIMDTAGNDPYCFVEFHEHRHAAAALAAMNGRKIMGKEVKVNWATTPSSQKKDTSSSTVVSTQRSQDHFHVFVGDLSPEITTEDIKAAFAPFGRISDARVVKDMATGKSKGYGFVSFFNKWDAENAIQQMGGQWLGGRQIRTNWATRKPPAPKSTYECRCIGEEKEMWNFGEKYARF

SEQ ID NO: 897859 - protein, 112 aa, Homo sapiens
MEDEMPKTLYVGNLSRDVTEALILQLFSQIGPCKNCKMIMDTAGNDPYCFVEFHEHRHAAAALAAMNGRKIMGKEVKVNWATTPSSQKKDTSSSTVVSTQRSQGNCIFLNIK

SEQ ID NO: 897860 - protein, 286 aa, Homo sapiens
MKVKHENELCVKFLFDIQRIVCKPKLLIVSDFRDARVVKDMATGKSKGYGFVSFFNKWDAENAIQQMGGQWLGGRQIRTNWATRKPPAPKSTYESNTKQLSYDEVVNQSSPSNCTVYCGGVTSGLTEQLMRQTFSPFGQIMEIRVFPDKGYSFVRFNSHESAAHAIVSVNGTTIEGHVVKCYWGKETLDMINPVQQQNQIGYPQPYGQWGQWYGNAQQIGQYMPNGWQVPAYGMYGQAWNQQGFNQTQSSAPWMGPNYGVQPPQGQNGSMLPNQPSGYRVAGYETQ

SEQ ID NO: 897861 - protein, 246 aa, Homo sapiens
MATGKSKGYGFVSFFNKWDAENAIQQMGGQWLGGRQIRTNWATRKPPAPKSTYESNTKQLSYDEVVNQSSPSNCTVYCGGVTSGLTEQLMRQTFSPFGQIMEIRVFPDKGYSFVRFNSHESAAHAIVSVNGTTIEGHVVKCYWGKETLDMINPVQQQNQIGYPQPYGQWGQWYGNAQQIGQYMPNGWQVPAYGMYGQAWNQQGFNQTQSSAPWMGPNYGVQPPQGQNGSMLPNQPSGYRVAGYETQ

SEQ ID NO: 897862 - protein, 286 aa, Homo sapiens; identical to SEQ ID NO: 897860

SEQ ID NO: 897863 - protein, 246 aa, Homo sapiens; identical to SEQ ID NO: 897861

SEQ ID NO: 897864 - protein, 157 aa, Homo sapiens [sequence omitted]

SEQ ID NO: 897865 - protein, 375 aa, Homo sapiens; identical to SEQ ID NO: 897856

SEQ ID NO: 897866 - protein, 214 aa, Homo sapiens; identical to SEQ ID NO: 897858

SEQ ID NO: 897867 - protein, 112 aa, Homo sapiens; identical to SEQ ID NO: 897859

SEQ ID NO: 897868 - protein, 161 aa, Homo sapiens
MEDEMPKTLYVGNLSRDVTEALILQLFSQIGPCKNCKMIMDTAGNDPYCFVEFHEHRHAAAALAAMNGRKIMGKEVKVNWATTPSSQKKDTSSSTVVSTQRSQVLVHLHMDSHKLNGVMSGQPKLLAFEKTVKYFNIKLLQCKIISMSLLVISAQKLQLKI

SEQ ID NO: 897869 - protein, 68 aa, Homo sapiens
  misc_feature (54)..(54): Xaa can be any naturally occurring amino acid
MGKEVKVNWATTPSSQKKDTSNHFHVFVGDLSPEITTEDIKAAFAPFGRISDAXVVKDMAGLDWLCSF

SEQ ID NO: 897870 - protein, 375 aa, Homo sapiens; identical to SEQ ID NO: 897856

SEQ ID NO: 897871 - protein, 214 aa, Homo sapiens; identical to SEQ ID NO: 897858

SEQ ID NO: 897872 - protein, 285 aa, Homo sapiens
MQDHFHVFVGDLSPEITTEDIKAAFAPFGRISDARVVKDMATGKSKGYGFVSFFNKWDAENAIQQMGGQWLGGRQIRTNWATRKPPAPKSTYESNTKQLSYDEVVNQSSPSNCTVYCGGVTSGLTEQLMRQTFSPFGQIMEIRVFPDKGYSFVRFNSHESAAHAIVSVNGTTIEGHVVKCYWGKETLDMINPVQQQNQIGYPQPYGQWGQWYGNAQQIGQYMPNGWQVPAYGMYGQAWNQQGFNQTQSSAPWMGPNYGVQPPQGQNGSMLPNQPSGYRVAGYETQ

SEQ ID NO: 897873 - protein, 214 aa, Homo sapiens; identical to SEQ ID NO: 897858

SEQ ID NO: 897874 - protein, 275 aa, Homo sapiens
MTDIVCTTEDIKAAFAPFGRISDARVVKDMATGKSKGYGFVSFFNKWDAENAIQQMGGQWLGGRQIRTNWATRKPPAPKSTYESNTKQLSYDEVVNQSSPSNCTVYCGGVTSGLTEQLMRQTFSPFGQIMEIRVFPDKGYSFVRFNSHESAAHAIVSVNGTTIEGHVVKCYWGKETLDMINPVQQQNQIGYPQPYGQWGQWYGNAQQIGQYMPNGWQVPAYGMYGQAWNQQGFNQTQSSAPWMGPNYGVQPPQGQNGSMLPNQPSGYRVAGYETQ

SEQ ID NO: 897875 - protein, 220 aa, Homo sapiens [sequence omitted]

SEQ ID NO: 897876 - protein, 308 aa, Homo sapiens
MEDEMPKTLYVGNLSRDVTEALILQLFSQIGPCKNCKMIMDTAGNDPYCFVEFHEHRHAAAALAAMNGRKIMGKEVKVNWATTPSSQKKDTSSSTVVSTQRSQDHFHVFVGDLSPEITTEDIKAAFAPFGRISDARVVKDMATGKSKGYGFVSFFNKWDAENAIQQMGGQWLGGRQIRTNWATRKPPAPKSTYESNTKQLSYDEVVNQSSPSNCTVYCGGVTSGLTEQLMRQTFSPFGQIMEIRVFPDKGYSFVRFNSHESAAHAIVSVNGTTIEGHVVKCYWGKETLDMINPVQQFQNGVSWIAVVT

SEQ ID NO: 897877 - protein, 214 aa, Homo sapiens; identical to SEQ ID NO: 897858

SEQ ID NO: 897878 - protein, 214 aa, Homo sapiens; identical to SEQ ID NO: 897858

SEQ ID NO: 897879 - protein, 160 aa, Homo sapiens
MEDEMPKTLYVGNLSRDVTEALILQLFSQIGPCKNCKMIMDTAGNDPYCFVEFHEHRHAAAALAAMNGRKIMGKEVKVNWATTPSSQKKDTSNHFHVFVGDLSPEITTEDIKAAFAPFGRISDARVVKDMATGKSKGYGFVSFFNKWVSSVRSAWIMLKE

SEQ ID NO: 897880 - protein, 226 aa, Homo sapiens
MEGCVSNLMVCNLAYSGKLEELKESILADKSLATRTDQDSRTALHWACSAGHTEIVEFLLQLGVPVNDKDDAGWSPLHIAASAGRDEIVKALLGKGAQVNAVNQNGCTPLHYAASKNRHEIAVMLLEGGANPDAKDHYEATAMHRAAAKGNLKMIHILLYYKASTNIQDTEGNTPLHLACDEERVEEAKLLVSQGASIYIENKEEKTPLQVAKGGLGLILKRMVEG

SEQ ID NO: 897881 - protein, 226 aa, Homo sapiens; identical to SEQ ID NO: 897880

SEQ ID NO: 897882 - protein, 208 aa, Homo sapiens
MEGCVSNLMVCNLAYSGKLEELKESILADKSLATRTDQDSRTALHWACSAGHTEIVEFLLQLGVPVNDKDDAGWSPLHIAASAGRDEIVKALLGKGAQVNAVNQNGCTPLHYAASKNRHEIAVMLLEGGANPDAKDHYEATAMHRAAAKGNLKMIHILLYYKASTNIQDTEGNTPLHLACDEERVEEAKLLVSQGASIYIENKEMVEG

SEQ ID NO: 897883 - protein, 193 aa, Homo sapiens
MEGCVSNLMVCNLAYSGKLEELKESILADKSLATRTDQAGWSPLHIAASAGRDEIVKALLGKGAQVNAVNQNGCTPLHYAASKNRHEIAVMLLEGGANPDAKDHYEATAMHRAAAKGNLKMIHILLYYKASTNIQDTEGNTPLHLACDEERVEEAKLLVSQGASIYIENKEEKTPLQVAKGGLGLILKRMVEG

SEQ ID NO: 897884 - protein, 185 aa, Homo sapiens
MEGCVSNLMVCNLAYSGKLEELKESILADKSLATRTDQDSRTALHWACSAGHTEIVEFLLQLGVPVNDKDDAASKNRHEIAVMLLEGGANPDAKDHYEATAMHRAAAKGNLKMIHILLYYKASTNIQDTEGNTPLHLACDEERVEEAKLLVSQGASIYIENKEEKTPLQVAKGGLGLILKRMVEG

SEQ ID NO: 897885 - protein, 226 aa, Homo sapiens; identical to SEQ ID NO: 897880

SEQ ID NO: 897886 - protein, 151 aa, Homo sapiens
MEGCVSNLMVCNLAYSGKLEELKESILADKSLATRTDQDSRTALHWACSAGHTEIVEFLLQLGVPVNDKDDAGWSPLHIAASAGRDEIVKALLGKGAQVNAVNQNGCTPLHYAASKNRHEIAVMLLEGGANPDAKDHYEATAMHRAAAKDT

SEQ ID NO: 897887 - protein, 246 aa, Homo sapiens
MEGCVSNLMVCNLAYSGKLEELKESILADKSLATRTDQDSRTALHWACSAGHTEIVEFLLQLGVPVNDKDDAGWSPLHIAASAGRDEIVKALLGKGAQVLGKKIWGAPPFWGGLPPPKKNAVNQNGCTPLHYAASKNRHEIAVMLLEGGANPDAKDHYEATAMHRAAAKGNLKMIHILLYYKASTNIQDTEGNTPLHLACDEERVEEAKLLVSQGASIYIENKEEKTPLQVAKGGLGLILKRMVEG

SEQ ID NO: 897888 - protein, 709 aa, Homo sapiens
KSSLSLLGHRLVSVTEYFVRLPPPSQILITEFQGEGTCEMGEPAGVAGTMESPFSPGLFHRLDEDWDSALFAELGYFTDTDELQLEAANETYENNFDNLDFDLDLMPWESDIWDINNQICTVKDIKAEPQPLSPASSSYSVSSPRSVDSYSSTQHVPEELDLSSSSQMSPLSLYGENSNSLSSAEPLKEDKPVTGPRNKTENGLTPKKKIQVNSKPSIQPKPLLLPAAPKTQTNSSVPAKTIIIQTVPTLMPLAKQQPIISLQPAPTKGQTVLLSQPTVVQLQAPGVLPSAQPVLAVAGGVTQLPNHVVNVVPAPSANSPVNGKLSVTKPVLQSTMRNVGSDIAVLRRQQRMIKNRESACQSRKKKKEYMLGLEARLKAALSENEQLKKENGTLKRQLDEVVSENQRLKVPSPKRRVVCVMIVLAFIILNYGPMSMLEQDSRRMNPSVSPANQRRHLLGFSAKEAQDTSDGIIQKNSYRYDHSVSNDKALMVLTEEPLLYIPPPPCQPLINTTESLRLNHELRGWVHRHEVERTKSRRMTNNQQKTRILQGALEQGSNSQLMAVQYTETTSSISRNSGSELQVYYASPRSYQDFFEAIRRRGDTFYVVSFRRDHLLLPATTHNKTTRPKMSIVLPAININENVINGQDYEVMMQIDCQVMDTRILHIKSSSVPPYLRDQQRNQTNTFFGSPPAATEATHVVSTIPESLQ

SEQ ID NO: 897889 - protein, 709 aa, Homo sapiens; identical to SEQ ID NO: 897888

SEQ ID NO: 897890 - protein, 709 aa, Homo sapiens; identical to SEQ ID NO: 897888

SEQ ID NO: 897891 - protein, 279 aa, Homo sapiens
MVLTCMLEQDSRRMNPSVSPANQRRHLLGFSAKEAQDTSDGIIQKNSYRYDHSVSNDKALMVLTEEPLLYIPPPPCQPLINTTESLRLNHELRGWVHRHEVERTKSRRMTNNQQKTRILQGALEQGSNSQLMAVQYTETTSSISRNSGSELQVYYASPRSYQDFFEAIRRRGDTFYVVSFRRDHLLLPATTHNKTTRPKMSIVLPAININENVINGQDYEVMMQIDCQVMDTRILHIKSSSVPPYLRDQQRNQTNTFFGSPPAATEATHVVSTIPESLQ

SEQ ID NO: 897892 - protein, 612 aa, Homo sapiens
KSSLSLLGHRLVSVTEYFVRLPPPSQILITEFQGEGTCEMGEPAGVAGTMESPFSPGLFHRLDEDWDSALFAELGYFTDTDELQLEAANETYENNFDNLDFDLDLMPWESDIWDINNQICTVKDIKAEPQPLSPASSSYSVSSPRSVDSYSSTQHVPEELDLSSSSQMSPLSLYGENSNSLSSAEPLKEDKPVTGPRNKTENGLTPKKKIQVNSKPSIQPKPLLLPAAPKTQTNSSVPAKTIIIQTVPTLMPLAKQQPIISLQPAPTKGQTVLLSQPTVVQLQAPGVLPSAQPVLAVAGGVTQLPNHVVNVVPAPSANSPVNGKLSVTKPVLQSTMRNVGSDIAVLRRQQRMIKNRESACQSRKKKKEYMLGLEARLKAALSENEQLKKENGTLKRQLDEVVSENQRLKVPSPKRRVVCVMIVLAFIILNYGPMSMLEQDSRRMNPSVSPANQRRHLLGFSAKEAQDTSDGIIQKNSYRYDHSVSNDKALMVLTEEPLLYIPPPPCQPLINTTESLRLNHELRGWVHRHEVERTKSRRMTNNQQKTRILQGALEQGSNSQLMAVQYTETTSSISRNSGSELQVYYASPRSYQDFFEAIRRRGDTFYVVSFRR

SEQ ID NO: 897893 - protein, 274 aa, Homo sapiens
KSSLSLLGHRLVSVTEYFVRLPPPSQILITEFQGEGTCEMGEPAGVAGTMESPFSPGLFHRLDEDWDSALFAELGYFTDTDELQLEAANETYENNFDNLDFDLDLMPWESDIWDINNQICTVKDIKAEPQPLSPASSSYSVSSPRSVDSYSSTQHVPEELDLSSSSQMSPLSLYGENSNSLSSAEPLKEDKPVTGPRNKTENGLTPKKKIQVNSKPSIQPKPLLLPAAPKTQTNSSVPAKTIIIQTVPTLMPLAKQQPIISLQPAPTKGCQHHP

SEQ ID NO: 897894 - protein, 479 aa, Homo sapiens
KSSLSLLGHRLVSVTEYFVRLPPPSQILITEFQGEGTCEMGEPAGVAGTMESPFSPGLFHRLDEDWDSALFAELGYFTDTDELQLEAANETYENNFDNLDFDLDLMPWESDIWDINNQICTVKDIKAEPQPLSPASSSYSVSSPRSVDSYSSTQHVPEELDLSSSSQMSPLSLYGENSNSLSSAEPLKEDKPVTGPRNKTENGLTPKKKIQVNSKPSIQPKPLLLPAAPKTQTNSSVPAKTIIIQTVPTLMPLAKQQPIISLQPAPTKGQTVLLSQPTVVQLQAPGVLPSAQPVLAVAGGVTQLPNHVVNVVPAPSANSPVNGKLSVTKPVLQSTMRNVGSDIAVLRRQQRMIKNRESACQSRKKKKEYMLGLEARLKAALSENEQLKKENGTLKRQLDEVVSENQRLKVPSPKRRVVCVMIVLAFIILNYGPMSMLEQDSRRMNPSVSPANQRRHLLGFSAKEAQDTSDGIIQKNSYR

SEQ ID NO: 897895 - protein, 709 aa, Homo sapiens; identical to SEQ ID NO: 897888

SEQ ID NO: 897896 - protein, 527 aa, Homo sapiens
NSHGWLVRTCMGWASPELAWLVQTEPAWLVNSKPSIQPKPLLLPAAPKTQTNSSVPAKTIIIQTVPTLMPLAKQQPIISLQPAPTKGQTVLLSQPTVVQLQAPGVLPSAQPVLAVAGGVTQLPNHVVNVVPAPSANSPVNGKLSVTKPVLQSTMRNVGSDIAVLRRQQRMIKNRESACQSRKKKKEYMLGLEARLKAALSENEQLKKENGTLKRQLDEVVSENQRLKVPSPKRRVVCVMIVLAFIILNYGPMSMLEQDSRRMNPSVSPANQRRHLLGFSAKEAQDTSDGIIQKNSYRYDHSVSNDKALMVLTEEPLLYIPPPPCQPLINTTESLRLNHELRGWVHRHEVERTKSRRMTNNQQKTRILQGALEQGSNSQLMAVQYTETTSSISRNSGSELQVYYASPRSYQDFFEAIRRRGDTFYVVSFRRDHLLLPATTHNKTTRPKMSIVLPAININENVINGQDYEVMMQIDCQVMDTRILHIKSSSVPPYLRDQQRNQTNTFFGSPPAATEATHVVSTIPESLQ

SEQ ID NO: 897897 - protein, 274 aa, Homo sapiens; identical to SEQ ID NO: 897893

SEQ ID NO: 897898 - protein, 645 aa, Homo sapiens
KSSLSLLGHRLVSVTEYFVRLPPPSQILITEFQGEGTCEMGEPAGVAGTMESPFSPGLFHRLDEDWDSALFAELGYFTDTDELQLEAANETYENNFDNLDFDLDLMPWESDIWDINNQICTVKDIKAEPQPLSPASSSYSVSSPRSVDSYSSTQHVPEELDLSSSSQMSPLSLYGENSNSLSSAEPLKEDKPVTGPRNKTENGLTPKKKIQVNSKPSIQPKPLLLPAAPKTQTNSSVPAKTIIIQTVPTLMPLAKQQPIISLQPAPTKGQTVLLSQPTVVQLQAPGVLPSAQPVLAVAGGVTQLPNHVVNVVPAPSANSPVNGKLSVTKPVLQSTMRNVGSDIAVLRRQQRMIKNRESACQSRKKKKEYMLGLEARLKAALSENEQLKKENGTLKRQLDEVVSENQRLKVPSPKRRVVCVMIVLAFIILNYGPMSMLEQDSRRMNPSVSPANQRRHLLGFSAKEAQDTSDGIIQKNSYRYDHSVSNDKALMVLTEEPLLYIPPPPCQPLINTTESLRLNHELRGWVHRHEVERTKSRRMTNNQQKTRILQGALEQGSNSQLMAVQYTETTSSISRNSGSELQVYYASPRSYQDFFEAIRRRGDTFYVVSFRRDHLLLPATTHNKTTRPKMSIVLPAININGKLKF

SEQ ID NO: 897899 - protein, 92 aa, Homo sapiens
EHPKLDAMKIPVLPAVVLLSLLVLHSAQGATLGGPEEESTIENYASRPEAFKADEFLNWHALFESIKRKLPFLNWDAFPKLKGLRSATPDAQ

SEQ ID NO: 897900 - protein, 106 aa, Homo sapiens
EHPKLDAMKIPVLPAVVLLSLLVLHSAQGATLGGPEEESTIENYASRPEAFNTPFLNIDKLRSAFKADEFLNWHALFESIKRKLPFLNWDAFPKLKGLRSATPDAQ

SEQ ID NO: 897901 - protein, 497 aa, Homo sapiens
MDVPGPVSRRAAAAAATVLLRTARVRRECWFLPTALLCAYGFFASLRPSEPFLTPYLLGPDKNLTEREVFNEIYPVWTYSYLVLLFPVFLATDYLRYKPVVLLQGLSLIVTWFMLLYAQGLLAIQFLEFFYGIATATEIAYYSYIYSVVDLGMYQKVTSYCRSATLVGFTVGSVLGQILVSVAGWSLFSLNVISLTCVSVAFAVAWFLPMPQKSLFFHHIPSTCQRVNGIKVQNGGIVTDTPASNHLPGWEDIESKIPLNMEEPPVEEPEPKPDRLLVLKVLWNDFLMCYSSRPLLCWSVWWALSTCGYFQVVNYTQGLWEKVMPSRYAAIYNGGVEAVSTLLGAVAVFAVGYIKISWSTWGEMTLSLFSLLIAAAVYIMDTVGNIWVCYASYVVFRIIYMLLITIATFQIAANLSMERYALVFGVNTFIALALQTLLTLIVVDASGLGLEITTQFLIYASYFALIAVVFLASGAVSVMKKCRKLEDPQSSSQVTTS

SEQ ID NO: 897902 - protein, 423 aa, Homo sapiens
MDVPGPVSRRAAAAAATVLLRTARVRRECWFLPTALLCAYGFFASLRPSEPFLTPYLLGPDKNLTEREVFNEIYPVWTYSYLVLLFPVFLATDYLRYKPVVLLQGLSLIVTWFMLLYAQGLLAIQFLEFFYGIATATEIAYYSYIYSVVDLGMYQKVTSYCRSATLVGFTVGSVLGQILVSVAGWSLFSLNVISLTCVSVAFAVAWFLPMPQKSLFFHHIPSTCQRVNGIKVQNGGIVTDTPASNHLPGWEDIESKIPLNMEEPPVEEPEPKPDRLLVLKVLWNDFLMCYSSRPLLCWSVWWALSTCGYFQVVNYTQGLWEKVMPSRYAAIYNGGVEAVSTLLGAVAVFAVGYIKISWSTWGEMTLSLFSLLIAAAVYIMDTVGNIWVCYASYVVFRIIYMLLITIATYVFWLIEALGKIVTG

SEQ ID NO: 897903 - protein, 222 aa, Homo sapiens
MDVPGPVSRRAAAAAATVLLRTARVRRECWFLPTALLCAYGFFASLRPSEPFLTPYLLGPDKNLTEREEPKPDRLLVLKVLWNDFLMCYSSRPLLCWSVWWALSTCGYFQVVNYTQGLWEKVMPSRYAAIYNGGVEAVSTLLGAVAVFAVGYIKISWSTWGEMTLSLFSLLIAAAVYIMDTVGNIWVCYASYVVFRIIYMLLITIATYVFWLIEALGKIVTG

SEQ ID NO: 897904 - protein, 423 aa, Homo sapiens; identical to SEQ ID NO: 897902

SEQ ID NO: 897905 - protein, 497 aa, Homo sapiens; identical to SEQ ID NO: 897901

SEQ ID NO: 897906 - protein, 227 aa, Homo sapiens
MVVPLPVAGLVARVLLLLSLFLPRAGLCRRALPVYFGEARALGGFTERPEGDFSAPRTLRGGVTPMTPPSFIVPPGPLIFSWEVGVPTCGAPPPRVGSSLPRVCPPGALFPPPPVCCINAARRLPLALLLTRPPSWGPPLLKKTGWAVMGAPPGGDFLAGAPLFFFFFFFFFFFFFFFFFLMECGTNCSCYQSNISLEFNSKFVAYNLSLFLYKTRICSHLGMWPYL

SEQ ID NO: 897907 - protein, 423 aa, Homo sapiens; identical to SEQ ID NO: 897902

SEQ ID NO: 897908 - protein, 423 aa, Homo sapiens; identical to SEQ ID NO: 897902

SEQ ID NO: 897909 - protein, 264 aa, Homo sapiens
MSWGKDNKSTWIQNILLLLESKNAFKNATDRPGVSHCARPQNQLSQDDKLEDTYFDRDVEKAFMKASSELFSQKTKASLLVSNQNGNMYTSSVYGSLASVLAQYSPQQLAGKRIGVFSYGSGLAATLYSLKVTQDATPGSALDKITASLCDLKSRLDSRTGVAPDVFAENMKLREDTHHLVNYIPQGSIDSLFEGTWYLVRVDEKHRRTYARRPTPNDDTLDEGVGLVHSNIATEHIPSPAKKVPRLPATAAEPEAAVISNGEH

SEQ ID NO: 897910 - protein, 459 aa, Homo sapiens
PQEADINLPGRKFRSLQTLGEATRQRTKMAAPCEGQAFAVGVEKNWGAVVRSPEGTPQKIRQLIDEGIAPEEGGVDAKDTSATSQSVNGSPQAEQPSLESTSKEAFFSRVETFSSLKWAGKPFELSPLVCAKYGWVTVECDMLKCSSCQAFLCASLQPAFDFDRYKQRCAELKKALCTAHEKFCFWPDSPSPDRFGMLPLDEPAILVSEFLDRFQSLCHLDLQLPSLRPEDLKTMCLTEDKISLLLHLLEDELDHRTDERKTTIKLGSDIQVHVTACILSVCGWACSSSLESMQLSLIACSQCMRKVGLWGFQQIESSMTDLDASFGLTSSPIPGLEGRPERLPLVPESPRRMMTRSQDATFSPGSEQDTSSRSFFDPTSQHRDWCPWVNITLGKESRENGGTEPDASAPAEPGWKAVLTILLAHKQSSQPAETDSMSLSEKSRKVFRIFRQWESLCSC

SEQ ID NO: 897911 - protein, 324 aa, Homo sapiens
PQEADINLPGRKFRSLQTLGEATRQRTKMAAPCEGQAFAVGVEKNWGAVVRSPEGTPQKIRQLIDEGIAPEEGGVDAKDTSATSQSVNGSPQAEQPSLESTSKEAFFSRVETFSSLKWAGKPFELSPLVCAKYGWVTVECDMLKCSSCQAFLCASLQPAFDFDRYKQRCAELKKALCTAHEKFCFWPDSPSPDRFGMLPLDEPAILVSEFLDRFQSLCHLDLQLPSLRPEDLKTMCLTEDKISLLLHLLEDELDHRTDERKTTIKLGSDIQVHVTACILSVCGWACRLKRALVPLSLELGAGTLPVLLTVLSQRLLAPPPELAQ

SEQ ID NO: 897912 - protein, 435 aa, Homo sapiens [sequence omitted]

SEQ ID NO: 897913 - protein, 370 aa, Homo sapiens
MWISDKQRCAELKKALCTAHEKFCFWPDSPSPDRFGMLPLDEPAILVSEFLDRFQSLCHLDLQLPSLRPEDLKTMCLTEDKISLLLHLLEDELDHRTDERKTTIKLGSDIQVHVTACILSVCGWACSSSLESMQLSLIACSQCMRKVGLWGFQQIESSMTDLDASFGLTSSPIPGLEGRPERLPLVPESPRRMMTRSQDATFSPGSEQAEKSPGPIVSRTRSWDSSSPVDRPEPEAASPTTRTRPVTRSMGTGDTPGLEVPSSPLRKAKRARLCSSSSSDTSSRSFFDPTSQHRDWCPWVNITLGKESRENGGTEPDASAPAEPGWKAVLTILLAHKQSSQPAETDSMSLSEKSRKVFRIFRQWESLCSC

SEQ ID NO: 897914 - protein, 287 aa, Homo sapiens
PQEADINLPGRKFRSLQTLGEATRQRTKMAAPCEGQAFAVGVEKNWGAVVRSPEGTPQKIRQLIDEGIAPEEGGVDAKDTSATSQSVNGSPQAEQPSLESTSKEAFFSRVETFSSLKWAGKPFELSPLVCAKYGWVTVECDMLKCSSCQAFLCASLQPAFDFDRYKQRCAELKKALCTAHEKFCFWPDSPSPDRFGMLPLDEPAILVSEFLDRFQSLCHLDLQLPSLRPEDLKTMCLTEDKISLLLHLLEDELDHRTDERKTTIKLGSDIQVHVTACILSVCGWACR

SEQ ID NO: 897915 - protein, 208 aa, Homo sapiens
PQEADINLPGRKFRSLQTLGEATRQRTKMAAPCEGQAFAVGVEKNWGAVVRSPEGTPQKIRQLIDEGIAPEEGGVDAKDTSATSQSVNGSPQAEQPSLESTSKEAFFSRVETFSSLKWAGKPFELSPLVCAKYGWVTVECDMLKCSSCQAFLCASLQPAFDFDRYKQRCAELKKALCTAHEKFCFWPDSPSPGTWNSMCIKLNSSSYT

SEQ ID NO: 897916 - protein, 530 aa, Homo sapiens
PQEADINLPGRKFRSLQTLGEATRQRTKMAAPCEGQAFAVGVEKNWGAVVRSPEGTPQKIRQLIDEGIAPEEGGVDAKDTSATSQSVNGSPQAEQPSLESTSKEAFFSRVETFSSLKWAGKPFELSPLVCAKYGWVTVECDMLKCSSCQAFLCASLQPAFDFDRYKQRCAELKKALCTAHEKFCFWPDSPSPDRFGMLPLDEPAILVSEFLDRFQSLCHLDLQLPSLRPEDLKTMCLTEDKISLLLHLLEDELDHRTDERKTTIKLGSDIQVHVTACILSVCGWACSSSLESMQLSLIACSQCMRKVGLWGFQQIESSMTDLDASFGLTSSPIPGLEGRPERLPLVPESPRRMMTRSQDATFSPGSEQAEKSPGPIVSRTRSWDSSSPVDRPEPEAASPTTRTRPVTRSMGTGDTPGLEVPSSPLRKAKRARLCSSSSSDTSSRSFFDPTSQHRDWCPWVNITLGKESRENGGTEPDASAPAEPGWKAVLTILLAHKQSSQPAETDSMSLSEKSRKVFRIFRQWESLCSC

SEQ ID NO: 897917 - protein, 481 aa, Homo sapiens [sequence omitted]

SEQ ID NO: 897918 - protein, 378 aa, Homo sapiens
MRGLPRKREAWTHKQRCAELKKALCTAHEKFCFWPDSPSPDRFGMLPLDEPAILVSEFLDRFQSLCHLDLQLPSLRPEDLKTMCLTEDKISLLLHLLEDELDHRTDERKTTIKLGSDIQVHVTACILSVCGWACSSSLESMQLSLIACSQCMRKVGLWGFQQIESSMTDLDASFGLTSSPIPGLEGRPERLPLVPESPRRMMTRSQDATFSPGSEQAEKSPGPIVSRTRSWDSSSPVDRPEPEAASPTTRTRPVTRSMGTGDTPGLEVPSSPLRKAKRARLCSSSSSDTSSRSFFDPTSQHRDWCPWVNITLGKESRENGGTEPDASAPAEPGWKAVLTILLAHKQSSQPAETDSMSLSEKSRKVFRIFRQWESLCSC

SEQ ID NO: 897919 - protein, 334 aa, Homo sapiens
MLPLDEPAILVSEFLDRFQSLCHLDLQLPSLRPEDLKTMCLTEDKISLLLHLLEDELDHRTDERKTTIKLGSDIQVHVTACILSVCGWACSSSLESMQLSLIACSQCMRKVGLWGFQQIESSMTDLDASFGLTSSPIPGLEGRPERLPLVPESPRRMMTRSQDATFSPGSEQAEKSPGPIVSRTRSWDSSSPVDRPEPEAASPTTRTRPVTRSMGTGDTPGLEVPSSPLRKAKRARLCSSSSSDTSSRSFFDPTSQHRDWCPWVNITLGKESRENGGTEPDASAPAEPGWKAVLTILLAHKQSSQPAETDSMSLSEKSRKVFRIFRQWESLCSC

SEQ ID NO: 897920 - protein, 245 aa, Homo sapiens
PQEADINLPGRKFRSLQTLGEATRQRTKMAAPCEGQAFAVGVEKNWGAVVRSPEGTPQKIRQLIDEGIAPEEGGVDAKDTSATSQSVNGSPQAEQPSLESTSKEAFFSRVETFSSLKWAGKPFELSPLVCAKYGWVTVECDMLKCSSCQAFLCASLQPAFDFDRYKQRCAELKKALCTAHEKFCFWPDSPSPDGVSLLLPRLEYSGAILAHCNLRLPRSSNSPASASRVARITGVRHHAQLILYF

SEQ ID NO: 897921 - protein, 190 aa, Homo sapiens
MRGLPRKREAWTQPHPLEALYESLRVLEKDTSATSQSVNGSPQAEQPSLESTSKEAFFSRVETFSSLKWAGKPFELSPLVCAKYGWVTVECDMLKCSSCQAFLCASLQPAFDFDRYKQRCAELKKALCTAHEKFCFWPDSPSPDRFGMLPLDEPAILVSEFLDRFQSLCHLDLQLPSLRPEDLKTMVSFS

SEQ ID NO: 897922 - protein, 346 aa, Homo sapiens
MLKKPLSAVTWLCIFIVAFVSHPAWLQKLSKHKTPAQPQLKAANCCEEVKELKAQVANLSSLLSELNKKQERDWVSVVMQVMELESNSKRMESRLTDAESKYSEMNNQIDIMQLQAAQTVTQTSADAIYDCSSLYQKNYRISGVYKLPPDDFLGSPELEVFCDMETSGGGWTIIQRRKSGLVSFYRDWKQYKQGFGSIRGDFWLGNEHIHRLSRQPTRLRVEMEDWEGNLRYAEYSHFVLGNELNSYRLFLGNYTGNVGNDALQYHNNTAFSTKDKDNDNCLDKCAQLRKGGYWYNCCTDSNLNGVYYRLGEHNKHLDGITWYGWHGSTYSLKRVEMKIRPEDFKP

SEQ ID NO: 897923 - protein, 346 aa, Homo sapiens; identical to SEQ ID NO: 897922

SEQ ID NO: 897924 - protein, 283 aa, Homo sapiens
  misc_feature (23)..(23): Xaa can be any naturally occurring amino acid
  misc_feature (57)..(57): Xaa can be any naturally occurring amino acid
  misc_feature (63)..(63): Xaa can be any naturally occurring amino acid
  misc_feature (69)..(69): Xaa can be any naturally occurring amino acid
  misc_feature (83)..(83): Xaa can be any naturally occurring amino acid
  misc_feature (90)..(90): Xaa can be any naturally occurring amino acid
  misc_feature (98)..(98): Xaa can be any naturally occurring amino acid
  misc_feature (119)..(119): Xaa can be any naturally occurring amino acid
  misc_feature (128)..(128): Xaa can be any naturally occurring amino acid
  misc_feature (137)..(137): Xaa can be any naturally occurring amino acid
  misc_feature (163)..(163): Xaa can be any naturally occurring amino acid
FVTRLIYRQVEALPLQATSALVXVICSRKGPRLWVAYSSRHDPRLWVRYNVPVTGHXLWVRVXVHITDXRLLGRVIMVHVSGXQLLGMRXGSTSRPLXSLSRKVVPSQPPSASWVCVVXLPQPPEVAXGGVLRLSSXKGESGPADARQGVLILSSAEGGAEGXRGVSCRSEGVLRLSSAEGESSCRIRHEEQCEERIEEVTKKGNEAVASRDLSENNDQRQQHLAGALAPLASHRLPSSWDYRHTVTEAGPVCNSRCHLQLKHSSYVMSLVTKVKLSHPEKAT

SEQ ID NO: 897925 - protein, 347 aa, Homo sapiens
GGGALPLRRPETRRRWTRRRWAHGAEPAGARGRRRRESDPGGLVAGPRIPEWRPEPRKEILSADFEMMGLGNGRRSMKSPPLVLAALVACIIVLGFNYWIASSRSVDLQTRIMELEGRVRRAAAERGAVELKKNEFQGELEKQREQLDKIQSSHNFQLESVNKLYQDEKAVLVNNITTGERLIRVLQDQLKTLQRNYGRLQQDVLQFQKNQTNLERKFSYDLSQCINQMKEVKEQCEERIEEVTKKGNEAVASRDLSENNDQRQQLQALSEPQPRLQAAGLPHTEVPQGKGNVLGNSKSQTPAPSSEVVLDSKRQVEKEETNEIQVVNEEPQSCPVSEPGKSRDGGP

SEQ ID NO: 897926 - protein, 467 aa, Homo sapiens
GGGALPLRRPETRRRWTRRRWAHGAEPAGARGRRRRESDPGGLVAGPRIPEWRPEPRKEILSADFEMMGLGNGRRSMKSPPLVLAALVACIIVLGFNYWIASSRSVDLQTRIMELEGRVRRAAAERGAVELKKNEFQGELEKQREQLDKIQSSHNFQLESVNKLYQDEKAVLVNNITTGERLIRVLQDQLKTLQRNYGRLQQDVLQFQKNQTNLERKFSYDLSQCINQMKEVKEQCEERIEEVTKKGNEAVASRDLSENNDQRQQLQALSEPQPRLQAAGLPHTEVPQGKGNVLGNSKSQTPAPSSEVVLDSKRQVEKEETNEIQVVNEEPQRDRLPQEPGREQVVEDRPVGGRGFGGAGELGQTPQVQAALSVSQENPEMEGPERDQLVIPDGQEEEQEAAGEGRNQQKLRGEDDYNMDENEAESETDKQAALAGNDRNIDVFNVEDQKRDTINLLDQREKRNHTL

SEQ ID NO: 897927 - protein, 467 aa, Homo sapiens; identical to SEQ ID NO: 897926

SEQ ID NO: 897928 - protein, 445 aa, Homo sapiens
GGGALPLRRPETRRRWTRRRWAHGAEPAGARGRRRRESDPGGLVAGPRIPEWRPEPRKEILSADFEMMGLGNGRRSMKSPPLVLAALVACIIVLGFNYWIASSRSVDLQTRIMELEGRVRRAAAERGAVELKKNEFQGELEKQREQLDKIQSSHNFQLESVNKLYQDEKAVLVNNITTGERLIRVLQDQLKTLQRNYGRLQQDVLQFQKNQTNLERKFSYDLSQCINQMKEVKEQCEERIEEVTKKGNEAVASRDLSENNDQRQQLQALSEPQPRLQAAGLPHTEVPQGKGNVLGNSKSQTPAPSSEVVLDSKRQVEKEETNEIQVVNEEPQRDRLPQEPGREQVVEDRPVGGRGFGGAGELGQTPQVQAALSVSQENPEMEGPERDQLVIPDGQEEEQEAAGEGRNQQKLRGEDDYNMDENEAESETDKQAALAGNDRNIDDLP

SEQ ID NO: 897929 - protein, 467 aa, Homo sapiens; identical to SEQ ID NO: 897926

SEQ ID NO: 897930 - protein, 460 aa, Homo sapiens
GGGALPLRRPETRRRWTRRRWAHGAEPAGARGRRRRESDPGGLVAGPRIPEWRPEPRKEILSADFEMMGLGNGRRSMKSPPLVLAALVACIIVLGFNYWIASSRSVDLQTRIMELEGRVRRAAAERGAVELKKNEFQGELEKQREQLDKIQSSHNFQLESVNKLYQDEKAVLVNNITTGERLIRVLQDQLKTLQRNYGRLQQDVLQFQKNQTNLERKFSYDLSQCINQMKEVKEQCEERIEEVTKKGNEAVASRDLSENNDQRQQLQALSEPQPRLQAAGLPHTEVPQGKGNVLGNSKSQTPAPSSEVVLDSKRQVEKEETNEIQVVNEEPQRDRLPQEPGREQVVEDRPVGGRGFGGAGELGQTPQVQAALSVSQENPEMEGPERDQLVIPDGQEEEQEAAGEGRNQQKLRGEDDYNMDENEAESETDKQAALAGNDRNIDGSWEVPLKTGKILHVAFD

SEQ ID NO: 897931 - protein, 414 aa, Homo sapiens
GGGALPLRRPETRRRWTRRRWAHGAEPAGARGRRRRESDPGGLVAGPRIPEWRPEPRKEILSADFEMMGLGNGRRSMKSPPLVLAALVACIIVLGFNYWIASSRSVDLQTRIMELEGRVRRAAAERGAVELKKNEFQGELEKQREQLDKIQSSHNFQLESVNKLYQDEKAVLVNNITTGERLIRVLQDQLKTLQRNYGRLQQDVLQFQKNQTNLERKFSYDLSQCINQMKEVKEQCEERIEEVTKKGNEAVASRDLSENNDQRQQLQALSEPQPRLQAAGLPHTEVPQGKGNVLGNSKSQTPAPSSEVVLDSKRQVEKEETNEIQVVNEEPQRDRLPQEPGREQVVEDRPVGGRGFGGAGELGQTPQVQAALSVSQENPEMEGPERDQLVIPDGQEEEQEAAGEGGCEVSGAAV

SEQ ID NO: 897932 - protein, 322 aa, Homo sapiens
GGGALPLRRPETRRRWTRRRWAHGAEPAGARGRRRRESDPGGLVAGPRIPEWRPEPRKEILSADFEMMGLGNGRRSMKSPPLVLAALVACIIVLGFNYWIASSRSVDLQTRIMELEGRVRRAAAERGAVELKKNEFQGELEKQREQLDKIQSSHNFQLESVNKLYQDEKAVLVNNITTGERLIRVLQDQLKTLQRNYGRLQQDVLQFQKNQTNLERKFSYDLSQCINQMKEVKEQCEERIEEVTKKGNEAVASRDLSENNDQRQQLQALSEPQPRLQAAGLPHTEVPQGKGNVLGNSKSQTPAPSSEVVLDSTTSNLNILHM

SEQ ID NO: 897933 - protein, 467 aa, Homo sapiens; identical to SEQ ID NO: 897926

SEQ ID NO: 897934 - protein, 400 aa, Homo sapiens [sequence omitted]

SEQ ID NO: 897935 - protein, 171 aa, Homo sapiens
FFFFFFFKSNAGKVTANCVLCTEETNEIQVVNEEPQRDRLPQEPGREQVVEDRPVGGRGFGGAGELGQTPQVQAALSVSQENPEMEGPERDQLVIPDGQEEEQEAAGEGRNQQKLRGEDDYNMDENEAESETDKQAALAGNDRNIDVFNVEDQKRDTINLLDQREKRNHTL

SEQ ID NO: 897936 - protein, 467 aa, Homo sapiens; identical to SEQ ID NO: 897926

SEQ ID NO: 897937 - protein, 467 aa, Homo sapiens; identical to SEQ ID NO: 897926

SEQ ID NO: 897938 - protein, 450 aa, Homo sapiens
GGGALPLRRPETRRRWTRRRWAHGAEPAGARGRRRRESDPGGLVAGPRIPEWRPEPRKEILSADFEMMGLGNGRRSMKSPPLVLAALVACIIVLGFNYWIASSRSVDLQTRIMELEGRVRRAAAERGAVELKKNEFQGELEKQREQLDKIQSSHNFQLESVNKLYQDEKAVLVNNITTGERLIRVLQDQLKTLQRNYGRLQQDVLQFQKNQTNLERKFSYDLSQCINQMKEVKEQCEERIEEVTKKGNEAVASRDLSENNDQRQQLQALSEPQPRLQAAGLPHTEVPQGKGNVLGNSKSQTPAPSSEVVLDSKRQVEKEETNEIQVVNEEPQRDRLPQEPGREQVVEDRPVGGRGFGGAGELGQTPQVQAALSVSQENPEMEGPERDQLVIPDGQEEEQEAAGEGRNQQKLRGEDDYNMDENEAESETDKQAALAGNDRNIDGHMSEGDN

SEQ ID NO: 897939 - protein, 413 aa, Homo sapiens
GGGALPLRRPETRRRWTRRRWAHGAEPAGARGRRRRESDPGGLVAGPRIPEWRPEPRKEILSADFEMMGLGNGRRSMKSPPLVLAALVACIIVLGFNYWIASSRSVDLQTRIMELEGRVRRAAAERGAVELKKNEFQGELEKQREQLDKIQSSHNFQLESVNKLYQDEKAVLVNNITTGERLIRVLQDQLKTLQRNYGRLQQDVLQFQKNQTNLERKFSYDLSQCINQMKEVKEQCEERIEEVTKKGNEAVASRDLSENNDQRQQLQALSEPQPRLQAAGLPHTEVPQGKGNVLGNSKSQTPAPSSEVVLDSKRQVEKEETNEIQVVNEEPQRDRLPQEPGREQVVEDRPVGGRGFGGAGELGQTPQVQAALSVSQENPEMEGPERDQLVIPDGQEEEQEAAGEGTGGKMRQR

SEQ ID NO: 897940 - protein, 980 aa, Homo sapiens
MPAELLLLLIVAFASPSCQVLSSLRMAAILDDQTVCGRGERLALALAREQINGIIEVPAKARVEVDIFELQRDSQYETTDTMCQILPKGVVSVLGPSSSPASASTVSHICGEKEIPHIKVGPEETPRLQYLRFASVSLYPSNEDVSLAVSRILKSFNYPSASLICAKAECLLRLEELVRGFLISKETLSVRMLDDSRDPTPLLKEIRDDKVSTIIIDANASISHLILRKASELGMTSAFYKYILTTMDFPILHLDGIVEDSSNILGFSMFNTSHPFYPEFVRSLNMSWRENCEASTYLGPALSAALMFDAVHVVVSAVRELNRSQEIGVKPLACTSANIWPHGTSLMNYLRMVEYDGLTGRVEFNSKGQRTNYTLRILEKSRQGHREIGVWYSNRTLAMNATTLDINLSQTLANKTLVVTTILENPYVMRRPNFQALSGNERFEGFCVDMLRELAELLRFRYRLRLVEDGLYGAPEPNGSWTGMVGELINRKADLAVAAFTITAEREKVIDFSKPFMTLGISILYRVHMGRKPGYFSFLDPFSPAVWLFMLLAYLAVSCVLFLAARLSPYEWYNPHPCLRARPHILENQYTLGNSLWFPVGGFMQQGSEIMPRALSTRCVSGVWWAFTLIIISSYTANLAAFLTVQRMEVPVESADDLADQTNIEYGTIHAGSTMTFFQNSRYQTYQRMWNYMQSKQPSVFVKSTEEGIARVLNSRYAFLLESTMNEYHRRLNCNLTQIGGLLDTKGYGIGMPLGSPFRDEITLAILQLQENNRLEILKRKWWEGGRCPKEEDHRAKGLGMENIGGIFIVLICGLIIAVFVAVMEFIWSTRRSAESEEVSVCQEMLQELRHAVSCRKTSRSRRRRRPGGPSRALLSLRAVREMRLSNGKLYSAGAGGDAGSAHGGPQRLLDDPGPPSGARPAAPTPCTHVRVCQECRRIQALRASGAGAPPRGLGVPAEATSPPRPRPGPAGPRELAEHE

SEQ ID NO: 897941 - protein, 149 aa, Homo sapiens
DRPRHPQVSVCQEMLQELRHAVSCRKTSRSRRRRRPGGPSRALLSLRAVREMRLSNGKLYSAGAGGDAGSAHGGPQRLLDDPGPPSGARPAAPTPCTHVRVCQECRRIQALRASGAGAPPRGLGVPAEATSPPRPRPGPAGPRELAEHE

SEQ ID NO: 897942 - protein, 785 aa, Homo sapiens
VIFIADSRGYTEGQRTVTIIIDANASISHLILRKASELGMTSAFYKYILTTMDFPILHLDGIVEDSSNILGFSMFNTSHPFYPEFVRSLNMSWRENCEASTYLGPALSAALMFDAVHVVVSAVRELNRSQEIGVKPLACTSANIWPHGTSLMNYLRMVEYDGLTGRVEFNSKGQRTNYTLRILEKSRQGHREIGVWYSNRTLAMNATTLDINLSQTLANKTLVVTTILENPYVMRRPNFQALSGNERFEGFCVDMLRELAELLRFRYRLRLVEDGLYGAPEPNGSWTGMVGELINRKADLAVAAFTITAEREKVIDFSKPFMTLGISILYRVHMGRKPGYFSFLDPFSPAVWLFMLLAYLAVSCVLFLAARLSPYEWYNPHPCLRARPHILENQYTLGNSLWFPVGGFMQQGSEIMPRALSTRCVSGVWWAFTLIIISSYTANLAAFLTVQRMEVPVESADDLADQTNIEYGTIHAGSTMTFFQNSRYQTYQRMWNYMQSKQPSVFVKSTEEGIARVLNSRYAFLLESTMNEYHRRLNCNLTQIGGLLDTKGYGIGMPLGSPFRDEITLAILQLQENNRLEILKRKWWEGGRCPKEEDHRAKGLGMENIGGIFIVLICGLIIAVFVAVMEFIWSTRRSAESEEVSVCQEMLQELRHAVSCRKTSRSRRRRRPGGPSRALLSLRAVREMRLSNGKLYSAGAGGDAGSAHGGPQRLLDDPGPPSGARPAAPTPCTHVRVCQECRRIQALRASGAGAPPRGLGVPAEATSPPRPRPGPAGPRELAEHE

SEQ ID NO: 897943 - protein, 180 aa, Homo sapiens
MENIGGIFIVLICGLIIAVFVAVMEFIWSTRRSAESEEVSVCQEMLQELRHAVSCRKTSRSRRRRRPGGPSRALLSLRAVREMRLSNGKLYSAGAGGDAGSAHGGPQRLLDDPGPPSGARPAAPTPCTHVRVCQECRRIQALRASGAGAPPRGLGVPAEATSPPRPRPGPAGPRELAEHE

SEQ ID NO: 897944 - protein, 229 aa, Homo sapiens [sequence omitted]

SEQ ID NO: 897945 - protein, 214 aa, Homo sapiens
MASLSRPSLPSCLCSFLLLLLLQVSSSYAGQFRVIGPRHPIRALVGDEVELPCRISPGKNATGMEVGWYRPPFSRVVHLYRNGKDQDGDQAPEYRGRTELLKDAIGEGKVTLRIRNVRFSDEGGFTCFFRDHSYQEEAAMELKVEDPFYWVSPGVLVLLAVLPVLLLQITVGLVFLCLQYRLRGKLRAEIENLHRTFAGQFLEELLFHLEALSG

SEQ ID NO: 897946 - protein, 190 aa, Homo sapiens
MASLSRPSLPSCLCSFLLLLLLQVSSSYAGQFRVIGPRHPIRALVGDEVELPCRISPGKNATGMEVGWYRPPFSRVVHLYRNGKDQDGDQAPEYRGRTELLKDAIGEGKVTLRIRNVRFSDEGGFTCFFRDHSYQEEAAMELKVEDPFYWVSPGVLVLLAVLPVLLLQITVGLVFLCLQYRLRGGCPAGR

SEQ ID NO: 897947 - protein, 136 aa, Homo sapiens
MASLSRPSLPSCLCSFLLLLLLQVSSSYADPFYWVSPGVLVLLAVLPVLLLQITVGLVFLCLQYRLRGKLRAEIENLHRTFDPHFLRVPCWKITLFVIVPVLGPLVALIICYNWLHRRLAGQFLEELLFHLEALSG

SEQ ID NO: 897948 - protein, 252 aa, Homo sapiens
MASLSRPSLPSCLCSFLLLLLLQVSSSYAGQFRVIGPRHPIRALVGDEVELPCRISPGKNATGMEVGWYRPPFSRVVHLYRNGKDQDGDQAPEYRGRTELLKDAIGEGKVTLRIRNVRFSDEGGFTCFFRDHSYQEEAAMELKVEDPFYWVSPGVLVLLAVLPVLLLQITVGLVFLCLQYRLRGKLRAEIENLHRTFDPHFLRVPCWKITLFVIVPVLGPLVALIICYNWLHRRLAGQFLEELLFHLEALSG

SEQ ID NO: 897949 - protein, 147 aa, Homo sapiens
MASLSRPSLPSCLCSFLLLLLLQVSSSYAGQFRVIGPRHPIRALVGDEVELPCRISPGKNATGMEVGWYRPPFSRVVHLYRNGKDQDGDQAPEYRGRTELLKDAIGEGKVTLRIRNVRFSDEGGFTCFFRDHSYQEEAAMELKVEGE

SEQ ID NO: 897950 - protein, 250 aa, Homo sapiens
MASLSRPSLPSCLCSFLLLLLLQVSSSYAGQFRVIGPRHPIRALVGDEVELPCRISPGKNATGMEVGWYRPPFSRVVHLYRNGKDQDGDQAPEYRGRTELLKDAIGEGKVTLRIRNVRFSDEGGFTCFFRDHSYQEEAAMELKVEDPFYWVSPGVLVLLAVLPVLLLQITVGLVFLCLQYRLRGKLRAEIENLHRTFDPHFLSSTWKPSLAKDRQVPLSPSEDTCTGEQHRMVSAMNWRPGISSLKITVW

SEQ ID NO: 897951 - protein, 145 aa, Homo sapiens
MVAERTHKAAATGARGPGELGAPGTVALVAARAERGARLPSPGSCGLLTLALCSLALSLLAHFRTAELQARVLRLEAERGEQQMETAILGRVNQLLDEKWKLHSRRRREAPKTSPGCNCPPGPLHLLCWCAVTIPWTPSCRLFII

SEQ ID NO: 897952 - protein, 308 aa, Homo sapiens
MQPSGHRLRDVEHHPLLAENDNYDSSSSSSSEADVADRVWFIRDGCGMICAVMTWLLVAYADFVVTFVMLLPSKDFWYSVVNGVIFNCLAVLALSSHLRTMLTDPGAVPKGNATKEYMESLQLKPGEVIYKCPKCCCIKPERAHHCSICKRCIRKMDHHCPWVNNCVGEKNQRFFVLFTMYIALSSVHALILCGFQFISCVRGQWTECSDFSPPITVILLIFLCLEGLLFFTFTAVMFGTQIHSICNDETEIERLKSEKPTWERRLRWEGMKSVFGGPPSLLWMNPFVGFRFRRLPTRPRKGGPEFSV

SEQ ID NO: 897953 - protein, 357 aa, Homo sapiens
MQPSGHRLRDVEHHPLLAENDNYDSSSSSSSEADVADRVWFIRDGCGMICAVMTWLLVAYADFVVTFVMLLPSKDFWYSVVNGVIFNCLAVLALSSHLRTMLTDPEKSSDCRPSACTVKTGLDPTLVGICGEGTESVQSLLLGAVPKGNATKEYMESLQLKPGEVIYKCPKCCCIKPERAHHCRAWNTEKSNSPFHICKRCIRKMDHHCPWVNNCVGEKNQRFFVLFTMYIALSSVHALILCGFQFISCVRGQWTECSDFSPPITVILLIFLCLEGLLFFTFTAVMFGTQIHSICNDETEIERLKSEKPTWERRLRWEGMKSVFGGPPSLLWMNPFVGFRFRRLPTRPRKGGPEFSV

SEQ ID NO: 897954 - protein, 191 aa, Homo sapiens
MESLQLKPGEVIYKCPKCCCIKPERAHHCSICKRCIRKMDHHCPWVNNCVGEKNQRFFVLFTMYIALSSVHALILCGFQFISCVRGQWTECSDFSPPITVILLIFLCLEGLLFFTFTAVMFGTQIHSICNDETEIERLKSEKPTWERRLRWEGMKSVFGGPPSLLWMNPFVGFRFRRLPTRPRKGGPEFSV

SEQ ID NO: 897955 - protein, 345 aa, Homo sapiens
MQPSGHRLRDVEHHPLLAENDNYDSSSSSSSEADVADRVWFIRDGCGMICAVMTWLLVAYADFVVTFVMLLPSKDFWYSVVNGVIFNCLAVLALSSHLRTMLTDPEKSSDCRPSACTVKTGLDPTLVGICGEGTESVQSLLLGAVPKGNATKEYMESLQLKPGEVIYKCPKCCCIKPERAHHCSICKRCIRKMDHHCPWVNNCVGEKNQRFFVLFTMYIALSSVHALILCGFQFISCVRGQWTECSDFSPPITVILLIFLCLEGLLFFTFTAVMFGTQIHSICNDETEIERLKSEKPTWERRLRWEGMKSVFGGPPSLLWMNPFVGFRFRRLPTRPRKGGPEFSV

SEQ ID NO: 897956 - protein, 345 aa, Homo sapiens; identical to SEQ ID NO: 897955

SEQ ID NO: 897957 - protein, 126 aa, Homo sapiens [sequence omitted]

SEQ ID NO: 897958 - protein, 308 aa, Homo sapiens; identical to SEQ ID NO: 897952

SEQ ID NO: 897959 - protein, 345 aa, Homo sapiens; identical to SEQ ID NO: 897955

SEQ ID NO: 897960 - protein, 191 aa, Homo sapiens; identical to SEQ ID NO: 897954

SEQ ID NO: 897961 - protein, 345 aa, Homo sapiens; identical to SEQ ID NO: 897955

SEQ ID NO: 897962 - protein, 146 aa, Homo sapiens [sequence omitted]

SEQ ID NO: 897963 - protein, 331 aa, Homo sapiens
MDSEKKRFTEEATKYFRERVSPVHLQILLTNNEAWKRFVTAAELPRDEADALYEALKKLRTYAAIEDEYVQQKDEQFREWFLKEFPQVKRKIQESIEKLRALANGIEEVHRGCTISNVVSSSTGAASGIMSLAGLVLAPFTAGTSLALTAAGVGLGAASAVTGITTSIVEHSYTSSAEAEASRLTATSIDRLKVFKEVMRDITPNLLSLLNNYYEATQTIGSEIRAIRQARARARLPVTTWRISAGSGGQAERTIAGTTRAVSRGARILSATTSGIFLALDVVNLVYESKHLHEGAKSASAEELRRQAQELEENLMELTQIYQRLNPCHTH

SEQ ID NO: 897964 - protein, 375 aa, Homo sapiens
MCPEATQGISQRLENVSGYYADARLEVGSTQLRTAGSCSHSFKRSFLEKKRFTEEATKYFRERVSPVHLQILLTNNEAWKRFVTAAELPRDEADALYEALKKLRTYAAIEDEYVQQKDEQFREWFLKEFPQVKRKIQESIEKLRALANGIEEVHRGCTISNVVSSSTGAASGIMSLAGLVLAPFTAGTSLALTAAGVGLGAASAVTGITTSIVEHSYTSSAEAEASRLTATSIDRLKVFKEVMRDITPNLLSLLNNYYEATQTIGSEIRAIRQARARARLPVTTWRISAGSGGQAERTIAGTTRAVSRGARILSATTSGIFLALDVVNLVYESKHLHEGAKSASAEELRRQAQELEENLMELTQIYQRLNPCHTH

SEQ ID NO: 897965 - protein, 414 aa, Homo sapiens
QEGGTKGAAGPRMGLGQGWGWEASCFACLIRSCCQVVTFTFPFGFQGISQRLENVSGYYADARLEVGSTQLRTAGSCSHSFKRSFLEKKRFTEEATKYFRERVSPVHLQILLTNNEAWKRFVTAAELPRDEADALYEALKKLRTYAAIEDEYVQQKDEQFREWFLKEFPQVKRKIQESIEKLRALANGIEEVHRGCTISNVVSSSTGAASGIMSLAGLVLAPFTAGTSLALTAAGVGLGAASAVTGITTSIVEHSYTSSAEAEASRLTATSIDRLKVFKEVMRDITPNLLSLLNNYYEATQTIGSEIRAIRQARARARLPVTTWRISAGSGGQAERTIAGTTRAVSRGARILSATTSGIFLALDVVNLVYESKHLHEGAKSASAEELRRQAQELEENLMELTQIYQRLNPCHTH

SEQ ID NO: 897966 - protein, 331 aa, Homo sapiens; identical to SEQ ID NO: 897963

SEQ ID NO: 897967 - protein, 331 aa, Homo sapiens; identical to SEQ ID NO: 897963

SEQ ID NO: 897968 - protein, 331 aa, Homo sapiens; identical to SEQ ID NO: 897963

SEQ ID NO: 897969 - protein, 331 aa, Homo sapiens; identical to SEQ ID NO: 897963

SEQ ID NO: 897970 - protein, 202 aa, Homo sapiens
MSLAGLVLAPFTAGTSLALTAAGVGLGAASAVTGITTSIVEHSYTSSAEAEASRLTATSIDRLKVFKEVMRDITPNLLSLLNNYYEATQTIGSEIRAIRQARARARLPVTTWRISAGSGGQAERTIAGTTRAVSRGARILSATTSGIFLALDVVNLVYESKHLHEGAKSASAEELRRQAQELEENLMELTQIYQRLNPCHTH

SEQ ID NO: 897971 - protein, 331 aa, Homo sapiens; identical to SEQ ID NO: 897963

SEQ ID NO: 897972 - protein, 331 aa, Homo sapiens; identical to SEQ ID NO: 897963

SEQ ID NO: 897973 - protein, 331 aa, Homo sapiens; identical to SEQ ID NO: 897963

SEQ ID NO: 897974 - protein, 212 aa, Homo sapiens
MMGRPCLLTAGRPCLWRRMAPSLQTPVQYLLPEAKAQDSDKICVVIDLDETLVHSSFKPVNNADFIIPVEIDGVVHQVYVLKRPHVDEFLQRMGELFECVLFTASLAKYADPVADLLDKWGAFRARLFRESCVFHRGNYVKDLSRLGRDLRRVLILDNSPASYVFHPDNAVPVASWFDNMSDTELHDLLPFFEQLSRVDDVYSVLRQPRPGS

SEQ ID NO: 897975 - protein, 212 aa, Homo sapiens; identical to SEQ ID NO: 897974

SEQ ID NO: 897976 - protein, 212 aa, Homo sapiens; identical to SEQ ID NO: 897974

SEQ ID NO: 897977 - protein, 212 aa, Homo sapiens; identical to SEQ ID NO: 897974

SEQ ID NO: 897978 - protein, 220 aa, Homo sapiens
MMGRPCLLTAGRPCLWRRMAPSLQTPVQYLLPEAKAQDSDKICVVIDLDETLVHSSFKPVNNADFIIPVEIDGVVHQPPHWPAPQVYVLKRPHVDEFLQRMGELFECVLFTASLAKYADPVADLLDKWGAFRARLFRESCVFHRGNYVKDLSRLGRDLRRVLILDNSPASYVFHPDNAVPVASWFDNMSDTELHDLLPFFEQLSRVDDVYSVLRQPRPGS

SEQ ID NO: 897979 - protein, 140 aa, Homo sapiens
MMGRPCLLTAGRPCLWRRMAPSLQTPVQYLLPEAKAQDSDKICVVIDLDETLVHSSFKPVNNADFIIPVEIDGVVHQLRRVLILDNSPASYVFHPDNAVPVASWFDNMSDTELHDLLPFFEQLSRVDDVYSVLRQPRPGS

SEQ ID NO: 897980 - protein, 212 aa, Homo sapiens; identical to SEQ ID NO: 897974

SEQ ID NO: 897981 - protein, 212 aa, Homo sapiens; identical to SEQ ID NO: 897974

SEQ ID NO: 897982 - protein, 212 aa, Homo sapiens; identical to SEQ ID NO: 897974

SEQ ID NO: 897983 - protein, 212 aa, Homo sapiens; identical to SEQ ID NO: 897974

SEQ ID NO: 897984 - protein, 212 aa, Homo sapiens; identical to SEQ ID NO: 897974

SEQ ID NO: 897985 - protein, 212 aa, Homo sapiens; identical to SEQ ID NO: 897974

SEQ ID NO: 897986 - protein, 88 aa, Homo sapiens
LLVCSSFPSLVLRLCAVACRFFFRLSFCLRRFLSPLSSLPSILLPVTHTLCLSLSLCSSAPRLASPFLSFSPPARPRGVSFFFFFLYI

SEQ ID NO: 897987 - protein, 212 aa, Homo sapiens; identical to SEQ ID NO: 897974

SEQ ID NO: 897988 - protein, 233 aa, Homo sapiens
MARLRLHSISPCQQGQGSPCDVHSPWYTACLHVVSQCDIMSPNVVLPLLQPDDSTQNAPNGAICVVIDLDETLVHSSFKPVNNADFIIPVEIDGVVHQVYVLKRPHVDEFLQRMGELFECVLFTASLAKYADPVADLLDKWGAFRARLFRESCVFHRGNYVKDLSRLGRDLRRVLILDNSPASYVFHPDNAVPVASWFDNMSDTELHDLLPFFEQLSRVDDVYSVLRQPRPGS

SEQ ID NO: 897989 - protein, 212 aa, Homo sapiens; identical to SEQ ID NO: 897974

SEQ ID NO: 897990 - protein, 146 aa, Homo sapiens
MLPCFSAAKLGPLAPSGSASWGQGSCLGPPVWERWTSSALHRAPSSPPSFPRGTALGWEGRTSPSPCPTSSLGTERAPTNLCLCLGGRGGLLPLGKAAGVCPSGPTVQLLQGRQLRAAPCIIQAMTSDFCLNQPRGLAPPALSVGA

SEQ ID NO: 897991 - protein, 212 aa, Homo sapiens; identical to SEQ ID NO: 897974

SEQ ID NO: 897992 - protein, 212 aa, Homo sapiens; identical to SEQ ID NO: 897974

SEQ ID NO: 897993 - protein, 212 aa, Homo sapiens; identical to SEQ ID NO: 897974

SEQ ID NO: 897994 - protein, 209 aa, Homo sapiens
MAPSLQTPVQYLLPEAKAQDSDKICVVIDLDETLVHSSFKPVNNADFIIPVEIDGVVHQVYVLKRPHVDEFLQRMGELFECVLFTASLAKYADPVADLLDKWGAFRARLFRESCVFHRGNYVKDLSRLGRDLRRVLILDNSPASYVFHPDNAVSAGWTGTGTGAETQEGVSPFRPPWPLGSPVGGWVPSQSFLHSLPVPAAHSPHPPAL

SEQ ID NO: 897995 - protein, 105 aa, Homo sapiens
MNGGGSGPASQVAADVLNISIKISLFPYARGATELHPYGSYHAVMEAAIHWGALAIELARSGSLCQLWNNNLQLISIDDTLPLGLGQIATEYLLQITLHVFSLER

SEQ ID NO: 897996 - protein, 73 aa, Homo sapiens
RRRSEWKWAADRAAIVSRWNWLQAHVSDLEYRIRQQTDIYKQIRANKVRDKYLMFLNAAENYQYRWSQTLDLK

SEQ ID NO: 897997 - protein, 73 aa, Homo sapiens; identical to SEQ ID NO: 897996

SEQ ID NO: 897998 - protein, 109 aa, Homo sapiens
RRRSEWKWAADRAAIVSRWNWLQAHVSDLEYRIRQQTDIYKQIRANKGLIVLGEVPPPEHTTDLFLPLSSEVKTDHGTDKLIESVSQPLENHGAPIIGHISESLSTKSC

SEQ ID NO: 897999 - protein, 70 aa, Homo sapiens
GVCVRLERTGEPRPAERRGRAVTWTTAQTRASCGSDASGHAGEITLGSSDIQPVSSLLICEHEMGLGCVT

SEQ ID NO: 898000 - protein, 149 aa, Homo sapiens
GGVCEAGADWGAQTCRATWASGDLDHGADAGELRLGRQRTRGRVRGLSVQRARCRHLQRPAVPRRPDLDHFLAASLSGGSPRSGSHFPVQDAGSEATSVVARDPSQDLPGTRRDGTLGPRPQPPAAAGRRDLIPRRPGGTEASRSWEGI

SEQ ID NO: 898001 - protein, 491 aa, Homo sapiens
MSLKSERRGIHVDQSDLLCKKGCGYYGNPAWQGFCSKCWREEYHKARQKQIQEDWELAERLQREEEEAFASSQSSQGAQSLTFSKFEEKKTNEKTRKVTTVKKFFSASSRVGSKKEIQEAKAPSPSINRQTSIETDRVSKEFIEFLKTFHKTGQEIYKQTKLFLEGMHYKRDLSIEEQSECAQDFYHNVAERMQTRGKVPPERVEKIMDQIEKYIMTRLYKYVFCPETTDDEKKDLAIQKRIRALRWVTPQMLCVPVNEDIPEVSDMVVKAITDIIEMDSKRVPRDKLACITKCSKHIFNAIKITKNEPASADDFLPTLIYIVLKGNPPRLQSNIQYITRFCNPSRLMTGEDGYYFTNLCCAVAFIEKLDAQSLNLSQEDFDRYMSGQTSPRKQEAESWSPDACLGVKQMYKNLDLLSQLNERQERIMNEAKKLEKDLIDWTDGIAREVQDIVEKYPLEIKPPNQPLAAIDSENVENDKLPPPLQPQVYAG

SEQ ID NO: 898002 - protein, 491 aa, Homo sapiens; identical to SEQ ID NO: 898001

SEQ ID NO: 898003 - protein, 407 aa, Homo sapiens
MWINRISCARKDVVTTATLPGRVSAPSAGGKSTTKPGRSSPSINRQTSIETDRVSKEFIEFLKTFHKTGQEIYKQTKLFLEGMHYKRDLSIEEQSECAQDFYHNVAERMQTRGKVPPERVEKIMDQIEKYIMTRLYKYVFCPETTDDEKKDLAIQKRIRALRWVTPQMLCVPVNEDIPEVSDMVVKAITDIIEMDSKRVPRDKLACITKCSKHIFNAIKITKNEPASADDFLPTLIYIVLKGNPPRLQSNIQYITRFCNPSRLMTGEDGYYFTNLCCAVAFIEKLDAQSLNLSQEDFDRYMSGQTSPRKQEAESWSPDACLGVKQMYKNLDLLSQLNERQERIMNEAKKLEKDLIDWTDGIAREVQDIVEKYPLEIKPPNQPLAAIDSENVENDKLPPPLQPQVYAG

SEQ ID NO: 898004 - protein, 578 aa, Homo sapiens
ASRRVCVGRERTTETRPTAATRASGCVDVGEAAGEGLGNSKTEWPEAWTLSEDISAKAPAAQITLGSSDIQPVSSLLICEHVVSRKKMSLKSERRGIHVDQSDLLCKKGCGYYGNPAWQGFCSKCWREEYHKARQKQIQEDWELAERLQREEEEAFASSQSSQGAQSLTFSKFEEKKTNEKTRKVTTVKKFFSASSRVGSKKEIQEAKAPSPSINRQTSIETDRVSKEFIEFLKTFHKTGQEIYKQTKLFLEGMHYKRDLSIEEQSECAQDFYHNVAERMQTRGKVPPERVEKIMDQIEKYIMTRLYKYVFCPETTDDEKKDLAIQKRIRALRWVTPQMLCVPVNEDIPEVSDMVVKAITDIIEMDSKRVPRDKLACITKCSKHIFNAIKITKNEPASADDFLPTLIYIVLKGNPPRLQSNIQYITRFCNPSRLMTGEDGYYFTNLCCAVAFIEKLDAQSLNLSQEDFDRYMSGQTSPRKQEAESWSPDACLGVKQMYKNLDLLSQLNERQERIMNEAKKLEKDLIDWTDGIAREVQDIVEKYPLEIKPPNQPLAAIDSENVENDKLPPPLQPQVYAG

SEQ ID NO: 898005 - protein, 299 aa, Homo sapiens
MQTRGKVPPERVEKIMDQIEKYIMTRLYKYVFCPETTDDEKKDLAIQKRIRALRWVTPQMLCVPVNEDIPEVSDMVVKAITDIIEMDSKRVPRDKLACITKCSKHIFNAIKITKNEPASADDFLPTLIYIVLKGNPPRLQSNIQYITRFCNPSRLMTGEDGYYFTNLCCAVAFIEKLDAQSLNLSQEDFDRYMSGQTSPRKQEAESWSPDACLGVKQMYKNLDLLSQLNERQERIMNEAKKLEKDLIDWTDGIAREVQDIVEKYPLEIKPPNQPLAAIDSENVENDKLPPPLQPQVYAG

SEQ ID NO: 898006 - protein, 102 aa, Homo sapiens
MGRSDPDHSPRPRQGRGDLIPRHPRGQKCPGVGRGFEACGPDFHPVAEGEAAGPGLGAEVPASEPSGRRAEGCPSRQFREREGGTLPLWRLGHRQLAVSQRG

SEQ ID NO: 898007 - protein, 68 aa, Homo sapiens
GVCVRLERTGEPRPAERRGRAVTWTTAQTRASCGSDASGHAGEITLGSSDIQPVSSLLICEHGWSAVS

SEQ ID NO: 898008 - protein, 89 aa, Homo sapiens
ASRRVCVGRERTTETRPTAATRASGCVDVGEAAGEGLGNSKTEWPEAWTLSEDISAKAPAAQITLGSSDIQPVSSLLICEHEMGLGCVT

SEQ ID NO: 898009 - protein, 69 aa, Homo sapiens
GVCVRLERTGEPRPAERRGRAVTWTTAQTRASCGSDASGHAGEMFEVRPGMLAHACNPSTFGGQGGRIT

SEQ ID NO: 898010 - protein, 491 aa, Homo sapiens; identical to SEQ ID NO: 898001

SEQ ID NO: 898011 - protein, 491 aa, Homo sapiens; identical to SEQ ID NO: 898001

SEQ ID NO: 898012 - protein, 491 aa, Homo sapiens; identical to SEQ ID NO: 898001

SEQ ID NO: 898013 - protein, 284 aa, Homo sapiens
MDQIEKYIMTRLYKYVFCPETTDDEKKDLAIQKRIRALRWVTPQMLCVPVNEDIPEVSDMVVKAITDIIEMDSKRVPRDKLACITKCSKHIFNAIKITKNEPASADDFLPTLIYIVLKGNPPRLQSNIQYITRFCNPSRLMTGEDGYYFTNLCCAVAFIEKLDAQSLNLSQEDFDRYMSGQTSPRKQEAESWSPDACLGVKQMYKNLDLLSQLNERQERIMNEAKKLEKDLIDWTDGIAREVQDIVEKYPLEIKPPNQPLAAIDSENVENDKLPPPLQPQVYAG

SEQ ID NO: 898014 - protein, 392 aa, Homo sapiens
RVGTRRCASSRVGSKKEIQEAKAPSPSINRQTSIETDRVSKEFIEFLKTFHKTGQEIYKQTKLFLEGMHYKRDLSIEEQSECAQDFYHNVAERMQTRGKVPPERVEKIMDQIEKYIMTRLYKYVFCPETTDDEKKDLAIQKRIRALRWVTPQMLCVPVNEDIPEVSDMVVKAITDIIEMDSKRVPRDKLACITKCSKHIFNAIKITKNEPASADDFLPTLIYIVLKGNPPRLQSNIQYITRFCNPSRLMTGEDGYYFTNLCCAVAFIEKLDAQSLNLSQEDFDRYMSGQTSPRKQEAESWSPDACLGVKQMYKNLDLLSQLNERQERIMNEAKKLEKDLIDWTDGIAREVQDIVEKYPLEIKPPNQPLAAIDSENVENDKLPPPLQPQVYAG

SEQ ID NO: 898015 - protein, 89 aa, Homo sapiens; identical to SEQ ID NO: 898008

SEQ ID NO: 898016 - protein, 87 aa, Homo sapiens
ASRRVCVGRERTTETRPTAATRASGCVDVGEAAGEGLGNSKTEWPEAWTLSEDISAKAPAAQITLGSSDIQPVSSLLICEHGWSAVS

SEQ ID NO: 898017 - protein, 727 aa, Homo sapiens
GGRRAPGARSCEETWQSAAALAPDRKAGEVAEEGGLRAMATKTAGVGRWEVVKKGRRPGVGAGAGGRGGGRNRRALGEANGVWKYDLTPAIQTTSTLYERGFENIMKRQNKEQVPPPAVEPKKPGNKKQPKKVATPPNQNQKQGRFRSLEEALKALDVADLQKELDKSQSVFSGNPSIWLKDLASYLNYKLQAPLSEPTLSQHTHDYPYSLVSRELRGIIRGLLAKAAGSLELFFDHCLFTMLQELDKTPGESLHGYRICIQAILQDKPKIATANLGKFLELLRSHQSRPAKCLTIMWALGQAGFANLTEGLKVWLGIMLPVLGIKSLSPFAITYLDRLLLMHPNLTKGFGMIGPKDFFPLLDFAYMPNNSLTPSLQEQLCQLYPRLKVLAFGAKPDSTLHTYFPSFLSRATPSCPPEMKKELLSSLTECLTVDPLSASVWRQLYPKHLSQSSLLLEHLLSSWEQIPKKVQKSLQETIQSLKLTNQELLRKGSSNNQDVVTCDMACKGLLQQVQGPRLPWTRLLLLLLVFAVGFLCHDLRSHSSFQASLTGRLLRSSGFLPASQQACAKLYSYSLQGYSWLGETLPLWGSHLLTVVRPSLQLAWAHTNATVSFLSAHCASHLAWFGDSLTSLSQRLQIQLPDSVNQLLRYLRELPLLFHQNVLLPLWHLLLEALAWAQEHCHEACRGEVTWDCMKTQLSEAVHWTWLCLQDITVAFLDWALALISQQ

SEQ ID NO: 898018 - protein, 581 aa, Homo sapiens
MTEEEALKALDVADLQKELDKSQSVFSGNPSIWLKDLASYLNYKLQAPLSEPTLSQHTHDYPYSLVSRELRGIIRGLLAKAAGSLELFFDHCLFTMLQELDKTPGESLHGYRICIQAILQDKPKIATANLGKFLELLRSHQSRPAKCLTIMWALGQAGFANLTEGLKVWLGIMLPVLGIKSLSPFAITYLDRLLLMHPNLTKGFGMIGPKDFFPLLDFAYMPNNSLTPSLQEQLCQLYPRLKVLAFGAKPDSTLHTYFPSFLSRATPSCPPEMKKELLSSLTECLTVDPLSASVWRQLYPKHLSQSSLLLEHLLSSWEQIPKKVQKSLQETIQSLKLTNQELLRKGSSNNQDVVTCDMACKGLLQQVQGPRLPWTRLLLLLLVFAVGFLCHDLRSHSSFQASLTGRLLRSSGFLPASQQACAKLYSYSLQGYSWLGETLPLWGSHLLTVVRPSLQLAWAHTNATVSFLSAHCASHLAWFGDSLTSLSQRLQIQLPDSVNQLLRYLRELPLLFHQNVLLPLWHLLLEALAWAQEHCHEACRGEVTWDCMKTQLSEAVHWTWLCLQDITVAFLDWALALISQQ

SEQ ID NO: 898019 - protein, 682 aa, Homo sapiens
GGRRAPGARSCEETWQSAAALAPDRKAGEVAEEGGLRAMATKTAGVGRWEVVKKGRRPGVGAGAGGRGGGRNRRALGEANGVWKYDLTPAIQTTSTLYERGFENIMKRQNKEQVPPPAVEPKKPGNKKQPKKVATPPNQNQKQGRFRSLEEALKALDVADLQKELDKSQSVFSGNPSIWLKDLASYLNYKLQAPLSEPTLSQHTHGESLHGYRICIQAILQDKPKIATANLGKFLELLRSHQSRPAKCLTIMWALGQAGFANLTEGLKVWLGIMLPVLGIKSLSPFAITYLDRLLLMHPNLTKGFGMIGPKDFFPLLDFAYMPNNSLTPSLQEQLCQLYPRLKVLAFGAKPDSTLHTYFPSFLSRATPSCPPEMKKELLSSLTECLTVDPLSASVWRQLYPKHLSQSSLLLEHLLSSWEQIPKKVQKSLQETIQSLKLTNQELLRKGSSNNQDVVTCDMACKGLLQQVQGPRLPWTRLLLLLLVFAVGFLCHDLRSHSSFQASLTGRLLRSSGFLPASQQACAKLYSYSLQGYSWLGETLPLWGSHLLTVVRPSLQLAWAHTNATVSFLSAHCASHLAWFGDSLTSLSQRLQIQLPDSVNQLLRYLRELPLLFHQNVLLPLWHLLLEALAWAQEHCHEACRGEVTWDCMKTQLSEAVHWTWLCLQDITVAFLDWALALISQQ

SEQ ID NO: 898020 - protein, 753 aa, Homo sapiens
GGRRAPGARSCEETWQSAAALAPDRKAGEVAEEGGLRAMATKTAGVGRWEVVKKGRRPGVGAGAGGRGGGRNRRALGEANGVWKYDLTPAIQTTSTLYERGFENIMKRQNKEQVPPPAVEPKKPGNKKQPKKVATPPNQNQKQGRFRSLEEALKALDVADLQKELDKSQSVFSGNPSIWLKDLASYLNYKLQAPLSEPTLSQHTHDYPYSLVSRELRGIIRGLLAKAAGSLELFFDHCLFTMLQELDKTPGESLHGYRICIQAILQDKPKIATANLGKFLELLRSHQSRPAKCLTIMWALGQAGFANLTEGLKVWLGIMLPVLGIKSLSPFAITYLDRLLLMHPNLTKGFGMIGPKDFFPLLDFAYMPNNSLTPSLQEQLCQLYPRLKVLAFGAKPDSTLHTYFPSFLSRATPSCPPEMKKELPVDSCLPRSLELHPQKMDPKRQHIQLLSSLTECLTVDPLSASVWRQLYPKHLSQSSLLLEHLLSSWEQIPKKVQKSLQETIQSLKLTNQELLRKGSSNNQDVVTCDMACKGLLQQVQGPRLPWTRLLLLLLVFAVGFLCHDLRSHSSFQASLTGRLLRSSGFLPASQQACAKLYSYSLQGYSWLGETLPLWGSHLLTVVRPSLQLAWAHTNATVSFLSAHCASHLAWFGDSLTSLSQRLQIQLPDSVNQLLRYLRELPLLFHQNVLLPLWHLLLEALAWAQEHCHEACRGEVTWDCMKTQLSEAVHWTWLCLQDITVAFLDWALALISQQ

SEQ ID NO: 898021 - protein, 791 aa, Homo sapiens
GGRRAPGARSCEETWQSAAALAPDRKAGEVAEEGGLRAMATKTAGVGRWEVVKKGRRPGVGAGAGGRGGGRNRRALGEANGVWKYDLTPAIQTTSTLYERGFENIMKRQNKEQVPPPAVEPKKPGNKKQPKKVATPPNQNQKQGRFRSLEEALKALDVADLQKELDKSQSVFSGNPSIWLKDLASYLNYKLQAPLSEPTLSQHTHDYPYSLVSRELRGIIRGLLAKAAGSLELFFDHCLFTMLQELDKTPGESLHGYRICIQAILQDKPKIATANLGKFLELLRSHQSRPAKCLTIMWALGQAGFANLTEGLKVWLGIMLPVLGIKSLSPFAITYLDRLLLMHPNLTKGFGMIGPKDFFPLLDFAYMPNNSLTPSLQEQLCQLYPRLKVLAFGAKPDSTLHTYFPSFLSRATPSCPPEMKKEVRIWWEAFSPSPGVSCSGPYLLTKAFAFTEPILRLFLSSLLTAACPAHSSFTLRRWILKRQHIQLLSSLTECLTVDPLSASVWRQLYPKHLSQSSLLLEHLLSSWEQIPKKVQKSLQETIQSLKLTNQELLRKGSSNNQDVVTCDMACKGLLQQVQGPRLPWTRLLLLLLVFAVGFLCHDLRSHSSFQASLTGRLLRSSGFLPASQQACAKLYSYSLQGYSWLGETLPLWGSHLLTVVRPSLQLAWAHTNATVSFLSAHCASHLAWFGDSLTSLSQRLQIQLPDSVNQLLRYLRELPLLFHQNVLLPLWHLLLEALAWAQEHCHEACRGEVTWDCMKTQLSEAVHWTWLCLQDITVAFLDWALALISQQ

SEQ ID NO: 898022 - protein, 429 aa, Homo sapiens
SRCKPEASLVTFTPAVWLGIMLPVLGIKSLSPFAITYLDRLLLMHPNLTKGFGMIGPKDFFPLLDFAYMPNNSLTPSLQEQLCQLYPRLKVLAFGAKPDSTLHTYFPSFLSRATPSCPPEMKKELLSSLTECLTVDPLSASVWRQLYPKHLSQSSLLLEHLLSSWEQIPKKVQKSLQETIQSLKLTNQELLRKGSSNNQDVVTCDMACKGLLQQVQGPRLPWTRLLLLLLVFAVGFLCHDLRSHSSFQASLTGRLLRSSGFLPASQQACAKLYSYSLQGYSWLGETLPLWGSHLLTVVRPSLQLAWAHTNATVSFLSAHCASHLAWFGDSLTSLSQRLQIQLPDSVNQLLRYLRELPLLFHQNVLLPLWHLLLEALAWAQEHCHEACRGEVTWDCMKTQLSEAVHWTWLCLQDITVAFLDWALALISQQ

SEQ ID NO: 898023 - protein, 727 aa, Homo sapiens; identical to SEQ ID NO: 898017

SEQ ID NO: 898024 - protein, 454 aa, Homo sapiens
GGRRAPGARSCEETWQSAAALAPDRKAGEVAEEGGLRAMATKTAGVGRWEVVKKGRRPGVGAGAGGRGGGRNRRALGEANGVWKYDLTPAIQTTSTLYERGFENIMKRQNKEQVPPPAVEPKKPGNKKQPKKVATPPNQNQKQGRFRSLEEALKALDVADLQKELDKSQSVFSGNPSIWLKDLASYLNYKLQAPLSEPTLSQHTHDYPYSLVSRELRGIIRGLLAKAAGSLELFFDHCLFTMLQELDKTPGESLHGYRICIQAILQDKPKIATANLGKFLELLRSHQSRPAKCLTIMWALGQAGFANLTEGLKVWLGIMLPVLGIKSLSPFAITYLDRLLLMHPNLTKGFGMIGPKDFFPLLDFAYMPNNSLTPSLQEQLCQLYPRLKVLAFGAKPDSTLHTYFPSFLSRATPSCPPEMKKEVRIWWEAFSPSPGVSCSGPYLLTKALPSQSPF

SEQ ID NO: 898025 - protein, 385 aa, Homo sapiens
GGRRAPGARSCEETWQSAAALAPDRKAGEVAEEGGLRAMATKTAGVGRWEVVKKGRRPGVGAGAGGRGGGRNRRALGEANGVWKYDLTPAIQTTSTLYERGFENIMKRQNKEQVPPPAVEPKKPGNKKQPKKVATPPNQNQKQGRFRSLEEALKALDVADLQKELDKSQSVFSGNPSIWLKDLASYLNYKLQAPLSEPTLSQHTHDYPYSLVSRELRGIIRGLLAKAAGSLELFFDHCLFTMLQELDKTPGESLHGYRICIQAILQDKPKIATANLGKFLELLRSHQSRPAKCLTIMWALGQAGFANLTEGLKVWLGIMLPVLGIKSLSPCPLPCSPTSSNFPFPIMLGVLVTRLSFSPLSIPPIICRAEHRQLCALGPGNPPST

SEQ ID NO: 898026 - protein, 239 aa, Homo sapiens
GGRRAPGARSCEETWQSAAALAPDRKAGEVAEEGGLRAMATKTAGVGRWEVVKKGRRPGVGAGAGGRGGGRNRRALGEANGVWKYDLTPAIQTTSTLYERGFENIMKRQNKEQVPPPAVEPKKPGNKKQPKKVATPPNQNQKQGRFRSLEEALKALDVADLQKELDKSQSVFSGNPSIWLKDLASYLNYKLQAPLSEPTLSQHTHGKSFQLPQAQTSSNKFKKGGITDPSAPHCPDFHG

SEQ ID NO: 898027 - protein, 727 aa, Homo sapiens; identical to SEQ ID NO: 898017

SEQ ID NO: 898028 - protein, 669 aa, Homo sapiens
VQLNAAGRIYEVSPGSARVRPTECGNTTLTPAIQTTSTLYERGFENIMKRQNKEQVPPPAVEPKKPGNKKQPKKVATPPNQNQKQGRFRSLEEALKALDVADLQKELDKSQSVFSGNPSIWLKDLASYLNYKLQAPLSEPTLSQHTHDYPYSLVSRELRGIIRGLLAKAAGSLELFFDHCLFTMLQELDKTPGESLHGYRICIQAILQDKPKIATANLGKFLELLRSHQSRPAKCLTIMWALGQAGFANLTEGLKVWLGIMLPVLGIKSLSPFAITYLDRLLLMHPNLTKGFGMIGPKDFFPLLDFAYMPNNSLTPSLQEQLCQLYPRLKVLAFGAKPDSTLHTYFPSFLSRATPSCPPEMKKELLSSLTECLTVDPLSASVWRQLYPKHLSQSSLLLEHLLSSWEQIPKKVQKSLQETIQSLKLTNQELLRKGSSNNQDVVTCDMACKGLLQQVQGPRLPWTRLLLLLLVFAVGFLCHDLRSHSSFQASLTGRLLRSSGFLPASQQACAKLYSYSLQGYSWLGETLPLWGSHLLTVVRPSLQLAWAHTNATVSFLSAHCASHLAWFGDSLTSLSQRLQIQLPDSVNQLLRYLRELPLLFHQNVLLPLWHLLLEALAWAQEHCHEACRGEVTWDCMKTQLSEAVHWTWLCLQDITVAFLDWALALISQQ

SEQ ID NO: 898029 - protein, 482 aa, Homo sapiens [sequence omitted]

SEQ ID NO: 898030 - protein, 762 aa, Homo sapiens
GGRRAPGARSCEETWQSAAALAPDRKAGEVAEEGGLRAMATKTAGVGRWEVVKKGRRPGVGAGAGGRGGGRNRRALGEANGVWKYDLTPAIQTTSTLYERGFENIMKRQNKEQVPPPAVEPKKPGNKKQPKKVATPPNQNQKQGRFRSLEEALKALDVADLQKELDKSQSVFSGNPSIWLKDLASYLNYKLQAPLSEPTLSQHTHDYPYSLVSRELRGIIRGLLAKAAGSLELFFDHCLFTMLQELDKTPGESLHGYRICIQAILQDKPKIATANLGKFLELLRSHQSRPAKCLTIMWALGQAGFANLTEGLKVWLGIMLPVLGIKSLSPFAITYLDRLLLMHPNLTKGFGMIGPKDFFPLLDFAYMPNNSLTPSLQEQLCQLYPRLKVLAFGAKPDSTLHTYFPSFLSRATPSCPPEMKKEEPILRLFLQLPVDSCLPRSLELHPQKMDPKRQHIQLLSSLTECLTVDPLSASVWRQLYPKHLSQSSLLLEHLLSSWEQIPKKVQKSLQETIQSLKLTNQELLRKGSSNNQDVVTCDMACKGLLQQVQGPRLPWTRLLLLLLVFAVGFLCHDLRSHSSFQASLTGRLLRSSGFLPASQQACAKLYSYSLQGYSWLGETLPLWGSHLLTVVRPSLQLAWAHTNATVSFLSAHCASHLAWFGDSLTSLSQRLQIQLPDSVNQLLRYLRELPLLFHQNVLLPLWHLLLEALAWAQEHCHEACRGEVTWDCMKTQLSEAVHWTWLCLQDITVAFLDWALALISQQ

SEQ ID NO: 898031 - protein, 611 aa, Homo sapiens
GGRRAPGARSCEETWQSAAALAPDRKAGEVAEEGGLRAMATKTAGVGRWEVVKKGRRPGVGAGAGGRGGGRNRRALGEANGVWKYDLTPAIQTTSTLYERGFENIMKRQNKEQVPPPAVEPKKPGNKKQPKKVATPPNQNQKQGRFRSLEEALKALDVADLQKELDKSQSVFSGNPSIWLKDLASYLNYKLQAPLSEPTLSQHTHDYPYSLVSRELRGIIRGLLAKAAGSLELFFDHCLFTMLQELDKTPGESLHGYRICIQAILQDKPKIATANLGKFLELLRSHQSRPAKCLTIMWALGQAGFANLTEGLKVWLGIMLPVLGIKSLSPFAITYLDRLLLMHPNLTKGFGMIGPKDFFPLLDFAYMPNNSLTPSLQEQLCQLYPRLKVLAFGAKPDSTLHTYFPSFLSRATPSCPPEMKKELLSSLTECLTVDPLSASVWRQLYPKHLSQSSLLLEHLLSSWEQIPKKVQKSLQETIQSLKLTNQELLRKGSSNNQDVVTCDMACKGLLQQVQGPRLPWTRLLLLLLVFAVGFLCHDLRSHSSFQAGWGRHCRSGAPTCSPWCGPACSWPGLTPMPQSASFLPTVPLTLRGLVTVSPVSLRGYRSSSPIP

SEQ ID NO: 898032 - protein, 478 aa, Homo sapiens
GGRRAPGARSCEETWQSAAALAPDRKAGEVAEEGGLRAMATKTAGVGRWEVVKKGRRPGVGAGAGGRGGGRNRRALGEANGVWKYDLTPAIQTTSTLYERGFENIMKRQNKEQVPPPAVEPKKPGNKKQPKKVATPPNQNQKQGRFRSLEEALKALDVADLQKELDKSQSVFSGNPSIWLKDLASYLNYKLQAPLSEPTLSQHTHDYPYSLVSRELRGIIRGLLAKAAGSLELFFDHCLFTMLQELDKTPGESLHGYRICIQAILQDKPKIATANLGKFLELLRSHQSRPAKCLTIMWALGQAGFANLTEGLKVWLGIMLPVLGIKSLSPFAITYLDRLLLMHPNLTKGFGMIGPKDFFPLLDFAYMPNNSLTPSLQEQLCQLYPRLKVLAFGAKPDSTLHTYFPSFLSRATPSCPPEMKKELLSSLTECLTVDPLSASVWRQLYPKHLSQSSLLLEHLLSSWEQIPKKVRSWEDVAG

SEQ ID NO: 898033 - protein, 404 aa, Homo sapiens
GGRRAPGARSCEETWQSAAALAPDRKAGEVAEEGGLRAMATKTAGVGRWEVVKKGRRPGVGAGAGGRGGGRNRRALGEANGVWKYDLTPAIQTTSTLYERGFENIMKRQNKEQVPPPAVEPKKPGNKKQPKKVATPPNQNQKQGRFRSLEEALKALDVADLQKELDKSQSVFSGNPSIWLKDLASYLNYKLQAPLSEPTLSQHTHDYPYSLVSRELRGIIRGLLAKAAGSLELFFDHCLFTMLQELDKTPGESLHGYRICIQAILQDKPKIATANLGKFLELLRSHQSRPAKCLTIMWALGQAGFANLTEGLKVWLGIMLPVLGIKSLSPFAITYLDRLLLMHPNLTKGFGMIGPKDSSNFPFPIMLGVLVTRLSFSPLSIPPIICRAEHRQLCALGPGNPPST

SEQ ID NO: 898034 - protein, 256 aa, Homo sapiens
GGRRAPGARSCEETWQSAAALAPDRKAGEVAEEGGLRAMATKTAGVGRWEVVKKGRRPGVGAGAGGRGGGRNRRALGEANGVWKYDLTPAIQTTSTLYERGFENIMKRQNKEQVPPPAVEPKKPGNKKQPKKVATPPNQNQKQGRFRSLEEALKALDVADLQKELDKSQSVFSGNPSIWLKDLASYLNYKLQAPLSEPTLSQHTHDYPYSLVSRELRGIIRGLLAKAAGSLELFFDHCLFTMLQELDKTPGNPPST

SEQ ID NO: 898035 - protein, 625 aa, Homo sapiens
GRSRPPGGSGRAVAGLRGDRRESAVVRAMEAEPPLYPMAGAAGPQGDEDLLGVPDGPEAPLDELVGAYPNYNEEEEERRYYRRKRLGVLKNVLAASAGGMLTYGVYLGLLQMQLILHYDETYREVKYGNMGLPDIDSKMLMGINVTPIAALLYTPVLIRFFGTKWMMFLAVGIYALFVSTNYWERYYTLVPSAVALGMAIVPLWASMGNYITRMAQKYHEYSHYKEQDGQGMKQRPPRGSHAPYLLVFQAIFYSFFHLSFACAQLPMIYFLNHYLYDLNHTLYNVQSCGTNSHGILSGFNKTVLRTLPRSGNLIVVESVLMAVAFLAMLLVLGLCGAAYRPTEEIDLRSVGWGNIFQLPFKHVRDYRLRHLVPFFIYSGFEVLFACTGIALGYGVCSVGLERLAYLLVAYSLGASAASLLGLLGLWLPRPVPLVAGAGVHLLLTFILFFWAPVPRVLQHSWILYVAAALWGVGSALNKTGLSTLLGILYEDKERQDFIFTIYHWWQAVAIFTVYLGSSLHMKAKLAVLLVTLVAAAVSYLRMEQKLRRGVAPRQPRIPRPQHKVRGYRYLEEDNSDESDAEGEHGDGAEEEAPPAGPRPGPEPAGLGRRPCPYEQAQGGDGPEEQ

SEQ ID NO: 898036 - protein, 654 aa, Homo sapiens
AGRLGFGIMEAEPPLYPMAGAAGPQGDEDLLGVPDGPEAPVSGDPECEARASLWARSPRRGRGGPGGGGHRGTRVRGAIAGASGVRGSQLDELVGAYPNYNEEEEERRYYRRKRLGVLKNVLAASAGGMLTYGVYLGLLQMQLILHYDETYREVKYGNMGLPDIDSKMLMGINVTPIAALLYTPVLIRFFGTKWMMFLAVGIYALFVSTNYWERYYTLVPSAVALGMAIVPLWASMGNYITRMAQKYHEYSHYKEQDGQGMKQRPPRGSHAPYLLVFQAIFYSFFHLSFACAQLPMIYFLNHYLYDLNHTLYNVQSCGTNSHGILSGFNKTVLRTLPRSGNLIVVESVLMAVAFLAMLLVLGLCGAAYRPTEEIDLRSVGWGNIFQLPFKHVRDYRLRHLVPFFIYSGFEVLFACTGIALGYGVCSVGLERLAYLLVAYSLGASAASLLGLLGLWLPRPVPLVAGAGVHLLLTFILFFWAPVPRVLQHSWILYVAAALWGVGSALNKTGLSTLLGILYEDKERQDFIFTIYHWWQAVAIFTVYLGSSLHMKAKLAVLLVTLVAAAVSYLRMEQKLRRGVAPRQPRIPRPQHKVRGYRYLEEDNSDESDAEGEHGDGAEEEAPPAGPRPGPEPAGLGRRPCPYEQAQGGDGPEEQ

SEQ ID NO: 898037 - protein, 514 aa, Homo sapiens [sequence omitted]

SEQ ID NO: 898038 - protein, 534 aa, Homo sapiens
CRAEETVPIYERLTEALISVYHCILLVAETYREVKYGNMGLPDIDSKMLMGINVTPIAALLYTPVLIRFFGTKWMMFLAVGIYALFVSTNYWERYYTLVPSAVALGMAIVPLWASMGNYITRMAQKYHEYSHYKEQDGQGMKQRPPRGSHAPYLLVFQAIFYSFFHLSFACAQLPMIYFLNHYLYDLNHTLYNVQSCGTNSHGILSGFNKTVLRTLPRSGNLIVVESVLMAVAFLAMLLVLGLCGAAYRPTEEIDLRSVGWGNIFQLPFKHVRDYRLRHLVPFFIYSGFEVLFACTGIALGYGVCSVGLERLAYLLVAYSLGASAASLLGLLGLWLPRPVPLVAGAGVHLLLTFILFFWAPVPRVLQHSWILYVAAALWGVGSALNKTGLSTLLGILYEDKERQDFIFTIYHWWQAVAIFTVYLGSSLHMKAKLAVLLVTLVAAAVSYLRMEQKLRRGVAPRQPRIPRPQHKVRGYRYLEEDNSDESDAEGEHGDGAEEEAPPAGPRPGPEPAGLGRRPCPYEQAQGGDGPEEQ

SEQ ID NO: 898039 - protein, 648 aa, Homo sapiens
GRSRPPGGSGRAVAGLRGDRRESAVVRAMEAEPPLYPMAGAAGPQGDEDLLGVPDGPEAPLDELVGAYPNYNEEEEERRYYRRKRLGVLKNVLAASAGGMLTYGVYLGLLQMQLILHYDETYREVKYGNMGLPDIDSKMLMGINVTPIAALLYTPVLIRFFGTKWMMFLAVGIYALFVSTNYWERYYTLVPSAVALGMAIVPLWASMGNYITSSGCRTHRSGTGRAGESLLSFVVQMAQKYHEYSHYKEQDGQGMKQRPPRGSHAPYLLVFQAIFYSFFHLSFACAQLPMIYFLNHYLYDLNHTLYNVQSCGTNSHGILSGFNKTVLRTLPRSGNLIVVESVLMAVAFLAMLLVLGLCGAAYRPTEEIDLRSVGWGNIFQLPFKHVRDYRLRHLVPFFIYSGFEVLFACTGIALGYGVCSVGLERLAYLLVAYSLGASAASLLGLLGLWLPRPVPLVAGAGVHLLLTFILFFWAPVPRVLQHSWILYVAAALWGVGSALNKTGLSTLLGILYEDKERQDFIFTIYHWWQAVAIFTVYLGSSLHMKAKLAVLLVTLVAAAVSYLRMEQKLRRGVAPRQPRIPRPQHKVRGYRYLEEDNSDESDAEGEHGDGAEEEAPPAGPRPGPEPAGLGRRPCPYEQAQGGDGPEEQ

SEQ ID NO: 898040 - protein, 292 aa, Homo sapiens
LVQVGDFRMEEIDLRSVGWGNIFQLPFKHVRDYRLRHLVPFFIYSGFEVLFACTGIALGYGVCSVGLERLAYLLVAYSLGASAASLLGLLGLWLPRPVPLVAGAGVHLLLTFILFFWAPVPRVLQHSWILYVAAALWGVGSALNKTGLSTLLGILYEDKERQDFIFTIYHWWQAVAIFTVYLGSSLHMKAKLAVLLVTLVAAAVSYLRMEQKLRRGVAPRQPRIPRPQHKVRGYRYLEEDNSDESDAEGEHGDGAEEEAPPAGPRPGPEPAGLGRRPCPYEQAQGGDGPEEQ

SEQ ID NO: 898041 - protein, 260 aa, Homo sapiens
PRDAGRAETVVWAVPDFNTQPLVPPQGYGVCSVGLERLAYLLVAYSLGASAASLLGLLGLWLPRPVPLVAGAGVHLLLTFILFFWAPVPRVLQHSWILYVAAALWGVGSALNKTGLSTLLGILYEDKERQDFIFTIYHWWQAVAIFTVYLGSSLHMKAKLAVLLVTLVAAAVSYLRMEQKLRRGVAPRQPRIPRPQHKVRGYRYLEEDNSDESDAEGEHGDGAEEEAPPAGPRPGPEPAGLGRRPCPYEQAQGGDGPEEQ

SEQ ID NO: 898042 - protein, 453 aa, Homo sapiens
GRSRPPGGSGRAVAGLRGDRRESAVVRAMEAEPPLYPMAGAAGPQGDEDLLGVPDGPEAPLDELVGAYPNYNEEEEERRYYRRKRLGVLKNVLAASAGGMLTYGVYLGLLQMQLILHYDETYREVKYGNMGLPDIDSKMLMGINVTPIAALLYTPVLIRFFGTKWMMFLAVGIYALFVSTNYWERYYTLVPSAVALGMAIVPLWASMGNYITRMAQKYHEYSHYKEQDGQGMKQRPPRGSHAPYLLVFQAIFYSFFHLSFACAQLPMIYFLNHYLYDLNHTLYNVQSCGTNSHGILSGFNKTVLRTLPRSGNLIVVESVLMAVAFLAMLLVLGLCGAAYRPTEEIDLRSVGWGNIFQLPFKHVRDYRLRHLVPFFIYSGFEVLFACTGIALVSTACKGLPDKRQDSQVNLNSSKQRIIFNYICKCVHVYPKYPPPAFSSLSYPRPPFTLGKLF

SEQ ID NO: 898043 - protein, 608 aa, Homo sapiens
QAGTGPEIFGFMEAEPPLYPMAGAAGPQGDEDLLGVPDGPEAPLDELVGAYPNYNEEEEERRYYRRKRLGVLKNVLAASAGGMLTYGVYLGLLQMQLILHYDETYREVKYGNMGLPDIDSKMLMGINVTPIAALLYTPVLIRFFGTKWMMFLAVGIYALFVSTNYWERYYTLVPSAVALGMAIVPLWASMGNYITRMAQKYHEYSHYKEQDGQGMKQRPPRGSHAPYLLVFQAIFYSFFHLSFACAQLPMIYFLNHYLYDLNHTLYNVQSCGTNSHGILSGFNKTVLRTLPRSGNLIVVESVLMAVAFLAMLLVLGLCGAAYRPTEEIDLRSVGWGNIFQLPFKHVRDYRLRHLVPFFIYSGFEVLFACTGIALGYGVCSVGLERLAYLLVAYSLGASAASLLGLLGLWLPRPVPLVAGAGVHLLLTFILFFWAPVPRVLQHSWILYVAAALWGVGSALNKTGLSTLLGILYEDKERQDFIFTIYHWWQAVAIFTVYLGSSLHMKAKLAVLLVTLVAAAVSYLRMEQKLRRGVAPRQPRIPRPQHKVRGYRYLEEDNSDESDAEGEHGDGAEEEAPPAGPRPGPEPAGLGRRPCPYEQAQGGDGPEEQ

SEQ ID NO: 898044 - protein, 623 aa, Homo sapiens
KTRREVKGLHSLQGWSLVLRAEWEGSHLGGAAGRAFKPEGTQGRESGYFQKWPRGSSQLDELVGAYPNYNEEEEERRYYRRKRLGVLKNVLAASAGGMLTYGVYLGLLQMQLILHYDETYREVKYGNMGLPDIDSKMLMGINVTPIAALLYTPVLIRFFGTKWMMFLAVGIYALFVSTNYWERYYTLVPSAVALGMAIVPLWASMGNYITRMAQKYHEYSHYKEQDGQGMKQRPPRGSHAPYLLVFQAIFYSFFHLSFACAQLPMIYFLNHYLYDLNHTLYNVQSCGTNSHGILSGFNKTVLRTLPRSGNLIVVESVLMAVAFLAMLLVLGLCGAAYRPTEEIDLRSVGWGNIFQLPFKHVRDYRLRHLVPFFIYSGFEVLFACTGIALGYGVCSVGLERLAYLLVAYSLGASAASLLGLLGLWLPRPVPLVAGAGVHLLLTFILFFWAPVPRVLQHSWILYVAAALWGVGSALNKTGLSTLLGILYEDKERQDFIFTIYHWWQAVAIFTVYLGSSLHMKAKLAVLLVTLVAAAVSYLRMEQKLRRGVAPRQPRIPRPQHKVRGYRYLEEDNSDESDAEGEHGDGAEEEAPPAGPRPGPEPAGLGRRPCPYEQAQGGDGPEEQ

SEQ ID NO: 898045 - protein, 696 aa, Homo sapiens
GRSRPPGGSGRAVAGLRGDRRESAVVRAMEAEPPLYPMAGAAGPQGDEDLLGVPDGPEAPLDELVGAYPNYNEEEEERRYYRRKRLGVLKNVLAASAGGMLTYGVYLGLLQMQLILHYDETYREVKYGNMGLPDIDSKMLMGINVTPIAALLYTPVLIRFFGTKWMMFLAVGIYALFVSTNYWERYYTLVPSAVALGMAIVPLWASMGNYITRWPGGQQGRRAGDLAKPPLYCQLWLGDHRKPLPPSGPQFPHTGAGLLLALGAGHTGVAQVGLGRAFSPLWSRMAQKYHEYSHYKEQDGQGMKQRPPRGSHAPYLLVFQAIFYSFFHLSFACAQLPMIYFLNHYLYDLNHTLYNVQSCGTNSHGILSGFNKTVLRTLPRSGNLIVVESVLMAVAFLAMLLVLGLCGAAYRPTEEIDLRSVGWGNIFQLPFKHVRDYRLRHLVPFFIYSGFEVLFACTGIALGYGVCSVGLERLAYLLVAYSLGASAASLLGLLGLWLPRPVPLVAGAGVHLLLTFILFFWAPVPRVLQHSWILYVAAALWGVGSALNKTGLSTLLGILYEDKERQDFIFTIYHWWQAVAIFTVYLGSSLHMKAKLAVLLVTLVAAAVSYLRMEQKLRRGVAPRQPRIPRPQHKVRGYRYLEEDNSDESDAEGEHGDGAEEEAPPAGPRPGPEPAGLGRRPCPYEQAQGGDGPEEQ

SEQ ID NO: 898046 - protein, 585 aa, Homo sapiens
MQLILHYDETYREVKYGNMGLPDIDSKMLMGINVTPIAALLYTPVLIRFFGTKWMMFLAVGIYALFVSTNYWERYYTLVPSAVALGMAIVPLWASMGNYITSEPGGQQGRRAGDLAKPPLYCQLWLGDHRKPLPPSGPQFPHTGAGLLLALGAGHTGVAQVGLGRAFSPLWSRMAQKYHEYSHYKEQDGQGMKQRPPRGSHAPYLLVFQAIFYSFFHLSFACAQLPMIYFLNHYLYDLNHTLYNVQSCGTNSHGILSGFNKTVLRTLPRSGNLIVVESVLMAVAFLAMLLVLGLCGAAYRPTEEIDLRSVGWGNIFQLPFKHVRDYRLRHLVPFFIYSGFEVLFACTGIALGYGVCSVGLERLAYLLVAYSLGASAASLLGLLGLWLPRPVPLVAGAGVHLLLTFILFFWAPVPRVLQHSWILYVAAALWGVGSALNKTGLSTLLGILYEDKERQDFIFTIYHWWQAVAIFTVYLGSSLHMKAKLAVLLVTLVAAAVSYLRMEQKLRRGVAPRQPRIPRPQHKVRGYRYLEEDNSDESDAEGEHGDGAEEEAPPAGPRPGPEPAGLGRRPCPYEQAQGGDGPEEQ

SEQ ID NO: 898047 - protein, 290 aa, Homo sapiens
KGLNHEREEIDLRSVGWGNIFQLPFKHVRDYRLRHLVPFFIYSGFEVLFACTGIALGYGVCSVGLERLAYLLVAYSLGASAASLLGLLGLWLPRPVPLVAGAGVHLLLTFILFFWAPVPRVLQHSWILYVAAALWGVGSALNKTGLSTLLGILYEDKERQDFIFTIYHWWQAVAIFTVYLGSSLHMKAKLAVLLVTLVAAAVSYLRMEQKLRRGVAPRQPRIPRPQHKVRGYRYLEEDNSDESDAEGEHGDGAEEEAPPAGPRPGPEPAGLGRRPCPYEQAQGGDGPEEQ

SEQ ID NO: 898048 - protein, 222 aa, Homo sapiens
MAARPKLHYPNGRGRMESVRWVLAAAGVEFDEEFLETKEQLYKLQDGNHLLFQQVPMVEIDGMKLVQTRSILHYIADKHNLFGKNLKERTLIDMYVEGTLDLLELLIMHPFLKPDDQQKEVVNMAQKAIIRYFPVFEKILRGHGQSFLVGNQLSLADVILLQTILALEEKIPNILSAFPFLQEYTVKLSNIPTIKRFLEPGSKKKPPPDEIYVRTVYNIFRP

SEQ ID NO: 898049 - protein, 69 aa, Homo sapiens
LESPLVRSSRSLAQLPRARAACWSHPAGTADLALCAAPGLRVDSRKPEKLSWQQGPSSTIPTEEAGWSP

SEQ ID NO: 898050 - protein, 107 aa, Homo sapiens
MAARPKLHYPNGRGRMESVRWVLAAAGVEFDEEFLETKEQLYKLQDGNHLLFQQVPMVEIDGMKLVQTRSILHYIADKHNLFGKNLKERTLYCGPSRVLSLVSLLMP

SEQ ID NO: 898051 - protein, 129 aa, Homo sapiens
MYVEGTLDLLELLIMHPFLKPDDQQKEVVNMAQKAIIRYFPVFEKILRGHGQSFLVGNQLSLADVILLQTILALEEKIPNILSAFPFLQEYTVKLSNIPTIKRFLEPGSKKKPPPDEIYVRTVYNIFRP

SEQ ID NO: 898052 - protein, 129 aa, Homo sapiens; identical to SEQ ID NO: 898051

SEQ ID NO: 898053 - protein, 177 aa, Homo sapiens
MGFSCRRSRGNHLLFQQVPMVEIDGMKLVQTRSILHYIADKHNLFGIDMYVEGTLDLLELLIMHPFLKPDDQQKEVVNMAQKAIIRYFPVFEKILRGHGQSFLVGNQLSLADVILLQTILALEEKIPNILSAFPFLQEYTVKLSNIPTIKRFLEPGSKKKPPPDEIYVRTVYNIFRP

SEQ ID NO: 898054 - protein, 69 aa, Homo sapiens; identical to SEQ ID NO: 898049

SEQ ID NO: 898055 - protein, 107 aa, Homo sapiens; identical to SEQ ID NO: 898050

SEQ ID NO: 898056 - protein, 231 aa, Homo sapiens
MAARPKLHYPNGRGRMESVRWVLAAAGVEFDEEFLETKEQLYKLQDGNHLLFQQVPMVEIDGMKLVQTRSILHYIADKHNLFGKNLKERTLIDMYVEGTLDLLELLIMHPFLKPDDQQKEVVNMAQKAIIRYFPVFEKILRGHGQSFLVGNQLSLADPAIRRRIADLLRAVHAKTSPVKANYYTQLTNNLTNGTSYPRDNSQSYSRVHINNRVYDLDVGSGHPNGADPAIR

SEQ ID NO: 898057 - protein, 69 aa, Homo sapiens; identical to SEQ ID NO: 898049

SEQ ID NO: 898058 - protein, 222 aa, Homo sapiens; identical to SEQ ID NO: 898048

SEQ ID NO: 898059 - protein, 222 aa, Homo sapiens; identical to SEQ ID NO: 898048

SEQ ID NO: 898060 - protein, 185 aa, Homo sapiens
MGFSCRRSRGNHLLFQQVPMVEIDGMKLVQTRSILHYIADKHNLFGKNLKERTLIDMYVEGTLDLLELLIMHPFLKPDDQQKEVVNMAQKAIIRYFPVFEKILRGHGQSFLVGNQLSLADVILLQTILALEEKIPNILSAFPFLQEYTVKLSNIPTIKRFLEPGSKKKPPPDEIYVRTVYNIFRP

SEQ ID NO: 898061 - protein, 185 aa, Homo sapiens; identical to SEQ ID NO: 898060

SEQ ID NO: 898062 - protein, 69 aa, Homo sapiens; identical to SEQ ID NO: 898049

SEQ ID NO: 898063 - protein, 129 aa, Homo sapiens; identical to SEQ ID NO: 898051

SEQ ID NO: 898064 - protein, 176 aa, Homo sapiens
MAARPKLHYPNGRGRMESVRWVLAAAGVEFDEEFLETKEQLYKLQDGNHLLFQQVPMVEIDGMKLVQTRSILHYIADKHNLFGKNLKERTLIDMYVEGTLDLLELLIMHPFLKPDDQQKEVVNMAQKAIIRYFPVFEKILRGHGQSFLVGNQLSLADVILLQTILALEERIHSETK

SEQ ID NO: 898065 - protein, 107 aa, Homo sapiens; identical to SEQ ID NO: 898050

SEQ ID NO: 898066 - protein, 69 aa, Homo sapiens; identical to SEQ ID NO: 898049

SEQ ID NO: 898067 - protein, 69 aa, Homo sapiens; identical to SEQ ID NO: 898049

SEQ ID NO: 898068 - protein, 428 aa, Homo sapiens
MAPALTDAAAEAHHIRFKLAPPSSTLSPGSAENNGNANILIAANGTKRKAIAAEDPSLDFRNNPTKEDLGKLQPLVASYLCSDVTSVPSKESLKLQGVFSKQTVLKSHPLLSQSYELRAELLGRQPVLEFSLENLRTMNTSGQTALPQAPVNGLAKKLTKSSTHSDHDNSTSLNGGKRALTSSALHGGEMGGSESGDLKGGMTNCTLPHRSLDVEHTTLYSNNSTANKSSVNSMEQPALQGSSRLSPGTDSSSNLGGVKLEGKKSPLSSILFSALDSDTRITALLRRQADIESRARRLQKRLQVVQAKQVERHIQHQLGGFLEKTLSKLPNLESLRPRSQLMLTRKAEAALRKAASETHHFQRDLANFLKSNSISEELERFTASGIANLRCSEQAFDSDVTDSSSGGESDIEEEELTRADPEQRHVPL

SEQ ID NO: 898069 - protein, 440 aa, Homo sapiens
MAPALTDAAAEAHHIRFKLAPPSSTLSPGSAENNGNANILIAANGTKRKAIAAEDPSLDFRNNPTKEDLGKLQPLVASYLCSDVTSVPSKESLKLQGVFSKQTVLKSHPLLSQSYELRAELLGRQPVLEFSLENLRTMNTSGQTALPQAPVNGLAKKLTKSSTHSDHDNSTSLNGGKRALTSSALHGGEMGGSESGDLKGGMTNCTLPHRSLDVEHTTLYSNNSTANKSSVNSMEQPALQGSSRLSPGTDSSSNLGGVKLEGKKSPLSSILFSALDSDTRITALLRRQADIESRARRLQKRLQVVQAKQVERHIQHQLGGFLEKTLSKLPNLESLRPRSQLMLTRKAEAALRKAASETHHFQRDLANFLKSNSISEELERFTASGIANLRCSEQAFDSDVTDSSSGGESDIEEEELTRADPEQRHVPLYLHTAKNKERKG

SEQ ID NO: 898070 - protein, 368 aa, Homo sapiens
MAPALTDAAAEAHHIRFKLAPPSSTLSPGSAENNGNANILIAANGTKRKAIAAEDPSLDFRNNPTKEDLGKLQPLVASYLCSDVTSVPSKESLKLQGVFSKQTVLKSHPLLSQSYELRAELLGRQPVLEFSLENLRTMNTSGQTALPQAPVNGLAKKLTKSSTHSDHDNSTSLNGGKRALTSSALHGGEMGGSESGDLKGGMTNCTLPHRSLDVEHTTLYSNNSTANKSSVNSMEQPALQGSSRLSPGTDSSSNLGGVKLEGKKSPLSSILFSALDSDTRITALLRRQADIESRARRLQKRLQVVQAKQVERHIQHQLGGFLEKTLSKLPNLESLRPRSQLMLTRKAEAALRKAASETHHFQRDLATF

SEQ ID NO: 898071 - protein, 163 aa, Homo sapiens
MTFSYLKIAISRYVTLYLQDLPNTMNAAEITDKLGSIPFRYRNTGHIQATLCHLTGHGLYERPETGSPSQFPEPETGSAGFYSLCLGGHIKLALGCGAVYVCAGTCRQSLKRGLIIAKQTVVHLTDTRARLPPPALKQIGDLSRLSGKLSGLCQDNGSARIPR

SEQ ID NO: 898072 - protein, 323 aa, Homo sapiens
MAPALTDAAAEAHHIRFKLAPPSSTLSPGSAENNGNANILIAANGTKRKAIAAEDPSLDFRNNPTKEDLGKLQPLVASYLCSDVTSVPSKESLKLQGVFSKQTVLKSHPLLSQSYELRAELLGRQPVLEFSLENLRTMNTSGQTALPQAPVNGLAKKLTKSSTHSDHDNSTSLNGGKRALTSSALHGGEMGGSESGDLKGGMTNCTLPHRSLDVEHTTLYSNNSTANKSSVNSMEQPALQGSSRLSPGTDSSSNLGGVKLEGKKSPLSSILFSALDSDTRITALLRRQADIESRARRLQKRLQVAQSLLQKSTQLMLYMPLNL

SEQ ID NO: 898073 - protein, 249 aa, Homo sapiens
GVIDATAAMARVVPRTLKRVAAPKHGCWINDRCVAPRPSTGPHKGESVSPSSFSMEQPALQGSSRLSPGTDSSSNLGGVKLEGKKSPLSSILFSALDSDTRITALLRRQADIESRARRLQKRLQVVQAKQVERHIQHQLGGFLEKTLSKLPNLESLRPRSQLMLTRKAEAALRKAASETHHFQRDLANFLKSNSISEELERFTASGIANLRCSEQAFDSDVTDSSSGGESDIEEEELTRADPEQRHVPL

SEQ ID NO: 898074 - protein, 85 aa, Homo sapiens
GTRFIEPETFLGEVTHPTPISIVRNALSTSMARFWCDRYMLTHLLSEEASCLHEACALLSSQMYLFLFMIRAFRSLKMYIFSYCT

SEQ ID NO: 898075 - protein, 594 aa, Homo sapiens
SPNRLVALLRLRAPLHSRPAMRDPGAAAPLSSLGLCALVLALLGALSAGAGAQPYHGEKGISVPDHGFCQPISIPLCTDIAYNQTILPNLLGHTNQEDAGLEVHQFYPLVKVQCSPELRFFLCSMYAPVCTVLDQAIPPCRSLCERARQGCEALMNKFGFQWPERLRCENFPVHGAGEICVGQNTSDGSGGPGGGPTAYPTAPYLPDLPFTALPPGASDGRGRPAFPFSCPRQLKVPPYLGYRFLGERDCGAPCEPGRANGLMYFKEEERRFARLWVGVWSVLCCASTLFTVLTYLVDMRRFSYPERPIIFLSGCYFMVAVAHVAGFLLEDRAVCVERFSDDGYRTVAQGTKKEGCTILFMVLYFFGMASSIWWVILSLTWFLAAGMKWGHEAIEANSQYFHLAAWAVPAVKTITILAMGQVDGDLLSGVCYVGLSSVDALRGFVLAPLFVYLFIGTSFLLAGFVSLFRIRTIMKHDGTKTEKLEKLMVRIGVFSVLYTVPATIVLACYFYEQAFREHWERTWLLQTCKSYAVPCPPGHFPPMSPDFTVFMIKYLMTMIVGITTGFWIWSGKTLQSWRRFYHRLSHSSKGETAV

SEQ ID NO: 898076 - protein, 594 aa, Homo sapiens; identical to SEQ ID NO: 898075

SEQ ID NO: 898077 - protein, 594 aa, Homo sapiens; identical to SEQ ID NO: 898075

SEQ ID NO: 898078 - protein, 594 aa, Homo sapiens; identical to SEQ ID NO: 898075

SEQ ID NO: 898079 - protein, 176 aa, Homo sapiens
MVAAGGGARTEGAVRRSLWRQCARRVHGEKLRRPTFGPRHRGAGTAKMSASLVRATVRAVSKRKLQPTRAALTLTPSAVNKIKQLLKDKPEHVGVKVGVRTRGCNGLSYTLEYTKTKGDSDEEVIQDGVRVFIEKKAQLTLLGTEMDYVEDKLSSEFVFNNPNIKGTCGCGESFNI

SEQ ID NO: 898080 - protein, 113 aa, Homo sapiens
MRPPCPWREAEAADLRPEAPGRRDGEDVGFLSPGNCPGCEQEEAAAHPGSPHPGECSRRAAGPVTLLVSAPCKGRSRRPGVGPQGRGHVRPRRRSDPPHSLAASFASGPSLQR

SEQ ID NO: 898081 - protein, 133 aa, Homo sapiens
MVAAGGGARTEGAVRRSLWRQCARRVHGEKLRRPTFGPRHRGAGTAKMSASLVRATVRAVSKRKLQPTRAALTLTPSAVNKIKQLLKDKPEHVGVKVGVRTRGCNGLSYTLEYTKTKGDSDEEVIQDGWSAVV

SEQ ID NO: 898082 - protein, 176 aa, Homo sapiens; identical to SEQ ID NO: 898079

SEQ ID NO: 898083 - protein, 176 aa, Homo sapiens; identical to SEQ ID NO: 898079

SEQ ID NO: 898084 - protein, 131 aa, Homo sapiens
MVAAGGGARTEGAVRRSLWRQCARRVHGEKLRRPTFGPRHRGAGTAKMSASLVRATVRAVSKRKLQPTRAALTLTPSAVNKIKQLLKDKPEHVGVKVGVRTRGCNGLSYTLEYTKTKGDSDEEVIQDGIRE

SEQ ID NO: 898085 - protein, 67 aa, Homo sapiens
CVGWGGTRLSEGPLCRGDSVRRGRAQRQQSPRLLPRSRPRRAKRYLPVSWVIEAFETPSVPLASLGS

SEQ ID NO: 898086 - protein, 176 aa, Homo sapiens; identical to SEQ ID NO: 898079

SEQ ID NO: 898087 - protein, 131 aa, Homo sapiens; identical to SEQ ID NO: 898084

SEQ ID NO: 898088 - protein, 176 aa, Homo sapiens; identical to SEQ ID NO: 898079

SEQ ID NO: 898089 - protein, 160 aa, Homo sapiens
MVAAGGGARTEGAVRRSLWRQCARRVHGEKLRRPTFGPRHRGAGTAKMSASLVRATVRAVSKRKLQPTRAALTLTPSAVNKIKQLLKDKPEHVGVKVGVRTRGCNGLSYTLEYTKTKGDSDEEVIQDESHSVARLECSGTISAYRNLRLPGSSDSFVSAS

SEQ ID NO: 898090 - protein, 179 aa, Homo sapiens; identical to SEQ ID NO: 747515

SEQ ID NO: 898091 - protein, 153 aa, Homo sapiens; identical to SEQ ID NO: 747516

SEQ ID NO: 898092 - protein, 179 aa, Homo sapiens; identical to SEQ ID NO: 747515

SEQ ID NO: 898093 - protein, 164 aa, Homo sapiens
MLSLDFLDDVRRMNKRQLYYQVLNFGMIVSSALMIWKGLMVITGSESPIVVVLSGSMEPAFHRGDLLFLTNRVEDPIRVGEIVVFRIEGREIPIVHRVLKIHEKQNGHIKFLTKGDNNAVDDRGLYKQGQHWLEKKDVVGRARGFYQENSSVEDRNYLFLILEL

SEQ ID NO: 898094 - protein, 179 aa, Homo sapiens; identical to SEQ ID NO: 747515

SEQ ID NO: 898095 - protein, 179 aa, Homo sapiens; identical to SEQ ID NO: 747515

SEQ ID NO: 898096 - protein, 179 aa, Homo sapiens; identical to SEQ ID NO: 747515

SEQ ID NO: 898097 - protein, 179 aa, Homo sapiens; identical to SEQ ID NO: 747515

SEQ ID NO: 898098 - protein, 129 aa, Homo sapiens
MLSLDFLDDVRRMNKRQLYYQVLNFGMIVSSALMIWKGLMVITGSESPIVVVLRQNGHIKFLTKGDNNAVDDRGLYKQGQHWLEKKDVVGRARGFVPYIGIVTILMNDYPKFKYAVLFLLGLFVLVHRE

SEQ ID NO: 898099 - protein, 179 aa, Homo sapiens; identical to SEQ ID NO: 747515

SEQ ID NO: 898100 - protein, 179 aa, Homo sapiens; identical to SEQ ID NO: 747515

SEQ ID NO: 898101 - protein, 880 aa, Homo sapiens
CLSISLRSLSAPAWENTAAVLGLLLSSRRRGPAAPACAVRSVSDGPDPGYRPLARCSPAQTRPWQWRLAIRTDPTWAEVARAPRHEPVTKLGAEREAAVAEPQGSDSSQGDVLRLRVRWWPAASLAVPEAVGRVSLMLQSYSELLFLLEMLLECEEEAVCVIMCASVKYNIRGPALIPRMKTKHRIYYITLFSIVLLGLIATGMFQFWPHSIESSNDWNVEKRSIRDVPVVRLPADSPIPERGDLSCRMHTCFDVYRCGFNPKNKIKVYIYALKKYVDDFGVSVSNTISREYNELLMAISDSDYYTDDINRACLFVPSIDVLNQNTLRIKETAQAMAQLSRWDRGTNHLLFNMLPGGPPDYNTALDVPRDRALLAGGGFSTWTYRQGYDVSIPVYSPLSAEVDLPEKGPGPRQYFLLSSQVGLHPEYREDLEALQVKHGESVLVLDKCTNLSEGVLSVRKRCHKHQVFDYPQVLQEATFCVVLRGARLGQAVLSDVLQAGCVPVVIADSYILPFSEVLDWKRASVVVPEEKMSDVYSILQSIPQRQIEEMQRQARWFWEAYFQSIKAIALATLQIINDRIYPYAAISYEEWNDPPAVKWGSVSNPLFLPLIPPQSQGFTAIVLTYDRVESLFRVITEVSKVPSLSKLLVVWNNQNKNPPEDSLWPKIRVPLKVVRTAENKLSNRFFPYDEIETEAVLAIDDDIIMLTSDELQFGYEVWREFPDRLVGYPGRLHLWDHEMNKWKYESEWTNEVSMVLTGAAFYHKYFNYLYTYKMPGDIKNWVDAHMNCEDIAMNFLVANVTGKAVIKVTPRKKFKCPECTAIDGLSLDQTHMVERSECINKFASVFGTMPLKVVEHRADPVLYKDDFPEKLKSFPNIGSL

SEQ ID NO: 898102 - protein, 718 aa, Homo sapiens
MCASVKYNIRGPALIPRMKTKHRIYYITLFSIVLLGLIATGMFQFWPHSIESSNDWNVEKRSIRDVPVVRLPADSPIPERGDLSCRMHTCFDVYRCGFNPKNKIKVYIYALKKYVDDFGVSVSNTISREYNELLMAISDSDYYTDDINRACLFVPSIDVLNQNTLRIKETAQAMAQLSRWDRGTNHLLFNMLPGGPPDYNTALDVPRDRALLAGGGFSTWTYRQGYDVSIPVYSPLSAEVDLPEKGPGPRQYFLLSSQVGLHPEYREDLEALQVKHGESVLVLDKCTNLSEGVLSVRKRCHKHQVFDYPQVLQEATFCVVLRGARLGQAVLSDVLQAGCVPVVIADSYILPFSEVLDWKRASVVVPEEKMSDVYSILQSIPQRQIEEMQRQARWFWEAYFQSIKAIALATLQIINDRIYPYAAISYEEWNDPPAVKWGSVSNPLFLPLIPPQSQGFTAIVLTYDRVESLFRVITEVSKVPSLSKLLVVWNNQNKNPPEDSLWPKIRVPLKVVRTAENKLSNRFFPYDEIETEAVLAIDDDIIMLTSDELQFGYEVWREFPDRLVGYPGRLHLWDHEMNKWKYESEWTNEVSMVLTGAAFYHKYFNYLYTYKMPGDIKNWVDAHMNCEDIAMNFLVANVTGKAVIKVTPRKKFKCPECTAIDGLSLDQTHMVERSECINKFASVFGTMPLKVVEHRADPVLYKDDFPEKLKSFPNIGSL

SEQ ID NO: 898103 - protein, 718 aa, Homo sapiens; identical to SEQ ID NO: 898102

SEQ ID NO: 898104 - protein, 556 aa, Homo sapiens
CLSISLRSLSAPAWENTAAVLGLLLSSRRRGPAAPACAVRSVSDGPDPGYRPLARCSPAQTRPWQWRLAIRTDPTWAEVARAPRHEPVTKLGAEREAAVAEECEEEAVCVIMCASVKYNIRGPALIPRMKTKHRIYYITLFSIVLLGLIATGMFQFWPHSIESSNDWNVEKRSIRDVPVVRLPADSPIPERGDLSCRMHTCFDVYRCGFNPKNKIKVYIYALKKYVDDFGVSVSNTISREYNELLMAISDSDYYTDDINRACLFVPSIDVLNQNTLRIKETAQAMAQLSRWDRGTNHLLFNMLPGGPPDYNTALDVPRDRALLAGGGFSTWTYRQGYDVSIPVYSPLSAEVDLPEKGPGPRQYFLLSSQVGLHPEYREDLEALQVKHGESVLVLDKCTNLSEGVLSVRKRCHKHQVFDYPQVLQEATFCVVLRGARLGQAVLSDVLQAGCVPVVIADSYILPFSEVLDWKRASVVVPEEKMSDVYSILQSIPQRQIEEMQRQARWFWEAYFQSIKAIALATLQIINDRIYPYAAISYEEWNDPPAVILSGPKSGFH

SEQ ID NO: 898105 - protein, 666 aa, Homo sapiens
CLSISLRSLSAPAWENTAAVLGLLLSSRRRGPAAPACAVRSVSDGPDPGYRPLARCSPAQTRPWQWRLAIRTDPTWAEVARAPRHEPVTKLGAEREAAVAEECEEEAVCVIMCASVKYNIRGPALIPRMKTKHRIYYITLFSIVLLGLIATGMFQFWPHSIESSNDWNVEKRSIRDVPVVRLPADSPIPERGDLSCRMHTCFDVYRCGFNPKNKIKVYIYALKKYVDDFGVSVSNTISREYNELLMAISDSDYYTDDINRACLFVPSIDVLNQNTLRIKETAQAMAQLSRWDRGTNHLLFNMLPGGPPDYNTALDVPRDRALLAGGGFSTWTYRQGYDVSIPVYSPLSAEVDLPEKGPGPRQYFLLSSQVGLHPEYREDLEALQVKHGESVLVLDKCTNLSEGVLSVRKRCHKHQVFDYPQVLQEATFCVVLRGARLGQAVLSDVLQAGCVPVVIADSYILPFSEVLDWKRASVVVPEEKMSDVYSILQSIPQRQIEEMQRQARWFWEAYFQSIKAIALATLQIINDRIYPYAAISYEEWNDPPAVKWGSVSNPLFLPLIPPQSQGFTAIVLTYDRVESLFRVITEVSKVPSLSKLLVVWNNQNKNPPEDSLWPKIRVPLKVVRTAENKLSNRFFPYDEIETEAVLAIDDDIIMLTSDELQFGYEV

SEQ ID NO: 898106 - protein, 552 aa, Homo sapiens
CLSISLRSLSAPAWENTAAVLGLLLSSRRRGPAAPACAVRSVSDGPDPGYRPLARCSPAQTRPWQWRLAIRTDPTWAEVARAPRHEPVTKLGAEREAAVAEECEEEAVCVIMCASVKYNIRGPALIPRMKTKHRIYYITLFSIVLLGLIATGMFQFWPHSIESSNDWNVEKRSIRDVPVVRLPADSPIPERGDLSCRMHTCFDVYRCGFNPKNKIKVYIYALKKYVDDFGVSVSNTISREYNELLMAISDSDYYTDDINRACLFVPSIDVLNQNTLRIKETAQAMAQLSRWDRGTNHLLFNMLPGGPPDYNTALDVPRDRALLAGGGFSTWTYRQGYDVSIPVYSPLSAEVDLPEKGPGPRQYFLLSSQVGLHPEYREDLEALQVKHGESVLVLDKCTNLSEGVLSVRKRCHKHQVFDYPQVLQEATFCVVLRGARLGQAVLSDVLQAGCVPVVIADSYILPFSEVLDWKRASVVVPEEKMSDVYSILQSIPQRQIEEMQRQARWFWEAYFQSIKAIALATLQIINDRIYPYAAISYEEWNDPPAVVSEFQC

SEQ ID NO: 898107 - protein, 386 aa, Homo sapiens
CLSISLRSLSAPAWENTAAVLGLLLSSRRRGPAAPACAVRSVSDGPDPGYRPLARCSPAQTRPWQWRLAIRTDPTWAEVARAPRHEPVTKLGAEREAAVAEECEEEAVCVIMCASVKYNIRGPALIPRMKTKHRIYYITLFSIVLLGLIATGMFQFWPHSIESSNDWNVEKRSIRDVPVVRLPADSPIPERGDLSCRMHTCFDVYRCGFNPKNKIKVYIYALKKYVDDFGVSVSNTISREYNELLMAISDSDYYTDDINRACLFVPSIDVLNQNTLRIKETAQAMAQLSRWDRGTNHLLFNMLPGGPPDYNTALDVPRDRALLAGGGFSTWTYRQGYDVSIPVYSPLSAEVDLPEKGPGPRQYFLLSSQVGLHPEYREDLEALQPE

SEQ ID NO: 898108 - protein, 278 aa, Homo sapiens
RWPNGTRCAQWQSQGFTAIVLTYDRVESLFRVITEVSKVPSLSKLLVVWNNQNKNPPEDSLWPKIRVPLKVVRTAENKLSNRFFPYDEIETEAVLAIDDDIIMLTSDELQFGYEVWREFPDRLVGYPGRLHLWDHEMNKWKYESEWTNEVSMVLTGAAFYHKYFNYLYTYKMPGDIKNWVDAHMNCEDIAMNFLVANVTGKAVIKVTPRKKFKCPECTAIDGLSLDQTHMVERSECINKFASVFGTMPLKVVEHRADPVLYKDDFPEKLKSFPNIGSL

SEQ ID NO: 898109 - protein, 829 aa, Homo sapiens
CLSISLRSLSAPAWENTAAVLGLLLSSRRRGPAAPACAVRSVSDGPDPGYRPLARCSPAQTRPWQWRLAIRTDPTWAEVARAPRHEPVTKLGAEREAAVAEECEEEAVCVIMCASVKYNIRGPALIPRMKTKHRIYYITLFSIVLLGLIATGMFQFWPHSIESSNDWNVEKRSIRDVPVVRLPADSPIPERGDLSCRMHTCFDVYRCGFNPKNKIKVYIYALKKYVDDFGVSVSNTISREYNELLMAISDSDYYTDDINRACLFVPSIDVLNQNTLRIKETAQAMAQLSRWDRGTNHLLFNMLPGGPPDYNTALDVPRDRALLAGGGFSTWTYRQGYDVSIPVYSPLSAEVDLPEKGPGPRQYFLLSSQVGLHPEYREDLEALQVKHGESVLVLDKCTNLSEGVLSVRKRCHKHQVFDYPQVLQEATFCVVLRGARLGQAVLSDVLQAGCVPVVIADSYILPFSEVLDWKRASVVVPEEKMSDVYSILQSIPQRQIEEMQRQARWFWEAYFQSIKAIALATLQIINDRIYPYAAISYEEWNDPPAVKWGSVSNPLFLPLIPPQSQGFTAIVLTYDRVESLFRVITEVSKVPSLSKLLVVWNNQNKNPPEDSLWPKIRVPLKVVRTAENKLSNRFFPYDEIETEAVLAIDDDIIMLTSDELQFGYEVWREFPDRLVGYPGRLHLWDHEMNKWKYESEWTNEVSMVLTGAAFYHKYFNYLYTYKMPGDIKNWVDAHMNCEDIAMNFLVANVTGKAVIKVTPRKKFKCPECTAIDGLSLDQTHMVERSECINKFASVFGTMPLKVVEHRADPVLYKDDFPEKLKSFPNIGSL

SEQ ID NO: 898110 - protein, 839 aa, Homo sapiens
CLSISLRSLSAPAWENTAAVLGLLLSSRRRGPAAPACAVRSVSDGPDPGYRPLARCSPAQTRPWQWRLAIRTDPTWAEVARAPRHEPVTKLGAEREAAVAEECEEEAVCVIMCASVKYNIRGPALIPRMKTKHRIYYITLFSIVLLGLIATGMFQFWPHSIESSNDWNVEKRSIRDVPVVRLPADSPIPERGDLSCRMHTCFDVYRCGFNPKNKIKVYIYALKKYVDDFGVSVSNTISREYNELLMAISDSDYYTDDINRACLFVPSIDVLNQNTLRIKETAQAMAQLSRWDRGTNHLLFNMLPGGPPDYNTALDVPRDRALLAGGGFSTWTYRQGYDVSIPVYSPLSAEVDLPEKGPGPRQYFLLSSQVGLHPEYREDLEALQVKHGESVLVLDKCTNLSEGVLSVRKRCHKHQVFDYPQVLQEATFCVVLRGARLGQAVLSDVLQAGCVPVVIADSYILPFSEVLDWKRASVVVPEEKMSDVYSILQSIPQRQIEEMQRQLFMEPARRENWSAANHQMNSLIWPREQWDSQIINDRIYPYAAISYEEWNDPPAVKWGSVSNPLFLPLIPPQSQGFTAIVLTYDRVESLFRVITEVSKVPSLSKLLVVWNNQNKNPPEDSLWPKIRVPLKVVRTAENKLSNRFFPYDEIETEAVLAIDDDIIMLTSDELQFGYEVWREFPDRLVGYPGRLHLWDHEMNKWKYESEWTNEVSMVLTGAAFYHKYFNYLYTYKMPGDIKNWVDAHMNCEDIAMNFLVANVTGKAVIKVTPRKKFKCPECTAIDGLSLDQTHMVERSECINKFASVFGTMPLKVVEHRADPVLYKDDFPEKLKSFPNIGSL

SEQ ID NO: 898111 - protein, 861 aa, Homo sapiens
CLSISLRSLSAPAWENTAAVLGLLLSSRRRGPAAPACAVRSVSDGPDPGYRPLARCSPAQTRPWQWRLAIRTDPTWAEVARAPRHEPVTKLGAEREAAVAEPQGSDSSQGDACASGSGGGLRHPLRCQKPWDEECEEEAVCVIMCASVKYNIRGPALIPRMKTKHRIYYITLFSIVLLGLIATGMFQFWPHSIESSNDWNVEKRSIRDVPVVRLPADSPIPERGDLSCRMHTCFDVYRCGFNPKNKIKVYIYALKKYVDDFGVSVSNTISREYNELLMAISDSDYYTDDINRACLFVPSIDVLNQNTLRIKETAQAMAQLSRWDRGTNHLLFNMLPGGPPDYNTALDVPRDRALLAGGGFSTWTYRQGYDVSIPVYSPLSAEVDLPEKGPGPRQYFLLSSQVGLHPEYREDLEALQVKHGESVLVLDKCTNLSEGVLSVRKRCHKHQVFDYPQVLQEATFCVVLRGARLGQAVLSDVLQAGCVPVVIADSYILPFSEVLDWKRASVVVPEEKMSDVYSILQSIPQRQIEEMQRQARWFWEAYFQSIKAIALATLQIINDRIYPYAAISYEEWNDPPAVKWGSVSNPLFLPLIPPQSQGFTAIVLTYDRVESLFRVITEVSKVPSLSKLLVVWNNQNKNPPEDSLWPKIRVPLKVVRTAENKLSNRFFPYDEIETEAVLAIDDDIIMLTSDELQFGYEVWREFPDRLVGYPGRLHLWDHEMNKWKYESEWTNEVSMVLTGAAFYHKYFNYLYTYKMPGDIKNWVDAHMNCEDIAMNFLVANVTGKAVIKVTPRKKFKCPECTAIDGLSLDQTHMVERSECINKFASVFGTMPLKVVEHRADPVLYKDDFPEKLKSFPNIGSL

SEQ ID NO: 898112 - protein, 705 aa, Homo sapiens
CLSISLRSLSAPAWENTAAVLGLLLSSRRRGPAAPACAVRSVSDGPDPGYRPLARCSPAQTRPWQWRLAIRTDPTWAEVARAPRHEPVTKLGAEREAAVAEECEEEAVCVIMCASVKYNIRGPALIPRMKTKHRIYYITLFSIVLLGLIATGMFQFWPHSIESSNDWNVEKRSIRDVPVVRLPADSPIPERGDLSCRMHTCFDVYRCGFNPKNKIKVYIYALKKYVDDFGVSVSNTISREYNELLMAISDSDYYTDDINRACLFVPSIDVLNQNTLRIKETAQAMAQLSRWDRGTNHLLFNMLPGGPPDYNTALDVPRDRALLAGGGFSTWTYRQGYDVSIPVYSPLSAEVDLPEKGPGPRQYFLLSSQVGLHPEYREDLEALQVKHGESVLVLDKCTNLSEGVLSVRKRCHKHQVFDYPQVLQEATFCVVLRGARLGQAVLSDVLQAGCVPVVIADSYILPFSEVLDWKRASVVVPEEKMSDVYSILQSIPQRQIEEMQRQARWFWEAYFQSIKAIALATLQIINDRIYPYAAISYEEWNDPPAVKWGSVSNPLFLPLIPPQSQGFTAIVLTYDRVESLFRVITEVSKVPSLSKLLVVWNNQNKNPPEDSLWPKIRVPLKVVRTAENKLSNRFFPYDEIETEAVLAIDDDIIMLTSDELQFGYEVWREFPDRLVGYPGRLHLWDHEMNKWKYESEWTNEVSMCA

SEQ ID NO: 898113 - protein, 511 aa, Homo sapiens
TAPATTAPVQQLWTYRQGYDVSIPVYSPLSAEVDLPEKGPGPRQYFLLSSQVGLHPEYREDLEALQVKHGESVLVLDKCTNLSEGVLSVRKRCHKHQVFDYPQVLQEATFCVVLRGARLGQAVLSDVLQAGCVPVVIADSYILPFSEVLDWKRASVVVPEEKMSDVYSILQSIPQRQIEEMQRQARWFWEAYFQSIKAIALATLQIINDRIYPYAAISYEEWNDPPAVKWGSVSNPLFLPLIPPQSQGFTAIVLTYDRVESLFRVITEVSKVPSLSKLLVVWNNQNKNPPEDSLWPKIRVPLKVVRTAENKLSNRFFPYDEIETEAVLAIDDDIIMLTSDELQFGYEVWREFPDRLVGYPGRLHLWDHEMNKWKYESEWTNEVSMVLTGAAFYHKYFNYLYTYKMPGDIKNWVDAHMNCEDIAMNFLVANVTGKAVIKVTPRKKFKCPECTAIDGLSLDQTHMVERSECINKFASVFGTMPLKVVEHRADPVLYKDDFPEKLKSFPNIGSL

SEQ ID NO: 898114 - protein, 431 aa, Homo sapiens
MARYEAVLIGRRCHKHQVFDYPQVLQEATFCVVLRGARLGQAVLSDVLQAGCVPVVIADSYILPFSEVLDWKRASVVVPEEKMSDVYSILQSIPQRQIEEMQRQARWFWEAYFQSIKAIALATLQIINDRIYPYAAISYEEWNDPPAVKWGSVSNPLFLPLIPPQSQGFTAIVLTYDRVESLFRVITEVSKVPSLSKLLVVWNNQNKNPPEDSLWPKIRVPLKVVRTAENKLSNRFFPYDEIETEAVLAIDDDIIMLTSDELQFGYEVWREFPDRLVGYPGRLHLWDHEMNKWKYESEWTNEVSMVLTGAAFYHKYFNYLYTYKMPGDIKNWVDAHMNCEDIAMNFLVANVTGKAVIKVTPRKKFKCPECTAIDGLSLDQTHMVERSECINKFASVFGTMPLKVVEHRADPVLYKDDFPEKLKSFPNIGSL

SEQ ID NO: 898115 - protein, 96 aa, Homo sapiens
ICCLSGTIFCWIETANQLQKLEGSSGPVRTSPHSPRPGYGKERAAHQPHDRFTLQLWFVRLALLVKLGLFQNAEMEFEPFGNLDQPDLYYEYYPHV

SEQ ID NO: 898116 - protein, 214 aa, Homo sapiens
MEGSGVFPAEVPGGVAGLWLTGCFLRFFPAQRPLGQRQPRRSFFESFIRTLIITCVALAVVLSSVSICDGHWLLAEDRLFGLWHFCTTTNQSVPICFRDLGQAHVPGLAVGMGLVRSVGALAVVAAIFGLEFLMVSQLCEDKHSQCKWVMGSILLLVSFVLSSGGLLGFVILLRNQVTLIGFTLMFWCEFTASFLLFLNAISGLHINSITHPWE

SEQ ID NO: 898117 - protein, 216 aa, Homo sapiens
DHTRNWRRQWVQMTRPDCSSDFNSRHFPLGQAQRPLGQRQPRRSFFESFIRTLIITCVALAVVLSSVSICDGHWLLAEDRLFGLWHFCTTTNQSVPICFRDLGQAHVPGLAVGMGLVRSVGALAVVAAIFGLEFLMVSQLCEDKHSQCKWVMGSILLLVSFVLSSGGLLGFVILLRNQVTLIGFTLMFWCEFTASFLLFLNAISGLHINSITHPWE

SEQ ID NO: 898118 - protein, 102 aa, Homo sapiens
ARYRLFAWLIARLVAWRLEFLMVSQLCEDKHSQCKWVMGSILLLVSFVLSSGGLLGFVILLRNQVTLIGFTLMFWCEFTASFLLFLNAISGLHINSITHPWE

SEQ ID NO: 898119 - protein, 269 aa, Homo sapiens
MGRTHRERRRRAGGASAPRARPLLQTWVRRRLGGEQPRGACLPHIAAPGARTPAASARGLASTRGSQTSFGKIFLLFGVTSDLLAQRPLGQRQPRRSFFESFIRTLIITCVALAVVLSSVSICDGHWLLAEDRLFGLWHFCTTTNQSVPICFRDLGQAHVPGLAVGMGLVRSVGALAVVAAIFGLEFLMVSQLCEDKHSQCKWVMGSILLLVSFVLSSGGLLGFVILLRNQVTLIGFTLMFWCEFTASFLLFLNAISGLHINSITHPWE

SEQ ID NO: 898120 - protein, 198 aa, Homo sapiens
MVARTQTWTEACWAQRPLGQRQPRRSFFESFIRTLIITCVALAVVLSSVSICDGHWLLAEDRLFGLWHFCTTTNQSVPICFRDLGQAHVPGLAVGMGLVRSVGALAVVAAIFGLEFLMVSQLCEDKHSQCKWVMGSILLLVSFVLSSGGLLGFVILLRNQVTLIGFTLMFWCEFTASFLLFLNAISGLHINSITHPWE

SEQ ID NO: 898121 - protein, 250 aa, Homo sapiens
VPWQVEIRRGDVEMSFRVWQCGGQLEIIPCSVVGHVFRTKSPHTFPKGTSVIARNQVRLAEVWMDSYKKIFYRRNLQAAKMAQEKSFGDISERLQLREQLHCHNFSWYLHNVYPEMFVPDLTPTFYGAIKNLGTNQCLDVGENNRGGKPLIMYSCHGLGGNQYFEYTTQRDLRHNIAKQLCLHVSKGALGLGSCHFTGKNSQVPKDEEWELAQDQLIRNSGSGTCLTSQDKKPAMAPCNPSDPHQLWLFV

SEQ ID NO: 898122 - protein, 57 aa, Homo sapiens
MGIGPGESVSRKLRIKNLRPGVVAHACNPSTLRGRGGQITRSGVRDHLANMVKPHLY

SEQ ID NO: 898123 - protein, 622 aa, Homo sapiens
MRLLRRRHMPLRLAMVGCAFVLFLFLLHRDVSSREEATEKPWLKSLVSRKDHVLDLMLEAMNNLRDSMPKLQIRAPEAQQTLFSINQSCLPGFYTPAELKPFWERPPQDPNAPGADGKAFQKSKWTPLETQEKEEGYKKHCFNAFASDRISLQRSLGPDTRPPECVDQKFRRCPPLATTSVIIVFHNEAWSTLLRTVYSVLHTTPAILLKEIILVDDASTEEHLKEKLEQYVKQLQVVRVVRQEERKGLITARLLGASVAQAEVLTFLDAHCECFHGWLEPLLARIAEDKTVVVSPDIVTIDLNTFEFAKPVQRGRVHSRGNFDWSLTFGWETLPPHEKQRRKDETYPIKSPTFAGGLFSISKSYFEHIGTYDNQMEIWGGENVEMSFRVWQCGGQLEIIPCSVVGHVFRTKSPHTFPKGTSVIARNQVRLAEVWMDSYKKIFYRRNLQAAKMAQEKSFGDISERLQLREQLHCHNFSWYLHNVYPEMFVPDLTPTFYGAIKNLGTNQCLDVGENNRGGKPLIMYSCHGLGGNQYFEYTTQRDLRHNIAKQLCLHVSKGALGLGSCHFTGKNSQVPKDEEWELAQDQLIRNSGSGTCLTSQDKKPAMAPCNPSDPHQLWLFV

SEQ ID NO: 898124 - protein, 154 aa, Homo sapiens
MVSSIGVKERKWAQCCCKDEEGPDLTPTFYGAIKNLGTNQCLDVGENNRGGKPLIMYSCHGLGGNQYFEYTTQRDLRHNIAKQLCLHVSKGALGLGSCHFTGKNSQVPKDEEWELAQDQLIRNSGSGTCLTSQDKKPAMAPCNPSDPHQLWLFV

SEQ ID NO: 898125 - protein, 163 aa, Homo sapiens
GPPTRSHWNSQPLSGPRGAFCSLSGNALAPGQAATPPQRRRGLFFWGVSPARRAPHLACARPEPAVLQAPSILLDAPRTDVGDMGRAMVARLGLGLLLLALLLPTQIYSSETTTGTSSNSSQSTSNTGLAPNPTNATTKAAGGALQSTASLFVVSLSLLHLYS

SEQ ID NO: 898126 - protein, 178 aa, Homo sapiens
MPLLALTMRLLLHIAGLPRRALSHEAYTGVKQPLVQAFLRSRPVSSEAITYIRRPFAVKGGNAPGVLPAFLGGENPTMILGVSHLKVSFLPNSTTRAHKRPPCWDRNAGHTCSLLHTKGPRFLTERNQIGTSCSSSQSTSNTGLAPNPTNATTKAAGGALQSTASLFVVSLSLLHLYS

SEQ ID NO: 898127 - protein, 163 aa, Homo sapiens; identical to SEQ ID NO: 898125

SEQ ID NO: 898128 - protein, 163 aa, Homo sapiens; identical to SEQ ID NO: 898125

SEQ ID NO: 898129 - protein, 163 aa, Homo sapiens; identical to SEQ ID NO: 898125

SEQ ID NO: 898130 - protein, 955 aa, Homo sapiens
MSSASVTAFEKEHLWMYLQALGFEPGPATIACGKIVSHTHLGVNMFDKLNRDAFHIISYFLFQVLDQSLTKEVFKFCWPPFDQKSDTEFRKHCCEWIKRISGECGSSFPQVVGSLFLSPGGPKFIHLMYHFARFVAMKYIKSNSKNSSHHFVETFNIKPQDLHKCIARCHFARSRFLQILQRQDCVTQKYQENAQLSVKQVRNLRSECIGLENQIKKMEPYDDHSNMEEKIQKVRSLWASVNETLMFLEKEREVVSSVLSLVNQYALDGTNVAINIPRLLLDKIEKQMFQLHIGNVYEAGKLNLLTVIQLLNEVLKVMKYERCQADQARLTVDLHYLEKETKFQKERLSDLKHMRYRIKDDLTTIRHSVVEKQGEWHKKWKEFLGLSPFSLIKGWTPSVDLLPPMSPLSFDPASEEVYAKSILCQYPASLPDAHKQHNQENGCRGDSDTLGALHDLANSPASFLSQSVSSSDRNSVTVLEKDTKMGTPKEKNEAISKKIPEFEVENSPLSDVAKNTESSAFGGSLPAKKSDPFQKEQDHLVEEVARAVLSDSPQLSEGKEIKLEELIDSLGSNPFLTRNQIPRTPENLITEIRSSWRKAIEMEENRTKEPIQMDAEHREVLPESLPVLHNQREFSMADFLLETTVSDFGQSHLTEEKVISDCECVPQKHVLTSHIDEPPTQNQSDLLNKKVICKQDLECLAFTKLSETSRMETFSPAVGNRIDVMGGSEEEFMKILDHLEVSCNKPSTNKTMLWNSFQISSGISSKSFKDNDFGILHETLPEEVGHLSFNSSSSSEANFKLEPNSPMHGGTLLEDVVGGRQTTPESDFNLQALRSRYEALKKSLSKKREESYLSNSQTPERHKPELSPTPQNVQTDDTLNFLDTCDLHTEHIKPSLRTSIGERKRSLSPLIKFSPVEQRLRTTIACSLGELPNLKEEDILNKSLDAKEPPSDLTR

SEQ ID NO: 898131 - protein, 516 aa, Homo sapiens
TPFSSGIYSSIPSIHQIVNIPASFLSQSVSSSDRNSVTVLEKDTKMGTPKEKNEAISKKIPEFEVENSPLSDVAKNTESSAFGGSLPAKKSDPFQKEQDHLVEEVARAVLSDSPQLSEGKEIKLEELIDSLGSNPFLTRNQIPRTPENLITEIRSSWRKAIEMEENRTKEPIQMDAEHREVLPESLPVLHNQREFSMADFLLETTVSDFGQSHLTEEKVISDCECVPQKHVLTSHIDEPPTQNQSDLLNKKVICKQDLECLAFTKLSETSRMETFSPAVGNRIDVMGGSEEEFMKILDHLEVSCNKPSTNKTMLWNSFQISSGISSKSFKDNDFGILHETLPEEVGHLSFNSSSSSEANFKLEPNSPMHGGTLLEDVVGGRQTTPESDFNLQALRSRYEALKKSLSKKREESYLSNSQTPERHKPELSPTPQNVQTDDTLNFLDTCDLHTEHIKPSLRTSIGERKRSLSPLIKFSPVEQRLRTTIACSLGELPNLKEEDILNKSLDAKEPPSDLTR

SEQ ID NO: 898132 - protein, 444 aa, Homo sapiens
RDKPDVLTHLVGSLPAKKSDPFQKEQDHLVEEVARAVLSDSPQLSEGKEIKLEELIDSLGSNPFLTRNQIPRTPENLITEIRSSWRKAIEMEENRTKEPIQMDAEHREVLPESLPVLHNQREFSMADFLLETTVSDFGQSHLTEEKVISDCECVPQKHVLTSHIDEPPTQNQSDLLNKKVICKQDLECLAFTKLSETSRMETFSPAVGNRIDVMGGSEEEFMKILDHLEVSCNKPSTNKTMLWNSFQISSGISSKSFKDNDFGILHETLPEEVGHLSFNSSSSSEANFKLEPNSPMHGGTLLEDVVGGRQTTPESDFNLQALRSRYEALKKSLSKKREESYLSNSQTPERHKPELSPTPQNVQTDDTLNFLDTCDLHTEHIKPSLRTSIGERKRSLSPLIKFSPVEQRLRTTIACSLGELPNLKEEDILNKSLDAKEPPSDLTR

SEQ ID NO: 898133 - protein, 938 aa, Homo sapiens
MSSASVTAFEKEHLWMYLQALGFEPGPATIACGKIVSHTHLGVNMFDKLNRDAFHIISYFLFQVLDQSLTKEVFKFCWPPFDQKSDTEFRKHCCEWIKRISGECGSSFPQVVGSLFLSPGGPKFIHLMYHFARFVAMKYIKSNSKNSSHHFVETFNIKPQDLHKCIARCHFARSRFLQILQRQDCVTQKYQENAQLSVKQVRNLRSECIGLENQIKKMEPYDDHSNMEEKIQKVRSLWASVNETLMFLEKEREVVSSVLSLVNQYALDGTNVAINIPRLLLDKIEKQMFQLHIGNVYEAGKLNLLTVIQLLNEVLKVMKYERCQADQARLTVDLHYLEKETKFQKERLSDLKHMRYRIKDDLTTIRHSVVEKQGEWHKKWKEFLGLSPFSLIKGWTPSVDLLPPMSPLSFDPASEEVYAKSILCQYPASLPDAHKQHNQENGCRGDSDTLGALHDLANSPASFLSQSVSSSDRNSVTVLEKDTKMGTPKEKNEAISKKIPEFEVENSPLSDVAKNTESSAFGGSLPAKKSDPFQKEQDHLVEEVARAVLSDSPQLSEGKEIKLEELIDSLGSNPFLTRNQIPRTPENLITEIRSSWRKAIEMEENRTKEPIQMDAEHREVLPESLPVLHNQREFSMADFLLETTVSDFGQSHLTEEKVISDCECVPQKHVLTSHIDEPPTQNQSDLLNKKVICKQDLECLAFTKLSETSRMETFSPAVGNRIDVMGGSEEEFMKILDHLEVSCNKPSTNKTMLWNSFQISSGISSKSFKDNDFGILHETLPEEVGHLSFNSSSSSEANFKLEPNSPMHGGTLLEDVVGGRQTTPESDFNLQALRSRYEALKKSLSKKREESYLSNSQTPERHKPELSPTPQNVQTDDTLNFLDTCDLHTEHIKPSLRTSIGERKRSLSPLIKFSPVEQRLRTTIACSLGELPNLKGKV

SEQ ID NO: 898134 - protein, 955 aa, Homo sapiens; identical to SEQ ID NO: 898130

SEQ ID NO: 898135 - protein, 955 aa, Homo sapiens; identical to SEQ ID NO: 898130

SEQ ID NO: 898136 - protein, 385 aa, Homo sapiens
SRVSTQSGHYGRGTPENSITEIRSSWRKAIEMEENRTKEPIQMDAEHREVLPESLPVLHNQREFSMADFLLETTVSDFGQSHLTEEKVISDCECVPQKHVLTSHIDEPPTQNQSDLLNKKVICKQDLECLAFTKLSETSRMETFSPAVGNRIDVMGGSEEEFMKILDHLEVSCNKPSTNKTMLWNSFQISSGISSKSFKDNDFGILHETLPEEVGHLSFNSSSSSEANFKLEPNSPMHGGTLLEDVVGGRQTTPESDFNLQALRSRYEALKKSLSKKREESYLSNSQTPERHKPELSPTPQNVQTDDTLNFLDTCDLHTEHIKPSLRTSIGERKRSLSPLIKFSPVEQRLRTTIACSLGELPNLKEEDILNKSLDAKEPPSDLTR

SEQ ID NO: 898137 - protein, 468 aa, Homo sapiens
MAQLRRGHLTFRDVAIEFSQEEWKCLDPVQKALYRDVMLENYRNLVSLGICLPDLSIISMMKQRTEPWTVENEMKVAKNPDRWEGIKDINTGRSCAVRSKAGNKPITNQLGLTFQLPLPELEIFQGEGKIYECNQVQKFISHSSSVSPLQRIYSGVKTHIFNKHRNDFVDFPLLSQEQKAHIRRKPYECNEQGKVFRVSSSLPNHQVIHTADKPNRCHECGKTVRDKSGLAEHWRIRTGEKPYKCKECGKLFNRIAYLARHEKVHTGESPYKCNECGKVFSRITYLVRHQKIHTREKPHKCNKCGKVYSSSSYLAQHWRIHTGEKLYKCNKCGKEFSGHSSLTTHLLIHTGEKPYKCKECDKAFRHKFSLTVHQRNHNGEKPYKCHECGKVFTQVSHLARHQKIHTGEKPYKCNECGKVFTQNSHLANHQRIHTGEKPYKCHVCGKVFRHSSWFVQHQRSVHERVLTN

SEQ ID NO: 898138 - protein, 105 aa, Homo sapiens
MAQLRRGHLTFRDVAIEFSQEEWKCLDPVQKALYRDVMLENYRNLVSLGICLPDLSIISMMKQRTEPWTVENEMKVAKNPASCSHQDSVSYNLQRSMYRNPSDGN

SEQ ID NO: 898139 - protein, 105 aa, Homo sapiens
MAQLRRGHLTFRDVAIEFSQEEWKCLDPVQKALYRDVMLENYRNLVSLGICLPDLSIISMMKQRTEPWTVENEMKVAKNPDRWEGIKDINTDGVLFCRPGWSTVV

SEQ ID NO: 898140 - protein, 524 aa, Homo sapiens
MISPFLVLAIGTCLTNSLVPEKEKDPKYWRDQAQETLKYALELQKLNTNVAKNVIMFLGDGMGVSTVTAARILKGQLHHNPGEETRLEMDKFPFVALSKTYNTNAQVPDSAGTATAYLCGVKANEGTVGVSAATERSRCNTTQGNEVTSILRWAKDAGKSVGIVTTTRVNHATPSAAYAHSADRDWYSDNEMPPEALSQGCKDIAYQLMHNIRDIDVIMGGGRKYMYPKNKTDVEYESDEKARGTRLDGLDLVDTWKSFKPRYKHSHFIWNRTELLTLDPHNVDYLLGLFEPGDMQYELNRNNVTDPSLSEMVVVAIQILRKNPKGFFLLVEGGRIDHGHHEGKAKQALHEAVEMDRAIGQAGSLTSSEDTLTVVTADHSHVFTFGGYTPRGNSIFGLAPMLSDTDKKPFTAILYGNGPGYKVVGGERENVSMVDYAHNNYQAQSAVPLRHETHGGEDVAVFSKGPMAHLLHGVHEQNYVPHVMAYAACIGANLGHCAPASSAGSLAAGPLLLALALYPLSVLF

SEQ ID NO: 898141 - protein, 563 aa, Homo sapiens
PHSGPAAAFIRRRGWWPGPRCAPATPRPLSWLRAPTRLCLDGPSPVLCAGLEHQLTSDHCQPTPSHPRRLHLWAPGIKQVLGCTMISPFLVLAIGTCLTNSLVPEKEKDPKYWRDQAQETLKYALELQKLNTNVAKNVIMFLGDGMGVSTVTAARILKGQLHHNPGEETRLEMDKFPFVALSKTYNTNAQVPDSAGTATAYLCGVKANEGTVGVSAATERSRCNTTQGNEVTSILRWAKDAGKSVGIVTTTRVNHATPSAAYAHSADRDWYSDNEMPPEALSQGCKDIAYQLMHNIRDIDVIMGGGRKYMYPKNKTDVEYESDEKARGTRLDGLDLVDTWKSFKPRYKHSHFIWNRTELLTLDPHNVDYLLGGRIDHGHHEGKAKQALHEAVEMDRAIGQAGSLTSSEDTLTVVTADHSHVFTFGGYTPRGNSIFGLAPMLSDTDKKPFTAILYGNGPGYKVVGGERENVSMVDYAHNNYQAQSAVPLRHETHGGEDVAVFSKGPMAHLLHGVHEQNYVPHVMAYAACIGANLGHCAPASSAGSLAAGPLLLALALYPLSVLF

SEQ ID NO: 898142 - protein, 553 aa, Homo sapiens
PHSGPAAAFIRRRGWWPGPRCAPATPRPLSWLRAPTRLCLDGPSPVLCAEKEKDPKYWRDQAQETLKYALELQKLNTNVAKNVIMFLGDGMGVSTVTAARILKGQLHHNPGEETRLEMDKFPFVALSKTYNTNAQVPDSAGTATAYLCGVKANEGTVGVSAATERSRCNTTQGNEVTSILRWAKDAGKSVGIVTTTRVNHATPSAAYAHSADRDWYSDNEMPPEALSQGCKDIAYQLMHNIRDIDVIMGGGRKYMYPKNKTDVEYESDEKARGTRLDGLDLVDTWKSFKPRYKHSHFIWNRTELLTLDPHNVDYLLGLFEPGDMQYELNRNNVTDPSLSEMVVVAIQILRKNPKGFFLLVEGGRIDHGHHEGKAKQALHEAVEMDRAIGQAGSLTSSEDTLTVVTADHSHVFTFGGYTPRGNSIFGLAPMLSDTDKKPFTAILYGNGPGYKVVGGERENVSMVDYAHNNYQAQSAVPLRHETHGGEDVAVFSKGPMAHLLHGVHEQNYVPHVMAYAACIGANLGHCAPASSAGSLAAGPLLLALALYPLSVLF

SEQ ID NO: 898143 - protein, 359 aa, Homo sapiens
PHSGPAAAFIRRRGWWPGPRCAPATPRPLSWLRAPTRLCLDGPSPVLCAGLEHQLTSDHCQPTPSHPRRLHLWAPGIKQVLGCTMISPFLVLAIGTCLTNSLVPEKEKDPKYWRDQAQETLKYALELQKLNTNVAKNVIMFLGDGMGVSTVTAARILKGQLHHNPGEETRLEMDKFPFVALSKTYNTNAQVPDSAGTATAYLCGVKANEGTVGVSAATERSRCNTTQGNEVTSILRWAKDAGKSVGIVTTTRVNHATPSAAYAHSADRDWYSDNEMPPEALSQGCKDIAYQLMHNIRDIDVIMGGGRKYMYPKNKTDVEYESDEKARGTRLDGLDLVDTWKSFKPRYKCSLPAALWPTG

SEQ ID NO: 898144 - protein, 608 aa, Homo sapiens
PHSGPAAAFIRRRGWWPGPRCAPATPRPLSWLRAPTRLCLDGPSPVLCAGLEHQLTSDHCQPTPSHPRRLHLWAPGIKQVLGCTMISPFLVLAIGTCLTNSLVPEKEKDPKYWRDQAQETLKYALELQKLNTNVAKNVIMFLGDGMGVSTVTAARILKGQLHHNPGEETRLEMDKFPFVALSKTYNTNAQVPDSAGTATAYLCGVKANEGTVGVSAATERSRCNTTQGNEVTSILRWAKDAGKSVGIVTTTRVNHATPSAAYAHSADRDWYSDNEMPPEALSQGCKDIAYQLMHNIRDIDVIMGGGRKYMYPKNKTDVEYESDEKARGTRLDGLDLVDTWKSFKPRYKHSHFIWNRTELLTLDPHNVDYLLGLFEPGDMQYELNRNNVTDPSLSEMVVVAIQILRKNPKGFFLLVEGGRIDHGHHEGKAKQALHEAVEMDRAIGQAGSLTSSEDTLTVVTADHSHVFTFGGYTPRGNSIFGLAPMLSDTDKKPFTAILYGNGPGYKVVGGERENVSMVDYAHNNYQAQSAVPLRHETHGGEDVAVFSKGPMAHLLHGVHEQNYVPHVMAYAACIGANLGHCAPASSAGSLAAGPLLLALALYPLSVLF

SEQ ID NO: 898145 - protein, 608 aa, Homo sapiens; identical to SEQ ID NO: 898144

SEQ ID NO: 898146 - protein, 608 aa, Homo sapiens; identical to SEQ ID NO: 898144

SEQ ID NO: 898147 - protein, 608 aa, Homo sapiens; identical to SEQ ID NO: 898144

SEQ ID NO: 898148 - protein, 524 aa, Homo sapiens; identical to SEQ ID NO: 898140

SEQ ID NO: 898149 - protein, 524 aa, Homo sapiens; identical to SEQ ID NO: 898140

SEQ ID NO: 898150 - protein, 170 aa, Homo sapiens [sequence omitted]

SEQ ID NO: 898151 - protein, 310 aa, Homo sapiens
MDRLLRLGGGMPGLGQGPPTDAPAVDTAEQVYISSLALLKMLKHGRAGVPMEVMGLMLGEFVDDYTVRVIDVFAMPQSGTGVSVEAVDPVFQAKMLDMLKQTGRPEMVVGWYHSHPGFGCWLSGVDINTQQSFEALSERAVAVVVDPIQSVKGKVVIDAFRLINANMMVLGHEPRQTTSNLGHLNKPSIQALIHGLNRHYYSITINYRKNELEQKMLLNLHKKSWMEGLTLQDYSEHCKHNESVVKEMLELAKNYNKAVEEEDKMTPEQLAIKNVGKQDPKRHLEEHVDVLMTSNIVQCLAAMLDTVVFK

SEQ ID NO: 898152 - protein, 310 aa, Homo sapiens; identical to SEQ ID NO: 898151

SEQ ID NO: 898153 - protein, 310 aa, Homo sapiens; identical to SEQ ID NO: 898151

SEQ ID NO: 898154 - protein, 305 aa, Homo sapiens
MLNDSLIPPLQGPPTDAPAVDTAEQVYISSLALLKMLKHGRAGVPMEVMGLMLGEFVDDYTVRVIDVFAMPQSGTGVSVEAVDPVFQAKMLDMLKQTGRPEMVVGWYHSHPGFGCWLSGVDINTQQSFEALSERAVAVVVDPIQSVKGKVVIDAFRLINANMMVLGHEPRQTTSNLGHLNKPSIQALIHGLNRHYYSITINYRKNELEQKMLLNLHKKSWMEGLTLQDYSEHCKHNESVVKEMLELAKNYNKAVEEEDKMTPEQLAIKNVGKQDPKRHLEEHVDVLMTSNIVQCLAAMLDTVVFK

SEQ ID NO: 898155 - protein, 310 aa, Homo sapiens; identical to SEQ ID NO: 898151

SEQ ID NO: 898156 - protein, 179 aa, Homo sapiens
LGQFVRDCASFRGCGSHSECQRKVVIDAFRLINANMMVLGHEPRQTTSNLGHLNKPSIQALIHGLNRHYYSITINYRKNELEQKMLLNLHKKSWMEGLTLQDYSEHCKHNESVVKEMLELAKNYNKAVEEEDKMTPEQLAIKNVGKQDPKRHLEEHVDVLMTSNIVQCLAAMLDTVVFK

SEQ ID NO: 898157 - protein, 75 aa, Homo sapiens
HTLHFTKTFTSTLQMTPSELTQAVEEEDKMTPEQLAIKNVGKQDPKRHLEEHVDVLMTSNIVQCLAAMLDTVVFK

SEQ ID NO: 898158 - protein, 310 aa, Homo sapiens; identical to SEQ ID NO: 898151

SEQ ID NO: 898159 - protein, 310 aa, Homo sapiens; identical to SEQ ID NO: 898151

SEQ ID NO: 898160 - protein, 270 aa, Homo sapiens
MLKHGRAGVPMEVMGLMLGEFVDDYTVRVIDVFAMPQSGTGVSVEAVDPVFQAKMLDMLKQTGRPEMVVGWYHSHPGFGCWLSGVDINTQQSFEALSERAVAVVVDPIQSVKGKVVIDAFRLINANMMVLGHEPRQTTSNLGHLNKPSIQALIHGLNRHYYSITINYRKNELEQKMLLNLHKKSWMEGLTLQDYSEHCKHNESVVKEMLELAKNYNKAVEEEDKMTPEQLAIKNVGKQDPKRHLEEHVDVLMTSNIVQCLAAMLDTVVFK

SEQ ID NO: 898161 - protein, 270 aa, Homo sapiens; identical to SEQ ID NO: 898160

SEQ ID NO: 898162 - protein, 227 aa, Homo sapiens
MAEVEVEVKEGEDDMLKQTGRPEMVVGWYHSHPGFGCWLSGVDINTQQSFEALSERAVAVVVDPIQSVKGKVVIDAFRLINANMMVLGHEPRQTTSNLGHLNKPSIQALIHGLNRHYYSITINYRKNELEQKMLLNLHKKSWMEGLTLQDYSEHCKHNESVVKEMLELAKNYNKAVEEEDKMTPEQLAIKNVGKQDPKRHLEEHVDVLMTSNIVQCLAAMLDTVVFK

SEQ ID NO: 898163 - protein, 212 aa, Homo sapiens
MDRLLRLGGGMPGLGQGPPTDAPAVDTAEQVYISSLALLKMLKHGRAGVPMEVMGLMLGEFVDDYTVRVIDVFAMPQSGTGVSVEAVDPVFQAKMLDMLKQTGRPEMVVGWYHSHPGFGCWLSGVDINTQQSFEALSERAVAVVVDPIQSVKGKVVIDAFRLINANMMVLGHEPRQTTSNLGHLNKPSIQALIHGLTDIILPVESTDAVGIL

SEQ ID NO: 898164 - protein, 1924 aa, Homo sapiens
MKSPALQPLSMAGLQLMTPASSPMGPFFGLPWQQEAIHDNIYTPRKYQVELLEAALDHNTIVCLNTGSGKTFIASTTLLKSCLYLDLGETSARNGKRTVFLVNSANQVAQQVSAVRTHSDLKVGEYSNLEVNASWTKERWNQEFTKHQVLIMTCYVALNVLKNGYLSLSDINLLVFDECHLAILDHPYREIMKLCENCPSCPRILGLTASILNGKCDPEELEEKIQKLEKILKSNAETATDLVVLDRYTSQPCEIVVDCGPFTDRSGLYERLLMELEEALNFINDCNISVHSKERDSTLISKQILSDCRAVLVVLGPWCADKVAGMMVRELQKYIKHEQEELHRKFLLFTDTFLRKIHALCEEHFSPASLDLKFVTPKVIKLLEILRKYKPYERHSFESVEWYNNRNQDNYVSWSDSEDDDEDEEIEEKEKPETNFPSPFTNILCGIIFVERRYTAVVLNRLIKEAGKQDPELAYISSNFITGHGIGKNQPRNKQMEAEFRKQEEVLRKFRAHETNLLIATSIVEEGVDIPKCNLVVRFDLPTEYRSYVQSKGRARAPISNYIMLADTDKIKSFEEDLKTYKAIEKILRNKCSKSVDTGETDIDPVMDDDDVFPPYVLRPDDGGPRVTINTAIGHINRYCARLPSDPFTHLAPKCRTRELPDGTFYSTLYLPINSPLRASIVGPPMSCVRLAERVVALICCEKLHKIGELDDHLMPVGKETVKYEEELDLHDEEETSVPGRPGSTKRRQCYPKAIPECLRDSYPRPDQPCYLYVIGMVLTTPLPDELNFRRRKLYPPEDTTRCFGILTAKPIPQIPHFPVYTRSGEVTISIELKKSGFMLSLQMLELITRLHQYIFSHILRLEKPALEFKPTDADSAYCVLPLNVVNDSSTLDIDFKFMEDIEKSEARIGIPSTKYTKETPFVFKLEDYQDAVIIPRYRNFDQPHRFYVADVYTDLTPLSKFPSPEYETFAEYYKTKYNLDLTNLNQPLLDVDHTSSRLNLLTPRHLNQKGKALPLSSAEKRKAKWESLQNKQILVPELCAIHPIPASLWRKAVCLPSILYRLHCLLTAEELRAQTASDAGVGVRSLPADFRYPNLDFGWKKSIDSKSFISISNSSSAENDNYCKHSTIVPENAAHQGANRTSSLENHDQMSVNCRTLLSESPGKLHVEVSADLTAINGLSYNQNLANGSYDLANRDFCQGNQLNYYKQEIPVQPTTSYSIQNLYSYENQPQPSDECTLLSNKYLDGNANKSTSDGSPVMAVMPGTTDTIQVLKGRMDSEQSPSIGYSSRTLGPNPGLILQALTLSNASDGFNLERLEMLGDSFLKHAITTYLFCTYPDAHEGRLSYMRSKKVSNCNLYRLGKKKGLPSRMVVSIFDPPVNWLPPGYVVNQDKSNTDKWEKDEMTKDCMLANGKLDEDYEEEDEEEESLMWRAPKEEADYEDDFLEYDQEHIRFIDNMLMGSGAFVKKISLSPFSTTDSAYEWKMPKKSSLGSMPFSSDFEDFDYSSWDAMCYLDPSKAVEEDDFVVGFWNPSEENCGVDTGKQSISYDLHTEQCIADKSIADCVEALLGCYLTSCGERAAQLFLCSLGLKVLPVIKRTDREKALCPTRENFNSQQKNLSVSCAAASVASSRSSVLKDSEYGCLKIPPRCMFDHPDADKTLNHLISGFENFEKKINYRFKNKAYLLQAFTHASYHYNTITDCYQRLEFLGDAILDYLITKHLYEDPRQHSPGVLTDLRSALVNNTIFASLAVKYDYHKYFKAVSPELFHVIDDFVQFQLEKNEMQGMDSELRRSEEDEEKEEDIEVPKAMGDIFESLAGAIYMDSGMSLETVWQVYYPMMRPLIEKFSANVPRSPVRELLEMEPETAKFSPAERTYDGKVRVTVEVVGKGKFKGVGRSYRIAKSAAARRALRSLKANQPQVPNS

SEQ ID NO: 898165 - protein, 1924 aa, Homo sapiens; identical to SEQ ID NO: 898164

SEQ ID NO: 898166 - protein, 1924 aa, Homo sapiens; identical to SEQ ID NO: 898164

SEQ ID NO: 898167 - protein, 1924 aa, Homo sapiens; identical to SEQ ID NO: 898164

SEQ ID NO: 898168 - protein, 1177 aa, Homo sapiens
MKKRPVFQEDQVPRNEGSATQKHYLYVIGMVLTTPLPDELNFRRRKLYPPEDTTRCFGILTAKPIPQIPHFPVYTRSGEVTISIELKKSGFMLSLQMLELITRLHQYIFSHILRLEKPALEFKPTDADSAYCVLPLNVVNDSSTLDIDFKFMEDIEKSEARIGIPSTKYTKETPFVFKLEDYQDAVIIPRYRNFDQPHRFYVADVYTDLTPLSKFPSPEYETFAEYYKTKYNLDLTNLNQPLLDVDHTSSRLNLLTPRHLNQKGKALPLSSAEKRKAKWESLQNKQILVPELCAIHPIPASLWRKAVCLPSILYRLHCLLTAEELRAQTASDAGVGVRSLPADFRYPNLDFGWKKSIDSKSFISISNSSSAENDNYCKHSTIVPENAAHQGANRTSSLENHDQMSVNCRTLLSESPGKLHVEVSADLTAINGLSYNQNLANGSYDLANRDFCQGNQLNYYKQEIPVQPTTSYSIQNLYSYENQPQPSDECTLLSNKYLDGNANKSTSDGSPVMAVMPGTTDTIQVLKGRMDSEQSPSIGYSSRTLGPNPGLILQALTLSNASDGFNLERLEMLGDSFLKHAITTYLFCTYPDAHEGRLSYMRSKKVSNCNLYRLGKKKGLPSRMVVSIFDPPVNWLPPGYVVNQDKSNTDKWEKDEMTKDCMLANGKLDEDYEEEDEEEESLMWRAPKEEADYEDDFLEYDQEHIRFIDNMLMGSGAFVKKISLSPFSTTDSAYEWKMPKKSSLGSMPFSSDFEDFDYSSWDAMCYLDPSKAVEEDDFVVGFWNPSEENCGVDTGKQSISYDLHTEQCIADKSIADCVEALLGCYLTSCGERAAQLFLCSLGLKVLPVIKRTDREKALCPTRENFNSQQKNLSVSCAAASVASSRSSVLKDSEYGCLKIPPRCMFDHPDADKTLNHLISGFENFEKKINYRFKNKAYLLQAFTHASYHYNTITDCYQRLEFLGDAILDYLITKHLYEDPRQHSPGVLTDLRSALVNNTIFASLAVKYDYHKYFKAVSPELFHVIDDFVQFQLEKNEMQGMDSELRRSEEDEEKEEDIEVPKAMGDIFESLAGAIYMDSGMSLETVWQVYYPMMRPLIEKFSANVPRSPVRELLEMEPETAKFSPAERTYDGKVRVTVEVVGKGKFKGVGRSYRIAKSAAARRALRSLKANQPQVPNS

SEQ ID NO: 898169 - protein, 1870 aa, Homo sapiens
MKSPALQPLSMAGLQLMTPASSPMGPFFGLPWQQEAIHDNIYTPRKYQVELLEAALDHNTIVCLNTGSGKTFIASTTLLKSCLYLDLGETSARNGKRTVFLVNSANQVAQQVSAVRTHSDLKVGEYSNLEVNASWTKERWNQEFTKHQVLIMTCYVALNVLKNGYLSLSDINLLVFDECHLAILDHPYREIMKLCENCPSCPRILGLTASILNGKCDPEELEEKIQKLEKILKSNAETATDLVVLDRYTSQPCEIVVDCGPFTDRSGLYERLLMELEEALNFINDCNISVHSKERDSTLISKQILSDCRAVLVVLGPWCADKVAGMMVRELQKYIKHEQEELHRKFLLFTDTFLRKIHALCEEHFSPASLDLKFVTPKVIKLLEILRKYKPYERHSFESVEWYNNRNQDNYVSWSDSEDDDEDEEIEEKEKPETNFPSPFTNILCGIIFVERRYTAVVLNRLIKEAGKQDPELAYISSNFITGHGIGKNQPRNKQMEAEFRKQEEVLRKFRAHETNLLIATSIVEEGVDIPKCNLVVRFDLPTEYRSYVQSKGRARAPISNYIMLADTDKIKSFEEDLKTYKAIEKILRNKCSKSVDTGETDIDPVMDDDDVFPPYVLRPDDGGPRVTINTAIGHINRYCARLPSDPFTHLAPKCRTRELPDGTFYSTLYLPINSPLRASIVGPPMSCVRLAERVVALICCEKLHKIGELDDHLMPVGKETVKYEEELDLHDEEETSVPGRPGSTKRRQCYPKAIPECLRDSYPRPDQPCYLYVIGMVLTTPLPDELNFRRRKLYPPEDTTRCFGILTAKPIPQIPHFPVYTRSGEVTISIELKKSGFMLSLQMLELITRLHQYIFSHILRLEKPALEFKPTDADSAYCVLPLNVVNDSSTLDIDFKFMEDIEKSEARIGIPSTKYTKETPFVFKLEDYQDAVIIPRYRNFDQPHRFYVADVYTDLTPLSKFPSPEYETFAEYYKTKYNLDLTNLNQPLLDVDHTSSRLNLLTPRHLNQKGKALPLSSAEKRKAKWESLQNKQILVPELCAIHPIPASLWRKAVCLPSILYRLHCLLTAEELRAQTASDAGVGVRSLPADFRYPNLDFGWKKSIDSKSFISISNSSSAENDNYCKHSTIVPENAAHQGANRTSSLENHDQMSVNCRTLLSESPGKLHVEVSADLTAINGLSYNQNLANGSYDLANRDFCQGNQLNYYKQEIPVQPTTSYSIQNLYSYENQPQPSDECTLLSNKYLDGNANKSTSDGSPVMAVMPGTTDTIQVLKGRMDSEQSPSIGYSSRTLGPNPGLILQALTLSNASDGFNLERLEMLGDSFLKHAITTYLFCTYPDAHEGRLSYMRSKKVSNCNLYRLGKKKGLPSRMVVSIFDPPVNWLPPGYVVNQDKSNTDKWEKDEMTKDCMLANGKLDEDYEEEDEEEESLMWRAPKEEADYEDDFLEYDQEHIRFIDNMLMGSGAFVKKISLSPFSTTDSAYEWKMPKKSSLGSMPFSSDFEDFDYSSWDAMCYLDPSKAVEEDDFVVGFWNPSEENCGVDTGKQSISYDLHTEQCIADKSIADCVEALLGCYLTSCGERAAQLFLCSLGLKVLPVIKRTDREKALCPTRENFNSQQKNLSVSCAAASVASSRSSVLKDSEYGCLKIPPRCMFDHPDADKTLNHLISGFENFEKKINYRFKNKAYLLQAFTHASYHYNTITDCYQRLEFLGDAILDYLITKHLYEDPRQHSPGVLTDLRSALVNNTIFASLAVKYDYHKYFKAVSPELFHVIDDFVQFQLEKNEMQGMDSELRRSEEDEEKEEDIEVPKAMGDIFESLAGAIYMDSGMSLETVWQVYYPMMRPLIEKFSANVPRSPVRELLEMEPETAKFR

SEQ ID NO: 898170 - protein, 1903 aa, Homo sapiens
MKSPALQPLSMAGLQLMTPASSPMGPFFGLPWQQEAIHDNIYTPRKYQVELLEAALDHNTIVCLNTGSGKTFIASTTLLKSCLYLDLGETSARNGKRTVFLVNSANQVAQQVSAVRTHSDLKVGEYSNLEVNASWTKERWNQEFTKHQVLIMTCYVALNVLKNGYLSLSDINLLVFDECHLAILDHPYREIMKLCENCPSCPRILGLTASILNGKCDPEELEEKIQKLEKILKSNAETATDLVVLDRYTSQPCEIVVDCGPFTDRSGLYERLLMELEEALNFINDCNISVHSKERDSTLISKQILSDCRAVLVVLGPWCADKVAGMMVRELQKYIKHEQEELHRKFLLFTDTFLRKIHALCEEHFSPASLDLKFVTPKVIKLLEILRKYKPYERHSFESVEWYNNRNQDNYVSWSDSEDDDEDEEIEEKEKPETNFPSPFTNILCGIIFVERRYTAVVLNRLIKEAGKQDPELAYISSNFITGHGIGKNQPRNKQMEAEFRKQEEVLRKFRAHETNLLIATSIVEEGVDIPKCNLVVRFDLPTEYRSYVQSKGRARAPISNYIMLADTDKIKSFEEDLKTYKAIEKILRNKCSKSVDTGETDIDPVMDDDDVFPPYVLRPDDGGPRVTINTAIGHINRYCARLPSDPFTHLAPKCRTRELPDGTFYSTLYLPINSPLRASIVGPPMSCVRLAERVVALICCEKLHKIGELDDHLMPVGKETVKYEEELDLHDEEETSVPGRPGSTKRRQCYPKAIPECLRDSYPRPDQPCYLYVIGMVLTTPLPDELNFRRRKLYPPEDTTRCFGILTAKPIPQIPHFPVYTRSGEVTISIELKKSGFMLSLQMLELITRLHQYIFSHILRLEKPALEFKPTDADSAYCVLPLNVVNDSSTLDIDFKFMEDIEKSEARIGIPSTKYTKETPFVFKLEDYQDAVIIPRYRNFDQPHRFYVADVYTDLTPLSKFPSPEYETFAEYYKTKYNLDLTNLNQPLLDVDHTSSRLNLLTPRHLNQKGKALPLSSAEKRKAKWESLQNKQILVPELCAIHPIPASLWRKAVCLPSILYRLHCLLTAEELRAQTASDAGVGVRSLPADFRYPNLDFGWKKSIDSKSFISISNSSSAENDNYCKHSTIVPENAAHQGANRTSSLENHDQMSVNCRTLLSESPGKLHVEVSADLTAINGLSYNQNLANGSYDLANRDFCQGNQLNYYKQEIPVQPTTSYSIQNLYSYENQPQPSDECTLLSNKYLDGNANKSTSDGSPVMAVMPGTTDTIQVLKGRMDSEQSPSIGYSSRTLGPNPGLILQALTLSNASDGFNLERLEMLGDSFLKHAITTYLFCTYPDAHEGRLSYMRSKKVSNCNLYRLGKKKGLPSRMVVSIFDPPVNWLPPGYVVNQDKSNTDKWEKDEMTKDCMLANGKLDEDYEEEDEEEESLMWRAPKEEADYEDDFLEYDQEHIRFIDNMLMGSGAFVKKISLSPFSTTDSAYEWKMPKKSSLGSMPFSSDFEDFDYSSWDAMCYLDPSKAVEEDDFVVGFWNPSEENCGVDTGKQSISYDLHTEQCIADKSIADCVEALLGCYLTSCGERAAQLFLCSLGLKVLPVIKRTDREKALCPTRENFNSQQKNLSVSCAAASVASSRSSVLKDSEYGCLKIPPRCMFDHPDADKTLNHLISGFENFEKKINYRFKNKAYLLQAFTHASYHYNTITDCYQRLEFLGDAILDYLITKHLYEDPRQHSPGVLTDLRSALVNNTIFASLAVKYDYHKYFKAVSPELFHVIDDFVQFQLEKNEMQGMDSELRRSEEDEEKEEDIEVPKAMGDIFESLAGAIYMDSGMSLETVWQVYYPMMRPLIEKFSANVPRSPVRELLEMEPETAKFSPAERTYDGKVRVTVEVVGKGKFKGVGRSYRFYN

SEQ ID NO: 898171 - protein, 1717 aa, Homo sapiens
MKSPALQPLSMAGLQLMTPASSPMGPFFGLPWQQEAIHDNIYTPRKYQVELLEAALDHNTIVCLNTGSGKTFIASTTLLKSCLYLDLGETSARNGKRTVFLVNSANQVAQQVSAVRTHSDLKVGEYSNLEVNASWTKERWNQEFTKHQVLIMTCYVALNVLKNGYLSLSDINLLVFDECHLAILDHPYREIMKLCENCPSCPRILGLTASILNGKCDPEELEEKIQKLEKILKSNAETATDLVVLDRYTSQPCEIVVDCGPFTDRSGLYERLLMELEEALNFINDCNISVHSKERDSTLISKQILSDCRAVLVVLGPWCADKVAGMMVRELQKYIKHEQEELHRKFLLFTDTFLRKIHALCEEHFSPASLDLKFVTPKVIKLLEILRKYKPYERHSFESVEWYNNRNQDNYVSWSDSEDDDEDEEIEEKEKPETNFPSPFTNILCGIIFVERRYTAVVLNRLIKEAGKQDPELAYISSNFITGHGIGKNQPRNKQMEAEFRKQEEVLRKFRAHETNLLIATSIVEEGVDIPKCNLVVRFDLPTEYRSYVQSKGRARAPISNYIMLADTDKIKSFEEDLKTYKAIEKILRNKCSKSVDTGETDIDPVMDDDDVFPPYVLRPDDGGPRVTINTAIGHINRYCARLPSDPFTHLAPKCRTRELPDGTFYSTLYLPINSPLRASIVGPPMSCVRLAERVVALICCEKLHKIGELDDHLMPVGKETVKYEEELDLHDEEETSVPGRPGSTKRRQCYPKAIPECLRDSYPRPDQPCYLYVIGMVLTTPLPDELNFRRRKLYPPEDTTRCFGILTAKPIPQIPHFPVYTRSGEVTISIELKKSGFMLSLQMLELITRLHQYIFSHILRLEKPALEFKPTDADSAYCVLPLNVVNDSSTLDIDFKFMEDIEKSEARIGIPSTKYTKETPFVFKLEDYQDAVIIPRYRNFDQPHRFYVADVYTDLTPLSKFPSPEYETFAEYYKTKYNLDLTNLNQPLLDVDHTSSRLNLLTPRHLNQKGKALPLSSAEKRKAKWESLQNKQILVPELCAIHPIPASLWRKAVCLPSILYRLHCLLTAEELRAQTASDAGVGVRSLPADFRYPNLDFGWKKSIDSKSFISISNSSSAENDNYCKHSTIVPENAAHQGANRTSSLENHDQMSVNCRTLLSESPGKLHVEVSADLTAINGLSYNQNLANGSYDLANRDFCQGNQLNYYKQEIPVQPTTSYSIQNLYSYENQPQPSDECTLLSNKYLDGNANKSTSDGSPVMAVMPGTTDTIQVLKGRMDSEQSPSIGYSSRTLGPNPGLILQALTLSNASDGFNLERLEMLGDSFLKHAITTYLFCTYPDAHEGRLSYMRSKKVSNCNLYRLGKKKGLPSRMVVSIFDPPVNWLPPGYVVNQDKSNTDKWEKDEMTKDCMLANGKLDEDYEEEDEEEESLMWRAPKEEADYEDDFLEYDQEHIRFIDNMLMGSGAFVKKISLSPFSTTDSAYEWKMPKKSSLGSMPFSSDFEDFDYSSWDAMCYLDPSKAVEEDDFVVGFWNPSEENCGVDTGKQSISYDLHTEQCIADKSIADCVEALLGCYLTSCGERAAQLFLCSLGLKVLPVIKRTDREKALCPTRENFNSQQKNLSVSCAAASVASSRSSVLKDSEYGCLKIPPRCMFDHPDADKTLNHLISGFENFEKKINYRFKNKAYLLQAFTHASYHYNTITGKEPTTRLHFWENETLC

SEQ ID NO: 898172 - protein, 480 aa, Homo sapiens
MKSPALQPLSMAGLQLMTPASSPMGPFFGLPWQQEAIHDNIYTPRKYQVELLEAALDHNTIVCLNTGSGKTFIASTTLLKSCLYLDLGETSARNGKRTVFLVNSANQVAQQVSAVRTHSDLKVGEYSNLEVNASWTKERWNQEFTKHQVLIMTCYVALNVLKNGYLSLSDINLLVFDECHLAILDHPYREIMKLCENCPSCPRILGLTASILNGKCDPEELEEKIQKLEKILKSNAETATDLVVLDRYTSQPCEIVVDCGPFTDRSGLYERLLMELEEALNFINDCNISVHSKERDSTLISKQILSDCRAVLVVLGPWCADKVAGMMVRELQKYIKHEQEELHRKFLLFTDTFLRKIHALCEEHFSPASLDLKFVTPKVIKLLEILRKYKPYERHSFESVEWYNNRNQDNYVSWSDSEDDDEDEEIEEKEKPETNFPSPFTNILCGIIFVERRYTAVVLNRLIKVAGKQDPGRQITVTIT

SEQ ID NO: 898173 - protein, 1924 aa, Homo sapiens; identical to SEQ ID NO: 898164

SEQ ID NO: 898174 - protein, 1924 aa, Homo sapiens; identical to SEQ ID NO: 898164

SEQ ID NO: 898175 - protein, 1924 aa, Homo sapiens; identical to SEQ ID NO: 898164

SEQ ID NO: 898176 - protein, 1924 aa, Homo sapiens; identical to SEQ ID NO: 898164

SEQ ID NO: 898177 - protein, 964 aa, Homo sapiens
KGKRNGRKGTTRKGNKKGNLDLTNLNQPLLDVDHTSSRLNLLTPRHLNQKGKALPLSSAEKRKAKWESLQNKQILVPELCAIHPIPASLWRKAVCLPSILYRLHCLLTAEELRAQTASDAGVGVRSLPADFRYPNLDFGWKKSIDSKSFISISNSSSAENDNYCKHSTIVPENAAHQGANRTSSLENHDQMSVNCRTLLSESPGKLHVEVSADLTAINGLSYNQNLANGSYDLANRDFCQGNQLNYYKQEIPVQPTTSYSIQNLYSYENQPQPSDECTLLSNKYLDGNANKSTSDGSPVMAVMPGTTDTIQVLKGRMDSEQSPSIGYSSRTLGPNPGLILQALTLSNASDGFNLERLEMLGDSFLKHAITTYLFCTYPDAHEGRLSYMRSKKVSNCNLYRLGKKKGLPSRMVVSIFDPPVNWLPPGYVVNQDKSNTDKWEKDEMTKDCMLANGKLDEDYEEEDEEEESLMWRAPKEEADYEDDFLEYDQEHIRFIDNMLMGSGAFVKKISLSPFSTTDSAYEWKMPKKSSLGSMPFSSDFEDFDYSSWDAMCYLDPSKAVEEDDFVVGFWNPSEENCGVDTGKQSISYDLHTEQCIADKSIADCVEALLGCYLTSCGERAAQLFLCSLGLKVLPVIKRTDREKALCPTRENFNSQQKNLSVSCAAASVASSRSSVLKDSEYGCLKIPPRCMFDHPDADKTLNHLISGFENFEKKINYRFKNKAYLLQAFTHASYHYNTITDCYQRLEFLGDAILDYLITKHLYEDPRQHSPGVLTDLRSALVNNTIFASLAVKYDYHKYFKAVSPELFHVIDDFVQFQLEKNEMQGMDSELRRSEEDEEKEEDIEVPKAMGDIFESLAGAIYMDSGMSLETVWQVYYPMMRPLIEKFSANVPRSPVRELLEMEPETAKFSPAERTYDGKVRVTVEVVGKGKFKGVGRSYRIAKSAAARRALRSLKANQPQVPNS

SEQ ID NO: 898178 - protein, 1224 aa, Homo sapiens
MKSPALQPLSMAGLQLMTPASSPMGPFFGLPWQQEAIHDNIYTPRKYQVELLEAALDHNTIVCLNTGSGKTFIASTTLLKSCLYLDLGETSARNGKRTVFLVNSANQVAQQVSAVRTHSDLKVGEYSNLEVNASWTKERWNQEFTKHQVLIMTCYVALNVLKNGYLSLSDINLLVFDECHLAILDHPYREIMKLCENCPSCPRILGLTASILNGKCDPEELEEKIQKLEKILKSNAETATDLVVLDRYTSQPCEIVVDCGPFTDRSGLYERLLMELEEALNFINDCNISVHSKERDSTLISKQILSDCRAVLVVLGPWCADKVAGMMVRELQKYIKHEQEELHRKFLLFTDTFLRKIHALCEEHFSPASLDLKFVTPKVIKLLEILRKYKPYERHSFESVEWYNNRNQDNYVSWSDSEDDDEDEEIEEKEKPETNFPSPFTNILCGIIFVERRYTAVVLNRLIKEAGKQDPELAYISSNFITGHGIGKNQPRNKQMEAEFRKQEEVLRKFRAHETNLLIATSIVEEGVDIPKCNLVVRFDLPTEYRSYVQSKGRARAPISNYIMLADTDKIKSFEEDLKTYKAIEKILRNKCSKSVDTGETDIDPVMDDDDVFPPYVLRPDDGGPRVTINTAIGHINRYCARLPSDPFTHLAPKCRTRELPDGTFYSTLYLPINSPLRASIVGPPMSCVRLAERVVALICCEKLHKIGELDDHLMPVGKETVKYEEELDLHDEEETSVPGRPGSTKRRQCYPKAIPECLRDSYPRPDQPCYLYVIGMVLTTPLPDELNFRRRKLYPPEDTTRCFGILTAKPIPQIPHFPVYTRSGEVTISIELKKSGFMLSLQMLELITRLHQYIFSHILRLEKPALEFKPTDADSAYCVLPLNVVNDSSTLDIDFKFMEDIEKSEARIGIPSTKYTKETPFVFKLEDYQDAVIIPRYRNFDQPHRFYVADVYTDLTPLSKFPSPEYETFAEYYKTKYNLDLTNLNQPLLDVDHTSSRLNLLTPRHLNQKGKALPLSSAEKRKAKWESLQNKQILVPELCAIHPIPASLWRKAVCLPSILYRLHCLLTAEELRAQTASDAGVGVRSLPADFRYPNLDFGWKKSIDSKSFISISNSSSAENDNYCKHSTIVPENAAHQGANRTSSLENHDQMSVNCRTLLSESPGKLHVEVSADLTAINGLSYNQNLANGSYDLANRDFCQGNQLNYYKQEIPVQPTTSYSIQIL

SEQ ID NO: 898179 - protein, 620 aa, Homo sapiens
MKSPALQPLSMAGLQLMTPASSPMGPFFGLPWQQEAIHDNIYTPRKYQVELLEAALDHNTIVCLNTGSGKTFIASTTLLKSCLYLDLGETSARNGKRTVFLVNSANQVAQQVSAVRTHSDLKVGEYSNLEVNASWTKERWNQEFTKHQVLIMTCYVALNVLKNGYLSLSDINLLVFDECHLAILDHPYREIMKLCENCPSCPRILGLTASILNGKCDPEELEEKIQKLEKILKSNAETATDLVVLDRYTSQPCEIVVDCGPFTDRSGLYERLLMELEEALNFINDCNISVHSKERDSTLISKQILSDCRAVLVVLGPWCADKVAGMMVRELQKYIKHEQEELHRKFLLFTDTFLRKIHALCEEHFSPASLDLKFVTPKVIKLLEILRKYKPYERHSFESVEWYNNRNQDNYVSWSDSEDDDEDEEIEEKEKPETNFPSPFTNILCGIIFVERRYTAVVLNRLIKEAGKQDPELAYISSNFITGHGIGKNQPRNKQMEAEFRKQEEVLRKFRAHETNLLIATSIVEEGVDIPKCNLVVRFDLPTEYRSYVQSKGRARAPISNYIMLADTDKIKSFEEDLKTYKAIEKILRNKCSKSVDTGETDIDPVMDDRSVLVRVLRRT

SEQ ID NO: 898180 - protein, 473 aa, Homo sapiens
AAAAGNWRKETLASQGPRLGQRRGAWGGAGFGPAWGRMVNLESMHTDIKMSGDVADSTDARSTLSQVEPGNDRNGLDFNRQIKTEDLSDSLQQTLSHRPCHLSQGPAMMSGNQMSGLNASPCQDMASLHPLQQLVLVPGHLQSVSQFLLSQTQPGQQGLQPNLLPFPQQQSGLLLPQTGPGLASQAFGHPGLPGSSLEPHLEASQHLPVPKHLPSSGGADEPSDLEELEKFAKTFKQRRIKLGFTQGDVGLAMGKLYGNDFSQTTISRFEALNLSFKNMCKLKPLLEKWLNDAESSPSDPSVSTPSSYPSLSEVFGRKRKKRTSIETNIRLTLEKRFQDNPKPSSEEISMIAEQLSMEKEVVRVWFCNRRQKEKRINCPVATPIKPPVYNSRLVSPSGSLGPLSVPPVHSTMPGTVTSSCSPGNNSRPSSPGSGLHASSPTASQNNSKAAVNSASSFNSSGSWYRWNHSTYLH

SEQ ID NO: 898181 - protein, 187 aa, Homo sapiens
WVLVVSRGSPVEGFGDVGLAMGKLYGNDFSQTTISRFEALNLSFKNMCKLKPLLEKWLNDAESSPSDPSVSTPSSYPSLSEVFGRKRKKRTSIETNIRLTLEKRFQDVSPSGSLGPLSVPPVHSTMPGTVTSSCSPGNNSRPSSPGSGLHASSPTASQNNSKAAVNSASSFNSSGSWYRWNHSTYLH

SEQ ID NO: 898182 - protein, 834 aa, Homo sapiens
MASLGANPRRTPQGPRPGAASSGFPSPAPVPGPREAEEEEVEEEEELAEIHLCVLWNSGYLGIAYYDTSDSTIHFMPDAPDHESLKLLQRVLDEINPQSVVTSAKQDENMTRFLGKLASQEHREPKRPEIIFLPSVDFGLEISKQRLLSGNYSFIPDAMTATEKILFLSSIIPFDCLLTVRALGGLLKFLGRRRIGVELEDYNVSVPILGFKKFMLTHLVNIDQDTYSVLQIFKSESHPSVYKVASGLKEGLSLFGILNRCHCKWGEKLLRLWFTRPTHDLGELSSRLDVIQFFLLPQNLDMAQMLHRLLGHIKNVPLILKRMKLSHTKVSDWQVLYKTVYSALGLRDACRSLPQSIQLFRDIAQEFSDDLHHIASLIGKVVDFEGSLAENRFTVLPNIDPEIDEKKRRLMGLPSFLTEVARKELENLDSRIPSCSVIYIPLIGFLLSIPRLPSMVEASDFEINGLDFMFLSEEKLHYRSARTKELDALLGDLHCEIRDQETLLMYQLQCQVLARAAVLTRVLDLASRLDVLLALASAARDYGYSRPRYSPQVLGVRIQNGRHPLMELCARTFVPNSTECGGDKGRVKVITGPNSSGKSIYLKQVGLITFMALVGSFVPAEEAEIGAVDAIFTRIHSCESISLGLSTFMIDLNQVAKAVNNATAQSLVLIDEFGKGTNTVDGLALLAAVLRHWLARGPTCPHIFVATNFLSLVQLQLLPQGPLVQYLTMETCEDGNDLVFFYQVCEGVAKASHASHTAAQAGLPDKLVARGKEVSDLIRSGKPIKPVKDLLKKNQMENCQTLVDKFMKLDLEDPNLDLNVFMSQEVLPAATSIL

SEQ ID NO: 898183 - protein, 834 aa, Homo sapiens; identical to SEQ ID NO: 898182

SEQ ID NO: 898184 - protein, 834 aa, Homo sapiens; identical to SEQ ID NO: 898182

SEQ ID NO: 898185 - protein, 834 aa, Homo sapiens; identical to SEQ ID NO: 898182

SEQ ID NO: 898186 - protein, 533 aa, Homo sapiens
MAQMLHRLLGHIKNVPLILKRMKLSHTKVSDWQVLYKTVYSALGLRDACRSLPQSIQLFRDIAQEFSDDLHHIASLIGKVVDFEGSLAENRFTVLPNIDPEIDEKKRRLMGLPSFLTEVARKELENLDSRIPSCSVIYIPLIGFLLSIPRLPSMVEASDFEINGLDFMFLSEEKLHYRSARTKELDALLGDLHCEIRDQETLLMYQLQCQVLARAAVLTRVLDLASRLDVLLALASAARDYGYSRPRYSPQVLGVRIQNGRHPLMELCARTFVPNSTECGGDKGRVKVITGPNSSGKSIYLKQVGLITFMALVGSFVPAEEAEIGAVDAIFTRIHSCESISLGLSTFMIDLNQVAKAVNNATAQSLVLIDEFGKGTNTVDGLALLAAVLRHWLARGPTCPHIFVATNFLSLVQLQLLPQGPLVQYLTMETCEDGNDLVFFYQVCEGVAKASHASHTAAQAGLPDKLVARGKEVSDLIRSGKPIKPVKDLLKKNQMENCQTLVDKFMKLDLEDPNLDLNVFMSQEVLPAATSIL

SEQ ID NO: 898187 - protein, 834 aa, Homo sapiens; identical to SEQ ID NO: 898182

SEQ ID NO: 898188 - protein, 438 aa, Homo sapiens
MAQMLHRLLGHIKNVPLILKRMKLSHTKVSDWQVLYKTVYSALGLRDACRSLPQSIQLFRDIAQEFSDDLHHIASLIGKVVDFEGSLAENRFTVLPNIDPEIDEKKRRLMGLPSFLTEVARKELENLDSRIPSCSVIYIPLIGFLLSIPRLPSMVEASDFEINGLDFMFLSEEKLHYRSARTKELDALLGDLHCEIRDQETLLMYQLQCQVLARAAVLTRVLDLASRLDVLLALASAARDYGYSRPRYSPQVLGVRIQNGRHPLMELCARTFVPNSTECGGDKGRVKVITGPNSSGKSIYLKQVGLITFMALVGSFVPAEEAEIGAVDAIFTRIHSCESISLGLSTFMIDLNQVAKAVNNATAQSLVLIDEFGKGTNTVDGLALLAAVLRHWLARGPTCPHIFVATNFLSLVQLQLLPQGPLVQYLDWPRVSGQEGGD

SEQ ID NO: 898189 - protein, 438 aa, Homo sapiens; identical to SEQ ID NO: 898188

SEQ ID NO: 898190 - protein, 546 aa, Homo sapiens
MAQMLHRLLGHIKNVPLILKRMKLSHTKVSDWQVLYKTVYSALGLRDACRSLPQSIQLFRDIAQEFSDDLHHIASLIGKVVDFEGSLAENRFTVLPNIDPEIDEKKRRLMGLPSFLTEVARKELENLDSRIPSCSVIYIPLIGFLLSIPRLPSMVEASDFEINGLDFMFLSEEKLHYRSARTKELDALLGDLHCEIRDQETLLMYQLQCQVLARAAVLTRVLDLASRLDVLLALASAARDYGYSRPRYSPQVLGVRIQNGRHPLMELCARTFVPNSTECGGDKGRVKVITGPNSSGKSIYLKQVGLITFMALVGSFVPAEEAEIGAVDAIFTRIHSCESISLGLSTFMIDLNQVAKAVNNATAQSLVLIDEFGKGTNTVDGLALLAAVLRHWLARGPTCPHIFVATNFLSLVQLQLLPQGPLVQYLDWPRVSGQEGGELMIHCLLFSFKTMETCEDGNDLVFFYQVCEGVAKASHASHTAAQAGLPDKLVARGKEVMRSKCATTSTSELPFIPSPTGPGSRSTGFLTLISPSLPHSPYSSHLLACS

SEQ ID NO: 898191 - protein, 517 aa, Homo sapiens
MAQMLHRLLGHIKNVPLILKRMKLSHTKVSDWQVLYKTVYSALGLRDACRSLPQSIQLFRDIAQEFSDDLHHIASLIGKVVDFEGSLAENRFTVLPNIDPEIDEKKRRLMGLPSFLTEVARKELENLDSRIPSCSVIYIPLIGFLLSIPRLPSMVEASDFEINGLDFMFLSEEKLHYRSARTKELDALLGDLHCEIRDQETLLMYQLQCQVLARAAVLTRVLDLASRLDVLLALASAARDYGYSRPRYSPQVLGVRIQNGRHPLMELCARTFVPNSTECGGDKGRVKVITGPNSSGKSIYLKQVGLITFMALVGSFVPAEEAEIGAVDAIFTRIHSCESISLGLSTFMIDLNQVAKAVNNATAQSLVLIDEFGKGTNTVDGLALLAAVLRHWLARGPTCPHIFVATNFLSLVQLQLLPQGPLVQYLVCEGVAKASHASHTAAQAGLPDKLVARGKEVSDLIRSGKPIKPVKDLLKKNQMENCQTLVDKFMKLDLEDPNLDLNVFMSQEVLPAATSIL

SEQ ID NO: 898192 - protein, 407 aa, Homo sapiens
MAQMLHRLLGHIKNVPLILKRMKLSHTKVSDWQVLYKTVYSALGLRDACRSLPQSIQLFRDIAQEFSDDLHHIASLIGKVVDFEGSLAENRFTVLPNIDPEIDEKKRRLMGLPSFLTEVARKELENLDSRIPSCSVIYIPLIGFLLSIPRLPSMVEASDFEINGLDFMFLSEEKLHYRSARTKELDALLGDLHCEIRDQETLLMYQLQCQVLARAAVLTRVLDLASRLDVLLALASAARDYGYSRPRYSPQVLGVRIQNGRHPLMELCARTFVPNSTECGGDKGRVKVITGPNSSGKSIYLKQVAKAVNNATAQSLVLIDEFGKGTNTVDGLALLAAVLRHWLARGPTCPHIFVATNFLSLVQLQLLPQGPLVQYLDWPRVSGQEGGLRRCCEGQPCLPHSCPGWAS

SEQ ID NO: 898193 - protein, 834 aa, Homo sapiens; identical to SEQ ID NO: 898182

SEQ ID NO: 898194 - protein, 850 aa, Homo sapiens
MASLGANPRRTPQGPRPGAASSGFPSPAPVPGPREAEEEEVEEEEELAEIHLCVLWNSGYLGIAYYDTSDSTIHFMPDAPDHESLKLLQRVLDEINPQSVVTSAKQDENMTRFLGKLASQEHREPKRPEIIFLPSVDFGLEISKQRLLSGNYSFIPDAMTATEKILFLSSIIPFDCLLTPPGDLRFTPIPLLIPSVRALGGLLKFLGRRRIGVELEDYNVSVPILGFKKFMLTHLVNIDQDTYSVLQIFKSESHPSVYKVASGLKEGLSLFGILNRCHCKWGEKLLRLWFTRPTHDLGELSSRLDVIQFFLLPQNLDMAQMLHRLLGHIKNVPLILKRMKLSHTKVSDWQVLYKTVYSALGLRDACRSLPQSIQLFRDIAQEFSDDLHHIASLIGKVVDFEGSLAENRFTVLPNIDPEIDEKKRRLMGLPSFLTEVARKELENLDSRIPSCSVIYIPLIGFLLSIPRLPSMVEASDFEINGLDFMFLSEEKLHYRSARTKELDALLGDLHCEIRDQETLLMYQLQCQVLARAAVLTRVLDLASRLDVLLALASAARDYGYSRPRYSPQVLGVRIQNGRHPLMELCARTFVPNSTECGGDKGRVKVITGPNSSGKSIYLKQVGLITFMALVGSFVPAEEAEIGAVDAIFTRIHSCESISLGLSTFMIDLNQVAKAVNNATAQSLVLIDEFGKGTNTVDGLALLAAVLRHWLARGPTCPHIFVATNFLSLVQLQLLPQGPLVQYLTMETCEDGNDLVFFYQVCEGVAKASHASHTAAQAGLPDKLVARGKEVSDLIRSGKPIKPVKDLLKKNQMENCQTLVDKFMKLDLEDPNLDLNVFMSQEVLPAATSIL

SEQ ID NO: 898195 - protein, 834 aa, Homo sapiens; identical to SEQ ID NO: 898182

SEQ ID NO: 898196 - protein, 834 aa, Homo sapiens; identical to SEQ ID NO: 898182

SEQ ID NO: 898197 - protein, 616 aa, Homo sapiens
MAQMLHRLLGHIKNVPLILKRMKLSHTKVSDWQVLYKTVYSALGLRDACRSLPQSIQLFRDIAQEFSDDLHHIASLIGKVVDFEGSLAENRFTVLPNIDPEIDEKKRRLMGLPSFLTEVARKELENLDSRIPSCSVIYIPLIGFLLSIPRLPSMVEASDFEINGLDFMVKTLNLCKVSDEENESAAEEERYSTAALPNMGSLLCSFTLSFTSTETKEREVRVEGLEVGLERWGRRGGPRDAKSTALNPCTQFLSEEKLHYRSARTKELDALLGDLHCEIRDQETLLMYQLQCQVLARAAVLTRVLDLASRLDVLLALASAARDYGYSRPRYSPQVLGVRIQNGRHPLMELCARTFVPNSTECGGDKGRVKVITGPNSSGKSIYLKQVGLITFMALVGSFVPAEEAEIGAVDAIFTRIHSCESISLGLSTFMIDLNQVAKAVNNATAQSLVLIDEFGKGTNTVDGLALLAAVLRHWLARGPTCPHIFVATNFLSLVQLQLLPQGPLVQYLTMETCEDGNDLVFFYQVCEGVAKASHASHTAAQAGLPDKLVARGKEVSDLIRSGKPIKPVKDLLKKNQMENCQTLVDKFMKLDLEDPNLDLNVFMSQEVLPAATSIL

SEQ ID NO: 898198 - protein, 457 aa, Homo sapiens
MAQMLHRLLGHIKNVPLILKRMKLSHTKVSDWQVLYKTVYSALGLRDACRSLPQSIQLFRDIAQEFSDDLHHIASLIGKVVDFEGSLAENRFTVLPNIDPEIDEKKRRLMGLPSFLTEVARKELENLDSRIPSCSVIYIPLIGFLLSIPRLPSMVEASDFEINGLDFMFLSEEKLHYRSARTKELDALLGDLHCEIRDQETLLMYQLQCQVLARAAVLTRVLDLASRLDVLLALASAARDYGYSRPRYSPQVLGVRIQNGRHPLMELCARTFVPNSTECGGDKGRVKVITGPNSSGKSIYLKQVGLITFMALVGSFVPAEEAEIGAVDAIFTRIHSCESISLGLSTFMIDLNQVAKAVNNATAQSLVLIDEFGKGTNTVDGLALLAAVLRHWLARGPTCPHIFVATNFLSLVQLQLLPQGPLVQYLDWPRVSGQEGGLRRCCEGQPCLPHSCPGWAS

SEQ ID NO: 898199 - protein, 606 aa, Homo sapiens
AGPVFLAGFKKYMLTHLAELSMIKTLTGILNRCHCKWGEKLLRLWFTRPTHDLGELSSRLDVIQFFLLPQNLDMAQMLHRLLGHIKNVPLILKRMKLSHTKVSDWQVLYKTVYSALGLRDACRSLPQSIQLFRDIAQEFSDDLHHIASLIGKVVDFEGSLAENRFTVLPNIDPEIDEKKRRLMGLPSFLTEVARKELENLDSRIPSCSVIYIPLIGFLLSIPRLPSMVEASDFEINGLDFMFLSEEKLHYRSARTKELDALLGDLHCEIRDQETLLMYQLQCQVLARAAVLTRVLDLASRLDVLLALASAARDYGYSRPRYSPQVLGVRIQNGRHPLMELCARTFVPNSTECGGDKGRVKVITGPNSSGKSIYLKQVGLITFMALVGSFVPAEEAEIGAVDAIFTRIHSCESISLGLSTFMIDLNQVAKAVNNATAQSLVLIDEFGKGTNTVDGLALLAAVLRHWLARGPTCPHIFVATNFLSLVQLQLLPQGPLVQYLTMETCEDGNDLVFFYQVCEGVAKASHASHTAAQAGLPDKLVARGKEVSDLIRSGKPIKPVKDLLKKNQMENCQTLVDKFMKLDLEDPNLDLNVFMSQEVLPAATSIL

SEQ ID NO: 898200 - protein, 457 aa, Homo sapiens; identical to SEQ ID NO: 898198

SEQ ID NO: 898201 - protein, 499 aa, Homo sapiens
AAGELGGFSCHVSYAAAATRLVGSMSATAAARKRGKPASGAGAGAGAGKRRRKADSAGDRGKSKGGGKMNEEISSDSESESLAPRKPEEEEEEELEETAQEKKLRLAKLYLEQLRQQEEEKAEARAFEEDQVAGRLKEDVLEQRGRLQKLVAKEIQAPASADIRVLRGHQLSITCLVVTPDDSAIFSAAKDCSIIKWSVESGRKLHVIPRAKKGAEGKPPGHSSHVLCMAISSDGKYLASGDRSKLILIWEAQSCQHLYTFTGHRDAVSGLAFRRGTHQLYSTSHDRSVKVWNVAENSYVETLFGHQDAVAALDALSRECCVTAGGRDGTVRVWKIPEESQLVFYGHQGSIDCIHLINEEHMVSGADDGSVALWGLSKKRPLALQREAHGLRGEPGLEQPFWISSVAALLNTDLVATGSHSSCVRLWQCGEGFRQLDLLCDIPLVGFINSLKFSSSGDFLVAGVGQEHRLGRWWRIKEARNSVCIIPLRRVPVPPAAGS

SEQ ID NO: 898202 - protein, 499 aa, Homo sapiens; identical to SEQ ID NO: 898201

SEQ ID NO: 898203 - protein, 429 aa, Homo sapiens
AAGELGGFSCHVSYAAAATRLVGSMSATAAARKRGKPASGAGAGAGAGKRRRKADSAGDRGKSKGGGKMNEEISSDSESESLAPRKPEEEEEEELEETAQEKKLRLAKLYLEQLRQQEEEKAEARAFEEDQVAGRLKEDVLEQRGRLQKLVAKEIQAPASADIRVLRGHQLSITCLVVTPDDSAIFSAAKDCSIIKWSVESGRKLHVIPRAKKGAEGKPPGHSSHVLCMAISSDGKYLASGDRSKLILIWEAQSCQHLYTFTGHRDAVSGLAFRRGTHQLYSTSHDRSVKVWNVAENSYVETLFGHQDAVAALDALSRECCVTAGGRDGTVRVWKIPEESQLVFYGHQGSIDCIHLINEEHMVSGADDGSVALWGLSKKRPLALQREAHGLRGEPGLEQPFWISSVAALLNTDLVATGSPVPGSRSAMW

SEQ ID NO: 898204 - protein, 104 aa, Homo sapiens
MRSTWCPARTMALWPCGVSPRSDHLPCSVKLTGCGESQAWSSPSGYRRWQPSSTQTLWPQAPTAPVCGFGSVGKASGSLTFSVTSPWWVLSTASSSPALGTSGS

SEQ ID NO: 898205 - protein, 438 aa, Homo sapiens
RYRHVAWLFARLLCLFYIPETQAETPCGRLEEELEETAQEKKLRLAKLYLEQLRQQEEEKAEARAFEEDQVAGRLKEDVLEQRGRLQKLVAKEIQAPASADIRVLRGHQLSITCLVVTPDDSAIFSAAKDCSIIKWSVESGRKLHVIPRAKKGAEGKPPGHSSHVLCMAISSDGKYLASGDRSKLILIWEAQSCQHLYTFTGHRDAVSGLAFRRGTHQLYSTSHDRSVKVWNVAENSYVETLFGHQDAVAALDALSRECCVTAGGRDGTVRVWKIPEESQLVFYGHQGSIDCIHLINEEHMVSGADDGSVALWGLSKKRPLALQREAHGLRGEPGLEQPFWISSVAALLNTDLVATGSHSSCVRLWQCGEGFRQLDLLCDIPLVGFINSLKFSSSGDFLVAGVGQEHRLGRWWRIKEARNSVCIIPLRRVPVPPAAGS

SEQ ID NO: 898206 - protein, 499 aa, Homo sapiens; identical to SEQ ID NO: 898201

SEQ ID NO: 898207 - protein, 535 aa, Homo sapiens
AAGELGGFSCHVSYAAAATRLVGSMSATAAARKRGKPASGAGAGAGAGKRRRKADSAGDRGKSKGGGKMNEEISSDSESESLAPRKPEEEEEEELEETAQEKKLRLAKLYLEQLRQQEEEKAEARAFEEDQVAGRLKEDVLEQRGRLQKLVAKEIQAPASADIRVLRGHQLSITCLVVTPDDSAIFSAAKDCSIIKWSVESGRKLHVIPRAKKGAEGKPPGHSSHVLCMAISSDGKYLASGDRSKLILIWEAQSCQHLYTFTGHRDAVSGLAFRRGTHQLYSTSHDRSVKVWNVAENSYVETLFGHQDAVAALDALSRECCVTAGGRDGTVRVWKIPEESQLVFYGHQGSIDCIHLINEEHMVSGADDGSVALWGLSKKRPLALQREAHGLRGEPGLEQPFWISSVAALLNTDLVATGSHSSCVRLWQCGEGFRQLDLLCDIPLVGFINSLKFSSSGDFLVAGVGQEHRYVWPSRVQVRWCRLDSSVEMGWRLGRVSAASCTPCRLGRWWRIKEARNSVCIIPLRRVPVPPAAGS

SEQ ID NO: 898208 - protein, 325 aa, Homo sapiens
AAGELGGFSCHVSYAAAATRLVGSMSATAAARKRGKPASGAGAGAGAGKRRRKADSAGDRGKSKGGGKMNEEISSDSESESLAPRKPEEEEEEELEETAQEKKLRLAKLYLEQLRQQEEEKAEARAFEEDQVAGRLKEDVLEQRGRLQKLVAKEIQAPASADIRVLRGHQLSITCLVVTPDDSAIFSAAKDCSIIKWSVESGRKLHVIPRAKKGAEGKPPGHSSHVLCMAISSDGKYLASGDRSKLILIWEAQSCQHLYTFTGHRDAVSGLAFRRGTHQLYSTSHDRSVKVWNVAENSYVETLSDTGRCGDSDRCYRALTALEPG

SEQ ID NO: 898209 - protein, 618 aa, Homo sapiens
MLRKPGKWCAMHVHIAWQIYHHQQKVKKQMQSDPHKLDFGLKPEFLSRPPGPSLFGAIHHPHDLARPSTLFSAAGAAHPTGTPFGPPPHHSNFLNPAAHLEPFNRPSTFTGLAAVGGNAFGGLGNPSVTPNSMFGHKDGPSVQNFSNPHEPWNRLHRTPPSFPTPPPWLKPGELERSASAAAHDRDRDVDKRDSSVSKDDKERESVEKRHSSHPSPAPVLPVNALGHTRSSTEQIRAHLNTEAREKDKPKERERDHSESRKDLAADEHKAKEGHLPEKDGHGHEGRAAGEEAKQLARVPSPYVRTPVVESARPNSTSSREAEPRKGEPAYENPKKSSEVKVKEERKEDHDLPPEAPQTHRASEPPPPNSSSSVHPGPLASMPMTVGVTGIHPMNSISSLDRTRMMTPFMGISPLPGGERFPYPSFHWDPIRDPLRDPYRELDIHRRDPLGRDFLLRNDPLHRLSTPRLYEADRSFRDREPHDYSHHHHHHHHPLSVDPRREHERGGHLDERERLHMLREDYEHTRLHSVHPASLDGHLPHPSLITPGLPSMHYPRISPTAGNQNGLLNKTPPTAALSAPPPLISTLGGRPVSPRRTTPLSAEIRERPPSHTLKDIEAR

SEQ ID NO: 898210 - protein, 486 aa, Homo sapiens [sequence omitted]

SEQ ID NO: 898211 - protein, 618 aa, Homo sapiens; identical to SEQ ID NO: 898209

SEQ ID NO: 898212 - protein, 618 aa, Homo sapiens; identical to SEQ ID NO: 898209

SEQ ID NO: 898213 - protein, 618 aa, Homo sapiens; identical to SEQ ID NO: 898209

SEQ ID NO: 898214 - protein, 1172 aa, Homo sapiens
IDGFAMTSFVTFEALEKDVALKPQERVEKRQTPLTKKKREALTNGLSFHSKKSRLSHPHHYSSDRENDRNLCQHLGKRKKMPKALRQLKPGQNSCRDSDSESASGESKGFHRSSSRERLSDSSAPSSLGTGYFCDSDSDQEEKASDASSEKLFNTVIVNKDPELGVGTLPEHDSQDAGPIVPKISGLERSQEKSQDCCKEPIFEPVVLKDPCPQVAQPIPQPQTEPQLRAPSPDPDLVQRTEAPPQPPPLSTQPPQGPPEAQLQPAPQPQVQRPPRPQSPTQLLHQNLPPVQAHPSAQSLSQPLSAYNSSSLSLNSLSSSRSSTPAKTQPAPPHISHHPSASPFPLSLPNHSPLHSFTPTLQPPAHSHHPNMFAPPTALPPPPPLTSGSLQVAGHPAGSTYSEQDILRQELNTRFLASQSADRGASLGPPPYLRTEFHQHQHQHQHTHQHTHQHTFTPFPHAIPPTAIMPTPAPPMFDKYPTKVDPFYRHSLFHSYPPAVSGIPPMIPPTGPFGSLQGAFQPKTSNPIDVAARPGTVPHTLLQKDPRLTDPFRPMLRKPGKWCAMHVHIAWQIYHHQQKVKKQMQSDPHKLDFGLKPEFLSRPPGPSLFGAIHHPHDLARPSTLFSAAGAAHPTGTPFGPPPHHSNFLNPAAHLEPFNRPSTFTGLAAVGGNAFGGLGNPSVTPNSMFGHKDGPSVQNFSNPHEPWNRLHRTPPSFPTPPPWLKPGELERSASAAAHDRDRDVDKRDSSVSKDDKERESVEKRHSSHPSPAPVLPVNALGHTRSSTEQIRAHLNTEAREKDKPKERERDHSESRKDLAADEHKAKEGHLPEKDGHGHEGRAAGEEAKQLARVPSPYVRTPVVESARPNSTSSREAEPRKGEPAYENPKKSSEVKVKEERKEDHDLPPEAPQTHRASEPPPPNSSSSVHPGPLASMPMTVGVTGIHPMNSISSLDRTRMMTPFMGISPLPGGERFPYPSFHWDPIRDPLRDPYRELDIHRRDPLGRDFLLRNDPLHRLSTPRLYEADRSFRDREPHDYSHHHHHHHHPLSVDPRREHERGGHLDERERLHMLREDYEHTRLHSVHPASLDGHLPHPSLITPGLPSMHYPRISPTAGNQNGLLNKTPPTAALSAPPPLISTLGGRPVSPRRTTPLSAEIRERPPSHTLKDIEAR

SEQ ID NO: 898215 - protein, 1138 aa, Homo sapiens
IDGFAMTSFVTFEALEKDVALKPQERVEKRQTPLTKKKREALTNGLSFHSKKSRLSHPHHYSSDRENDRNLCQHLGKRKKMPKALRQLKPGQNSCRDSDSESASGESKGFHRSSSRERLSDSSAPSSLGTGYFCDSDSDQEEKASDASSEKLFNTVIVNKDPELGVGTLPEHDSQDAGPIVPKISGLERSQEKSQDCCKEPIFEPVVLKDPCPQVAQPIPQPQTEPQLRAPSPDPDLVQRTEAPPQPPPLSTQPPQGPPEAQLQPAPQPQVQRPPRPQSPTQLLHQNLPPVQAHPSAQSLSQPLSAYNSSSLSLNSLSSSRSSTPAKTQPAPPHISHHPSASPFPLSLPNHSPLHSFTPTLQPPAHSHHPNMFAPPTALPPPPPLTSGSLQVAGHPAGSTYSEQDILRQELNTRFLASQSADRGASLGPPPYLRTEFHQHQHQHQHTHQHTHQHTFTPFPHAIPPTAIMPTPAPPMFDKYPTKVDPFYRHSLFHSYPPAVSGIPPMIPPTGPFGSLQGAFQPKKPGKWCAMHVHIAWQIYHHQQKVKKQMQSDPHKLDFGLKPEFLSRPPGPSLFGAIHHPHDLARPSTLFSAAGAAHPTGTPFGPPPHHSNFLNPAAHLEPFNRPSTFTGLAAVGGNAFGGLGNPSVTPNSMFGHKDGPSVQNFSNPHEPWNRLHRTPPSFPTPPPWLKPGELERSASAAAHDRDRDVDKRDSSVSKDDKERESVEKRHSSHPSPAPVLPVNALGHTRSSTEQIRAHLNTEAREKDKPKERERDHSESRKDLAADEHKAKEGHLPEKDGHGHEGRAAGEEAKQLARVPSPYVRTPVVESARPNSTSSREAEPRKGEPAYENPKKSSEVKVKEERKEDHDLPPEAPQTHRASEPPPPNSSSSVHPGPLASMPMTVGVTGIHPMNSISSLDRTRMMTPFMGISPLPGGERFPYPSFHWDPIRDPLRDPYRELDIHRRDPLGRDFLLRNDPLHRLSTPRLYEADRSFRDREPHDYSHHHHHHHHPLSVDPRREHERGGHLDERERLHMLREDYEHTRLHSVHPASLDGHLPHPSLITPGLPSMHYPRISPTAGNQNGLLNKTPPTAALSAPPPLISTLGGRPVSPRRTTPLSAEIRERPPSHTLKDIEAR

SEQ ID NO: 898216 - protein, 618 aa, Homo sapiens; identical to SEQ ID NO: 898209

SEQ ID NO: 898217 - protein, 618 aa, Homo sapiens; identical to SEQ ID NO: 898209

SEQ ID NO: 898218 - protein, 496 aa, Homo sapiens
IDGFAMTSFVTFEALEKDVALKPQERVEKRQTPLTKKKREALTNGLSFHSKKSRLSHPHHYSSDRENDRNLCQHLGKRKKMPKALRQLKPGQNSCRDSDSESASGESKGFHRSSSRERLSDSSAPSSLGTGYFCDSDSDQEEKASDASSEKLFNTVIVNKDPELGVGTLPEHDSQDAGPIVPKISGLERSQEKSQDCCKEPIFEPVVLKDPCPQVAQPIPQPQTEPQLRAPSPDPDLVQRTEAPPQPPPLSTQPPQGPPEAQLQPAPQPQVQRPPRPQSPTQLLHQNLPPVQAHPSAQSLSQPLSAYNSSSLSLNSLSSSRSSTPAKTQPAPPHISHHPSASPFPLSLPNHSPLHSFTPTLQPPAHSHHPNMFAPPTALPPPPPLTSGSLQVAGHPAGSTYSEQDILRQELNTRFLASQSADRGASLGPPPYLRTEFHQHQHQHQHTHQHTHQHTFTPFPHAIPPTAIMPTPAPPMFDKYPTKVDPFYRHSDPSCF

SEQ ID NO: 898219 - protein, 2080 aa, Homo sapiens
MLRVFILYAENVHTPDTDISDAYCSAVFAGVKKRTKVIKNSVNPVWNEGFEWDLKGIPLDQGSELHVVVKDHETMGRNRFLGEAKVPLREVLATPSLSASFNAPLLDTKKQPTGASLVLQVSYTPLPGAVPLFPPPTPLEPSPTLPDLDVVADTGGEEDTEDQGLTGDEAEPFLDQSGGPGAPTTPRKLPSRPPPHYPGIKRKRSAPTSRKLLSDKPQDFQIRVQVIEGRQLPGVNIKPVVKVTAAGQTKRTRIHKGNSPLFNETLFFNLFDSPGELFDEPIFITVVDSRSLRTDALLGEFRMDVGTIYREPRHAYLRKWLLLSDPDDFSAGARGYLKTSLCVLGPGDEAPLERKDPSEDKEDIESNLLRPTGVALRGAHFCLKVFRAEDLPQMDDAVMDNVKQIFGFESNKKNLVDPFVEVSFAGKMLCSKILEKTANPQWNQNITLPAMFPSMCEKMRIRIIDWDRLTHNDIVATTYLSMSKISAPGGEIEEEPAGAVKPSKASDLDDYLGFLPTFGPCYINLYGSPREFTGFPDPYTELNTGKGEGVAYRGRLLLSLETKLVEHSEQKVEDLPADDILRVEKYLRRRKYSLFAAFYSATMLQDVDDAIQFEVSIGNYGNKFDMTCLPLASTTQYSRAVFDGCHYYYLPWGNVKPVVVLSSYWEDISHRIETQNQLLGIADRLEAGLEQVHLALKAQCSTEDVDSLVAQLTDELIAGCSQPLGDIHETPSATHLDQYLYQLRTHHLSQITEAALALKLGHSELPAALEQAEDWLLRLRALAEEPQNSLPDIVIWMLQGDKRVAYQRVPAHQVLFSRRGANYCGKNCGKLQTIFLKYPMEKVPGARMPVQIRVKLWFGLSVDEKEFNQFAEGKLSVFAETYENETKLALVGNWGTTGLTYPKFSDVTGKIKLPKDSFRPSAGWTWAGDWFVCPEKTLLHDMDAGHLSFVEEVFENQTRLPGGQWIYMSDNYTDVNGEKVLPKDDIECPLGWKWEDEEWSTDLNRAVDEQGWEYSITIPPERKPKHWVPAEKMYYTHRRRRWVRLRRRDLSQMEALKRHRQAEAEGEGWEYASLFGWKFHLEYRKTDAFRRRRWRRRMEPLEKTGPAAVFALEGALGGVMDDKSEDSMSVSTLSFGVNRPTISCIFDYGNRYHLRCYMYQARDLAAMDKDSFSDPYAIVSFLHQSQKTVVVKNTLNPTWDQTLIFYEIEIFGEPATVAEQPPSIVVELYDHDTYGADEFMGRCICQPSLERMPRLAWFPLTRGSQPSGELLASFELIQREKPAIHHIPGFEVQETSRILDESEDTDLPYPPPQREANIYMVPQNIKPALQRTAIEILAWGLRNMKSYQLANISSPSLVVECGGQTVQSCVIRNLRKNPNFDICTLFMEVMLPREELYCPPITVKVIDNRQFGRRPVVGQCTIRSLESFLCDPYSAESPSPQGGPDDVSLLSPGEDVLIDIDDKEPLIPIQEEEFIDWWSKFFASIGEREKCGSYLEKDFDTLKVYDTQLENVEAFEGLSDFCNTFKLYRGKTQEETEDPSVIGEFKGLFKIYPLPEDPAIPMPPRQFHQLAAQGPQECLVRIYIVRAFGLQPKDPNGKCDPYIKISIGKKSVSDQDNYIPCTLEPVFGKMFELTCTLPLEKDLKITLYDYDLLSKDEKIGETVVDLENRLLSKFGARCGLPQTYCVSGPNQWRDQLRPSQLLHLFCQQHRVKAPVYRTDRVMFQDKEYSIEEIEAGRIPNPHLGPVEERLALHVLQQQGLVPEHVESRPLYSPLQPDIEQGKLQMWVDLFPKALGRPGPPFNITPRRARRFFLRCIIWNTRDVILDDLSLTGEKMSDIYVKGWMIGFEEHKQKTDVHYRSLGGEGNFNWRFIFPFDYLPAEQVCTIAKKDAFWRLDKTESKIPARVVFQIWDNDKFSFDDFLGSLQLDLNRMPKPAKTAKKCSLDQLDDAFHPEWFVSLFEQKTVKGWWPCVAEEGEKKILAGKLEMTLEIVAESEHEERPAGQGRDEPNMNPKLEDPRRPDTSFLWFTSPYKTMKFILWRRFRWAIILFIILFILLLFLAIFIYAFPNYAAMKLVKPFS

SEQ ID NO: 898220 - protein, 284 aa, Homo sapiens
TYVVKLHLFCLPAHICLSPLIACLFGFVLQNGEKVLPKDDIECPLGWKWEDEEWSTDLNRAVDEQGWEYSITIPPERKPKHWVPAEKMYYTHRRRRWVRLRRRDLSQMEALKRVSQQVVGGSEACGHRWPVGTDADLHAHRHMHVCTQHAQTPGTHWRCSQITPSIPKDHTQHTHRSHPAYPKITPSIHTDHTQHTDHTGNTHRSHSAHTQITPSTHTDHTQHTDYTQHTHRSHPAHRSHPQITPSACTDHTQHTQRSHPAHTHRSHPTHPQFTLSTHRSHPTH

SEQ ID NO: 898221 - protein, 1640 aa, Homo sapiens
SRLVRSEFRIRPSLLPCSRDRLTHNDIVATTYLSMSKISAPGGEIEVDDYLGFLPTFGPCYINLYGSPREFTGFPDPYTELNTGKGEGVAYRGRLLLSLETKLVEHSEQKVEDLPADDILRVEKYLRRRKYSLFAAFYSATMLQDVDDAIQFEVSIGNYGNKFDMTCLPLASTTQYSRAVFDGCHYYYLPWGNVKPVVVLSSYWEDISHRIETQNQLLGIADRLEAGLEQVHLALKAQCSTEDVDSLVAQLTDELIAGCSQPLGDIHETPSATHLDQYLYQLRTHHLSQITEAALALKLGHSELPAALEQAEDWLLRLRALAEEPQNSLPDIVIWMLQGDKRVAYQRVPAHQVLFSRRGANYCGKNCGKLQTIFLKYPMEKVPGARMPVQIRVKLWFGLSVDEKEFNQFAEGKLSVFAETYENETKLALVGNWGTTGLTYPKFSDVTGKIKLPKDSFRPSAGWTWAGDWFVCPEKTLLHDMDAGHLSFVEEVFENQTRLPGGQWIYMSDNYTDVNGEKVLPKDDIECPLGWKWEDEEWSTDLNRAVDEQGWEYSITIPPERKPKHWVPAEKMYYTHRRRRWVRLRRRDLSQMEALKRHRQAEAEGEGWEYASLFGWKFHLEYRKTDAFRRRRWRRRMEPLEKTGPAAVFALEGALGGVMDDKSEDSMSVSTLSFGVNRPTISCIFDYGNRYHLRCYMYQARDLAAMDKDSFSDPYAIVSFLHQSQKTVVVKNTLNPTWDQTLIFYEIEIFGEPATVAEQPPSIVVELYDHDTYGADEFMGRCICQPSLERMPRLAWFPLTRGSQPSGELLASFELIQREKPAIHHIPGFEVQETSRILDESEDTDLPYPPPQREANIYMVPQNIKPALQRTAIEILAWGLRNMKSYQLANISSPSLVVECGGQTVQSCVIRNLRKNPNFDICTLFMEVMLPREELYCPPITVKVIDNRQFGRRPVVGQCTIRSLESFLCDPYSAESPSPQGGPDDVSLLSPGEDVLIDIDDKEPLIPIQLADGLSSLAPTNTASPPSSPHEEEFIDWWSKFFASIGEREKCGSYLEKDFDTLKVYDTQLENVEAFEGLSDFCNTFKLYRGKTQEETEDPSVIGEFKGLFKIYPLPEDPAIPMPPRQFHQLAAQGPQECLVRIYIVRAFGLQPKDPNGKCDPYIKISIGKKSVSDQDNYIPCTLEPVFGKMFELTCTLPLEKDLKITLYDYDLLSKDEKIGETVVDLENRLLSKFGARCGLPQTYCVSGPNQWRDQLRPSQLLHLFCQQHRVKAPVYRTDRVMFQDKEYSIEEIEAGRIPNPHLGPVEERLALHVLQQQGLVPEHVESRPLYSPLQPDIEQGKLQMWVDLFPKALGRPGPPFNITPRRARRFFLRCIIWNTRDVILDDLSLTGEKMSDIYVKGWMIGFEEHKQKTDVHYRSLGGEGNFNWRFIFPFDYLPAEQVCTIAKKDAFWRLDKTESKIPARVVFQIWDNDKFSFDDFLGSLQLDLNRMPKPAKTAKKCSLDQLDDAFHPEWFVSLFEQKTVKGWWPCVAEEGEKKILAGKLEMTLEIVAESEHEERPAGQGRDEPNMNPKLEDPRRPDTSFLWFTSPYKTMKFILWRRFRWAIILFIILFILLLFLAIFIYAFPNYAAMKLVKPFS

SEQ ID NO: 898222 - protein, 1156 aa, Homo sapiens
TYVVKLHLFCLPAHICLSPLIACLFGFVLQNGEKVLPKDDIECPLGWKWEDEEWSTDLNRAVDEQGWEYSITIPPERKPKHWVPAEKMYYTHRRRRWVRLRRRDLSQMEALKRHRQAEAEGEGWEYASLFGWKFHLEYRKTDAFRRRRWRRRMEPLEKTGPAAVFALEGALGGVMDDKSEDSMSVSTLSFGVNRPTISCIFDYGNRYHLRCYMYQARDLAAMDKDSFSDPYAIVSFLHQSQKTVVVKNTLNPTWDQTLIFYEIEIFGEPATVAEQPPSIVVELYDHDTYGADEFMGRCICQPSLERMPRLAWFPLTRGSQPSGELLASFELIQREKPAIHHIPGFEVQETSRILDESEDTDLPYPPPQREANIYMVPQNIKPALQRTAIEILAWGLRNMKSYQLANISSPSLVVECGGQTVQSCVIRNLRKNPNFDICTLFMEVMLPREELYCPPITVKVIDNRQFGRRPVVGQCTIRSLESFLCDPYSAESPSPQGGPDDVSLLSPGEDVLIDIDDKEPLIPIQLADGLSSLAPTNTASPPSSPHEEEFIDWWSKFFASIGEREKCGSYLEKDFDTLKVYDTQLENVEAFEGLSDFCNTFKLYRGKTQEETEDPSVIGEFKGLFKIYPLPEDPAIPMPPRQFHQLAAQGPQECLVRIYIVRAFGLQPKDPNGKCDPYIKISIGKKSVSDQDNYIPCTLEPVFGKMFELTCTLPLEKDLKITLYDYDLLSKDEKIGETVVDLENRLLSKFGARCGLPQTYCVSGPNQWRDQLRPSQLLHLFCQQHRVKAPVYRTDRVMFQDKEYSIEEIEAGRIPNPHLGPVEERLALHVLQQQGLVPEHVESRPLYSPLQPDIEQGKLQMWVDLFPKALGRPGPPFNITPRRARRFFLRCIIWNTRDVILDDLSLTGEKMSDIYVKGWMIGFEEHKQKTDVHYRSLGGEGNFNWRFIFPFDYLPAEQVCTIAKKDAFWRLDKTESKIPARVVFQIWDNDKFSFDDFLGSLQLDLNRMPKPAKTAKKCSLDQLDDAFHPEWFVSLFEQKTVKGWWPCVAEEGEKKILAGKLEMTLEIVAESEHEERPAGQGRDEPNMNPKLEDPRRPDTSFLWFTSPYKTMKFILWRRFRWAIILFIILFILLLFLAIFIYAFPNYAAMKLVKPFS

SEQ ID NO: 898223 - protein, 782 aa, Homo sapiens
MVPQNIKPALQRTAIEILAWGLRNMKSYQLANISSPSLVVECGGQTVQSCVIRNLRKNPNFDICTLFMEVMLPREELYCPPITVKVIDNRQFGRRPVVGQCTIRSLESFLCDPYSAESPSPQGGPDDVSLLSPGEDVLIDIDDKEPLIPIQLADGLSSLAPTNTASPPSSPHEEEFIDWWSKFFASIGEREKCGSYLEKDFDTLKVYDTQLENVEAFEGLSDFCNTFKLYRGKTQEETEDPSVIGEFKGLFKIYPLPEDPAIPMPPRQFHQLAAQGPQECLVRIYIVRAFGLQPKDPNGKCDPYIKISIGKKSVSDQDNYIPCTLEPVFGKMFELTCTLPLEKDLKITLYDYDLLSKDEKIGETVVDLENRLLSKFGARCGLPQTYCVSGPNQWRDQLRPSQLLHLFCQQHRVKAPVYRTDRVMFQDKEYSIEEIEAGRIPNPHLGPVEERLALHVLQQQGLVPEHVESRPLYSPLQPDIEQGKLQMWVDLFPKALGRPGPPFNITPRRARRFFLRCIIWNTRDVILDDLSLTGEKMSDIYVKGWMIGFEEHKQKTDVHYRSLGGEGNFNWRFIFPFDYLPAEQVCTIAKKDAFWRLDKTESKIPARVVFQIWDNDKFSFDDFLGSLQLDLNRMPKPAKTAKKCSLDQLDDAFHPEWFVSLFEQKTVKGWWPCVAEEGEKKILAGKLEMTLEIVAESEHEERPAGQGRDEPNMNPKLEDPRRPDTSFLWFTSPYKTMKFILWRRFRWAIILFIILFILLLFLAIFIYAFPNYAAMKLVKPFS

SEQ ID NO: 898224 - protein, 591 aa, Homo sapiens
SRTLLDMDFDTLCVSDIIMIRNVEAFEGLSDFCNTFKLYRGKTQEETEDPSVIGEFKGLFKIYPLPEDPAIPMPPRQFHQLAAQGPQECLVRIYIVRAFGLQPKDPNGKCDPYIKISIGKKSVSDQDNYIPCTLEPVFGKMFELTCTLPLEKDLKITLYDYDLLSKDEKIGETVVDLENRLLSKFGARCGLPQTYCVSGPNQWRDQLRPSQLLHLFCQQHRVKAPVYRTDRVMFQDKEYSIEEIEAGRIPNPHLGPVEERLALHVLQQQGLVPEHVESRPLYSPLQPDIEQGKLQMWVDLFPKALGRPGPPFNITPRRARRFFLRCIIWNTRDVILDDLSLTGEKMSDIYVKGWMIGFEEHKQKTDVHYRSLGGEGNFNWRFIFPFDYLPAEQVCTIAKKDAFWRLDKTESKIPARVVFQIWDNDKFSFDDFLGSLQLDLNRMPKPAKTAKKCSLDQLDDAFHPEWFVSLFEQKTVKGWWPCVAEEGEKKILAGKLEMTLEIVAESEHEERPAGQGRDEPNMNPKLEDPRRPDTSFLWFTSPYKTMKFILWRRFRWAIILFIILFILLLFLAIFIYAFPNYAAMKLVKPFS

SEQ ID NO: 898225 - protein, 450 aa, Homo sapiens
SRLVRSEFRIRPSLLPCSRDRLTHNDIVATTYLSMSKISAPGGEIEVDDYLGFLPTFGPCYINLYGSPREFTGFPDPYTELNTGKGEGVAYRGRLLLSLETKLVEHSEQKVEDLPADDILRVEKYLRRRKYSLFAAFYSATMLQDVDDAIQFEVSIGNYGNKFDMTCLPLASTTQYSRAVFDGCHYYYLPWGNVKPVVVLSSYWEDISHRIETQNQLLGIADRLEAGLEQVHLALKAQCSTEDVDSLVAQLTDELIAGCDAFWRLDKTESKIPARVVFQIWDNDKFSFDDFLGSLQLDLNRMPKPAKTAKKCSLDQLDDAFHPEWFVSLFEQKTVKGWWPCVAEEGEKKILAGKLEMTLEIVAESEHEERPAGQGRDEPNMNPKLEDPRRPDTSFLWFTSPYKTMKFILWRRFRWAIILFIILFILLLFLAIFIYAFPNYAAMKLVKPFS

SEQ ID NO: 898226 - protein, 1215 aa, Homo sapiens
MLRVFILYAENVHTPDTDISDAYCSAVFAGVKKRTKVIKNSVNPVWNEGFEWDLKGIPLDQGSELHVVVKDHETMGRNRFLGEAKVPLREVLATPSLSASFNAPLLDTKKQPTGASLVLQVSYTPLPGAVPLFPPPTPLEPSPTLPDLDVVADTGGEEDTEDQGLTGDEAEPFLDQSGGPGAPTTPRKLPSRPPPHYPGIKRKRSAPTSRKLLSDKPQDFQIRVQVIEGRQLPGVNIKPVVKVTAAGQTKRTRIHKGNSPLFNETLFFNLFDSPGELFDEPIFITVVDSRSLRTDALLGEFRMDVGTIYREPRHAYLRKWLLLSDPDDFSAGARGYLKTSLCVLGPGDEAPLERKDPSEDKEDIESNLLRPTGVALRGAHFCLKVFRAEDLPQMDDAVMDNVKQIFGFESNKKNLVDPFVEVSFAGKMLCSKILEKTANPQWNQNITLPAMFPSMCEKMRIRIIDWDRLTHNDIVATTYLSMSKISAPGGEIEVDDYLGFLPTFGPCYINLYGSPREFTGFPDPYTELNTGKGEGVAYRGRLLLSLETKLVEHSEQKVEDLPADDILRVEKYLRRRKYSLFAAFYSATMLQDVDDAIQFEVSIGNYGNKFDMTCLPLASTTQYSRAVFDGCHYYYLPWGNVKPVVVLSSYWEDISHRIETQNQLLGIADRLEAGLEQVHLALKAQCSTEDVDSLVAQLTDELIAGCSQPLGDIHETPSATHLDQYLYQLRTHHLSQITEAALALKLGHSELPAALEQAEDWLLRLRALAEEPQNSLPDIVIWMLQGDKRVAYQRVPAHQVLFSRRGANYCGKNCGKLQTIFLKYPMEKVPGARMPVQIRVKLWFGLSVDEKEFNQFAEGKLSVFAETYENETKLALVGNWGTTGLTYPKFSDVTGKIKLPKDSFRPSAGWTWAGDWFVCPEKTLLHDMDAGHLSFVEEVFENQTRLPGGQWIYMSDNYTDVNGEKVLPKDDIECPLGWKWEDEEWSTDLNRAVDEQGWEYSITIPPERKPKHWVPAEKMYYTHRRRRWVRLRRRDLSQMEALKRVSQQVVGGSEACGHRWPVGTDADLHAHRHMHVCTQHAQTPGTHWRCSQITPSIPKDHTQHTHRSHPAYPKITPSIHTDHTQHTDHTGNTHRSHSAHTQITPSTHTDHTQHTDYTQHTHRSHPAHRSHPQITPSACTDHTQHTQRSHPAHTHRSHPTHPQFTLSTHRSHPTH

SEQ ID NO: 898227 - protein, 486 aa, Homo sapiens
MLRVFILYAENVHTPDTDISDAYCSAVFAGVKKRTKVIKNSVNPVWNEGFEWDLKGIPLDQGSELHVVVKDHETMGRNRFLGEAKVPLREVLATPSLSASFNAPLLDTKKQPTGASLVLQVSYTPLPGAVPLFPPPTPLEPSPTLPDLDVVADTGGEEDTEDQGLTGDEAEPFLDQSGGPGAPTTPRKLPSRPPPHYPGIKRKRSAPTSRKLLSDKPQDFQIRVQVIEGRQLPGVNIKPVVKVTAAGQTKRTRIHKGNSPLFNETLFFNLFDSPGELFDEPIFITVVDSRSLRTDALLGEFRMDVGTIYREPRHAYLRKWLLLSDPDDFSAGARGYLKNKPAKTAKKCSLDQLDDAFHPEWFVSLFEQKTVKGWWPCVAEEGEKKILAGKLEMTLEIVAESEHEERPAGQGRDEPNMNPKLEDPRRPDTSFLWFTSPYKTMKFILWRRFRWAIILFIILFILLLFLAIFIYAFPNYAAMKLVKPFS

SEQ ID NO: 898228 - protein, 2087 aa, Homo sapiens
MLRVFILYAENVHTPDTDISDAYCSAVFAGVKKRTKVIKNSVNPVWNEGFEWDLKGIPLDQGSELHVVVKDHETMGRNRFLGEAKVPLREVLATPSLSASFNAPLLDTKKQPTGASLVLQVSYTPLPGAVPLFPPPTPLEPSPTLPDLDVVADTGGEEDTEDQGLTGDEAEPFLDQSGGPGAPTTPRKLPSRPPPHYPGIKRKRSAPTSRKLLSDKPQDFQIRVQVIEGRQLPGVNIKPVVKVTAAGQTKRTRIHKGNSPLFNETLFFNLFDSPGELFDEPIFITVVDSRSLRTDALLGEFRMDVGTIYREPRHAYLRKWLLLSDPDDFSAGARGYLKTSLCVLGPGDEAPLERKDPSEDKEDIESNLLRPTGVALRGAHFCLKVFRAEDLPQMDDAVMDNVKQIFGFESNKKNLVDPFVEVSFAGKMLCSKILEKTANPQWNQNITLPAMFPSMCEKMRIRIIDWDRLTHNDIVATTYLSMSKISAPGGEIEVDDYLGFLPTFGPCYINLYGSPREFTGFPDPYTELNTGKGEGVAYRGRLLLSLETKLVEHSEQKVEDLPADDILRVEKYLRRRKYSLFAAFYSATMLQDVDDAIQFEVSIGNYGNKFDMTCLPLASTTQYSRAVFDGCHYYYLPWGNVKPVVVLSSYWEDISHRIETQNQLLGIADRLEAGLEQVHLALKAQCSTEDVDSLVAQLTDELIAGCSQPLGDIHETPSATHLDQYLYQLRTHHLSQITEAALALKLGHSELPAALEQAEDWLLRLRALAEEPQNSLPDIVIWMLQGDKRVAYQRVPAHQVLFSRRGANYCGKNCGKLQTIFLKYPMEKVPGARMPVQIRVKLWFGLSVDEKEFNQFAEGKLSVFAETYENETKLALVGNWGTTGLTYPKFSDVTGKIKLPKDSFRPSAGWTWAGDWFVCPEKTLLHDMDAGHLSFVEEVFENQTRLPGGQWIYMSDNYTDVNGEKVLPKDDIECPLGWKWEDEEWSTDLNRAVDEQGWEYSITIPPERKPKHWVPAEKMYYTHRRRRWVRLRRRDLSQMEALKRHRQAEAEGEGWEYASLFGWKFHLEYRKTDAFRRRRWRRRMEPLEKTGPAAVFALEGALGGVMDDKSEDSMSVSTLSFGVNRPTISCIFDYGNRYHLRCYMYQARDLAAMDKDSFSDPYAIVSFLHQSQKTVVVKNTLNPTWDQTLIFYEIEIFGEPATVAEQPPSIVVELYDHDTYGADEFMGRCICQPSLERMPRLAWFPLTRGSQPSGELLASFELIQREKPAIHHIPGFEVQETSRILDESEDTDLPYPPPQREANIYMVPQNIKPALQRTAIEILAWGLRNMKSYQLANISSPSLVVECGGQTVQSCVIRNLRKNPNFDICTLFMEVMLPREELYCPPITVKVIDNRQFGRRPVVGQCTIRSLESFLCDPYSAESPSPQGGPDDVSLLSPGEDVLIDIDDKEPLIPIQLADGLSSLAPTNTASPPSSPHEEEFIDWWSKFFASIGEREKCGSYLEKDFDTLKVYDTQLENVEAFEGLSDFCNTFKLYRGKTQEETEDPSVIGEFKGLFKIYPLPEDPAIPMPPRQFHQLAAQGPQECLVRIYIVRAFGLQPKDPNGKCDPYIKISIGKKSVSDQDNYIPCTLEPVFGKMFELTCTLPLEKDLKITLYDYDLLSKDEKIGETVVDLENRLLSKFGARCGLPQTYCVSGPNQWRDQLRPSQLLHLFCQQHRVKAPVYRTDRVMFQDKEYSIEEIEAGRIPNPHLGPVEERLALHVLQQQGLVPEHVESRPLYSPLQPDIEQGKLQMWVDLFPKALGRPGPPFNITPRRARRFFLRCIIWNTRDVILDDLSLTGEKMSDIYVKGWMIGFEEHKQKTDVHYRSLGGEGNFNWRFIFPFDYLPAEQVCTIAKKDAFWRLDKTESKIPARVVFQIWDNDKFSFDDFLGSLQLDLNRMPKPAKTAKKCSLDQLDDAFHPEWFVSLFEQKTVKGWWPCVAEEGEKKILAGKLEMTLEIVAESEHEERPAGQGRDEPNMNPKLEDPRRPDTSFLWFTSPYKTMKFILWRRFRWAIILFIILFILLLFLAIFIYAFPNYAAMKLVKPFS

SEQ ID NO: 898229 - protein, 982 aa, Homo sapiens
MDDKSEDSMSVSTLSFGVNRPTISCIFDYGNRYHLRCYMYQARDLAAMDKDSFSDPYAIVSFLHQSQKTVVVKNTLNPTWDQTLIFYEIEIFGEPATVAEQPPSIVVELYDHDTYGADEFMGRCICQPSLERMPRLAWFPLTRGSQPSGELLASFELIQREKPAIHHIPGFEVQETSRILDESEDTDLPYPPPQREANIYMVPQNIKPALQRTAIEILAWGLRNMKSYQLANISSPSLVVECGGQTVQSCVIRNLRKNPNFDICTLFMEVMLPREELYCPPITVKVIDNRQFGRRPVVGQCTIRSLESFLCDPYSAESPSPQGGPDDVSLLSPGEDVLIDIDDKEPLIPIQLADGLSSLAPTNTASPPSSPHEEEFIDWWSKFFASIGEREKCGSYLEKDFDTLKVYDTQLENVEAFEGLSDFCNTFKLYRGKTQEETEDPSVIGEFKGLFKIYPLPEDPAIPMPPRQFHQLAAQGPQECLVRIYIVRAFGLQPKDPNGKCDPYIKISIGKKSVSDQDNYIPCTLEPVFGKMFELTCTLPLEKDLKITLYDYDLLSKDEKIGETVVDLENRLLSKFGARCGLPQTYCVSGPNQWRDQLRPSQLLHLFCQQHRVKAPVYRTDRVMFQDKEYSIEEIEAGRIPNPHLGPVEERLALHVLQQQGLVPEHVESRPLYSPLQPDIEQGKLQMWVDLFPKALGRPGPPFNITPRRARRFFLRCIIWNTRDVILDDLSLTGEKMSDIYVKGWMIGFEEHKQKTDVHYRSLGGEGNFNWRFIFPFDYLPAEQVCTIAKKDAFWRLDKTESKIPARVVFQIWDNDKFSFDDFLGSLQLDLNRMPKPAKTAKKCSLDQLDDAFHPEWFVSLFEQKTVKGWWPCVAEEGEKKILAGKLEMTLEIVAESEHEERPAGQGRDEPNMNPKLEDPRRPDTSFLWFTSPYKTMKFILWRRFRWAIILFIILFILLLFLAIFIYAFPNYAAMKLVKPFS

SEQ ID NO: 898230 - protein, 959 aa, Homo sapiens
MNLPDDPAACSHFQNHCPRVCSSDTNLPLGQDPYAIVSFLHQSQKTVVVKNTLNPTWDQTLIFYEIEIFGEPATVAEQPPSIVVELYDHDTYGADEFMGRCICQPSLERMPRLAWFPLTRGSQPSGELLASFELIQREKPAIHHIPGFEVQETSRILDESEDTDLPYPPPQREANIYMVPQNIKPALQRTAIEILAWGLRNMKSYQLANISSPSLVVECGGQTVQSCVIRNLRKNPNFDICTLFMEVMLPREELYCPPITVKVIDNRQFGRRPVVGQCTIRSLESFLCDPYSAESPSPQGGPDDVSLLSPGEDVLIDIDDKEPLIPIQLADGLSSLAPTNTASPPSSPHEEEFIDWWSKFFASIGEREKCGSYLEKDFDTLKVYDTQLENVEAFEGLSDFCNTFKLYRGKTQEETEDPSVIGEFKGLFKIYPLPEDPAIPMPPRQFHQLAAQGPQECLVRIYIVRAFGLQPKDPNGKCDPYIKISIGKKSVSDQDNYIPCTLEPVFGKMFELTCTLPLEKDLKITLYDYDLLSKDEKIGETVVDLENRLLSKFGARCGLPQTYCVSGPNQWRDQLRPSQLLHLFCQQHRVKAPVYRTDRVMFQDKEYSIEEIEAGRIPNPHLGPVEERLALHVLQQQGLVPEHVESRPLYSPLQPDIEQGKLQMWVDLFPKALGRPGPPFNITPRRARRFFLRCIIWNTRDVILDDLSLTGEKMSDIYVKGWMIGFEEHKQKTDVHYRSLGGEGNFNWRFIFPFDYLPAEQVCTIAKKDAFWRLDKTESKIPARVVFQIWDNDKFSFDDFLGSLQLDLNRMPKPAKTAKKCSLDQLDDAFHPEWFVSLFEQKTVKGWWPCVAEEGEKKILAGKLEMTLEIVAESEHEERPAGQGRDEPNMNPKLEDPRRPDTSFLWFTSPYKTMKFILWRRFRWAIILFIILFILLLFLAIFIYAFPNYAAMKLVKPFS

SEQ ID NO: 898231 - protein, 2073 aa, Homo sapiens
MLRVFILYAENVHTPDTDISDAYCSAVFAGVKKRTKVIKNSVNPVWNEGFEWDLKGIPLDQGSELHVVVKDHETMGRNRFLGEAKVPLREVLATPSLSASFNAPLLDTKKQPTGASLVLQVSYTPLPGAVPLFPPPTPLEPSPTLPDLDVVADTGGEEDTEDQGLTGDEAEPFLDQSGGPGAPTTPRKLPSRPPPHYPGIKRKRSAPTSRKLLSDKPQDFQIRVQVIEGRQLPGVNIKPVVKVTAAGQTKRTRIHKGNSPLFNETLFFNLFDSPGELFDEPIFITVVDSRSLRTDALLGEFRMDVGTIYREPRHAYLRKWLLLSDPDDFSAGARGYLKTSLCVLGPGDEAPLERKDPSEDKEDIESNLLRPTGVALRGAHFCLKVFRAEDLPQMDDAVMDNVKQIFGFESNKKNLVDPFVEVSFAGKMLCSKILEKTANPQWNQNITLPAMFPSMCEKMRIRIIDWDRLTHNDIVATTYLSMSKISAPGGEIEVDDYLGFLPTFGPCYINLYGSPREFTGFPDPYTELNTGKGEGVAYRGRLLLSLETKLVEHSEQKVEDLPADDILRVEKYLRRRKYSLFAAFYSATMLQDVDDAIQFEVSIGNYGNKFDMTCLPLASTTQYSRAVFDGCHYYYLPWGNVKPVVVLSSYWEDISHRIETQNQLLGIADRLEAGLEQVHLALKAQCSTEDVDSLVAQLTDELIAGCSQPLGDIHETPSATHLDQYLYQLRTHHLSQITEAALALKLGHSELPAALEQAEDWLLRLRALAEEPQNSLPDIVIWMLQGDKRVAYQRVPAHQVLFSRRGANYCGKNCGKLQTIFLKYPMEKVPGARMPVQIRVKLWFGLSVDEKEFNQFAEGKLSVFAETYENETKLALVGNWGTTGLTYPKFSDVTGKIKLPKDSFRPSAGWTWAGDWFVCPEKTLLHDMDAGHLSFVEEVFENQTRLPGGQWIYMSDNYTDVNGEKVLPKDDIECPLGWKWEDEEWSTDLNRAVDEQGWEYSITIPPERKPKHWVPAEKMYYTHRRRRWVRLRRRDLSQMEALKRHRQAEAEGEGWEYASLFGWKFHLEYRKTDAFRRRRWRRRMEPLEKTGPAAVFALEGALGGVMDDKSEDSMSVSTLSFGVNRPTISCIFDYGNRYHLRCYMYQARDLAAMDKDSFSDPYAIVSFLHQSQKTVVVKNTLNPTWDQTLIFYEIEIFGEPATVAEQPPSIVVELYDHDTYGADEFMGRCICQPSLERMPRLAWFPLTRGSQPSGELLASFELIQREKPAIHHIPGFEVQETSRILDESEDTDLPYPPPQREANIYMVPQNIKPALQRTAIEILAWGLRNMKSYQLANISSPSLVVECGGQTVQSCVIRNLRKNPNFDICTLFMEVMLPREELYCPPITVKVIDNRQFGRRPVVGQCTIRSLESFLCDPYSAESPSPQGGPDDVSLLSPGEDVLIDIDDKEPLIPIQLADGLSSLAPTNTASPPSSPHEEEFIDWWSKFFASIGEREKCGSYLEKDFDTLKVYDTQLENVEAFEGLSDFCNTFKLYRGKTQEETEDPSVIGEFKGLFKIYPLPEDPAIPMPPRQFHQLAAQGPQECLVRIYIVRAFGLQPKDPNGKCDPYIKISIGKKSVSDQDNYIPCTLEPVFGKMFELTCTLPLEKDLKITLYDYDLLSKDEKIGETVVDLENRLLSKFGARCGLPQTYCVSGPNQWRDQLRPSQLLHLFCQQHRVKAPVYRTDRVMFQDKEYSIEEIEAGRIPNPHLGPVEERLALHVLQQQGLVPEHVESRPLYSPLQPDIEQGKLQMWVDLFPKALGRPGPPFNITPRRARRFFLRCIIWNTRDVILDDLSLTGEKMSDIYVKGWMIGFEEHKQKTDVHYRSLGGEGNFNWRFIFPFDYLPAEQVCTIAKKDAFWRLDKTESKIPARVVFQIWDNDKFSFDDFLGSLQLDLNRMPKPAKTAKKCSLDQLDDAFHPEWFVSLFEQKTVKGWWPCVAEEGEKKILAHEERPAGQGRDEPNMNPKLEDPRRPDTSFLWFTSPYKTMKFILWRRFRWAIILFIILFILLLFLAIFIYAFPNYAAMKLVKPFS

SEQ ID NO: 898232 - protein, 1916 aa, Homo sapiens
MLRVFILYAENVHTPDTDISDAYCSAVFAGVKKRTKVIKNSVNPVWNEGFEWDLKGIPLDQGSELHVVVKDHETMGRNRFLGEAKVPLREVLATPSLSASFNAPLLDTKKQPTGASLVLQVSYTPLPGAVPLFPPPTPLEPSPTLPDLDVVADTGGEEDTEDQGLTGDEAEPFLDQSGGPGAPTTPRKLPSRPPPHYPGIKRKRSAPTSRKLLSDKPQDFQIRVQVIEGRQLPGVNIKPVVKVTAAGQTKRTRIHKGNSPLFNETLFFNLFDSPGELFDEPIFITVVDSRSLRTDALLGEFRMDVGTIYREPRHAYLRKWLLLSDPDDFSAGARGYLKTSLCVLGPGDEAPLERKDPSEDKEDIESNLLRPTGVALRGAHFCLKVFRAEDLPQMDDAVMDNVKQIFGFESNKKNLVDPFVEVSFAGKMLCSKILEKTANPQWNQNITLPAMFPSMCEKMRIRIIDWDRLTHNDIVATTYLSMSKISAPGGEIEVDDYLGFLPTFGPCYINLYGSPREFTGFPDPYTELNTGKGEGVAYRGRLLLSLETKLVEHSEQKVEDLPADDILRVEKYLRRRKYSLFAAFYSATMLQDVDDAIQFEVSIGNYGNKFDMTCLPLASTTQYSRAVFDGCHYYYLPWGNVKPVVVLSSYWEDISHRIETQNQLLGIADRLEAGLEQVHLALKAQCSTEDVDSLVAQLTDELIAGCSQPLGDIHETPSATHLDQYLYQLRTHHLSQITEAALALKLGHSELPAALEQAEDWLLRLRALAEEPQNSLPDIVIWMLQGDKRVAYQRVPAHQVLFSRRGANYCGKNCGKLQTIFLKYPMEKVPGARMPVQIRVKLWFGLSVDEKEFNQFAEGKLSVFAETYENETKLALVGNWGTTGLTYPKFSDVTGKIKLPKDSFRPSAGWTWAGDWFVCPEKTLLHDMDAGHLSFVEEVFENQTRLPGGQWIYMSDNYTDVNGEKVLPKDDIECPLGWKWEDEEWSTDLNRAVDEQGWEYSITIPPERKPKHWVPAEKMYYTHRRRRWVRLRRRDLSQMEALKRHRQAEAEGEGWEYASLFGWKFHLEYRKTDAFRRRRWRRRMEPLEKTGPAAVFALEGALGGVMDDKSEDSMSVSTLSFGVNRPTISCIFDYGNRYHLRCYMYQARDLAAMDKDSFSDPYAIVSFLHQSQKTVVVKNTLNPTWDQTLIFYEIEIFGEPATVAEQPPSIVVELYDHDTYGADEFMGRCICQPSLERMPRLAWFPLTRGSQPSGELLASFELIQREKPAIHHIPGFEVQETSRILDESEDTDLPYPPPQREANIYMVPQNIKPALQRTAIEILAWGLRNMKSYQLANISSPSLVVECGGQTVQSCVIRNLRKNPNFDICTLFMEVMLPREELYCPPITVKVIDNRQFGRRPVVGQCTIRSLESFLCDPYSAESPSPQGGPDDVSLLSPGEDVLIDIDDKEPLIPIQLADGLSSLAPTNTASPPSSPHEEEFIDWWSKFFASIGEREKCGSYLEKDFDTLKVYDTQLENVEAFEGLSDFCNTFKLYRGKTQEETEDPSVIGEFKGLFKIYPLPEDPAIPMPPRQFHQLAAQGPQECLVRIYIVRAFGLQPKDPNGKCDPYIKISIGKKSVSDQDNYIPCTLEPVFGKMFELTCTLPLEKDLKITLYDYDLLSKDEKIGETVVDLENRLLSKFGARCGLPQTYCVSGPNQWRDQLRPSQLLHLFCQQHRVKAPVYRTDRVMFQDKEYSIEEIEAGRIPNPHLGPVEERLALHVLQQQGLVPEHVESRPLYSPLQPDIEQGKLQMWVDLFPKALGRPGPPFNITPRRARRFFLRCIIWNTRDVILDDLSLTGEKMSDIYVKGWMIGFEEHKQKTDVHYRSLGGEGNFNWRFIFPFDYLPAEQVCTIAKKVSVLPIPCGASTRASKVSLT

SEQ ID NO: 898233 - protein, 71 aa, Homo sapiens
APSPASSQAMLVGTTECQGPSLGYFTQGRFLKAPPTPSCKLGPRVSGRSRVCDHAPNSEMVPGEMGGTAKQ

SEQ ID NO: 898234 - protein, 116 aa, Homo sapiens
ARGVEPGQYRRRCALCGGLCASGGREREAAAASVGMSRSSKVVLGLSVLLTAATVAGVHVKQQWDQQRLRDGVIRDIERQIRKKENIRLLGEQIILTEQLEAEREKMLLAKGSQKS

SEQ ID NO: 898235 - protein, 782 aa, Homo sapiens
MDSSIHLSSLISRHDDEATRTSTSEGLEEGEVEGETLLIVESEDQASVDLSHDQSGDSLNSDEGDVSWMEEQLSYFCDKCQKWIPASQLREQLSYLKGDNFFRFTCSDCSADGKEQYERLKLTWQQVVMLAMYNLSLEGSGRQGYFRWKEDICAFIEKHWTFLLGNRKKTSTWWSTVAGCLSVGSPMYFRSGAQEFGEPGWWKLVHNKPPTMKPEGEKLSASTLKIKAASKPTLDPIITVEGLRKRASRNPVESAMELKEKRSRTQEAKDIRRAQKEAAGFLDRSTSSTPVKFISRGRRPDVILEKGEVIDFSSLSSSDRTPLTSPSPSPSLDFSAPGTPASHSATPSLLSEADLIPDVMPPQALFHDDDEMEGDGVIDPGMEYVPPPAGSVASGPVVGGRKKVRGPEQIKQEVESEEEKPDRMDIDSEDTDSNTSLQTRAREKRKPQLEKDTKPKEPRYTPVSIYEEKLLLKRLEACPGAVAMTPEARRLKRKLIVRQAKRDRGLPLFDLDQVVNAALLLVDGIYGAKEGGISRLPAGQATYRTTCQDFRILDRYQTSLPSRKGFRHQTTKFLYRLVGSEDMAVDQSIVSPYTSRILKPYIRRDYETKPPKLQLLSQIRSHLHRSDPHWTPEPDAPLDYCYVRPNHIPTINSMCQEFFWPGIDLSECLQYPDFSVVVLYKKVIIAFGFMVPDVKYNEAYISFLFVHPEWRRAGIATFMIYHLIQTCMGKDVTLHVSASNPAMLLYQKFGFKTEEYVLDFYDKYYPLESTECKHAFFLRLRR

SEQ ID NO: 898236 - protein, 782 aa, Homo sapiens; identical to SEQ ID NO: 898235

SEQ ID NO: 898237 - protein, 782 aa, Homo sapiens; identical to SEQ ID NO: 898235

SEQ ID NO: 898238 - protein, 782 aa, Homo sapiens; identical to SEQ ID NO: 898235

SEQ ID NO: 898239 - protein, 654 aa, Homo sapiens
MLAMYNLSLEGSGRQGYFRWKEDICAFIEKHWTFLLGNRKKTSTWWSTVAGCLSVGSPMYFRSGAQEFGEPGWWKLVHNKPPTMKPEGEKLSASTLKIKAASKPTLDPIITVEGLRKRASRNPVESAMELKEKRSRTQEAKDIRRAQKEAAGFLDRSTSSTPVKFISRGRRPDVILEKGEVIDFSSLSSSDRTPLTSPSPSPSLDFSAPGTPASHSATPSLLSEADLIPDVMPPQALFHDDDEMEGDGVIDPGMEYVPPPAGSVASGPVVGGRKKVRGPEQIKQEVESEEEKPDRMDIDSEDTDSNTSLQTRAREKRKPQLEKDTKPKEPRYTPVSIYEEKLLLKRLEACPGAVAMTPEARRLKRKLIVRQAKRDRGLPLFDLDQVVNAALLLVDGIYGAKEGGISRLPAGQATYRTTCQDFRILDRYQTSLPSRKGFRHQTTKFLYRLVGSEDMAVDQSIVSPYTSRILKPYIRRDYETKPPKLQLLSQIRSHLHRSDPHWTPEPDAPLDYCYVRPNHIPTINSMCQEFFWPGIDLSECLQYPDFSVVVLYKKVIIAFGFMVPDVKYNEAYISFLFVHPEWRRAGIATFMIYHLIQTCMGKDVTLHVSASNPAMLLYQKFGFKTEEYVLDFYDKYYPLESTECKHAFFLRLRR

SEQ ID NO: 898240 - protein, 782 aa, Homo sapiens; identical to SEQ ID NO: 898235

SEQ ID NO: 898241 - protein, 782 aa, Homo sapiens; identical to SEQ ID NO: 898235

SEQ ID NO: 898242 - protein, 307 aa, Homo sapiens
MAALLLGAVLLVAQPQLVPSRPAELGQQELLRKAGTLQDDVRDGVAPNGSAQQLPQTIIIGVRKGGTRALLEMLSLHPDVAAAENEVHFFDWEEHYSHGLGWYLSQMPFSWPHQLTVEKTPAYFTSPKVPERVYSMNPSIRLLLILRDPSERVLSDYTQVFYNHMQKHKPYPSIEEFLVRDGRLNVDYKALNRSLYHVHMQNWLRFFPLRHIHIVDGDRLIRDPFPEIQKVERFLKLSPQINASNFYFNKTKGFYCLRDSGRDRCLHESKGRAHPQVDPKLLNKLHEYFHEPNKKFFELVGRTFDWH

SEQ ID NO: 898243 - protein, 307 aa, Homo sapiens; identical to SEQ ID NO: 898242

SEQ ID NO: 898244 - protein, 307 aa, Homo sapiens; identical to SEQ ID NO: 898242

SEQ ID NO: 898245 - protein, 307 aa, Homo sapiens; identical to SEQ ID NO: 898242

SEQ ID NO: 898246 - protein, 307 aa, Homo sapiens; identical to SEQ ID NO: 898242

SEQ ID NO: 898247 - protein, 307 aa, Homo sapiens; identical to SEQ ID NO: 898242

SEQ ID NO: 898248 - protein, 307 aa, Homo sapiens; identical to SEQ ID NO: 898242

SEQ ID NO: 898249 - protein, 68 aa, Homo sapiens
HVIYSVKFFISYAIPDVSKRTKSKIQREKYLTQKLLHENHLKDMTKNMGVIAERMIEAVDNNLRPKSE

SEQ ID NO: 898250 - protein, 68 aa, Homo sapiens; identical to SEQ ID NO: 898249

SEQ ID NO: 898251 - protein, 163 aa, Homo sapiens
MAEERVATRTQFPVSTESQKPRQKKAPEFPILEKQNWLIHLHYIRKDYEACKAVIKEQLQETQGLCEYAIYVQALIFRLEGNIQESLELFQTCAVLSPQSADNLKQVARSLFLLGKHKAAIEVYNEAAKLNQKDWEISHNLGVCYIYLKQFNKVIYRSGDRFH

SEQ ID NO: 898252 - protein, 136 aa, Homo sapiens
MAEERVATRTQFPVSTESQKPRQKKAPEFPILEKQNWLIHLHYIRKDYEACKAVIKEQLQETQGLCEYAIYVQALIFRLEGNIQESLELFQTCAVLSPQSADNLKQVARSLFLLGKHKAAIEVYNEAAKLNQKDWG

SEQ ID NO: 898253 - protein, 527 aa, Homo sapiens [sequence omitted]

SEQ ID NO: 898254 - protein, 496 aa, Homo sapiens
MAEERVATRTQFPVSTESQKPRQKKAPEFPILEKQNWLIHLHYIRKDYEACKAVIKEQLQETQGLCEYAIYVQALIFRLEGNIQESLELFQTCAVLSPQSADNLKQVARSLFLLGKHKAAIEVYNEAAKLNQKDWEISHNLGVCYIYLKQFNKAQDQLHNALNLNRHDLTYIMLGKIHLLEGDLDKAIEVYKKAVEFSPENTELLTTLGLLYLQAILAAGSMMQTHGDFDVALTKYRVVACAVPESPPLWNNIGMCFFGKKKYVAAISCLKRANYLAPFDWKILYNLGLVHLTMQQYASAFHFLSAAINFQPKMGELYMLLAVALTNLEDTENAKRAYAEAVHLDKCNPLVNLNYAVLLYNQGEKKNALAQYQEMEKKVSLLKDNSSLEFDSEMVEMAQKLGAALQVGEALVWTKPVKDPKSKHQTTSTSKPASFQQPLGSNQALGQAMSSAAAYRTLPSGAGGTSQFTKPPSLPLEPEPAVESSPTETSEQIREK

SEQ ID NO: 898255 - protein, 275 aa, Homo sapiens
MMQTHGDFDVALTKYRVVACAVPESPPLWNNIGMCFFGKKKYVAAISCLKRANYLAPFDWKILYNLGLVHLTMQQYASAFHFLSAAINFQPKMGELYMLLAVALTNLEDTENAKRAYAEAVHLDKCNPLVNLNYAVLLYNQGEKKNALAQYQEMEKKVSLLKDNSSLEFDSEMVEMAQKLGAALQVGEALVWTKPVKDPKSKHQTTSTSKPASFQQPLGSNQALGQAMSSAAAYRTLPSGAGGTSQFTKPPSLPLEPEPAVESSPTETSEQIREK

SEQ ID NO: 898256 - protein, 291 aa, Homo sapiens
MTFSVPCFQAILAAGSMMQTHGDFDVALTKYRVVACAVPESPPLWNNIGMCFFGKKKYVAAISCLKRANYLAPFDWKILYNLGLVHLTMQQYASAFHFLSAAINFQPKMGELYMLLAVALTNLEDTENAKRAYAEAVHLDKCNPLVNLNYAVLLYNQGEKKNALAQYQEMEKKVSLLKDNSSLEFDSEMVEMAQKLGAALQVGEALVWTKPVKDPKSKHQTTSTSKPASFQQPLGSNQALGQAMSSAAAYRTLPSGAGGTSQFTKPPSLPLEPEPAVESSPTETSEQIREK

SEQ ID NO: 898257 - protein, 373 aa, Homo sapiens
MAEERVATRTQFPVSTESQKPRQKKAPEFPILEKQNWLIHLHYIRKDYEACKAVIKEQLQETQGLCEYAIYVQALIFRLEGNIQESLELFQTCAVLSPQSADNLKQVARSLFLLGKHKAAIEVYNEAAKLNQKDWEISHNLGVCYIYLKQFNKAQDQLHNALNLNRHDLTYIMLGKIHLLEGDLDKAIEVYKKAVEFSPENTELLTTLGLLYLQLGIYQKAFEHLGNALTYDPTNYKAILAAGSMMQTHGDFDVALTKYRVVACAVPESPPLWNNIGMCFFGKKKYVAAISCLKRANYLAPFDWKILYNLGLVHLTMQQYASAFHFLSAAINFQPKMGELYMLLAVALTNLEDTENAKRAYAEAVHLDKYALC

SEQ ID NO: 898258 - protein, 145 aa, Homo sapiens
MAEERVATRTQFPVSTESQKPRQKKAPEFPILEKQNWLIHLHYIRKDYEACKAVIKEQLQETQGLCEYAIYVQALIFRLEGNIQESLELFQTCAVLSPQSADNLKQVARSLFLLGKHKAAIEVYNEAAKLNQKDWALLHDFLAVC

SEQ ID NO: 898259 - protein, 519 aa, Homo sapiens [sequence omitted]

SEQ ID NO: 898260 - protein, 136 aa, Homo sapiens; identical to SEQ ID NO: 898252

SEQ ID NO: 898261 - protein, 519 aa, Homo sapiens [sequence omitted]

SEQ ID NO: 898262 - protein, 347 aa, Homo sapiens
MLGKIHLLEGDLDKAIEVYKKAVEFSPENTELLTTLGLLYLQLGIYQKAFEHLGNALTYDPTNYKAILAAGSMMQTHGDFDVALTKYRVVACAVPESPPLWNNIGMCFFGKKKYVAAISCLKRANYLAPFDWKILYNLGLVHLTMQQYASAFHFLSAAINFQPKMGELYMLLAVALTNLEDTENAKRAYAEAVHLDKCNPLVNLNYAVLLYNQGEKKNALAQYQEMEKKVSLLKDNSSLEFDSEMVEMAQKLGAALQVGEALVWTKPVKDPKSKHQTTSTSKPASFQQPLGSNQALGQAMSSAAAYRTLPSGAGGTSQFTKPPSLPLEPEPAVESSPTETSEQIREK

SEQ ID NO: 898263 - protein, 122 aa, Homo sapiens
MEKKVSLLKDNSSLEFDSEMVEMAQKLGAALQVGEALVWTKPVKDPKSKHQTTSTSKPASFQQPLGSNQALGQAMSSAAAYRTLPSGAGGTSQFTKPPSLPLEPEPAVESSPTETSEQIREK

SEQ ID NO: 898264 - protein, 113 aa, Homo sapiens
MAEERVATRTQFPVSTESQKPRQKKAPEFPILEKQNWLIHLHYIRKDYEACKAVIKEQLQETQGLCEYAIYVQALIFRLEGNIQESLELFQTCAVLSPQSADNLKQVARSLGK

SEQ ID NO: 898265 - protein, 721 aa, Homo sapiens
MILYLRTTIYSLWTLYAIEVYCPIVVTILFTVGPALQQLWFVSRWELKQVIPPKELVSSSRRDSLCQLSREKRTRLADPAPRIVPSPGPPSRPPSACNFPSGSGTVLEWPVADTEPPASCICLSWKSLPTLPVTLGSPKKFTDLPEALGNDPGTPGQRGLKLFGKAAGLLGKMVMAPSPSLVQVYTSPAAVAMAGGLGTWHPYSATICSFIEQQFVQQKGQRFGLGSLAHSIPLGQADPSLVRYIIDLPSWTQFRQDTGTTRTVRRHLFPQHSAPGRGVVWEWLSDDGSWTAYEAGVCDDLEQQVARGNQLVDLAPLGYNYTVNYTTHTQTNKTSSFCCSVRRQAGPPYPVTTIIAPPGHTGVACSCHQCLSGSRTGPVSGRYRHSMTNLPAYPVPQHPPHRTASVFGTHQAFAPYNKPSLSGARSAPRLNTTNAWDAAPPSLGSQPLYRSSLSHLGPQHLPPGSSTSGAVSASLPSGPSSSPGSVPATVPMQMPKPSRVQQALAGATPKPEPEPEQVIKNYTEELKVPPDEDCIICMEKLSAASGYSDVTDSKAIGPLAVGCLTKCSHAFHLLCLLAMYCNGNKGPEHPNPGKPFTARGFPRQCYLPDNAQGRKPPGGFQNPETLADIPASPQLLTDGHYMTLPVSPDQLPCDDPMAGSGGAPVLRVGHDHGCHQQPFCNAPLPGPGPYRTEPAKAIKPIDRKSVHQICSGPVVLSLSTG

SEQ ID NO: 898266 - protein, 639 aa, Homo sapiens
MILYLRTTIYSLWTLYAIEVYCPIVVTILFTVGPALQQLWFVSRWELKQVIPPKELVSSSRRDSLCQLSREKRTRLADPAPRIVPSPGPPSRPPSACNFPSGSGTVLEWPVADTEPPASCICLSWKSLPTLPVTLGSPKKFTDLPEALGNDPGTPGQRGLKLFGKAAGLLGKMVMAPSPSLVQVYTSPAAVAMAGGLGTWHPYSATICSFIEQQFVQQKGQRFGLGSLAHSIPLGQADPSLVRYIIDLPSWTQFRQDTGTTRTVRRHLFPQHSAPGRGVVWEWLSDDGSWTAYEAGVCDDLEQQVARGNQLVDLAPLGYNYTVNYTTHTQTNKTSSFCCSVRRQAGPPYPVTTIIAPPGHTGVACSCHQCLSGSRTGPVSGRYRHSMTNLPAYPVPQHPPHRTASVFGTHQAFAPYNKPSLSGARSAPRLNTTNAWDAAPPSLGSQPLYRSSLSHLGPQHLPPGSSTSGAVSASLPSGPSSSPGSVPATVPMQMPKPSRVQQALAGATPKPEPEPEQVIKNYTEELKVPPDEDCIICMEKLSAASGYSDVTDSKAIGPLAVGCLTKCSHAFHLLCLLAMYCNGNKGPEHPNPGKPFTARGFPRQCYLPDNAQGRKVSATMSPGGGRGPDQAAGGQAPHW

SEQ ID NO: 898267 - protein, 133 aa, Homo sapiens
MWGRRRKLRRLNDVTISTCHVSAKVGTRLVFDHDGKIIQKTPYPHPRGTTVSVKQLFSTLPVRHKEFQRNIKKKRACFPFAFCRDCQLLEGSPAMLPVRPAKLTPRSTPPHPCSLEDNVITVFSSCQEWSRFF

SEQ ID NO: 898268 - protein, 88 aa, Homo sapiens
VPHTGLPVWAPLAFPPGSLDLFLAFLALWPPLQPVLLRTLLMYFSLLGATPKPEPEPEQVIKNYTEELKVPPDEVCVLGPWLPLFLFG

SEQ ID NO: 898269 - protein, 90 aa, Homo sapiens
PQPTSPPASRLASKSHGSVKRLRKMSVKGATPKPEPEPEQVIKNYTEELLRAPGARGLVWGEKDFPSLDGRGFWVSFFYLNFVCNKCSTA

SEQ ID NO: 898270 - protein, 133 aa, Homo sapiens; identical to SEQ ID NO: 898267

SEQ ID NO: 898271 - protein, 142 aa, Homo sapiens
MILYLRTTIYSLWTLYAIEVYCPIVVTILFTVGPALQQLWFVSRWELKQVIPPKELVSSSRRDSLCQLSREKRTRLADPAPRIVPSPGPPSRPPSACNFPSGSGTVLEWPVADTEPPASCICLSWKSLPTLPVTLGSPKKSR

SEQ ID NO: 898272 - protein, 153 aa, Homo sapiens
LTFGFPLKTGTTRTVRRHLFPQHSAPGRGVVWEWLSDDGSWTAYEAGVCDDLEQQVARGNQLVDLAPLGYNYTVNYTTHTQTNKTSSFCCSVRRQAGPPYPVTTIIAPPGHTGVACSCHQCLSGSRTGPVSGRYRHSMTNLPAYPVPQHPPHR

SEQ ID NO: 898273 - protein, 1534 aa, Homo sapiens
PPKLYRYSPQSFLPDSTIQKQNFIPHTSLQVKNSQLPNSVLTLPSRQTSAVPSQQYATQTDKRPPPPPYNCRYGSQPLQSTQHITKHLSMEVPQSREMLSSEIRTSFQQQWQNPNENVSTIGNFTNLKVNTNNKQPFNSPIRSSVDGVQTLAQTNEEKIMDSCNPTSNQVLDTSVAKEKLVRDIKTLVEIKQKFSELARKIKINKDLLMAAGCIKMTNTSYSEPAQNSKLSLKQTAKIQSGPQITPVMPENAERQTPTVVESAETNKTQCMLNSDIQEVNCRRFNQVDSVLPNPVYSEKRPMPDPSHDVKVLTSKTSAVEMTQAVLNTQLSSENVTKVEQNSPAVCETISVPKSMSTEEYKSKIQNENMLLLALLSQARKTQKTVLKDANQTIQDSKPDSCEMNPNTQMTGNQLNLKNMETPSTSNVSGRVLDNSFCSGQESSTKGMPAKSDSSCSMEVLATCLSLWKKQPSDTAKEKECDKLRTNTTAVGISKPANIHVKSPCSVVGNSNSQNKISNPSQQTALSMVMHNYESSGINITKGTELQIAVVSPLVLSEVKTLSVKGITPAVLPETVYPVIKEGSVCSLQNQLAENAKATAALKVDVSGPVASTATSTKIFPLTQKEKQNESTNGNSEVTPNVNQGKHNKLESAIHSPMNDQQISQESRNSTVVSSDTLQIDNICSLVEGDTSYNSQIAKIFSSLPLKMVEPQKPSLPNQQGIGSREPEKQLDNTTENKDFGFQKDKPVQCTDVSHKICDQSKSEPPLESSFNNLETNRVILEKSSLEHATEKSTANDTCSSAAIQEDIYPQEIDASSNYTPQDPARNEIHSDKAPVLYLHDQLSELLKEFPYGIEAVNTREGSVGQQTTYQTSEDQTADKTSSDSKDPADQIQITILSSEQMKEIFPEQDDQPYVVDKLAEPQKEEPITEVVSQCDLQAPAAGQSRDSVILDSEKDDIHCCALGWLSMVYEGVPQCQCNSIKNSSSEEEKQKEQCSPLDTNSCKQGERTSDRDVTVVQFKSLVNNPKTPPDGKSHFPELQDDSRKDTPKTKHKSLPRTEQELVAGQFSSKCDKLNPLQNHKRKKLRFHEVTFHSSNKMTASYEQASQETRQKKHVTQNSRPLKTKTAFLPNKDVYKKHSSLGQSLSPEKIKLKLKSVSFKQKRKLDQGNVLDMEVKKKKHDKQEQKGSVGATFKLGDSLSNPNERAIVKEKMVSNTKSVDTKASSSKFSRILTPKEYLQRQKHKEALSNKASKKICVKNVPCDSEHMRPSKLAVQVESCGKSNEKHSSGVQTSKESLNGLTSHGKNLKIHHSQESKTYNILRNVKEKVGGKQPDKIWIDKTKLDKLTNISNEAQFSQMPPQVKDQKKLYLNRVGFKCTERESISLTKLESSPRKLHKDKRQENKHKTFLPVKGNTEKSNMLEFKLCPDILLKNTNSVEERKDVKPHPRKEQAPLQVSGIKSTKEDWLKFVATKKRTQKDSQERDNVNSRLSKRSFSADGFEMLQNPVKDSKEMFQTYKQMYLEKRSRSLGSSPVK

SEQ ID NO: 898274 - protein, 1534 aa, Homo sapiens; identical to SEQ ID NO: 898273

SEQ ID NO: 898275 - protein, 1457 aa, Homo sapiens
PPKLYRYSPQSFLPDSTIQKQNFIPHTSLQVKNSQLPNSVLTLPSRQTSAVPSQQYATQTDKRPPPPPYNCRYGSQPLQSTQHITKHLSMEVPQSREMLSSEIRTSFQQQWQNPNENVSTIGNFTNLKVNTNNKQPFNSPIRSSVDGVQTLAQTNEEKIMDSCNPTSNQVLDTSVAKEKLVRDIKTLVEIKQKFSELARKIKINKDLLMAAGCIKMTNTSYSEPAQNSKLSLKQTAKIQSGPQITPVMPENAERQTPTVVESAETNKTQCMLNSDIQEVNCRRFNQVDSVLPNPVYSEKRPMPDPSHDVKVLTSKTSAVEMTQAVLNTQLSSENVTKVEQNSPAVCETISVPKSMSTEEYKSKIQNENMLLLALLSQARKTQKTVLKDANQTIQDSKPDSCEMNPNTQMTGNQLNLKNMETPSTSNVSGRVLDNSFCSGQESSTKGMPAKSDSSCSMEVLATCLSLWKKQPSDTAKEKECDKLRTNTTAVGISKPANIHVKSPCSVVGNSNSQNKISNPSQQTALSMVMHNYESSGINITKGTELQIAVVSPLVLSEVKTLSVKGITPAVLPETVYPVIKEGSVCSLQNQLAENAKATAALKVDVSGPVASTATSTKIFPLTQKEKQNESTNGNSEVTPNVNQGKHNKLESAIHSPMNDQQISQESRNSTVVSSDTLQIDNICSLVEGDTSYNSQIAKIFSSLPLKMVEPQKPSLPNQQGIGSREPEKQLDNTTENKDFGFQKDKPVQCTDVSHKICDQSKSEPPLESSFNNLETNRVILEKSSLEHATEKSTANDTCSSAAIQEDIYPQEIDASSNYTPQDPARNEIHSDKAPVLYLHDQLSELLKEFPYGIEAVNTREGSVGQQTTYQTSEDQTADKTSSDSKDPADQIQITILSSEQMKEIFPEQDDQPYVVDKLAEPQKEEPITEVVSQCDLQAPAAGQSRDSVILDSEKDDIHCCALGWLSMVYEGVPQCQCNSIKNSSSEEEKQKEQCSPLDTNSCKQGERTSDRDVTVVQFKSLVNNPKTPPDGKSHFPELQDDSRKDTPKTKHKSLPRTEQELVAGQFSSKCDKLNPLQNHKRKKLRFHEVTFHSSNKMTASYEQASQETRQKKHVTQNSRPLKTKTAFLPNKDVYKKHSSLGQSLSPEKIKLKLKSVSFKQKRKLDQGNVLDMEVKKKKHDKQEQKGSVGATFKLGDSLSNPNERAIVKEKMVSNTKSVDTKASSSKFSRILTPKEYLQRQKHKEALSNKASKKICVKNVPCDSEHMRPSKLAVQVESCGKSNEKHSSGVQTSKESLNGLTSHGKNLKIHHSQESKTYNILRNVKEKVGGKQPDKIWIDKTKLDKLTNISNEAQFSQMPPQVKDQKKLYLNRVGFKCTERESISLTKLESSPRKLHKDKRQENKHKTFLPVKGNTEKSNMLEFKLCPDILLKNTNSVEERKDVKPHPRKEQAPLQGPV

SEQ ID NO: 898276 - protein, 1474 aa, Homo sapiens
PPKLYRYSPQSFLPDSTIQKQNFIPHTSLQVKNSQLPNSVLTLPSRQTSAVPSQQYATQTDKRPPPPPYNCRYGSQPLQSTQHITKHLSMEVPQSREMLSSEIRTSFQQQWQNPNENVSTIGNFTNLKVNTNNKQPFNSPIRSSVDGVQTLAQTNEEKIMDSCNPTSNQVLDTSVAKEKLVRDIKTLVEIKQKFSELARKIKINKDLLMAAGCIKMTNTSYSEPAQNSKLSLKQTAKIQSGPQITPVMPENAERQTPTVVESAETNKTQCMLNSDIQEVNCRRFNQVDSVLPNPVYSEKRPMPDPSHDVKVLTSKTSAVEMTQAVLNTQLSSENVTKVEQNSPAVCETISVPKSMSTEEYKSKIQNENMLLLALLSQARKTQKTVLKDANQTIQDSKPDSCEMNPNTQMTGNQLNLKNMETPSTSNVSGRVLDNSFCSGQESSTKGMPAKSDSSCSMEVLATCLSLWKKQPSDTAKEKECDKLRTNTTAVGISKPANIHVKSPCSVVGNSNSQNKISNPSQQTALSMVMHNYESSGINITKGTELQIAVVSPLVLSEVKTLSVKGITPAVLPETVYPVIKEGSVCSLQNQLAENAKATAALKVDVSGPVASTATSTKIFPLTQKEKQNESTNGNSEVTPNVNQGKHNKLESAIHSPMNDQQISQESRNSTVVSSDTLQIDNICSLVEGDTSYNSQIAKIFSSLPLKMVEPQKPSLPNQQGIGSREPEKQLDNTTENKDFGFQKDKPVQCTDVSHKICDQSKSEPPLESSFNNLETNRVILEKSSLEHATEKSTANDTCSSAAIQEDIYPQEIDASSNYTPQDPARNEIHSDKAPVLYLHDQLSELLKEFPYGIEAVNTREGSVGQQTTYQTSEDQTADKTSSDSKDPADQIQITILSSEQMKEIFPEQDDQPYVVDKLAEPQKEEPITEVVSQCDLQAPAAGQSRDSVILDSEKDDIHCCALGWLSMVYEGVPQCQCNSIKNSSSEEEKQKEQCSPLDTNSCKQGERTSDRDVTVVQFKSLVNNPKTPPDGKSHFPELQDDSRKDTPKTKHKSLPRTEQELVAGQFSSKCDKLNPLQNHKRKKLRFHEVTFHSSNKMTASYEQASQETRQKKHVTQNSRPLKTKTAFLPNKDVYKKHSSLGQSLSPEKIKLKLKSVSFKQKRKLDQGNVLDMEVKKKKHDKQEQKGSVGATFKLGDSLSNPNERAIVKEKMVSNTKSVDTKASSSKFSRILTPKEYLQRQKHKEALSNKASKKICVKNVPCDSEHMRPSKLAVQVESCGKSNEKHSSGVQTSKESLNGLTSHGKNLKIHHSQESKTYNILRNVKEKVGGKQPDKIWIDKTKLDKLTNISNEAQFSQMPPQVKDQKKLYLNRVGFKCTERESISLTKLESSPRKLHKDKRQENKHKTFLPVKANHTPTYHPRQQNTPTPSPSHLHAPGQHLVNPNNISNLHLYPPSPPTTPHRPPPVPPAPPSSP

SEQ ID NO: 898277 - protein, 156 aa, Homo sapiens
PPKLYRYSPQSFLPDSTIQKQNFIPHTSLQVKNSQLPNSVLTLPSRQTSAVPSQQYATQTDKRPPPPPYNCRYGSQPLQSTQHITKHLSMEVPQSREMLSSEIRTSFQQQWQNPNENVSTIGNFTNLKVNTNNKQPFNSPIRSSVDGVQIGGGANH

SEQ ID NO: 898278 - protein, 1534 aa, Homo sapiens; identical to SEQ ID NO: 898273

SEQ ID NO: 898279 - protein, 1622 aa, Homo sapiens
PPKLYRYSPQSFLPDSTIQKQNFIPHTSLQVKNSQLPNSVLTLPSRQTSAVPSQQYATQTDKRPPPPPYNCRYGSQPLQSTQHITKHLSMEVPQSREMLSSEIRTSFQQQWQNPNENVSTIGNFTNLKVNTNNKQPFNSPIRSSVDGVQTLAQTNEEKIMDSCNPTSNQVLDTSVAKEKLVRDIKTLVEIKQKFSELARKIKINKDLLMAAGCIKMTNTSYSEPAQNSKLSLKQTAKIQSGPQITPVMPENAERQTPTVVESAETNKTQCMLNSDIQEVNCRRFNQVDSVLPNPVYSEKRPMPDPSHDVKVLTSKTSAVEMTQAVLNTQLSSENVTKVEQNSPAVCETISVPKSMSTEEYKSKIQNENMLLLALLSQARKTQKTVLKDANQTIQDSKPDSCEMNPNTQMTGNQLNLKNMETPSTSNVSGRVLDNSFCSGQESSTKGMPAKSDSSCSMEVLATCLSLWKKQPSDTAKEKECDKLRTNTTAVGISKPANIHVKSPCSVVGNSNSQNKISNPSQQTALSMVMHNYESSGINITKGTELQIAVVSPLVLSEVKTLSVKGITPAVLPETVYPVIKEGSVCSLQNQLAENAKATAALKVDVSGPVASTATSTKIFPLTQKEKQNESTNGNSEVTPNVNQGKHNKLESAIHSPMNDQQISQESRNSTVVSSDTLQIDNICSLVEGDTSYNSQIAKIFSSLPLKMVEPQKPSLPNQQGIGSREPEKQLDNTTENKDFGFQKDKPVQCTDVSHKICDQSKSEPPLESSFNNLETNRVILEKSSLEHATEKSTANDTCSSAAIQEDIYPQEIDASSNYTPQDPARNEIHSDKAPVLYLHDQLSELLKEFPYGIEAVNTREGSVGQQTTYQTSEDQTADKTSSDSKDPADQIQITILSSEQMKEIFPEQDDQPYVVDKLAEPQKEEPITEVVSQCDLQAPAAGQSRDSVILDSEKDDIHCCALGWLSMVYEGVPQCQCNSIKNSSSEEEKQKEQCSPLDTNSCKQGERTSDRDVTVVQFKSLVNNPKTPPDGKSHFPELQDDSRKDTPKTKHKSLPRTEQELVAGQFSSKCDKLNPLQNHKRKKLRFHEVTFHSSNKMTASYEQASQETRQKKHVTQNSRPLKTKTAFLPNKDVYKKHSSLGQSLSPEKIKLKLKSVSFKQKRKLDQGNVLDMEVKKKKHDKQEQKGSVGATFKLGDSLSNPNERAIVKEKMVSNTKSVDTKASSSKFSRILTPKEYLQRQKHKEALSNKASKKICVKNVPCDSEHMRPSKLAVQVESCGKSNEKHSSGVQTSKESLNGLTSHGKNLKIHHSQESKTYNILRNVKEKVGGKQPDKIWIDKTKLDKLTNISNEAQFSQMPPQVKDQKKLYLNRVGFKCTERESISLTKLESSPRKLHKDKRQENKHKTFLPVKGNTEKSNMLEFKLCPDILLKNTNSVEERKDVKPHPRKEQAPLQVSGIKSTKEDWLKFVATKKRTQKDSQERDNVNSRLSKRSFSADGFEMLQNPVKDSKEMFQTYKQMYLEKRSRSLDGVLLCLPYRLECRGAVLAHCSLCLPGSGYSPASASRVAAINRKVGRAWWEAPVVPATREAEAGEWREPGRQSLQCAEIAPLHSSLGDRARLLL

SEQ ID NO: 898280 - protein, 862 aa, Homo sapiens
PPKLYRYSPQSFLPDSTIQKQNFIPHTSLQVKNSQLPNSVLTLPSRQTSAVPSQQYATQTDKRPPPPPYNCRYGSQPLQSTQHITKHLSMEVPQSREMLSSEIRTSFQQQWQNPNENVSTIGNFTNLKVNTNNKQPFNSPIRSSVDGVQTLAQTNEEKIMDSCNPTSNQVLDTSVAKEKLVRDIKTLVEIKQKFSELARKIKINKDLLMAAGCIKMTNTSYSEPAQNSKLSLKQTAKIQSGPQITPVMPENAERQTPTVVESAETNKTQCMLNSDIQEVNCRRFNQVDSVLPNPVYSEKRPMPDPSHDVKVLTSKTSAVEMTQAVLNTQLSSENVTKVEQNSPAVCETISVPKSMSTEEYKSKIQNENMLLLALLSQARKTQKTVLKDANQTIQDSKPDSCEMNPNTQMTGNQLNLKNMETPSTSNVSGRVLDNSFCSGQESSTKGMPAKSDSSCSMEVLATCLSLWKKQPSDTAKEKECDKLRTNTTAVGISKPANIHVKSPCSVVGNSNSQNKISNPSQQTALSMVMHNYESSGINITKGTELQIAVVSPLVLSEVKTLSVKGITPAVLPETVYPVIKEGSVCSLQNQLAENAKATAALKVDVSGPVASTATSTKIFPLTQKEKQNESTNGNSEVTPNVNQGKHNKLESAIHSPMNDQQISQESRNSTVVSSDTLQIDNICSLVEGDTSYNSQIAKIFSSLPLKMVEPQKPSLPNQQGIGSREPEKQLDNTTENKDFGFQKDKPVQCTDVSHKICDQSKSEPPLESSFNNLETNRVILEKSSLEHATEKSTANDTCSSAAIQEDIYPQEIDASSNYTPQDPARNEIHSDKAPVLYLHDQLSELLKEFPCTLTSSNLSVLS

SEQ ID NO: 898281 - protein, 203 aa, Homo sapiens
NSSVQASEMTVPQKPSVCHRPCKIEPVGIQRSYKPEHTGPALHNLCGQKPTIRDPYCRTQNLEIREVFSLAVSDYPQRILGGNAPQKPSSAEGNCLSIAMETGDAEDEYAREEELASMRAQIPSYSRFYESGSSLRAENQSTTLPGPGRNMPNSQMVNIRDMSDNVLYQNRNYHLTPRTSLHTASSTMYSNTNPLRSNFSPHF

SEQ ID NO: 898282 - protein, 190 aa, Homo sapiens
MAKATTIKEALARWEEKTGQRPSEAKEIKLYAQIPPIEKMDASLSMLANCEKLSLSTNCIEKIANLNGLKNLRILSLGRNNIKNLNGLEAVGDTLEELWISYNFIEKLKGIHIMKKLKILYMSNNLVKDWAEFVKLAELPCLEDLVFVGNPLEEKHSAENNWIEEATKRVPKLKKLDGTPVIKGDEEEDN

SEQ ID NO: 898283 - protein, 111 aa, Homo sapiens
SSGINAEGPLRPGLATRAVTVATAGMAKATTIKEALARWEEKTGQRPSEAKEIKLYAQIPPIEKMDASLSMLANCEKLSLSTNCIEKIANLNGLRGSRGHIRRTVDLLQFY

SEQ ID NO: 898284 - protein, 190 aa, Homo sapiens; identical to SEQ ID NO: 898282

SEQ ID NO: 898285 - protein, 399 aa, Homo sapiens
MSDILRELLCVSEKAANIARACRQQEALFQLLIEEKKEGEKNKKFAVDFKTLADVLVQEVIKQNMENKFPGLEKNIFGEESNEFTNDWGEKITLRLCSTEEETAELLSKVLNGNKVASEALARVVHQDVAFTDPTLDSTEINVPQDILGIWVDPIDSTYQYIKGSADIKSNQGIFPCGLQCVTILIGVYDIQTGVPLMGVINQPFVSRDPNTLRWKGQCYWGLSYMGTNMHSLQLTISRRNGSETHTGNTGSEAAFSPSFSAVISTSEKETIKAALSRVCGDRIFGAAGAGYKSLCVVQGLVDIYIFSEDTTFKWDSCAAHAILRAMGGGIVDLKECLERNPETGLDLPQLVYHVENEGAAGVDRWANKGGLIAYRSRKRLETFLSLLVQNLAPAETHT

SEQ ID NO: 898286 - protein, 399 aa, Homo sapiens; identical to SEQ ID NO: 898285

SEQ ID NO: 898287 - protein, 399 aa, Homo sapiens; identical to SEQ ID NO: 898285

SEQ ID NO: 898288 - protein, 399 aa, Homo sapiens; identical to SEQ ID NO: 898285

SEQ ID NO: 898289 - protein, 202 aa, Homo sapiens
MGVINQPFVSRDPNTLRWKGQCYWGLSYMGTNMHSLQLTISRRNGSETHTGNTGSEAAFSPSFSAVISTSEKETIKAALSRVCGDRIFGAAGAGYKSLCVVQGLVDIYIFSEDTTFKWDSCAAHAILRAMGGGIVDLKECLERNPETGLDLPQLVYHVENEGAAGVDRWANKGGLIAYRSRKRLETFLSLLVQNLAPAETHT

SEQ ID NO: 898290 - protein, 291 aa, Homo sapiens
MSDILRELLCVSEKAANIARACRQQEALFQLLIEEKKEGEKNKKFAVDFKTLADVLVQEVIKQNMENKFPGLEKNIFGEESNEFTNDWGEKITLRLCSTEEETAELLSKVLNGNKVASEALARVVHQDVAFTDPTLDSTEINVPQDILGIWVDPIDSTYQYIKGSADIKSNQGIFPCGLQCVTILIGVYDIQTGVPLMGVINQPFVSRDPNTLRWKGQCYWGLSYMGTNMHSLQLTISRRNGSETHTGDPHAFTTAHHLYQETAVKHTLETPALGENAASEIHTPRPVPAC

SEQ ID NO: 898291 - protein, 399 aa, Homo sapiens; identical to SEQ ID NO: 898285

SEQ ID NO: 898292 - protein, 399 aa, Homo sapiens; identical to SEQ ID NO: 898285

SEQ ID NO: 898293 - protein, 399 aa, Homo sapiens; identical to SEQ ID NO: 898285

SEQ ID NO: 898294 - protein, 399 aa, Homo sapiens; identical to SEQ ID NO: 898285

SEQ ID NO: 898295 - protein, 385 aa, Homo sapiens
MSDILRELLCVSEKAANIARACRQQEALFQLLIEEKKEGEKNKKFAVDFKTLADVLVQEVIKQNMENKFPGLEKNIFGEESNEFTNDWGEKITLRLCSTEEETAELLSKVLNGNKVASEALARVVHQDVAFTDPTLDSTEINVPQDILGIWVDPIDSTYQYIKGSADIKSNQGIFPCGLQCVTILIGVYDIQTGVPLMGVINQPFVSRDPNTLRWKGQCYWGLSYMGTNMHSLQLTISRRNGSETHTGNTGSEAAFSPSFSAVISTSEKETIKAALSRVCGDRIFGAAGAGYKSLCVVQGLVDIYIFSEDTTFKWDSCAAHAILRAMGGGIVDLKECLERNPETGLDLPQLVYHVENEGAAGVDRYLSLPVLETVSVSVSCAVCF

SEQ ID NO: 898296 - protein, 276 aa, Homo sapiens
MDRLGSFSNDPSDKPPCRGCSSYLMEPYIKCAECGPPPFFLCLQCFTRGFEYKKHQSDHTYEIMTSDFPVLDPSWTAQEEMALLEAVMDCGFGNWQDVANQMCTKTKEECEKHYMKHFINNPLFASTLLNLKQAEEAKTADTAIPFHSTDDPPRPTFDSLLSRDMAGYMPARADFIEEFDNYAEWDLRDIDFVEDDSDILHALKMAVVDIYHSRLKERQRRKKIIRDHGLINLRKFQLMERRYPKEVQDLYETMRRFARIVGPVEHDKFIESHACR

SEQ ID NO: 898297 - protein, 443 aa, Homo sapiens
MDRLGSFSNDPSDKPPCRGCSSYLMEPYIKCAECGPPPFFLCLQCFTRGFEYKKHQSDHTYEIMTSDFPVLDPSWTAQEEMALLEAVMDCGFGNWQDVANQMCTKTKEECEKHYMKHFINNPLFASTLLNLKQAEEAKTADTAIPFHSTDDPPRPTFDSLLSRDMAGYMPARADFIEEFDNYAEWDLRDIDFVEDDSDILHALKMAVVDIYHSRLKERQRRKKIIRDHGLINLRKFQLMERRYPKEVQDLYETMRRFARIVGPVEHDKFIESHALEFELRREIKRLQEYRTAGITNFCSARTYDHLKKTREEERLKRTMLSEVLQYIQDSSACQQWLRRQADIDSGLSPSIPMASNSGRRSAPPLNLTGLPGTEKLNEKEKELCQMVRLVPGAYLEYKSALLNECNKQGGLRLAQARALIKIDVNKTRKIYDFLIREGYITKG

SEQ ID NO: 898298 - protein, 443 aa, Homo sapiens; identical to SEQ ID NO: 898297

SEQ ID NO: 898299 - protein, 443 aa, Homo sapiens; identical to SEQ ID NO: 898297

SEQ ID NO: 898300 - protein, 342 aa, Homo sapiens
MCTKTKEECEKHYMKHFINNPLFASTLLNLKQAEEAKTADTAIPFHSTDDPPRPTFDSLLSRDMAGYMPARADFIEEFDNYAEWDLRDIDFVEDDSDILHALKMAVVDIYHSRLKERQRRKKIIRDHGLINLRKFQLMERRYPKEVQDLYETMRRFARIVGPVEHDKFIESHALEFELRREIKRLQEYRTAGITNFCSARTYDHLKKTREEERLKRTMLSEVLQYIQDSSACQQWLRRQADIDSGLSPSIPMASNSGRRSAPPLNLTGLPGTEKLNEKEKELCQMVRLVPGAYLEYKSALLNECNKQGGLRLAQARALIKIDVNKTRKIYDFLIREGYITKG

SEQ ID NO: 898301 - protein, 158 aa, Homo sapiens
MDRLGSFSNDPSDKPPCRGCSSYLMEPYIKCAECGPPPFFLCLQCFTRGFEYKKHQSDHTYEIMTSDFPVLDPSWTAQEEMALLEAVMDCGFGNWQDVANQMCTKTKEECEKHYMKHFINNPLFASTLLNLKQAEEAKTADTAIPFHCKCLPILIRYT

SEQ ID NO: 898302 - protein, 443 aa, Homo sapiens; identical to SEQ ID NO: 898297

SEQ ID NO: 898303 - protein, 443 aa, Homo sapiens; identical to SEQ ID NO: 898297

SEQ ID NO: 898304 - protein, 452 aa, Homo sapiens
MDRLGSFSNDPSDKPPCRGCSSYLMEPYIKCAECGPPPFFLCLQCFTRGFEYKKHQSDHTYEIMTSDFPVLDPSWTAQEEMALLEAVMDCGFGNWQDVANQMCTKTKEECEKHYMKHFINNPLFASTLLNLKQAEEAKTADTAIPFHSTDDPPRPTFDSLLSRDMAGYMPARADFIEEFDNYAEWDLRDIDFVEDDSDILHALKMAVVDIYHSRLKERQRRKKIIRDHGLINLRKFQLMERRYPKEVQDLYETMRRFARIVGPVEHDKFIESHALEFELRREIKRLQEYRTAGITNFCSARTYDHLKKTREEERLKRTMLSEVLQYIQDSSACQQWLRRQADIDSGLSPSIPMASNSGRRSAPPLNLTGLPGTEKLNEKEKELCQMVRLVPGAYLEYKSALLNECNKQGGLRLAQARALIKIDVNKTRKIYDFLIREGYITKELIKMFCYLI

SEQ ID NO: 898305 - protein, 256 aa, Homo sapiens
MDRLGSFSNDPSDKPPCRGCSSYLMEPYIKCAECGPPPFFLCLQCFTRGFEYKKHQSDHTYEIMTSDFPVLDPSWTAQEEMALLEAVMDCGFGNWQDVANQMCTKTKEECEKHYMKHFINNPLFASTLLNLKQAEEAKTADTAIPFHSTDDPPRPTFDSLLSRDMAGYMPARADFIEEFDNYAEWDLRDIDFVEDDSDILHALKMAVVDIYHSRLKERQRRKKKKKKQKKTFNVWLCTLQSACLICSSLLRRWHRI

SEQ ID NO: 898306 - protein, 63 aa, Homo sapiens
MARTRLDHSMSVETCPPTSSLSVVMVHFRCKLDWIKDSLKCQASEPKLSHHIPCDLHVHIQMA

SEQ ID NO: 898307 - protein, 423 aa, Homo sapiens [sequence omitted]

SEQ ID NO: 898308 - protein, 338 aa, Homo sapiens
MWSLISLLRASFCECPWTNTWKWRTSHQILTGSYDKTSRIWSLEGKSIMTIVGHTDVVKDVAWVKKDSLSCLLLSASMDQTILLWEWNVERNKVKALHCCRGHAGSVDSIAVDGSGTKFCSGSWDKMLKIWSTVPTDEEDEMEESTNRPRKKQKTEQLGLTRTPIVTLSGHMEAVSSVLWSDAEEICSASWDHTIRVWDVESGSLKSTLTGNKVFNCISYSPLCKRLASGSTDRHIRLWDPRTKDGSLVSLSLTSHTGWVTSVKWSPTHEQQLISGSLDNIVKLWDTRSCKAPLYDLAAHEDKVLSVDWTDTGLLLSGGADNKLYSYRYSPTTSHVGA

SEQ ID NO: 898309 - protein, 374 aa, Homo sapiens
MAQLQTRFYTDNKKYAVDDVPFSIPAASEIADLSNIINKLLKDKNEFHKHVEFDFLIKGQFLRMPLDKHMEMENISSEEVVEIEYVEKYTAPQPEQCMFHDDWISSIKGAEEWILTGSYDKTSRIWSLEGKSIMTIVGHTDVVKDVAWVKKDSLSCLLLSASMDQTILLWEWNVERNKVKALHCCRGHAGSVDSIAVDGSGTKFCSGSWDKMLKIWSTVPTDEEDEMEESTNRPRKKQKTEQLGLTRTPIVTLSGHMEAVSSVLWSDAEEICSASWDHTIRVWDVESGSLKSTLTGNKVFNCISYSPLCKRLASGSTDRHIRLWDPRTKDGSLVSLSLTSHTGWVTSVKWSPTHEQQLISGSLDNIVKLWDTRR

SEQ ID NO: 898310 - protein, 206 aa, Homo sapiens
MAQLQTRFYTDNKKYAVDDVPFSIPAASEIADLSNIINKLLKDKNEFHKHVEFDFLIKGQFLRMPLDKHMEMENISSEEVVEIEYVEKYTAPQPEQCMFHDDWISSIKGAEEWILTGSYDKTSRIWSLEGKSIMTIVGHTDVVKDVAWVKKDSLSCLLLSASMDQTILLWEWNVERNKVKALHCCRGHAGSVDSIAVDGSGTKVSS

SEQ ID NO: 898311 - protein, 527 aa, Homo sapiens
MAQLQTRFYTDNKKYAVDDVPFSIPAASEIADLSNIINKLLKDKNEFHKHVEFDFLIKGQFLRMPLDKHMEMENISSEEVVEIEYVEKYTAPQPEQCMFHDDWISSIKGAEEWILTGSYDKTSRIWSLEGKSIMTIVGHTDVVKDVAWVKKDSLSCLLLSASMDQTILLWEWNVERNKVKALHCCRGHAGSVDSIAVDGSGTKFCSGSWDKMLKIWSTVPTDEEDEMEESTNRPRKKQKTEQLGLTRTPIVTLSGHMEAVSSVLWSDAEEICSASWDHTIRVWDVESGSLKSTLTGNKVFNCISYSPLCKRLASGSTDRHIRLWDPRTKDGSLVSLSLTSHTGWVTSVKWSPTHEQQLISGSLDNIVKLWDTRSCKAPLYDLAAHEDKVLSVDWTDTGLLLSGGARPKIGFLPDIHLPLSRWGTDTGTLTLTISASFPQAQSGYRHLYVPCTSMPKAPFRMYSLSLTPPTATIHFPLSDSPHPARHTPPADHPPTHHQGYVHHNQRPDTTAISTPYAPQLTPRPSCS

SEQ ID NO: 898312 - protein, 421 aa, Homo sapiens
MRKLILSVSSSRYAVDDVPFSIPAASEIADLSNIINKLLKDKNEFHKHVEFDFLIKGQFLRMPLDKHMEMENISSEEVVEIEYVEKYTAPQPEQCMFHDDWISSIKGAEEWILTGSYDKTSRIWSLEGKSIMTIVGHTDVVKDVAWVKKDSLSCLLLSASMDQTILLWEWNVERNKVKALHCCRGHAGSVDSIAVDGSGTKFCSGSWDKMLKIWSTVPTDEEDEMEESTNRPRKKQKTEQLGLTRTPIVTLSGHMEAVSSVLWSDAEEICSASWDHTIRVWDVESGSLKSTLTGNKVFNCISYSPLCKRLASGSTDRHIRLWDPRTKDGSLVSLSLTSHTGWVTSVKWSPTHEQQLISGSLDNIVKLWDTRSCKAPLYDLAAHEDKVLSVDWTDTGLLLSGGADNKLYSYRYSPTTSHVGA

SEQ ID NO: 898313 - protein, 212 aa, Homo sapiens
MLKIWSTVPTDEEDEMEESTNRPRKKQKTEQLGLTRTPIVTLSGHMEAVSSVLWSDAEEICSASWDHTIRVWDVESGSLKSTLTGNKVFNCISYSPLCKRLASGSTDRHIRLWDPRTKDGSLVSLSLTSHTGWVTSVKWSPTHEQQLISGSLDNIVKLWDTRSCKAPLYDLAAHEDKVLSVDWTDTGLLLSGGADNKLYSYRYSPTTSHVGA

SEQ ID NO: 898314 - protein, 144 aa, Homo sapiens
MIKFFLMVNKQGQTRLSKYYEHVDINKRTLLETEVIKSCLSRSNEQCSFIEYKDFKLIYRQYAALFIVVGVNDTENEMAIYEFIHNFVEVLDEYFSRVSELDIMFNLDKVHIILDEMVLNGCIVETNRARILAPLLILDKMSES

SEQ ID NO: 898315 - protein, 144 aa, Homo sapiens; identical to SEQ ID NO: 898314

SEQ ID NO: 898316 - protein, 144 aa, Homo sapiens; identical to SEQ ID NO: 898314

SEQ ID NO: 898317 - protein, 103 aa, Homo sapiens
MIKFFLMVNKQGQTRLSKYYEHVDINKRTLLETEVIKSCLSRSNEQCSFIEYKDFKLIYRQYAALFIVVGVNDTENEMAIYEFIHNFVEVLDEYFSRVSELVN

SEQ ID NO: 898318 - protein, 77 aa, Homo sapiens
GPEKGGKMPILVPLFGLFISRGTNKSKLSVERPQTGLSHREVLGPKPRRPGKAASGGAPADAILKAKMAAPEEARTA

SEQ ID NO: 898319 - protein, 104 aa, Homo sapiens
MIKFFLMVNKQGQTRLSKYYEHVDINKRTLLETEVIKSCLSRSNEQCSFIEYKDFKLIYRQYAALFIVVGVNDTENEMAIYEFIHNFVEVLDEYFSRVSELSNG

SEQ ID NO: 898320 - protein, 295 aa, Homo sapiens
PRSAPIAAPRDHPPPAPGSLQARSGSRYLEADSGATEPGQPRQRRGARQGRPADPETPSQRAPRAGSLAGGGGGGHGGRARAPLAQRSMPVWCCRCSLAGHFRNYSDTETEGEIFNSLVQYFGDNLGRKVKAMPLVEETSLLEDSSVTFPVVIIGNGPSGICLSYMLSGYRPYLSSEAIHPNTILNSKLEEARHLSIVDQDLEYLSEGLEGRSSNPVAVLFDTLLHPDADFGYDYPSVLHWKLEQHHYIPHVVLGKGPPGGAWHNMEGSMLTISFGSWMELPGLKFKDWVSSKRR

SEQ ID NO: 898321 - protein, 505 aa, Homo sapiens
MPLVEETSLLEDSSVTFPVVIIGNGPSGICLSYMLSGYRPYLSSEAIHPNTILNSKLEEARHLSIVDQDLEYLSEGLEGRSSNPVAVLFDTLLHPDADFGYDYPSVLHWKLEQHHYIPHVVLGKGPPGGAWHNMEGSMLTISFGSWMELPGLKFKDWVSSKRRSLKGDRVMPEEIARYYKHYVKVMGLQKNFRENTYITSVSRLYRDQDDDDIQDRDISTKHLQIEKSNFIKRNWEIRGYQRIADGSHVPFCLFAENVALATGTLDSPAHLEIEGEDFPFVFHSMPEFGAAINKGKLRGKVDPVLIVGSGLTAADAVLCAYNSNIPVIHVFRRRVTDPSLIFKQLPKKLYPEYHKVYHMMCTQSYSVDSNLLSDYTSFPEHRVLSFKSDMKCVLQSVSGLKKIFKLSAAVVLIGSHPNLSFLKDQGCYLGHKSSQPITCKGNPVEIDTYTYECIKEANLFALGPLVGDNFVRFLKGGALGVTRCLATRQKKKHLFVERGGGDGIA

SEQ ID NO: 898322 - protein, 505 aa, Homo sapiens; identical to SEQ ID NO: 898321

SEQ ID NO: 898323 - protein, 637 aa, Homo sapiens
PRSAPIAAPRDHPPPAPGSLQARSGSRYLEADSGATEPGQPRQRRGARQGRPADPETPSQRAPRAGSLAGGGGGGHGGRARAPLAQRSMPVWCCRCSLAGHFRNYSDTETEGEIFNSLVQYFGDNLGRKVKAMPLVEETSLLEDSSVTFPVVIIGNGPSGICLSYMLSGYRPYLSSEAIHPNTILNSKLEEARHLSIVDQDLEYLSEGLEGRSSNPVAVLFDTLLHPDADFGYDYPSVLHWKLEQHHYIPHVVLGKGPPGGAWHNMEGSMLTISFGSWMELPGLKFKDWVSSKRRSLKGDRVMPEEIARYYKHYVKVMGLQKNFRENTYITSVSRLYRDQDDDDIQDRDISTKHLQIEKSNFIKRNWEIRGYQRIADGSHVPFCLFAENVALATGTLDSPAHLEIEGEDFPFVFHSMPEFGAAINKGKLRGKVDPVLIVGSGLTAADAVLCAYNSNIPVIHVFRRRVTDPSLIFKQLPKKLYPEYHKVYHMMCTQSYSVDSNLLSDYTSFPEHRVLSFKSDMKCVLQSVSGLKKIFKLSAAVVLIGSHPNLSFLKDQGCYLGHKSSQPITCKGNPVEIDTYTYECIKEANLFALGPLVGDNFVRFLKGGALGVTRCLATRQKKKHLFVERGGGDGIA

SEQ ID NO: 898324 - protein, 637 aa, Homo sapiens; identical to SEQ ID NO: 898323

SEQ ID NO: 898325 - protein, 258 aa, Homo sapiens
SSVGTNRQCLEWTKNHEFHISLKPELGNGLTLTLLEKMPEFGAAINKGKLRGKVDPVLIVGSGLTAADAVLCAYNSNIPVIHVFRRRVTDPSLIFKQLPKKLYPEYHKVYHMMCTQSYSVDSNLLSDYTSFPEHRVLSFKSDMKCVLQSVSGLKKIFKLSAAVVLIGSHPNLSFLKDQGCYLGHKSSQPITCKGNPVEIDTYTYECIKEANLFALGPLVGDNFVRFLKGGALGVTRCLATRQKKKHLFVERGGGDGIA

SEQ ID NO: 898326 - protein, 74 aa, Homo sapiens
MHPAKTGLTDSLAFGGGLPGAWGKLATFNSWYLFNSVAFQNADATRRTCPQLTTYGCHGSGQLSKQVPVVSSAV

SEQ ID NO: 898327 - protein, 74 aa, Homo sapiens; identical to SEQ ID NO: 898326

SEQ ID NO: 898328 - protein, 74 aa, Homo sapiens; identical to SEQ ID NO: 898326

SEQ ID NO: 898329 - protein, 74 aa, Homo sapiens; identical to SEQ ID NO: 898326

SEQ ID NO: 898330 - protein, 74 aa, Homo sapiens; identical to SEQ ID NO: 898326

SEQ ID NO: 898331 - protein, 74 aa, Homo sapiens; identical to SEQ ID NO: 898326

SEQ ID NO: 898332 - protein, 161 aa, Homo sapiens
MARVPPTGQFRFRAPHQPAQPFKFTISESCDRIKEEFQFLQAQYHSLKLECEKLASEKTEMQRHYVMYYEMSYGLNIEMHKQAEIVKRLNAICAQVIPFLSQEHQQQVVQAVERAKQVTMAELNAIIGVRGLSILALILVFVISSLALSFYILFRQRGKKQ

SEQ ID NO: 898333 - protein, 133 aa, Homo sapiens
MLSLANVLSLANVLSLANVLSQPPVQTLVRQFQGHTDGASCIDISNDGTKLWTGGLDNTVRSWDLREGRQLQQHDFTSQIFSLGYCPTGEWLAVGMENSNVEVLHVTKPDKYQLHLHESCVLSLKFAHCGNGL

SEQ ID NO: 898334 - protein, 773 aa, Homo sapiens
MIRDLSKMYPQTRHPAPHQPAQPFKFTISESCDRIKEEFQFLQAQYHSLKLECEKLASEKTEMQRHYVMYYEMSYGLNIEMHKQAEIVKRLNAICAQVIPFLSQEHQQQVVQAVERAKQVTMAELNAIIGQQLQAQHLSHGHGLPVPLTPHPSGLQPPAIPPIGSSAGLLALSSALGGQSHLPIKDEKKHHDNDHQRDRDSIKSSSVSPSASFRGAEKHRNSADYSSESKKQKTEEKEIAARYDSDGEKSDDNLVVDVSNEDPSSPRGSPAHSPRENGLDKTRLLKKDAPISPASIASSSSTPSSKSKELSLNEKSTTPVSKSNTPTPRTDAPTPGSNSTPGLRPVPGKPPGVDPLASSLRTPMAVPCPYPTPFGIVPHAGMNGELTSPGAAYAGLHNISPQMSAAAAAAAAAAAYGRSPVVGFDPHHHMRVPAIPPNLTGIPGGKPAYSFHVSADGQMQPVPFPPDALIGPGIPRHARQINTLNHGEVVCAVTISNPTRHVYTGGKGCVKVWDISHPGNKSPVSQLDCLNRDNYIRSCRLLPDGRTLIVGGEASTLSIWDLAAPTPRIKAELTSSAPACYALAISPDSKVCFSCCSDGNIAVWDLHNQTLVRQFQGHTDGASCIDISNDGTKLWTGGLDNTVRSWDLREGRQLQQHDFTSQIFSLGYCPTGEWLAVGMENSNVEVLHVTKPDKYQLHLHESCVLSLKFAHCGKWFVSTGKDNLLNAWRTPYGASIFQSKESSSVLSCDISVDDKYIVTGSGDKKATVYEVIY

SEQ ID NO: 898335 - protein, 754 aa, Homo sapiens
MIRDLSKMYPQTRHPAPHQPAQPFKFTISESCDRIKEEFQFLQAQYHSLKLECEKLASEKTEMQRHYVMYYEMSYGLNIEMHKQAEIVKRLNAICAQVIPFLSQEHQQQVVQAVERAKQVTMAELNAIIGQQLQAQHLSHGHGLPVPLTPHPSGLQPPAIPPIGSSAGLLALSSALGGQSHLPIKDEKKHHDNDHQRDRDSIKSSSVSPSASFRGAEKHRNSADYSSESKKQKTEEKEIAARYDSDGEKSDDNLVVDVSNEKRDMGKLSETRLSEDEQCTLGLQRWFCRLWFMNEKSTTPVSKSNTPTPRTDAPTPGSNSTPGLRPVPGKPPGVDPLASSLRTPMAVPCPYPTPFGIVPHAGMNGELTSPGAAYAGLHNISPQMSAAAAAAAAAAAYGRSPVVGFDPHHHMRVPAIPPNLTGIPGGKPAYSFHVSADGQMQPVPFPPDALIGPGIPRHARQINTLNHGEVVCAVTISNPTRHVYTGGKGCVKVWDISHPGNKSPVSQLDCLNRDNYIRSCRLLPDGRTLIVGGEASTLSIWDLAAPTPRIKAELTSSAPACYALAISPDSKVCFSCCSDGNIAVWDLHNQTLVRQFQGHTDGASCIDISNDGTKLWTGGLDNTVRSWDLREGRQLQQHDFTSQIFSLGYCPTGEWLAVGMENSNVEVLHVTKPDKYQLHLHESCVLSLKFAHCGKWFVSTGKDNLLNAWRTPYGASIFQSKESSSVLSCDISVDDKYIVTGSGDKKATVYEVIY

SEQ ID NO: 898336 - protein, 798 aa, Homo sapiens
MIRDLSKMYPQTRHPAPHQPAQPFKFTISESCDRIKEEFQFLQAQYHSLKLECEKLASEKTEMQRHYVMYYEMSYGLNIEMHKQAEIVKRLNAICAQVIPFLSQEHQQQVVQAVERAKQVTMAELNAIIGQQLQAQHLSHGHGLPVPLTPHPSGLQPPAIPPIGSSAGLLALSSALGGQSHLPIKDEKKHHDNDHQRDRDSIKSSSVSPSASFRGAEKHRNSADYSSESKKQKTEEKEIAARYDSDGEKSDDNLVVDVSNEDPSSPRGSPAHSPRENGLDKTRLLKKDAPISPASIASSSSTPSSKSKELSLNEKSTTPVSKSNTPTPRTDAPTPGSNSTPGLRPVPGKPPGVDPLASSLRTPMAVPCPYPTPFGIVPHAGMNGELTSPGAAYAGLHNISPQMSAAAAAAAAAAAYGRSPVVGFDPHHHMRVPAIPPNLTGIPGGKPTKCFYHLRAFPGNELEMELPRDTHRAYSFHVSADGQMQPVPFPPDALIGPGIPRHARQINTLNHGEVVCAVTISNPTRHVYTGGKGCVKVWDISHPGNKSPVSQLDCLNRDNYIRSCRLLPDGRTLIVGGEASTLSIWDLAAPTPRIKAELTSSAPACYALAISPDSKVCFSCCSDGNIAVWDLHNQTLVRQFQGHTDGASCIDISNDGTKLWTGGLDNTVRSWDLREGRQLQQHDFTSQIFSLGYCPTGEWLAVGMENSNVEVLHVTKPDKYQLHLHESCVLSLKFAHCGKWFVSTGKDNLLNAWRTPYGASIFQSKESSSVLSCDISVDDKYIVTGSGDKKATVYEVIY

SEQ ID NO: 898337 - protein, 773 aa, Homo sapiens; identical to SEQ ID NO: 898334

SEQ ID NO: 898338 - protein, 786 aa, Homo sapiens
MIRDLSKMYPQTRHPAPHQPAQPFKFTISESCDRIKEEFQFLQAQYHSLKLECEKLASEKTEMQRHYVMYYEMSYGLNIEMHKQAEIVKRLNAICAQVIPFLSQEHQQQVVQAVERAKQVTMAELNAIIGQQLQAQHLSHGHGLPVPLTPHPSGLQPPAIPPIGSSAGLLALSSALGGQSHLPIKDEKKHHDNDHQRDRDSIKSSSVSPSASFRGAEKHRNSADYSSESKKQKTEEKEIAARYDSDGEKSDDNLVVDVSNEDPSSPRGSPAHSPRENGLDKTRLLKKDAPISPASIASSSSTPSSKSKELSLNEKSTTPVSKSNTPTPRTDAPTPGSNSTPGLRPVPGKPPGVDPLASSLRTPMAVPCPYPTPFGIVPHAGMNGELTSPGAAYAGLHNISPQMSAAAAAAAAAAAYGRSPVVGFDPHHHMRVPAIPPNLTGIPGGKPAYSFHVSADGQMQPVPFPPDALIGPGIPRHARQINTLNHGEVVCAVTISNPTRHVYTGGKGCVKVWDISHPGNKSPVSQLDCLNRDNYIRSCRLLPDGRTLIVGGEASTLSIWDLAAPTPRIKAELTSSAPACYALAISPDSKVCFSCCSDGNIAVWDLHNQTLVRQFQGHTDGASCIDISNDGTKLWTGGLDNTVRSWDLLLPMEITSGGIDPHHHMRVPAARLHLPIFSLGYCPTGEWLAVGMENSNVEVLHVTKPDKYQLHLHESCVLSLKFAHCGKWFVSTGKDNLLNAWRTPYGASIFQSKESSSVLSCDISVDDKYIVTGSGDKKATVYEVIY

SEQ ID NO: 898339 - protein, 748 aa, Homo sapiens
MIRDLSKMYPQTRHPAPHQPAQPFKFTISESCDRIKEEFQFLQAQYHSLKLECEKLASEKTEMQRHYVMYYEMSYGLNIEMHKQAEIVKRLNAICAQVIPFLSQEQQLQAQHLSHGHGLPVPLTPHPSGLQPPAIPPIGSSAGLLALSSALGGQSHLPIKDEKKHHDNDHQRDRDSIKSSSVSPSASFRGAEKHRNSADYSSESKKQKTEEKEIAARYDSDGEKSDDNLVVDVSNEDPSSPRGSPAHSPRENGLDKTRLLKKDAPISPASIASSSSTPSSKSKELSLNEKSTTPVSKSNTPTPRTDAPTPGSNSTPGLRPVPGKPPGVDPLASSLRTPMAVPCPYPTPFGIVPHAGMNGELTSPGAAYAGLHNISPQMSAAAAAAAAAAAYGRSPVVGFDPHHHMRVPAIPPNLTGIPGGKPAYSFHVSADGQMQPVPFPPDALIGPGIPRHARQINTLNHGEVVCAVTISNPTRHVYTGGKGCVKVWDISHPGNKSPVSQLDCLNRDNYIRSCRLLPDGRTLIVGGEASTLSIWDLAAPTPRIKAELTSSAPACYALAISPDSKVCFSCCSDGNIAVWDLHNQTLVRQFQGHTDGASCIDISNDGTKLWTGGLDNTVRSWDLREGRQLQQHDFTSQIFSLGYCPTGEWLAVGMENSNVEVLHVTKPDKYQLHLHESCVLSLKFAHCGKWFVSTGKDNLLNAWRTPYGASIFQSKESSSVLSCDISVDDKYIVTGSGDKKATVYEVIY

SEQ ID NO: 898340 - protein, 758 aa, Homo sapiens
MIRDLSKMYPQTRHPAPHQPAQPFKFTISESCDRIKEEFQFLQAQYHSLKLECEKLASEKTEMQRHYVMAEIVKRLNAICAQVIPFLSQEHQQQVVQAVERAKQVTMAELNAIIGQQLQAQHLSHGHGLPVPLTPHPSGLQPPAIPPIGSSAGLLALSSALGGQSHLPIKDEKKHHDNDHQRDRDSIKSSSVSPSASFRGAEKHRNSADYSSESKKQKTEEKEIAARYDSDGEKSDDNLVVDVSNEDPSSPRGSPAHSPRENGLDKTRLLKKDAPISPASIASSSSTPSSKSKELSLNEKSTTPVSKSNTPTPRTDAPTPGSNSTPGLRPVPGKPPGVDPLASSLRTPMAVPCPYPTPFGIVPHAGMNGELTSPGAAYAGLHNISPQMSAAAAAAAAAAAYGRSPVVGFDPHHHMRVPAIPPNLTGIPGGKPAYSFHVSADGQMQPVPFPPDALIGPGIPRHARQINTLNHGEVVCAVTISNPTRHVYTGGKGCVKVWDISHPGNKSPVSQLDCLNRDNYIRSCRLLPDGRTLIVGGEASTLSIWDLAAPTPRIKAELTSSAPACYALAISPDSKVCFSCCSDGNIAVWDLHNQTLVRQFQGHTDGASCIDISNDGTKLWTGGLDNTVRSWDLREGRQLQQHDFTSQIFSLGYCPTGEWLAVGMENSNVEVLHVTKPDKYQLHLHESCVLSLKFAHCGKWFVSTGKDNLLNAWRTPYGASIFQSKESSSVLSCDISVDDKYIVTGSGDKKATVYEVIY

SEQ ID NO: 898341 - protein, 752 aa, Homo sapiens
MIRDLSKMYPQTRHPAPHQPAQPFKFTISESCDRIKEEFQFLQAQYHSLKLECEKLASEKTEMQRHYVMYYEMSYGLNIEMHKQHQQQVVQAVERAKQVTMAELNAIIGQQLQAQHLSHGHGLPVPLTPHPSGLQPPAIPPIGSSAGLLALSSALGGQSHLPIKDEKKHHDNDHQRDRDSIKSSSVSPSASFRGAEKHRNSADYSSESKKQKTEEKEIAARYDSDGEKSDDNLVVDVSNEDPSSPRGSPAHSPRENGLDKTRLLKKDAPISPASIASSSSTPSSKSKELSLNEKSTTPVSKSNTPTPRTDAPTPGSNSTPGLRPVPGKPPGVDPLASSLRTPMAVPCPYPTPFGIVPHAGMNGELTSPGAAYAGLHNISPQMSAAAAAAAAAAAYGRSPVVGFDPHHHMRVPAIPPNLTGIPGGKPAYSFHVSADGQMQPVPFPPDALIGPGIPRHARQINTLNHGEVVCAVTISNPTRHVYTGGKGCVKVWDISHPGNKSPVSQLDCLNRDNYIRSCRLLPDGRTLIVGGEASTLSIWDLAAPTPRIKAELTSSAPACYALAISPDSKVCFSCCSDGNIAVWDLHNQTLVRQFQGHTDGASCIDISNDGTKLWTGGLDNTVRSWDLREGRQLQQHDFTSQIFSLGYCPTGEWLAVGMENSNVEVLHVTKPDKYQLHLHESCVLSLKFAHCGKWFVSTGKDNLLNAWRTPYGASIFQSKESSSVLSCDISVDDKYIVTGSGDKKATVYEVIY

SEQ ID NO: 898342 - protein, 366 aa, Homo sapiens
MIRDLSKMYPQTRHPAPHQPAQPFKFTISESCDRIKEEFQFLQAQYHSLKLECEKLASEKTEMQRHYVMYYEMSYGLNIEMHKQAEIVKRLNAICAQVIPFLSQEHQQQVVQAVERAKQVTMAELNAIIGQQLQAQHLSHGHGLPVPLTPHPSGLQPPAIPPIGSSAGLLALSSALGGQSHLPIKDEKKHHDNDHQRDRDSIKSSSVSPSASFRGAEKHRNSADYSSESKKQKTEEKEIAARYDSDGEKSDDNLVVDVSNEDPSSPRGSPAHSPRENGLDKTRLLKKDAPISPASIASSSSTPSSKSKELSLKRDMGKLSETRLSEDEQCTLGLQRWFCRLWFMVNLVWGLNVILLLALFELPSYI

SEQ ID NO: 898343 - protein, 295 aa, Homo sapiens
MIRDLSKMYPQTRHPAPHQPAQPFKFTISESCDRIKEEFQFLQAQYHSLKLECEKLASEKTEMQRHYVMYYEMSYGLNIEMHKQAEIVKRLNAICAQVIPFLSQEQQLQAQHLSHGHGLPVPLTPHPSGLQPPAIPPIGSSAGLLALSSALGGQSHLPIKDEKKHHDNDHQRDRDSIKSSSVSPSASFRGAEKHRNSADYSSESKKQKTEEKEIAARYDSDGEKSDDNLVVDVSNEDPSSPRGSPAHSPRENGLDKTRLLKKDAPISPASIASSSSTPSSKSKELSLNEKSTTPV

SEQ ID NO: 898344 - protein, 106 aa, Homo sapiens
RPPPSSPGLTAARRHGAGPPDGPVSIPGEEGVGAARGSLGACLWPGRGDGTRTLGVRGAGACGREYAGPQDHLETSLCLGCWARGGLREESFNLSLLACAMTLTPR

SEQ ID NO: 898345 - protein, 206 aa, Homo sapiens
MARVPPTGQFRFRAPHQPAQPFKFTISESCDRIKEEFQFLQAQYHSLKLECEKLASEKTEMQRHYVMYYEMSYGLNIEMHKQAEIVKRLNAICAQVIPFLSQEHQQQVVQAVERAKQVTMAELNAIIGQQLQAQHLSHGHGLPVPLTPHPSGLQPPAIPPIGSSAGLLALSSALGGQSHLPIKDEKKHHDNDHQRDRDSSKTTCCS

SEQ ID NO: 898346 - protein, 100 aa, Homo sapiens
MIRDLSKMYPQTRHPAPHQPAQPFKFTISESCDRIKEEFQFLQAQYHSLKLECEKLASEKTEMQRHYVMVRKPCHRFKVPISLEYQKQEYVEIAGGCKID

SEQ ID NO: 898347 - protein, 805 aa, Homo sapiens
MIRDLSKMYPQTRHPAPHQPAQPFKFTISESCDRIKEEFQFLQAQYHSLKLECEKLASEKTEMQRHYVMYYEMSYGLNIEMHKQAEIVKRLNAICAQVIPFLSQEHQQQVVQAVERAKQVTMAELNAIIGQQLQAQHLSHGHGLPVPLTPHPSGLQPPAIPPIGSSAGLLALSSALGGQSHLPIKDEKKHHDNDHQRDRDSIKSSSVSPSASFRGAEKHRNSADYSSESKKQKTEEKEIAARYDSDGEKSDDNLVVDVSNEDPSSPRGSPAHSPRENGLDKTRLLKKDAPISPASIASSSSTPSSKSKELSLKRDMGKLSETRLSEDEQCTLGLQRWFCRLWFMNEKSTTPVSKSNTPTPRTDAPTPGSNSTPGLRPVPGKPPGVDPLASSLRTPMAVPCPYPTPFGIVPHAGMNGELTSPGAAYAGLHNISPQMSAAAAAAAAAAAYGRSPVVGFDPHHHMRVPAIPPNLTGIPGGKPAYSFHVSADGQMQPVPFPPDALIGPGIPRHARQINTLNHGEVVCAVTISNPTRHVYTGGKGCVKVWDISHPGNKSPVSQLDCLNRDNYIRSCRLLPDGRTLIVGGEASTLSIWDLAAPTPRIKAELTSSAPACYALAISPDSKVCFSCCSDGNIAVWDLHNQTLVRQFQGHTDGASCIDISNDGTKLWTGGLDNTVRSWDLREGRQLQQHDFTSQIFSLGYCPTGEWLAVGMENSNVEVLHVTKPDKYQLHLHESCVLSLKFAHCGKWFVSTGKDNLLNAWRTPYGASIFQSKESSSVLSCDISVDDKYIVTGSGDKKATVYEVIY

SEQ ID NO: 898348 - protein, 1104 aa, Homo sapiens
MIRDLSKMYPQTRHPAPHQPAQPFKFTISESCDRIKEEFQFLQAQYHSLKLECEKLASEKTEMQRHYVMYYEMSYGLNIEMHKQAEIVKRLNAICAQVIPFLSQEHQQQVVQAVERAKQVTMAELNAIIGQQLQAQHLSHGHGLPVPLTPHPSGLQPPAIPPIGSSAGLLALSSALGGQSHLPIKDEKKHHDNDHQRDRDSIKSSSVSPSASFRGAEKHRNSADYSSESKKQKTEEKEIAARYDSDGEKSDDNLVVDVSNEDPSSPRGSPAHSPRENGLDKTRLLKKDAPISPASIASSSSTPSSKSKELSLKRDMGKLSETRLSEDEQCTLGLQRWFCRLWFMVNLVWGLNVILLLALFELPSYIDGNNFPFLSKKYISHLQKSILTYITNHKCKNELLTHQDNLPAPYSSVAVYVNCNFVWCVFFPHQLFPCNITFKKRIKRQIQFSNNLWNSQLKERKFLTGLQIRGDKCDGLDCWCCFFKFYFLLAFWPSFNGTCSLLSLYDNSSLDVFSNVTCSQEASCDMNNLPGAHSYPSLYQSHQQVATVEDILVCEPHLTQTNFLEMSCSPLNSASVYVFPNIRSAVSRNSFVSLLTFLLKKIKAQAEEPLPFLFLLSFSLPFYCLTSLLKPCSNCWYMSFHLLNEKSTTPVSKSNTPTPRTDAPTPGSNSTPGLRPVPGKPPGVDPLASSLRTPMAVPCPYPTPFGIVPHAGMNGELTSPGAAYAGLHNISPQMSAAAAAAAAAAAYGRSPVVGFDPHHHMRVPAIPPNLTGIPGGKPAYSFHVSADGQMQPVPFPPDALIGPGIPRHARQINTLNHGEVVCAVTISNPTRHVYTGGKGCVKVWDISHPGNKSPVSQLDCLNRDNYIRSCRLLPDGRTLIVGGEASTLSIWDLAAPTPRIKAELTSSAPACYALAISPDSKVCFSCCSDGNIAVWDLHNQTLVRQFQGHTDGASCIDISNDGTKLWTGGLDNTVRSWDLREGRQLQQHDFTSQIFSLGYCPTGEWLAVGMENSNVEVLHVTKPDKYQLHLHESCVLSLKFAHCGKWFVSTGKDNLLNAWRTPYGASIFQSKESSSVLSCDISVDDKYIVTGSGDKKATVYEVIY

SEQ ID NO: 898349 - protein, 786 aa, Homo sapiens
MIRDLSKMYPQTRHPAPHQPAQPFKFTISESCDRIKEEFQFLQAQYHSLKLECEKLASEKTEMQRHYVMYYEMSYGLNIEMHKQAEIVKRLNAICAQVIPFLSQEHQQQVVQAVERAKQVTMAELNAIIGEKKNKSDTPGSLKQQLQAQHLSHGHGLPVPLTPHPSGLQPPAIPPIGSSAGLLALSSALGGQSHLPIKDEKKHHDNDHQRDRDSIKSSSVSPSASFRGAEKHRNSADYSSESKKQKTEEKEIAARYDSDGEKSDDNLVVDVSNEDPSSPRGSPAHSPRENGLDKTRLLKKDAPISPASIASSSSTPSSKSKELSLNEKSTTPVSKSNTPTPRTDAPTPGSNSTPGLRPVPGKPPGVDPLASSLRTPMAVPCPYPTPFGIVPHAGMNGELTSPGAAYAGLHNISPQMSAAAAAAAAAAAYGRSPVVGFDPHHHMRVPAIPPNLTGIPGGKPAYSFHVSADGQMQPVPFPPDALIGPGIPRHARQINTLNHGEVVCAVTISNPTRHVYTGGKGCVKVWDISHPGNKSPVSQLDCLNRDNYIRSCRLLPDGRTLIVGGEASTLSIWDLAAPTPRIKAELTSSAPACYALAISPDSKVCFSCCSDGNIAVWDLHNQTLVRQFQGHTDGASCIDISNDGTKLWTGGLDNTVRSWDLREGRQLQQHDFTSQIFSLGYCPTGEWLAVGMENSNVEVLHVTKPDKYQLHLHESCVLSLKFAHCGKWFVSTGKDNLLNAWRTPYGASIFQSKESSSVLSCDISVDDKYIVTGSGDKKATVYEVIY

SEQ ID NO: 898350 - protein, 711 aa, Homo sapiens
MQRHYVMYYEMSYGLNIEMHKQAEIVKRLNAICAQVIPFLSQEHQQQVVQAVERAKQVTMAELNAIIGQQLQAQHLSHGHGLPVPLTPHPSGLQPPAIPPIGSSAGLLALSSALGGQSHLPIKDEKKHHDNDHQRDRDSIKSSSVSPSASFRGAEKHRNSADYSSESKKQKTEEKEIAARYDSDGEKSDDNLVVDVSNEDPSSPRGSPAHSPRENGLDKTRLLKKDAPISPASIASSSSTPSSKSKELSLNEKSTTPVSKSNTPTPRTDAPTPGSNSTPGLRPVPGKPPGVDPLASSLRTPMAVPCPYPTPFGIVPHAGMNGELTSPGAAYAGLHNISPQMSAAAAAAAAAAAYGRSPVVGFDPHHHMRVPAIPPNLTGIPGGKPAYSFHVSADGQMQPVPFPPDALIGPGIPRHARQINTLNHGEVVCAVTISNPTRHVYTGGKGCVKVWDISHPGNKSPVSQLDCLNRDNYIRSCRLLPDGRTLIVGGEASTLSIWDLAAPTPRIKAELTSSAPACYALAISPDSKVCFSCCSDGNIAVWDLHNQTLVRQFQGHTDGASCIDISNDGTKLWTGGLDNTVRSWDLREGRQLQQHDFTSQIFSLGYCPTGEWLAVGMENSNVEVLHVTKPDKYQLHLHESCVLSLKFAHCGKWFVSTGKDNLLNAWRTPYGASIFQSKESSSVLSCDISVDDKYIVTGSGDKKATVYEVIY

SEQ ID NO: 898351 - protein, 805 aa, Homo sapiens
MIRDLSKMYPQTRHPAPHQPAQPFKFTISESCDRIKEEFQFLQAQYHSLKLECEKLASEKTEMQRHYVMYYEMSYGLNIEMHKQRLFFSKLKAVATLNGAVLPIACAHFVSLCHILAEIVKRLNAICAQVIPFLSQEHQQQVVQAVERAKQVTMAELNAIIGQQLQAQHLSHGHGLPVPLTPHPSGLQPPAIPPIGSSAGLLALSSALGGQSHLPIKDEKKHHDNDHQRDRDSIKSSSVSPSASFRGAEKHRNSADYSSESKKQKTEEKEIAARYDSDGEKSDDNLVVDVSNEDPSSPRGSPAHSPRENGLDKTRLLKKDAPISPASIASSSSTPSSKSKELSLNEKSTTPVSKSNTPTPRTDAPTPGSNSTPGLRPVPGKPPGVDPLASSLRTPMAVPCPYPTPFGIVPHAGMNGELTSPGAAYAGLHNISPQMSAAAAAAAAAAAYGRSPVVGFDPHHHMRVPAIPPNLTGIPGGKPAYSFHVSADGQMQPVPFPPDALIGPGIPRHARQINTLNHGEVVCAVTISNPTRHVYTGGKGCVKVWDISHPGNKSPVSQLDCLNRDNYIRSCRLLPDGRTLIVGGEASTLSIWDLAAPTPRIKAELTSSAPACYALAISPDSKVCFSCCSDGNIAVWDLHNQTLVRQFQGHTDGASCIDISNDGTKLWTGGLDNTVRSWDLREGRQLQQHDFTSQIFSLGYCPTGEWLAVGMENSNVEVLHVTKPDKYQLHLHESCVLSLKFAHCGKWFVSTGKDNLLNAWRTPYGASIFQSKESSSVLSCDISVDDKYIVTGSGDKKATVYEVIY

SEQ ID NO: 898352 - protein, 773 aa, Homo sapiens; identical to SEQ ID NO: 898334

SEQ ID NO: 898353 - protein, 208 aa, Homo sapiens
MIRDLSKMYPQTRHPAPHQPAQPFKFTISESCDRIKEEFQFLQAQYHSLKLECEKLASEKTEMQRHYVMYYEMSYGLNIEMHKQAEIVKRLNAICAQVIPFLSQEHQQQVVQAVERAKQVTMAELNAIIGQQLQAQHLSHGHGLPVPLTPHPSGLQPPAIPPIGSSAGLLALSSALGGQSHLPIKDEKKHHDNDHQRDRDSSKTTCCS

SEQ ID NO: 898354 - protein, 163 aa, Homo sapiens [sequence omitted]

SEQ ID NO: 898355 - protein, 782 aa, Homo sapiens
HVLVLTGQLPGGKPRLLQVGKLDVFAMGKRGSRSQSQLLNTLTKKQKKHLRDFGEEHPFYDRVSRKEAKPQICQLSESSDSSDSESDSESEPQQVSGYHRLLATLKNVSEEEEEDEEEEEEEDSIVDDAEMNDEDGGSDVSVEEEMAAESTESPENVALSADPEGKEDGEEPPGTSQTSPEEFTDAKHESLFSLETNFLEEESGDNSSLKASQDPFLQHVNKELKEKAIQAVATNPKTTHELKWPILGQLFFSSKFQKLETFKPPKDIDLKSLHLQKPLESTWTKTNSQFLSGPQKSSSPFTPLQKELFLIMNSYRDLFYPERTALKNGEEIRHVYCLHVINHILKANAQVLGNNSRRRSQKFGVGDDDDFRDQGLTRPKVLIVVPFREAALRVVQLFISLLEGDSKKKIIVSNKKRFQGEYGSDPEERPPNLKRPEDYEAVFVGNIDDHFRIGVAILQRSIRLYAPFYSSDILIASPLGLRTIIGGEGEKKRDFDFLSSIELLIIDQADIYLMQNWEHVLHLMNHMNLLPLDSHGVDFSRVRMWSLNNWSKYYRQTLLFGALQDAQINSVFNKYCVNMQGQVAVRNVPMTGSISHVLVQLPHVFQRMEAENLASVIDARFNFFVNKILPQYRDAVMSHTLIYIPSYFDFVRLRNYFKKEELNFTHICEYTQKSGVSRARHFFLQGEKQFLLFTERFHFYKRYTIKGIRNLIFYELPTYPHFYSEICNMLRATNRGEEATWTCTVLYSKYDAQRLAAVVGVERAAQMLQSNKNVHLFITGEK

SEQ ID NO: 898356 - protein, 782 aa, Homo sapiens; identical to SEQ ID NO: 898355

SEQ ID NO: 898357 - protein, 72 aa, Homo sapiens
HLMNHMNLLPLDSHGVDFSRVRMWSLNNWSKYYRQTLLFGALQDAQINSVFNKYCVNMQGQVGSRLVSSVSS

SEQ ID NO: 898358 - protein, 230 aa, Homo sapiens
RRMQYNRRFVNVVPTFGKKKDTTFTKIFVGGLPYHTTDASLRKYFEGFGDIEEAVVITDRQTGKSRGYGFVTMADRAAAERACKDPNPIIDGRKANVNLAYLGAKPRSLQTGFAIGVQQLHPTLIQRTYGLTPHYIYPPAIVQPSVVIPAAPVPSLSSPYIEYTPASPAYAQYPPATYDQYPYAASPATAASFVGYSYPAAVPQALSAAAPAGTTFVQYQAPQLQPDRMQ

SEQ ID NO: 898359 - protein, 186 aa, Homo sapiens
ESSSVPAGGAVVITDRQTGKSRGYGFVTMADRAAAERACKDPNPIIDGRKANVNLAYLGAKPRSLQTGFAIGVQQLHPTLIQRTYGLTPHYIYPPAIVQPSVVIPAAPVPSLSSPYIEYTPASPAYAQYPPATYDQYPYAASPATAASFVGYSYPAAVPQALSAAAPAGTTFVQYQAPQLQPDRMQ

SEQ ID NO: 898360 - protein, 158 aa, Homo sapiens
MADRAAAERACKDPNPIIDGRKANVNLAYLGAKPRSLQTGFAIGVQQLHPTLIQRTYGLTPHYIYPPAIVQPSVVIPAAPVPSLSSPYIEYTPASPAYAQYPPATYDQYPYAASPATAASFVGYSYPAAVPQALSAAAPAGTTFVQYQAPQLQPDRMQ

SEQ ID NO: 898361 - protein, 226 aa, Homo sapiens
ESSSVPAGGAVVITDRQTGKSRGYGFVTMADRAAAERACKDPNPIIDGRKANVNLAYLGAKPRSLQTGFAIGVQQLHPTLIQRTYGCRTLGNSPGPVCEMGLMMGRPSRRGDAPSHSTGLPPAWALLTPHYIYPPAIVQPSVVIPAAPVPSLSSPYIEYTPASPAYAQYPPATYDQYPYAASPATAASFVGYSYPAAVPQALSAAAPAGTTFVQYQAPQLQPDRMQ

SEQ ID NO: 898362 - protein, 117 aa, Homo sapiens
MVVPAWGGQWPSALPAGAVECRRVRLFPLPPHHLLCASLRRFLPVLGVGGGWRQFCQPWQGCYGASRAVGVWRRGHEVRGILAEGGGQRGVSLRTYLRELSVQALQGRPGTESRLRE

SEQ ID NO: 898363 - protein, 291 aa, Homo sapiens
RSAAHSARTAGAAPRVVGPGGWTGAPRCPARSPPPPMSAPRAARVRSGGAPPMLLQPAPCAPSAGFPRPLAAPGAMHGSQKDTTFTKIFVGGLPYHTTDASLRKYFEGFGDIEEAVVITDRQTGKSRGYGFVTMADRAAAERACKDPNPIIDGRKANVNLAYLGAKPRSLQTGFAIGVQQLHPTLIQRTYGLTPHYIYPPAIVQPSVVIPAAPVPSLSSPYIEYTPASPAYAQYPPATYDQYPYAASPATAASFVGYSYPAAVPQALSAAAPAGTTFVQYQAPQLQPDRMQ

SEQ ID NO: 898364 - protein, 239 aa, Homo sapiens
MLLQPAPCAPSAGFPRPLAAPGAMHGSQKDTTFTKIFVGGLPYHTTDASLRKYFEGFGDIEEAVVITDRQTGKSRGYGFVTMADRAAAERACKDPNPIIDGRKANVNLAYLGAKPRSLQTGFAIGVQQLHPTLIQRTYGLTPHYIYPPAIVQPSVVIPAAPVPSLSSPYIEYTPASPAYAQYPPATYDQYPYAASPATAASFVGYSYPAAVPQALSAAAPAGTTFVQYQAPQLQPDRMQ

SEQ ID NO: 898365 - protein, 122 aa, Homo sapiens
ESSSVPAGGAVVITDRQTGKSRGYGFVTMADRAAAERACKDPNPIIDGRKANVNLAYLGDRPADNVSDACSRGGRASATHQDSNGVRYNGRTKCRHHRFRKTKCGTQQLLSHCSHSAEHGVT

SEQ ID NO: 898366 - protein, 291 aa, Homo sapiens; identical to SEQ ID NO: 898363

SEQ ID NO: 898367 - protein, 158 aa, Homo sapiens; identical to SEQ ID NO: 898360

SEQ ID NO: 898368 - protein, 112 aa, Homo sapiens
RRMQYNRRFVNVVPTFGKKKDTTFTKIFVGGLPYHTTDASLRKYFEGFGDIEEAVVITDRQTGKSRGYGFVTMADRAAAERACKDPNPIIDGRKANVNLAYLGAKPRSLQTG

SEQ ID NO: 898369 - protein, 291 aa, Homo sapiens; identical to SEQ ID NO: 898363

SEQ ID NO: 898370 - protein, 291 aa, Homo sapiens; identical to SEQ ID NO: 898363

SEQ ID NO: 898371 - protein, 1326 aa, Homo sapiens
MLLSPSLLLLLLLGGAAGCAEGVAAALTPERLLEWQDKGIFVIQSESLKKCIQAGKSVLTLGRTGSKQANKHMLWKWVSNHGLFNIGGSGCLGLNFSAPEQPLSLYECDSTLVSLRWRCNRKMITGPLQYSVQVAHDNTVVASRKYIHKWISYGSGGGDICEYLHKDLHTIKGNTHGMPCMFPFQYNHQWHHECTREGREDDLLWCATTSRYERDEKWGFCPDPTSAEVGCDTIWEKDLNSHICYQFNLLSSLSWSEAHSSCQMQGGTLLSITDETEENFIREHMSSKTVEVWVGLNQLDEDAGWQWSDGTPLNYLNWSPEVNFEPFVEDHCGTFSSFMPSAWRSRDCESTLPYICKKYLNHIDHEIVEKDAWKYYATHCEPGWNPYNRNCYKLQKEEKTWHEALRSCQADNSALIDITSLAEVEFLVTLLGDENASETWIGLSSNKIPVSFEWSNDSSVIFTNWHTLEPHIFPNRSQLCVSAEQSEGHWKVKNCEERLFYICKKAGHVLSDAESGCQEGWERHGGFCYKIDTVLRSFDQASSGYYCPPALVTITNRFEQAFITSLISSVVKMKDSYFWIALQDQNDTGEYTWKPVGQKPEPVQYTHWNTHQPRYSGGCVAMRGRHPLGRWEVKHCRHFKAMSLCKQPVENQEKAEYEERWPFHPCYLDWESEPGLASCFKVFHSEKVLMKRTWREAEAFCEEFGAHLASFAHIEEENFVNELLHSKFNWTEERQFWIGFNKRNPLNAGSWEWSDRTPVVSSFLDNTYFGEDARNCAVYKANKTLLPLHCGSKREWICKIPRDVKPKIPFWYQYDVPWLFYQDAEYLFHTFASEWLNFEFVCSWLHSDLLTIHSAHEQEFIHSKIKALSKYGASWWIGLQEERANDEFRWRDGTPVIYQNWDTGRERTVNNQSQRCGFISSITGLWGSEECSVSMPSICKRKKVWLIEKKKDTPKQHGTCPKGWLYFNYKCLLLNIPKDPSSWKNWTHAQHFCAEEGGTLVAIESEVEQAFITMNLFGQTTSVWIGLQNDDYETWLNGKPVVYSNWSPFDIINIPSHNTTEVQKHIPLCALLSSNPNFHFTGKWYFEDCGKEGYGFVCEKMQDTSGHGVNTSDMYPMPNTLEYGNRTYKIINANMTWYAAIKTCLMHKAQLVSITDQYHQSFLTVVLNRLGYAHWIGLFTTDNGLNFDWSDGTKSSFTFWKDEESSLLGDCVFADSNGRWHSTACESFLQGAICHVPPETRQSEHPELCSETSIPWIKFKSNCYSFSTVLDSMSFEAAHEFCKKEGSNLLTIKDEAENAFLLEELFAFGSSVQMVWLNAQFDGNSK

SEQ ID NO: 898372 - protein, 158 aa, Homo sapiens
MKDSYFWIALQDQNDTGEYTWKPVGQKPEPVQYTHWNTHQPRYSGGCVAMRGRHPLGRWEVKHCRHFKAMSLCKQPVENQEKAEYEERWPFHPCYLDWESEPGLASCFKVFHSEKVLMKRTWREAEAFCEEFGAHLASFAHIEEENFVNELLHSKFNW

SEQ ID NO: 898373 - protein, 1393 aa, Homo sapiens
MLWKWVSNHGLFNIGGSGCLGLNFSAPEQPLSLYECDSTLVSLRWRCNRKMITGPLQYSVQVAHDNTVVASRKYIHKWISYGSGGGDICEYLHKDLHTIKGNTHGMPCMFPFQYNHQWHHECTREGREDDLLWCATTSRYERDEKWGFCPDPTSAEVGCDTIWEKDLNSHICYQFNLLSSLSWSEAHSSCQMQGGTLLSITDETEENFIREHMSSKTVEVWVGLNQLDEDAGWQWSDGTPLNYLNWSPEVNFEPFVEDHCGTFSSFMPSAWRSRDCESTLPYICKKYLNHIDHEIVEKDAWKYYATHCEPGWNPYNRNCYKLQKEEKTWHEALRSCQADNSALIDITSLAEVEFLVTLLGDENASETWIGLSSNKIPVSFEWSNDSSVIFTNWHTLEPHIFPNRSQLCVSAEQSEGHWKVKNCEERLFYICKKAGHVLSDAESGCQEGWEETCGFCYKIDTVLRSFDQASSGYYCPPALVTITNRFEQAFITSLISSVVKMKDSYFWIALQDQNDTGEYTWKPVGQKPEPVQYTHWNTHQPRYSGGCVAMRGRHPLGRWEVKHCRHFKAMSLCKQPVENQEKAEYEERWPFHPCYLDWESEPGLASCFKVFHSEKVLMKRTWREAEAFCEEFGAHLASFAHIEEENFVNELLHSKFNWTEERQFWIGFNKRNPLNAGSWEWSDRTPVVSSFLDNTYFGEDARNCAVYKANKTLLPLHCGSKREWICKIPRDVKPKIPFWYQYDVPWLFYQDAEYLFHTFASEWLNFEFVCSWLHSDLLTIHSAHEQEFIHSKIKALSKYGASWWIGLQEERANDEFRWRDGTPVIYQNWDTGRERTVNNQSQRCGFISSITGLWGSEECSVSMPSICKRKKVWLIEKKKDTPKQHGTCPKGWLYFNYKCLLLNIPKDPSSWKNWTHAQHFCAEEGGTLVAIESEVEQAFITMNLFGQTTSVWIGLQNDDYETWLNGKPVVYSNWSPFDIINIPSHNTTEVQKHIPLCALLSSNPNFHFTGKWYFEDCGKEGYGFVCEKMQDTSGHGVNTSDMYPMPNTLEYGNRTYKIINANMTWYAAIKTCLMHKAQLVSITDQYHQSFLTVVLNRLGYAHWIGLFTTDNGLNFDWSDGTKSSFTFWKDEESSLLGDCVFADSNGRWHSTACESFLQGAICHVPPETRQSEHPELCSETSIPWIKFKSNCYSFSTVLDSMSFEAAHEFCKKEGSNLLTIKDEAENAFLLEELFAFGSSVQMVWLNAQFDGNNETIKWFDGTPTDQSNWGIRKPDTDYFKPHHCVALRIPEGLWQLSPCQEKKGFICKMEADIHTAEALPEKGPSHSIIPLAVVLTLIVIVAICTLSFCIYKHNGGFFRRLAGFRNPYYPATNFSTVYLEENILISDLEKSDQ

SEQ ID NO: 898374 - protein, 893 aa, Homo sapiens
MKDSYFWIALQDQNDTGEYTWKPVGQKPEPVQYTHWNTHQPRYSGGCVAMRGRHPLGRWEVKHCRHFKAMSLCKQPVENQEKAEYEERWPFHPCYLDWESEPGLASCFKVFHSEKVLMKRTWREAEAFCEEFGAHLASFAHIEEENFVNELLHSKFNWTEERQFWIGFNKRNPLNAGSWEWSDRTPVVSSFLDNTYFGEDARNCAVYKANKTLLPLHCGSKREWICKIPRDVKPKIPFWYQYDVPWLFYQDAEYLFHTFASEWLNFEFVCSWLHSDLLTIHSAHEQEFIHSKIKALSKYGASWWIGLQEERANDEFRWRDGTPVIYQNWDTGRERTVNNQSQRCGFISSITGLWGSEECSVSMPSICKRKKVWLIEKKKDTPKQHGTCPKGWLYFNYKCLLLNIPKDPSSWKNWTHAQHFCAEEGGTLVAIESEVEQAFITMNLFGQTTSVWIGLQNDDYETWLNGKPVVYSNWSPFDIINIPSHNTTEVQKHIPLCALLSSNPNFHFTGKWYFEDCGKEGYGFVCEKMQDTSGHGVNTSDMYPMPNTLEYGNRTYKIINANMTWYAAIKTCLMHKAQLVSITDQYHQSFLTVVLNRLGYAHWIGLFTTDNGLNFDWSDGTKSSFTFWKDEESSLLGDCVFADSNGRWHSTACESFLQGAICHVPPETRQSEHPELCSETSIPWIKFKSNCYSFSTVLDSMSFEAAHEFCKKEGSNLLTIKDEAENAFLLEELFAFGSSVQMVWLNAQFDGNNETIKWFDGTPTDQSNWGIRKPDTDYFKPHHCVALRIPEGLWQLSPCQEKKGFICKMEADIHTAEALPEKGPSHSIIPLAVVLTLIVIVAICTLSFCIYKHNGGFFRRLAGFRNPYYPATNFSTVYLEENILISDLEKSDQ

SEQ ID NO: 898375 - protein, 1313 aa, Homo sapiens
MLWKWVSNHGLFNIGGSGCLGLNFSAPEQPLSLYECDSTLVSLRWRCNRKMITGPLQYSVQVAHDNTVVASRKYIHKWISYGSGGGDICEYLHKDLHTIKGNTHGMPCMFPFQYNHQWHHECTREGREDDLLWCATTSRYERDEKWGFCPDPTSAEVGCDTIWEKDLNSHICYQFNLLSSLSWSEAHSSCQMQGGTLLSITDETEENFIREHMSSKTVEVWVGLNQLDEDAGWQWSDGTPLNYLNWSPEVNFEPFVEDHCGTFSSFMPSAWRSRDCESTLPYICKKYLNHIDHEIVEKDAWKYYATHCEPGWNPYNRNCYKLQKEEKTWHEALRSCQADNSALIDITSLAEVEFLVTLLGDENASETWIGLSSNKIPVSFEWSNDSSVIFTNWHTLEPHIFPNRSQLCVSAEQSEGHWKVKNCEERLFYICKKAGHVLSDAESGCQEGWEETCGFCYKIDTVLRSFDQASSGYYCPPALVTITNRFEQAFITSLISSVVKMKDSYFWIALQDQNDTGEYTWKPVGQKPEPVQYTHWNTHQPRYSGGCVAMRGRHPLGRWEVKHCRHFKAMSLCKQPVENQEKAEYEERWPFHPCYLDWESEPGLASCFKVFHSEKVLMKRTWREAEAFCEEFGAHLASFAHIEEENFVNELLHSKFNWTEERQFWIGFNKRNPLNAGSWEWSDRTPVVSSFLDNTYFGEDARNCAVYKANKTLLPLHCGSKREWICKIPRDVKPKIPFWYQYDVPWLFYQDAEYLFHTFASEWLNFEFVCSWLHSDLLTIHSAHEQEFIHSKIKALSKYGASWWIGLQEERANDEFRWRDGTPVIYQNWDTGRERTVNNQSQRCGFISSITGLWGSEECSVSMPSICKRKKVWLIEKKKDTPKQHGTCPKGWLYFNYKCLLLNIPKDPSSWKNWTHAQHFCAEEGGTLVAIESEVEQAFITMNLFGQTTSVWIGLQNDDYETWLNGKPVVYSNWSPFDIINIPSHNTTEVQKHIPLCALLSSNPNFHFTGKWYFEDCGKEGYGFVCEKMQDTSGHGVNTSDMYPMPNTLEYGNRTYKIINANMTWYAAIKTCLMHKAQLVSITDQYHQSFLTVVLNRLGYAHWIGLFTTDNGLNFDWSDGTKSSFTFWKDEESSLLGDCVFADSNGRWHSTACESFLQGAICHVPPETRQSEHPELCSETSIPWIKFKSNCYSFSTVLDSMSFEAAHEFCKKEGSNLLTIKDEAENAFLLEELFAFGSSVQMVWLNAQFDGNNETIKWFDGTPTDQSNWGIRKPDTDYFKPHHCVALRIPEGLWQLSPCQEKKGFICKMEAGR

SEQ ID NO: 898376 - protein, 658 aa, Homo sapiens
MLWKWVSNHGLFNIGGSGCLGLNFSAPEQPLSLYECDSTLVSLRWRCNRKMITGPLQYSVQVAHDNTVVASRKYIHKWISYGSGGGDICEYLHKDLHTIKGNTHGMPCMFPFQYNHQWHHECTREGREDDLLWCATTSRYERDEKWGFCPDPTSAEVGCDTIWEKDLNSHICYQFNLLSSLSWSEAHSSCQMQGGTLLSITDETEENFIREHMSSKTVEVWVGLNQLDEDAGWQWSDGTPLNYLNWSPEVNFEPFVEDHCGTFSSFMPSAWRSRDCESTLPYICKKYLNHIDHEIVEKDAWKYYATHCEPGWNPYNRNCYKLQKEEKTWHEALRSCQADNSALIDITSLAEVEFLVTLLGDENASETWIGLSSNKIPVSFEWSNDSSVIFTNWHTLEPHIFPNRSQLCVSAEQSEGHWKVKNCEERLFYICKKAGHVLSDAESGCQEGWEETCGFCYKIDTVLRSFDQASSGYYCPPALVTITNRFEQAFITSLISSVVKMKDSYFWIALQDQNDTGEYTWKPVGQKPEPVQYTHWNTHQPRYSGGCVAMRGRHPLGRWEVKHCRHFKAMSLCKQPVENQEKAEYEERWPFHPCYLDWESEPGLASCFKVFHSEKVLMKRTWREAEAFCEEFGAHLASFAHIEEENFVNELLHSKFNW

SEQ ID NO: 898377 - protein, 1465 aa, Homo sapiens
MLLSPSLLLLLLLGGAAGCAEGVAAALTPERLLEWQDKGIFVIQSESLKKCIQAGKSVLTLGRTGSKQANKHMLWKWVSNHGLFNIGGSGCLGLNFSAPEQPLSLYECDSTLVSLRWRCNRKMITGPLQYSVQVAHDNTVVASRKYIHKWISYGSGGGDICEYLHKDLHTIKGNTHGMPCMFPFQYNHQWHHECTREGREDDLLWCATTSRYERDEKWGFCPDPTSAEVGCDTIWEKDLNSHICYQFNLLSSLSWSEAHSSCQMQGGTLLSITDETEENFIREHMSSKTVEVWVGLNQLDEDAGWQWSDGTPLNYLNWSPEVNFEPFVEDHCGTFSSFMPSAWRSRDCESTLPYICKKYLNHIDHEIVEKDAWKYYATHCEPGWNPYNRNCYKLQKEEKTWHEALRSCQADNSALIDITSLAEVEFLVTLLGDENASETWIGLSSNKIPVSFEWSNDSSVIFTNWHTLEPHIFPNRSQLCVSAEQSEGHWKVKNCEERLFYICKKAGHVLSDAESGCQEGWERHGGFCYKIDTVLRSFDQASSGYYCPPALVTITNRFEQAFITSLISSVVKMKDSYFWIALQDQNDTGEYTWKPVGQKPEPVQYTHWNTHQPRYSGGCVAMRGRHPLGRWEVKHCRHFKAMSLCKQPVENQEKAEYEERWPFHPCYLDWESEPGLASCFKVFHSEKVLMKRTWREAEAFCEEFGAHLASFAHIEEENFVNELLHSKFNWTEERQFWIGFNKRNPLNAGSWEWSDRTPVVSSFLDNTYFGEDARNCAVYKANKTLLPLHCGSKREWICKIPRDVKPKIPFWYQYDVPWLFYQDAEYLFHTFASEWLNFEFVCSWLHSDLLTIHSAHEQEFIHSKIKALSKYGASWWIGLQEERANDEFRWRDGTPVIYQNWDTGRERTVNNQSQRCGFISSITGLWGSEECSVSMPSICKRKKVWLIEKKKDTPKQHGTCPKGWLYFNYKCLLLNIPKDPSSWKNWTHAQHFCAEEGGTLVAIESEVEQAFITMNLFGQTTSVWIGLQNDDYETWLNGKPVVYSNWSPFDIINIPSHNTTEVQKHIPLCALLSSNPNFHFTGKWYFEDCGKEGYGFVCEKMQDTSGHGVNTSDMYPMPNTLEYGNRTYKIINANMTWYAAIKTCLMHKAQLVSITDQYHQSFLTVVLNRLGYAHWIGLFTTDNGLNFDWSDGTKSSFTFWKDEESSLLGDCVFADSNGRWHSTACESFLQGAICHVPPETRQSEHPELCSETSIPWIKFKSNCYSFSTVLDSMSFEAAHEFCKKEGSNLLTIKDEAENAFLLEELFAFGSSVQMVWLNAQFDGNNETIKWFDGTPTDQSNWGIRKPDTDYFKPHHCVALRIPEGLWQLSPCQEKKGFICKMEADIHTAEALPEKGPSHSIIPLAVVLTLIVIVAICTLSFCIYKHNGGFFRRLAGFRNPYYPATNFSTVYLEENILISDLEKSDQ

SEQ ID NO: 898378 - protein, 1393 aa, Homo sapiens; identical to SEQ ID NO: 898373

SEQ ID NO: 898379 - protein, 1010 aa, Homo sapiens
MTLQSSLLIGTHLSPTFFQIEASCVSQQSSLRDTGKSKIVKKDFFTFVKKQAMSSLMLNQDVKRDGRRHGGFCYKIDTVLRSFDQASSGYYCPPALVTITNRFEQAFITSLISSVVKMKDSYFWIALQDQNDTGEYTWKPVGQKPEPVQYTHWNTHQPRYSGGCVAMRGRHPLGRWEVKHCRHFKAMSLCKQPVENQEKAEYEERWPFHPCYLDWESEPGLASCFKVFHSEKVLMKRTWREAEAFCEEFGAHLASFAHIEEENFVNELLHSKFNWTEERQFWIGFNKRNPLNAGSWEWSDRTPVVSSFLDNTYFGEDARNCAVYKANKTLLPLHCGSKREWICKIPRDVKPKIPFWYQYDVPWLFYQDAEYLFHTFASEWLNFEFVCSWLHSDLLTIHSAHEQEFIHSKIKALSKYGASWWIGLQEERANDEFRWRDGTPVIYQNWDTGRERTVNNQSQRCGFISSITGLWGSEECSVSMPSICKRKKVWLIEKKKDTPKQHGTCPKGWLYFNYKCLLLNIPKDPSSWKNWTHAQHFCAEEGGTLVAIESEVEQAFITMNLFGQTTSVWIGLQNDDYETWLNGKPVVYSNWSPFDIINIPSHNTTEVQKHIPLCALLSSNPNFHFTGKWYFEDCGKEGYGFVCEKMQDTSGHGVNTSDMYPMPNTLEYGNRTYKIINANMTWYAAIKTCLMHKAQLVSITDQYHQSFLTVVLNRLGYAHWIGLFTTDNGLNFDWSDGTKSSFTFWKDEESSLLGDCVFADSNGRWHSTACESFLQGAICHVPPETRQSEHPELCSETSIPWIKFKSNCYSFSTVLDSMSFEAAHEFCKKEGSNLLTIKDEAENAFLLEELFAFGSSVQMVWLNAQFDGNNETIKWFDGTPTDQSNWGIRKPDTDYFKPHHCVALRIPEGLWQLSPCQEKKGFICKMEADIHTAEALPEKGPSHSIIPLAVVLTLIVIVAICTLSFCIYKHNGGFFRRLAGFRNPYYPATNFSTVYLEENILISDLEKSDQ

SEQ ID NO: 898380 - protein, 235 aa, Homo sapiens
NHNWLFFTETRQSEHPELCSETSIPWIKFKSNCYSFSTVLDSMSFEAAHEFCKKEGSNLLTIKDEAENAFLLEELFAFGSSVQMVWLNAQFDGNNETIKWFDGTPTDQSNWGIRKPDTDYFKPHHCVALRIPEGLWQLSPCQEKKGFICKMEADIHTAEALPEKGPSHSIIPLAVVLTLIVIVAICTLSFCIYKHNGGFFRRLAGFRNPYYPATNFSTVYLEENILISDLEKSDQ

SEQ ID NO: 898381 - protein, 802 aa, Homo sapiens
MLWKWVSNHGLFNIGGSGCLGLNFSAPEQPLSLYECDSTLVSLRWRCNRKMITGPLQYSVQVAHDNTVVASRKYIHKWISYGSGGGDICEYLHKDLHTIKGNTHGMPCMFPFQYNHQWHHECTREGREDDLLWCATTSRYERDEKWGFCPDPTSAEVGCDTIWEKDLNSHICYQFNLLSSLSWSEAHSSCQMQGGTLLSITDETEENFIREHMSSKTVEVWVGLNQLDEDAGWQWSDGTPLNYLNWSPEVNFEPFVEDHCGTFSSFMPSAWRSRDCESTLPYICKKYLNHIDHEIVEKDAWKYYATHCEPGWNPYNRNCYKLQKEEKTWHEALRSCQADNSALIDITSLAEVEFLVTLLGDENASETWIGLSSNKIPVSFEWSNDSSVIFTNWHTLEPHIFPNRSQLCVSAEQSEGHWKVKNCEERLFYICKKAGHVLSDAESGCQEGWEETCGFCYKIDTVLRSFDQASSGYYCPPALVTITNRFEQAFITSLISSVVKMKDSYFWIALQDQNDTGEYTWKPVGQKPEPVQYTHWNTHQPRYSGGCVAMRGRHPLGRWEVKHCRHFKAMSLCKQPVENQEKAEYEERWPFHPCYLDWESEPGLASCFKVFHSEKVLMKRTWREAEAFCEEFGAHLASFAHIEEENFVNELLHSKFNWTEERQFWIGFNKRNPLNAGSWEWSDRTPVVSSFLDNTYFGEDARNCAVYKANKTLLPLHCGSKREWICKIPRDVKPKIPFWYQYDVPWLFYQDAEYLFHTFASEWLNFEFVCSWLHSDLLTIHSAHEQEFIHSKIKAVLEHNSP

SEQ ID NO: 898382 - protein, 292 aa, Homo sapiens [sequence omitted]

SEQ ID NO: 898383 - protein, 292 aa, Homo sapiens [sequence omitted]

SEQ ID NO: 898384 - protein, 292 aa, Homo sapiens [sequence omitted]

SEQ ID NO: 898385 - protein, 119 aa, Homo sapiens
MPAQRLPLSWMPGWPSTHHPKLPAMGTPVHPTQSLWAGLQCMGRATAPTPGTCRACRQPGKLCRPVGGPSHRVPCASSPSPTTCSRASGLCIWHRASSWTTPGLALPGPWLKAGFRWPR

SEQ ID NO: 898386 - protein, 251 aa, Homo sapiens
MEPGEELEEEGSPGGREDGFTAEHLAAEAMAADMDPWLVFDARTTPATELDAWLAKYPPSQVTRYGDPGSPNSEPVGWIAVYGQGYSPNSGDVQGLQAAWEALQTSGRPITPGTLRQLAITHHVLSGKWLMHLAPGFKLDHAWAGIARAVVEGRLQVAKVSPRAKEGGRQVICVYTDDFTDRLGVLEADSAIRAAGIKCLLTYKPDVYTYLGIYRANRWHLCPTLYESRFQLGGSARGSRVLDRANNVELT

SEQ ID NO: 898387 - protein, 251 aa, Homo sapiens; identical to SEQ ID NO: 898386

SEQ ID NO: 898388 - protein, 88 aa, Homo sapiens
DAWVRTRGSTHAVDDFTDRLGVLEADSAIRAAGIKCLLTYKPDVYTYLGIYRANRWHLCPTLYESRFQLGGSARGSRVLDRANNVELT

SEQ ID NO: 898389 - protein, 471 aa, Homo sapiens
TWEEAENNMADGEEPEKKRRRIEELLAEKMAVDGGCGDTGDWEGRWNHVKKFLERSGPFTHPDFEPSTESLQFLLDTCKVLVIGAGGLGCELLKNLALSGFRQIHVIDMDTIDVSNLNRQFLFRPKDIGRPKAEVAAEFLNDRVPNCNVVPHFNKIQDFNDTFYRQFHIIVCGLDSIIARRWINGMLISLLNYEDGVLDPSSIVPLIDGGTEGFKGNARVILPGMTACIECTLELYPPQVNFPMCTIASMPRLPEHCIEYVRMLQWPKEQPFGEGVPLDGDDPEHIQWIFQKSLERASQYNIRGVTYRLTQGVVKRIIPAVASTNAVIAAVCATEVFKIATSAYIPLNNYLVFNDVDGLYTYTFEAERKENCPACSQLPQNIQFSPSAKLQEVLDYLTNSASLQMKSPAITATLEGKNRTLYLQSVTSIEERTRPNLSKTLKELGLVDGQELAVADVTTPQTVLFKLHFTS

SEQ ID NO: 898390 - protein, 457 aa, Homo sapiens
TWEEAENNMADGEEPMAVDGGCGDTGDWEGRWNHVKKFLERSGPFTHPDFEPSTESLQFLLDTCKVLVIGAGGLGCELLKNLALSGFRQIHVIDMDTIDVSNLNRQFLFRPKDIGRPKAEVAAEFLNDRVPNCNVVPHFNKIQDFNDTFYRQFHIIVCGLDSIIARRWINGMLISLLNYEDGVLDPSSIVPLIDGGTEGFKGNARVILPGMTACIECTLELYPPQVNFPMCTIASMPRLPEHCIEYVRMLQWPKEQPFGEGVPLDGDDPEHIQWIFQKSLERASQYNIRGVTYRLTQGVVKRIIPAVASTNAVIAAVCATEVFKIATSAYIPLNNYLVFNDVDGLYTYTFEAERKENCPACSQLPQNIQFSPSAKLQEVLDYLTNSASLQMKSPAITATLEGKNRTLYLQSVTSIEERTRPNLSKTLKELGLVDGQELAVADVTTPQTVLFKLHFTS

SEQ ID NO: 898391 - protein, 229 aa, Homo sapiens
TWEEAENNMADGEEPEKKRRRIEELLAEKMAVDGGCGDTGDWEGRWNHVKKFLERSGPFTHPDFEPSTESLQFLLDTCKVLVIGAGGLGCELLKNLTIDVSNLNRQFLFRPKDIGRPKAEVAAEFLNDRVPNCNVVPHFNKIQDFNDTFYRQFHIIVCGLDSIIARRWINGMLISLLNYEDGVLDPSSIVPLIDGGTEGFKGNARVILPGMTACIECTLELYPPQVISM

SEQ ID NO: 898392 - protein, 135 aa, Homo sapiens
TWEEAENNMADGEEPEKKRRRIEELLAEKLVLPGGRGPLRGPPPPPTPGLGDQPQRARGAGRGTPGAQAALPHPLIPAPQPRGPGGPLPVSARCGRRGQAVLPQLLQGPSGVLDVKVLRKDPCALLFLHPKLSEQ

SEQ ID NO: 898393 - protein, 349 aa, Homo sapiens
TWEEAENNMADGEEPEKKRRRIEELLAEKMAVDGGCGDTGDWEGRWNHVKKFLERSGPFTHPDFEPSTESLQFLLDTCKVLVIGAGGLGCELLKNLALSGFRQIHVIDMDTIDVSNLNRQFLFRPKDIGRPKAEVAAEFLNDRVPNCNVVPHFNKIQDFNDTFYRQFHIIVCGLDSIIARRWINGMLISLLNYEDGVLDPSSIVPLIDGGTEGFKGNARVILPGMTACIECTLELYPPQVNFPMCTIASMPRLPEHCIEYVRMLQWPKEQPFGEGVPLDGDDPEHIQWIFQKSLERASQYNIRGVTYRLTQGVVKRIIPAVASTNAVIAAVCATEVFKIATRWAVYIHI

SEQ ID NO: 898394 - protein, 444 aa, Homo sapiens
TWEEAENNMADGEEPEKKRRRIEELLAEKMAVDGGCGDTGDWEGRWNHVKKFLERSGPFTHPDFEPSTEALSGFRQIHVIDMDTIDVSNLNRQFLFRPKDIGRPKAEVAAEFLNDRVPNCNVVPHFNKIQDFNDTFYRQFHIIVCGLDSIIARRWINGMLISLLNYEDGVLDPSSIVPLIDGGTEGFKGNARVILPGMTACIECTLELYPPQVNFPMCTIASMPRLPEHCIEYVRMLQWPKEQPFGEGVPLDGDDPEHIQWIFQKSLERASQYNIRGVTYRLTQGVVKRIIPAVASTNAVIAAVCATEVFKIATSAYIPLNNYLVFNDVDGLYTYTFEAERKENCPACSQLPQNIQFSPSAKLQEVLDYLTNSASLQMKSPAITATLEGKNRTLYLQSVTSIEERTRPNLSKTLKELGLVDGQELAVADVTTPQTVLFKLHFTS

SEQ ID NO: 898395 - protein, 457 aa, Homo sapiens
TWEEAENNMADGEEPEKKRRRIEELLAEKMAVDGGCGDTGDWEGRWNHVKKFLERSGPFTHPDFEPSTESLQFLLDTCKVLVIGAGGLGCELLKNLTIDVSNLNRQFLFRPKDIGRPKAEVAAEFLNDRVPNCNVVPHFNKIQDFNDTFYRQFHIIVCGLDSIIARRWINGMLISLLNYEDGVLDPSSIVPLIDGGTEGFKGNARVILPGMTACIECTLELYPPQVNFPMCTIASMPRLPEHCIEYVRMLQWPKEQPFGEGVPLDGDDPEHIQWIFQKSLERASQYNIRGVTYRLTQGVVKRIIPAVASTNAVIAAVCATEVFKIATSAYIPLNNYLVFNDVDGLYTYTFEAERKENCPACSQLPQNIQFSPSAKLQEVLDYLTNSASLQMKSPAITATLEGKNRTLYLQSVTSIEERTRPNLSKTLKELGLVDGQELAVADVTTPQTVLFKLHFTS

SEQ ID NO: 898396 - protein, 178 aa, Homo sapiens
TWEEAENNMADGEEPEKKRRRIEELLAEKMAVDGGCGDTGDWEGRWNHVKKFLERSGPFTHPDFEPSTESLQFLLDTCKVLVIGAGGLGCELLKNLALSGFRQIHVIDMDTIDVSNLNRQFLFRPKDIGRPKAEVAAEFLNDRVPNCNVVPISYYCMWTGLYHRQKMDKWHADISSKL

SEQ ID NO: 898397 - protein, 471 aa, Homo sapiens; identical to SEQ ID NO: 898389

SEQ ID NO: 898398 - protein, 334 aa, Homo sapiens
TWEEAENNMADGEEPEKKRRRIEELLAEKMAVDGGCGDTGDWEGRWNHVKKFLERSGPFTHPDFEPSTESLQFLLDTCKVLVIGAGGLGCELLKNLALSGFRQIHVIDMDTIDVSNLNRQFLFRPKDIGRPKAEVAAEFLNDRVPNCNVVPHFNKIQDFNDTFYRQFHIIVCGLDSIIARRWINGMLISLLNYEDGVLDPSSIVPLIDGGTEGFKGNARVILPGMTACIECTLELYPPQVNFPMCTIASMPRLPEHCIEYVRMLQWPKEQPFGEGVPLDGDDPEHIQWIFQKSLERASQYNIRGVTYRLTQGVVKRIIPAVASTNAVIAAVVCH

SEQ ID NO: 898399 - protein, 270 aa, Homo sapiens
MADGEEPEKKRRRIEELLAEKMAVDGGCGDTGDWEGRWNHVKKFLERSGPFTHPDFEPSTESLQFLLDTCKVLVIGAGGLGCELLKNLALSGFRQIHVIDMDTIDVSNLNRQFLFRPKDIGRPKAEVAAEFLNDRVPNCNVVPHFNKIQDFNDTFYRQFHIIVCGLDSIIARRWINGMLISLLNYEDGVLDPSSIVPLIDGGTEGFKGNARVILPGMTACIECTLELYPPQVNFPMCTIASMPRLPEHCIEYVRMLQWPKEQPFGERGYH

SEQ ID NO: 898400 - protein, 470 aa, Homo sapiens
YVSSDLTAEEEEEPEKKRRRIEELLAEKMAVDGGCGDTGDWEGRWNHVKKFLERSGPFTHPDFEPSTESLQFLLDTCKVLVIGAGGLGCELLKNLALSGFRQIHVIDMDTIDVSNLNRQFLFRPKDIGRPKAEVAAEFLNDRVPNCNVVPHFNKIQDFNDTFYRQFHIIVCGLDSIIARRWINGMLISLLNYEDGVLDPSSIVPLIDGGTEGFKGNARVILPGMTACIECTLELYPPQVNFPMCTIASMPRLPEHCIEYVRMLQWPKEQPFGEGVPLDGDDPEHIQWIFQKSLERASQYNIRGVTYRLTQGVVKRIIPAVASTNAVIAAVCATEVFKIATSAYIPLNNYLVFNDVDGLYTYTFEAERKENCPACSQLPQNIQFSPSAKLQEVLDYLTNSASLQMKSPAITATLEGKNRTLYLQSVTSIEERTRPNLSKTLKELGLVDGQELAVADVTTPQTVLFKLHFTS

SEQ ID NO: 898401 - protein, 87 aa, Homo sapiens
TWEEAENNMADGEEPEKKRRRIEELLAEKMAVDGGCGDTGDWEGRWNHVKKFLERSGPFTHPDFEPSTESEKRLFLNNCSNSFMFQN

SEQ ID NO: 898402 - protein, 471 aa, Homo sapiens; identical to SEQ ID NO: 898389

SEQ ID NO: 898403 - protein, 363 aa, Homo sapiens
MDTIDVSNLNRQFLFRPKDIGRPKAEVAAEFLNDRVPNCNVVPHFNKIQDFNDTFYRQFHIIVCGLDSIIARRWINGMLISLLNYEDGVLDPSSIVPLIDGGTEGFKGNARVILPGMTACIECTLELYPPQVNFPMCTIASMPRLPEHCIEYVRMLQWPKEQPFGEGVPLDGDDPEHIQWIFQKSLERASQYNIRGVTYRLTQGVVKRIIPAVASTNAVIAAVCATEVFKIATSAYIPLNNYLVFNDVDGLYTYTFEAERKENCPACSQLPQNIQFSPSAKLQEVLDYLTNSASLQMKSPAITATLEGKNRTLYLQSVTSIEERTRPNLSKTLKELGLVDGQELAVADVTTPQTVLFKLHFTS

SEQ ID NO: 898404 - protein, 443 aa, Homo sapiens
TWEEAENNMADGEEPMAVDGGCGDTGDWEGRWNHVKKFLERSGPFTHPDFEPSTESLQFLLDTCKVLVIGAGGLGCELLKNLTIDVSNLNRQFLFRPKDIGRPKAEVAAEFLNDRVPNCNVVPHFNKIQDFNDTFYRQFHIIVCGLDSIIARRWINGMLISLLNYEDGVLDPSSIVPLIDGGTEGFKGNARVILPGMTACIECTLELYPPQVNFPMCTIASMPRLPEHCIEYVRMLQWPKEQPFGEGVPLDGDDPEHIQWIFQKSLERASQYNIRGVTYRLTQGVVKRIIPAVASTNAVIAAVCATEVFKIATSAYIPLNNYLVFNDVDGLYTYTFEAERKENCPACSQLPQNIQFSPSAKLQEVLDYLTNSASLQMKSPAITATLEGKNRTLYLQSVTSIEERTRPNLSKTLKELGLVDGQELAVADVTTPQTVLFKLHFTS

SEQ ID NO: 898405 - protein, 286 aa, Homo sapiens
MLISLLNYEDGVLDPSSIVPLIDGGTEGFKGNARVILPGMTACIECTLELYPPQVNFPMCTIASMPRLPEHCIEYVRMLQWPKEQPFGEGVPLDGDDPEHIQWIFQKSLERASQYNIRGVTYRLTQGVVKRIIPAVASTNAVIAAVCATEVFKIATSAYIPLNNYLVFNDVDGLYTYTFEAERKENCPACSQLPQNIQFSPSAKLQEVLDYLTNSASLQMKSPAITATLEGKNRTLYLQSVTSIEERTRPNLSKTLKELGLVDGQELAVADVTTPQTVLFKLHFTS

SEQ ID NO: 898406 - protein, 439 aa, Homo sapiens
TWEEAENNMADGEEPEKKRRRIEELLAEKMAVDGGCGDTGDWEGRWNHVKKFLERSGPFTHPDFEPSTESLQFLLDTCKVLVIGAGGLGCELLKNLALSGFRQIHVIDMDTIDVSNLNRQFLFRPKDIGRPKAEVAAEFLNDRVPNCNVVPHFNKIQDFNDTFYRQFHIIVCGLDSIIARRWINGMLISLLNYEDGVLDPSSIVPLIDGGTEGFKGNARVILPGMTACIECTLELYPPQVNFPMCTIASMPRLPEHCIEYVRMLQWPKEQPFGEGVPLDGDDPEHIQWIFQKSLERASQYNIRGVTYRLTQGVVKRIIPAVASTNAVIAAVCATEVFKIATSAYIPLNNYLVFNDVDGLYTYTFEAERKENCPACSQLPQNIQFSPSAKLQEVLDYLTNSASLQMKSPAITATLMGRRWIFVPSVKKIYETMYFLTCFK

SEQ ID NO: 898407 - protein, 101 aa, Homo sapiens
LTNGPMGPGARFSQRGDAGSWAACYHEAEGDGAGHQPAPGLGFSWAWAEGWRPVGDVFKTAQQPHLTVSRWGLSPTPRLPREHSLHSYTLATLPEGEAVLE

SEQ ID NO: 898408 - protein, 96 aa, Homo sapiens
LHNESLKFLCITSIPRMYLPPFSLFLKRSIKGKLPQPVKFIIFGLWRMESKSYFQKWPPHPGSLAELRSGSLTCLFSPCFQLPYDDCVFGGQRLTL

SEQ ID NO: 898409 - protein, 388 aa, Homo sapiens
KRSKNGKDRQVGKPQRGTAHQVGVLGISAADDPNSNRSWETPGKEGSLAEGQDYRVQAAGKYRGEGAWSEGLSSHSALIKKFPVRDPSGSSQGVSPMNPSSGFRLLFPPSRGRSQFSFSGLTGLEIPQSLTPPQRNPQPAFIGRRGGAAEPTAVRAAVPPASAPARKQRAARGPAHPQQRPQLVRAMFQAAERPQEWAMEGPRDGLKKERLLDDRHDSGLDSMKDEEYEQMVKELQEIRLEPQEVPRGSEPWKQQLTEDGDSFLHLAIIHEEKALTMEVIRQVKGDLAFLNFQNNLQQTPLHLAVITNQPEIAEALLGAGCDPELRDFRGNTPLHLACEQGCLASVGVLTQSLTPGLILLKVQYMAPFYLQLFMVLDRELGLGACMSD

SEQ ID NO: 898410 - protein, 503 aa, Homo sapiens
KRSKNGKDRQVGKPQRGTAHQVGVLGISAADDPNSNRSWETPGKEGSLAEGQDYRVQAAGKYRGEGAWSEGLSSHSALIKKFPVRDPSGSSQGVSPMNPSSGFRLLFPPSRGRSQFSFSGLTGLEIPQSLTPPQRNPQPAFIGRRGGAAEPTAVRAAVPPASAPARKQRAARGPAHPQQRPQLVRAMFQAAERPQEWAMEGPRDGLKKERLLDDRHDSGLDSMKDEEYEQMVKELQEIRLEPQEVPRGSEPWKQQLTEDGDSFLHLAIIHEEKALTMEVIRQVKGDLAFLNFQNNLQQTPLHLAVITNQPEIAEALLGAGCDPELRDFRGNTPLHLACEQGCLASVGVLTQSCTTPHLHSILKATNYNGHTCLHLASIHGYLGIVELLVSLGADVNAQEPCNGRTALHLAVDLQNPDLVSLLLKCGADVNRVTYQGYSPYQLTWGRPSTRIQQQLGQLTLENLQMLPESEDEESYDTESEFTEFTEDELPYDDCVFGGQRLTL

SEQ ID NO: 898411 - protein, 503 aa, Homo sapiens; identical to SEQ ID NO: 898410

SEQ ID NO: 898412 - protein, 503 aa, Homo sapiens; identical to SEQ ID NO: 898410

SEQ ID NO: 898413 - protein, 503 aa, Homo sapiens; identical to SEQ ID NO: 898410

SEQ ID NO: 898414 - protein, 206 aa, Homo sapiens
MTPLHLAVITNQPEIAEALLGAGCDPELRDFRGNTPLHLACEQGCLASVGVLTQSCTTPHLHSILKATNYNGHTCLHLASIHGYLGIVELLVSLGADVNAQEPCNGRTALHLAVDLQNPDLVSLLLKCGADVNRVTYQGYSPYQLTWGRPSTRIQQQLGQLTLENLQMLPESEDEESYDTESEFTEFTEDELPYDDCVFGGQRLTL

SEQ ID NO: 898415 - protein, 383 aa, Homo sapiens
KRSKNGKDRQVGKPQRGTAHQVGVLGISAADDPNSNRSWETPGKEGSLAEGQDYRVQAAGKYRGEGAWSEGLSSHSALIKKFPVRDPSGSSQGVSPMNPSSGFRLLFPPSRGRSQFSFSGLTGLEIPQSLTPPQRNPQPAFIGRRGGAAEPTAVRAAVPPASAPARKQRAARGPAHPQQRPQLVRAMFQAAERPQEWAMEGPRDGLKKERLLDDRHDSGLDSMKDEEYEQMVKELQEIRLEPQEVPRGSEPWKQQLTEDGDSFLHLAIIHEEKALTMEVIRQVKGDLAFLNFQNNLQQTPLHLAVITNQPEIAEALLGAGCDPELRDFRGNTPLHLACEQGCLASVGVLTQSCTTPHLHSILKATNYNGMSASLPCPTPSEGR

SEQ ID NO: 898416 - protein, 200 aa, Homo sapiens
AAPNNYYIRGRSTWELAVKSLCWCFKQFEGLYVDCEQGCLASVGVLTQSCTTPHLHSILKATNYNGHTCLHLASIHGYLGIVELLVSLGADVNAQEPCNGRTALHLAVDLQNPDLVSLLLKCGADVNRVTYQGYSPYQLTWGRPSTRIQQQLGQLTLENLQMLPESEDEESYDTESEFTEFTEDELPYDDCVFGGQRLTL

SEQ ID NO: 898417 - protein, 383 aa, Homo sapiens; identical to SEQ ID NO: 898415

SEQ ID NO: 898418 - protein, 187 aa, Homo sapiens
MDKVKFRTPLLTPNNLFLFLRQSPTLSPRLECSDAVSAHRNLRSILKATNYNGHTCLHLASIHGYLGIVELLVSLGADVNAQEPCNGRTALHLAVDLQNPDLVSLLLKCGADVNRVTYQGYSPYQLTWGRPSTRIQQQLGQLTLENLQMLPESEDEESYDTESEFTEFTEDELPYDDCVFGGQRLTL

SEQ ID NO: 898419 - protein, 387 aa, Homo sapiens
KRSKNGKDRQVGKPQRGTAHQVGVLGISAADDPNSNRSWETPGKEGSLAEGQDYRVQAAGKYRGEGAWSEGLSSHSALIKKFPVRDPSGSSQGVSPMNPSSGFRLLFPPSRGRSQFSFSGLTGLEIPQSLTPPQRNPQPAFIGRRGGAAEPTAVRAAVPPASAPARKQRAARGPAHPQQRPQLVRAMFQAAERPQEWAMEGPRDGLKKERLLDDRHDSGLDSMKDEEYEQMVKELQEIRLEPQEVPRGSEPWKQQLTEDGDSFLHLAIIHEEKALTMEVIRQVKGDLAFLNFQNNLQQTPLHLAVITNQPEIAEALLGAGCDPELRDFRGNTPLHLACEQGCLASVGVLTQSCTTPHLHSILKATNYNDHTCLHLLYPWLPDSPGDP

SEQ ID NO: 898420 - protein, 503 aa, Homo sapiens; identical to SEQ ID NO: 898410

SEQ ID NO: 898421 - protein, 503 aa, Homo sapiens; identical to SEQ ID NO: 898410

SEQ ID NO: 898422 - protein, 503 aa, Homo sapiens; identical to SEQ ID NO: 898410

SEQ ID NO: 898423 - protein, 503 aa, Homo sapiens; identical to SEQ ID NO: 898410

SEQ ID NO: 898424 - protein, 271 aa, Homo sapiens
ALRNPPQPAPPWAPRGALTTPGVFPSLPHRFLHLAIIHEEKALTMEVIRQVKGDLAFLNFQNNLQQTPLHLAVITNQPEIAEALLGAGCDPELRDFRGNTPLHLACEQGCLASVGVLTQSCTTPHLHSILKATNYNGHTCLHLASIHGYLGIVELLVSLGADVNAQEPCNGRTALHLAVDLQNPDLVSLLLKCGADVNRVTYQGYSPYQLTWGRPSTRIQQQLGQLTLENLQMLPESEDEESYDTESEFTEFTEDELPYDDCVFGGQRLTL

SEQ ID NO: 898425 - protein, 473 aa, Homo sapiens
KRSKNGKDRQVGKPQRGTAHQVGVLGISAADDPNSNRSWETPGKEGSLAEGQDYRVQAAGKYRGEGAWSEGLSSHSALIKKFPVRDPSGSSQGVSPMNPSSGFRLLFPPSRGRSQFSFSGLTGLEIPQSLTPPQRNPQPAFIGRRGGAAEPTAVRAAVPPASAPARKQRAARGPAHPQQRPQLVRAMFQAAERPQEWAMEGPRDGLKKERLLDDRHDSGLDSMKDEEYEQMVKELQEIRLEPQEVPRGSEPWKQQLTEDGDSFLHLAIIHEEKALTMEVIRQVKGDLAFLNFQNNLQQTPLHLAVITNQPEIAEALLGAGCDPELRDFRGNTPLHLACEQGCLASVGVLTQSCTTPHLHSILKATNYNGHTCLHLASIHGYLGIVELLVSLGADVNAQEPCNGRTALHLAVDLQNPDLVSLLLKCGADVNRVTYQGYSPYQLTWGRPSTRIQQQLGQLTLVRVHGVHRGRAAL

SEQ ID NO: 898426 - protein, 424 aa, Homo sapiens
KRSKNGKDRQVGKPQRGTAHQVGVLGISAADDPNSNRSWETPGKEGSLAEGQDYRVQAAGKYRGEGAWSEGLSSHSALIKKFPVRDPSGSSQGVSPMNPSSGFRLLFPPSRGRSQFSFSGLTGLEIPQSLTPPQRNPQPAFIGRRGGAAEPTAVRAAVPPASAPARKQRAARGPAHPQQRPQLVRAMFQAAERPQEWAMEGPRDGLKKERLLDDRHDSGLDSMKDEEYEQMVKELQEIRLEPQEVPRGSEPWKQQLTEDGDSFLHLAIIHEEKALTMEVIRQVKGDLAFLNFQNNLQQTPLHLAVITNQPEIAEALLGAGCDPELRDFRGNTPLHLACEQGCLASVGVLTQSCTTPHLHSILKATNYNGHTCLHLASIHGYLGIVELLVSLGADVNAQVGASCPRRTESGSSCLCCEQKFQMQP

SEQ ID NO: 898427 - protein, 383 aa, Homo sapiens; identical to SEQ ID NO: 898415

SEQ ID NO: 898428 - protein, 447 aa, Homo sapiens
KRSKNGKDRQVGKPQRGTAHQVGVLGISAADDPNSNRSWETPGKEGSLAEGQDYRVQAAGKYRGEGAWSEGLSSHSALIKKFPVRDPSGSSQGVSPMNPSSGFRLLFPPSRGRSQFSFSGLTGLEIPQSLTPPQRNPQPAFIGRRGGAAEPTAVRAAVPPASAPARKQRAARGPAHPQQRPQLVRAMFQAAERPQEWAMEGPRDGLKKERLLDDRHDSGLDSMKDEEYEQMVKELQEIRLEPQEVPRGSEPWKQQLTEDGDSFLHLAIIHEEKALTMEVIRQVKGDLAFLNFQNNLQQTPLHLAVITNQPEIAEALLGAGCDPELRDFRGNTPLHLACEQGCLASVGVLTQSCTTPHLHSILKATNYNGHTCLHLASIHGYLGIVELLVSLGADVNAQEPCNGRTALHLAVDLQNPDLVSLLLKCGADVNRVTYQVDAAANLVVVIV

SEQ ID NO: 898429 - protein, 1338 aa, Homo sapiens
MFLMPTSSELNSGQNFLTQWMTNPSRAGVILNRGFPILEADKEKRAAVDISTSFPIKGTHFSDSFSFINEEDSLLEEQKLESNNPYKPQSDKSETHTAFPCIKKGPQVAACHSAPGHQEENKNDFIPDLASEFKEGAYKDPLFKKLEQLKEVQQKKQEQLKRQQLEQLQRLMEEQEKLLTMVSGQCTLPGLSLLPDDQSQKHRSPGNTTTGERATCCFPSYVYPDPTQEETYPSNILSHEQSNFCRTAHGDFVLTSKRASPNLFSEAQYQEAPVEKNNLKEENRNHPTGESILCWEKVTEQIQEANDKNLQKHDDSSEVANIEERPIKAAIGERKQTFEDYLEEQIQLEEQELKQKQLKEAEGPLPIKAKPKQPFLKRGEGLARFTNAKSKFQKGKESKLVTNQSTSEDQPLFKMDRQQLQRKTALKNKELCADNPILKKDSKARTKSGSVTLSQKPKMLKCSNRKSLSPSGLKIQTGKKCDGQFRDQIKFENKVTSNNKENVTECPKPCDTGCTGWNKTQGKDRLPLSTGPASRLAAKSPIRETMKESESSLDVSLQKKLETWEREKEKENLELDEFLFLEQAADEISFSSNSSFVLKILERDQQICKGHRMSSTPVKAVPQKTNPADPISHCNRSEDLDHTAREKESECEVAPKQLHSLSSADELREQPCKIRKAVQKSTSENQTEWNARDDEGVPNSDSSTDSEEQLDVTIKPSTEDRERGISSREDSPQVCDDKGPFKDTRTQEDKRRDVDLDLSDKDYSSDESIMESIKHKVSEPSRSSSLSLSKMDFDDERTWTDLEENLCNHDVVLGNESTYGTPQTCYPNNEIGILDKTIKRKIAPVKRGEDLSKSRRSRSPPTSELMMKFFPSLKPKPKSDSHLGNELKLNISQDQPPGDNARSQVLREKIIELETEIEKFKAENASLAKLRIERESALEKLRKEIADFEQQKAKELARIEEFKKEEMRKLQKERKVFEKYTTAARTFPDKKEREEIQTLKQQIADLREDLKRKETKWSSTHSRLRSQIQMLVRENTDLREEIKVMERFRLDAWKRAEAIESSLEVEKKDKLANTSVRFQNSQISSGTQVEKYKKNYLPMQGNPPRRSKSAPPRDLGNLDKGQAASPREPLEPLNFPDPEYKEEEEDQDIQGEISHPDGKVEKVYKNGCRVILFPNGTRKEVSADGKTITVTFFNGDVKQVMPDQRVIYYYAAAQTTHTTYPEGLEVLHFSSGQIEKHYPDGRKEITFPDQTVKNLFPDGQEESIFPDGTIVRVQRDGNKLIEFNNGQRELHTAQFKRREYPDGTVKTVYANGHQETKYRSGRIRVKDKEGNVLMDTEL

SEQ ID NO: 898430 - protein, 1136 aa, Homo sapiens
MFLMPTSSELNSGQNFLTQWMTNPSRAGVILNRGFPILEADKEKRAAVDISTSFPIKGTHFSDSFSFINEEDSLLEEQKLESNNPYKPQSDKSETHTAFPCIKKGPQVAACHSAPGHQEENKNDFIPDLASEFKEGAYKDPLFKKLEQLKEVQQKKQEQLKRQQLEQLQRLMEEQEKLLTMVSGQCTLPGLSLLPDDQSQKHRSPGNTTTGERATCCFPSYVYPDPTQEETYPSNILSHEQSNFCRTAHGDFVLTSKRASPNLFSEAQYQEAPVEKNNLKEENRNHPTGESILCWEKVTEQIQEANDKNLQKHDDSSEVANIEERPIKAAIGERKQTFEDYLEEQIQLEEQELKQKQLKEAEGPLPIKAKPKQPFLKRGEGLARFTNAKSKFQKGKESKLVTNQSTSEDQPLFKMDRQQLQRKTALKNKELCADNPILKKDSKARTKSGSVTLSQKPKMLKCSNRKSLSPSGLKIQTGKKCDGQFRDQIKFENKVTSNNKENVTECPKPCDTGCTGWNKTQGKDRLPLSTGPASRLAAKSPIRETMKESESSLDVSLQKKLETWEREKEKENLELDEFLFLEQAADEISFSSNSSFVLKILERDQQICKGHRMSSTPVKAVPQKTNPADPISHCNRSEDLDHTAREKESECEVAPKQLHSLSSADELREQPCKIRKAVQKSTSENQTEWNARDDEGVPNSDSSTDSEEQLDVTIKPSTEDRERGISSREDSPQVCDDKGPFKDTRTQEDKRRDVDLDLSDKDYSSDESIMESIKHKVSEPSRSSSLSLSKMDFDDERTWTDLEENLCNHDVVLGNESTYGTPQTCYPNNEIGILDKTIKRKIAPVKRGEDLSKSRRSRSPPTSELMMKFFPSLKPKPKSDSHLGNELKLNISQDQPPGDNARSQVLREKIIELETEIEKFKAENASLAKLRIERESALEKLRKEIADFEQQKAKELARIEEFKKEEMRKLQKERKVFEKYTTAARTFPDKKEREEIQTLKQQIADLREDLKRKETKWSSTHSRLRSQIQMLVRENTDLREEIKVMERFRLDAWKRAEAIESSLEVEKKDKLANTSVRFQNSQISSGTQVEKYKKNYLPMQGTAQPPHTPSSLLADHLPPLSSFRPFSRNIQLRYTF

SEQ ID NO: 898431 - protein, 1321 aa, Homo sapiens
MLRRLRCRFVLLSCPGFTERLEADKEKRAAVDISTSFPIKGTHFSDSFSFINEEDSLLEEQKLESNNPYKPQSDKSETHTAFPCIKKGPQVAACHSAPGHQEENKNDFIPDLASEFKEGAYKDPLFKKLEQLKEVQQKKQEQLKRQQLEQLQRLMEEQEKLLTMVSGQCTLPGLSLLPDDQSQKHRSPGNTTTGERATCCFPSYVYPDPTQEETYPSNILSHEQSNFCRTAHGDFVLTSKRASPNLFSEAQYQEAPVEKNNLKEENRNHPTGESILCWEKVTEQIQEANDKNLQKHDDSSEVANIEERPIKAAIGERKQTFEDYLEEQIQLEEQELKQKQLKEAEGPLPIKAKPKQPFLKRGEGLARFTNAKSKFQKGKESKLVTNQSTSEDQPLFKMDRQQLQRKTALKNKELCADNPILKKDSKARTKSGSVTLSQKPKMLKCSNRKSLSPSGLKIQTGKKCDGQFRDQIKFENKVTSNNKENVTECPKPCDTGCTGWNKTQGKDRLPLSTGPASRLAAKSPIRETMKESESSLDVSLQKKLETWEREKEKENLELDEFLFLEQAADEISFSSNSSFVLKILERDQQICKGHRMSSTPVKAVPQKTNPADPISHCNRSEDLDHTAREKESECEVAPKQLHSLSSADELREQPCKIRKAVQKSTSENQTEWNARDDEGVPNSDSSTDSEEQLDVTIKPSTEDRERGISSREDSPQVCDDKGPFKDTRTQEDKRRDVDLDLSDKDYSSDESIMESIKHKVSEPSRSSSLSLSKMDFDDERTWTDLEENLCNHDVVLGNESTYGTPQTCYPNNEIGILDKTIKRKIAPVKRGEDLSKSRRSRSPPTSELMMKFFPSLKPKPKSDSHLGNELKLNISQDQPPGDNARSQVLREKIIELETEIEKFKAENASLAKLRIERESALEKLRKEIADFEQQKAKELARIEEFKKEEMRKLQKERKVFEKYTTAARTFPDKKEREEIQTLKQQIADLREDLKRKETKWSSTHSRLRSQIQMLVRENTDLREEIKVMERFRLDAWKRAEAIESSLEVEKKDKLANTSVRFQNSQISSGTQVEKYKKNYLPMQGNPPRRSKSAPPRDLGNLDKGQAASPREPLEPLNFPDPEYKEEEEDQDIQGEISHPDGKVEKVYKNGCRVILFPNGTRKEVSADGKTITVTFFNGDVKQVMPDQRVIYYYAAAQTTHTTYPEGLEVLHFSSGQIEKHYPDGRKEITFPDQTVKNLFPDGQEESIFPDGTIVRVQRDGNKLIEFNNGQRELHTAQFKRREYPDGTVKTVYANGHQETKYRSGRIRVKDKEGNVLMDTEL

SEQ ID NO: 898432 - protein, 398 aa, Homo sapiens
RPEVLWEVRTSGRGRGSDRGGDCGGPFVNAAEIEVSVRAAELPRLHGAVLEINSSSSTLKQQIADLREDLKRKETKWSSTHSRLRSQIQMLVRENTDLREEIKVMERFRLDAWKRAEAIESSLEVEKKDKLANTSVRFQNSQISSGTQVEKYKKNYLPMQGNPPRRSKSAPPRDLGNLDKGQAASPREPLEPLNFPDPEYKEEEEDQDIQGEISHPDGKVEKVYKNGCRVILFPNGTRKEVSADGKTITVTFFNGDVKQVMPDQRVIYYYAAAQTTHTTYPEGLEVLHFSSGQIEKHYPDGRKEITFPDQTVKNLFPDGQEESIFPDGTIVRVQRDGNKLIEFNNGQRELHTAQFKRREYPDGTVKTVYANGHQETKYRSGRIRVKDKEGNVLMDTEL

SEQ ID NO: 898433 - protein, 912 aa, Homo sapiens
MFLMPTSSELNSGQNFLTQWMTNPSRAGVILNRGFPILEADKEKRAAVDISTSFPIKGTHFSDSFSFINEEDSLLEEQKLESNNPYKPQSDKSETHTAFPCIKKGPQVAACHSAPGHQEENKNDFIPDLASEFKEGAYKDPLFKKLEQLKEVQQKKQEQLKRQQLEQLQRLMEEQEKLLTMVSGQCTLPGLSLLPDDQSQKHRSPGNTTTGERATCCFPSYVYPDPTQEETYPSNILSHEQSNFCRTAHGDFVLTSKRASPNLFSEAQYQEAPVEKNNLKEENRNHPTGESILCWEKVTEQIQEANDKNLQKHDDSSEVANIEERPIKAAIGERKQTFEDYLEEQIQLEEQELKQKQLKEAEGPLPIKAKPKQPFLKRGEGLARFTNAKSKFQKGKESKLVTNQSTSEDQPLFKMDRQQLQRKTALKNKELCADNPILKKDSKARTKSGSVTLSQKPKMLKCSNRKSLSPSGLKIQTGKKCDGQFRDQIKFENKVTSNNKENVTECPKPCDTGCTGWNKTQGKDRLPLSTGPASRLAAKSPIRETMKESESSLDVSLQKKLETWEREKEKENLELDEFLFLEQAADEISFSSNSSFVLKILERDQQICKGHRMSSTPVKAVPQKTNPADPISHCNRSEDLDHTAREKESECEVAPKQLHSLSSADELREQPCKIRKAVQKSTSENQTEWNARDDEGVPNSDSSTDSEEQLDVTIKPSTEDRERGISSREDSPQVCDDKGPFKDTRTQEDKRRDVDLDLSDKDYSSDESIMESIKHKVSEPSRSSSLSLSKMDFDDERTWTDLEENLCNHDVVLGNESTYGTPQTCYPNNEIGILDKTIKRKIAPVKRGEDLSKSRRSRSPPTSELMMKFFPSLKPKPKSDSHLGNELKLNISQDQPPGESEHYKICIRMVEI

SEQ ID NO: 898434 - protein, 143 aa, Homo sapiens
MESIKHKVSEPSRSSSLSLSKMDFDDERTWTDLEENLCNHDVVLGNESTYGTPQTCYPNNEIGILDKTIKRKIAPVKRGEDLSKSRRSRSPPTSELMMKFFPSLKPKPKSDSHLGNELKLNISQDQPPGESEHYKICIRMVEI

SEQ ID NO: 898435 - protein, 1388 aa, Homo sapiens
MFLMPTSSELNSGQNFLTQWMTNPSRAGVILNRGFPILEADKEKRAAVDISTSFPIKGTHFSDSFSFINEEDSLLEEQKLESNNPYKPQSDKSETHTAFPCIKKGPQVAACHSAPGHQEENKNDFIPDLASEFKEGAYKDPLFKKLEQLKEVQQKKQEQLKRQQLEQLQRLMEEQEKLLTMVSGQCTLPGLSLLPDDQSQKHRSPGNTTTGERATCCFPSYVYPDPTQEETYPSNILSHEQSNFCRTAHGDFVLTSKRASPNLFSEAQYQEAPVEKNNLKEENRNHPTGESILCWEKVTEQIQEANDKNLQKHDDSSEVANIEERPIKAAIGERKQTFEDYLEEQIQLEEQELKQKQLKEAEGPLPIKAKPKQPFLKRGEGLARFTNAKSKFQKGKESKLVTNQSTSEDQPLFKMDRQQLQRKTALKNKELCADNPILKKDSKARTKSGSVTLSQKPKMLKCSNRKSLSPSGLKIQTGKKCDGQFRDQIKFENKVTSNNKENVTECPKPCDTGCTGWNKTQGKDRLPLSTGPASRLAAKSPIRETMKESESSLDVSLQKKLETWEREKEKENLELDEFLFLEQAADEISFSSNSSFVLKILERDQQICKGHRMSSTPVKAVPQKTNPADPISHCNRSEDLDHTAREKESECEVAPKQLHSLSSADELREQPCKIRKAVQKSTSENQTEWNARDDEGVPNSDSSTDSEEQLDVTIKPSTEDRERGISSREDSPQVCDDKGPFKDTRTQEDKRRDVDLDLSDKDYSSDESIMESIKHKVSEPSRSSSLSLSKMDFDDERTWTDLEENLCNHDVVLGNESTYGTPQTCYPNNEIGILDKTIKRKIAPVKRGEDLSKSRRSRSPPTSELMMKFFPSLKPKPKSDSHLGNELKLNISQDQPPGDNARSQVLREKIIELETEIEKFKAENASLAKLRIERESALEKLRKEIADFEQQKAKELARIEEFKKEEMRKLQKERKVFEKYTTAARTFPDKKEREEIQTLKQQIADLREDLKRKETKWSSTHSRLRSQIQMLVRENTDLREEIKVMERFRLDAWKRAEAIESSLEVEKKDKLANTSVRFQNSQISSGTQVEKYKKNYLPMQGTAQPPHTPSSLLADHLPPLSSFRPFSRNIQLVTLFNMEVRFWHLLETLPSNPPRRSKSAPPRDLGNLDKGQAASPREPLEPLNFPDPEYKEEEEDQDIQGEISHPDGKVEKVYKNGCRVILFPNGTRKEVSADGKTITVTFFNGDVKQVMPDQRVIYYYAAAQTTHTTYPEGLEVLHFSSGQIEKHYPDGRKEITFPDQTVKNLFPDGQEESIFPDGTIVRVQRDGNKLIEFNNGQRELHTAQFKRREYPDGTVKTVYANGHQETKYRSGRIRVKDKEGNVLMDTEL

SEQ ID NO: 898436 - protein, 1101 aa, Homo sapiens
MFLMPTSSELNSGQNFLTQWMTNPSRAGVILNRGFPILEADKEKRAAVDISTSFPIKGTHFSDSFSFINEEDSLLEEQKLESNNPYKPQSDKSETHTAFPCIKKGPQVAACHSAPGHQEENKNDFIPDLASEFKEGAYKDPLFKKLEQLKEVQQKKQEQLKRQQLEQLQRLMEEQEKLLTMVSGQCTLPGLSLLPDDQSQKHRSPGNTTTGERATCCFPSYVYPDPTQEETYPSNILSHEQSNFCRTAHGDFVLTSKRASPNLFSEAQYQEAPVEKNNLKEENRNHPTGESILCWEKVTEQIQEANDKNLQKHDDSSEVANIEERPIKAAIGERKQTFEDYLEEQIQLEEQELKQKQLKEAEGPLPIKAKPKQPFLKRGEGLARFTNAKSKFQKGKESKLVTNQSTSEDQPLFKMDRQQLQRKTALKNKELCADNPILKKDSKARTKSGSVTLSQKPKMLKCSNRKSLSPSGLKIQTGKKCDGQFRDQIKFENKVTSNNKENVTECPKPCDTGCTGWNKTQGKDRLPLSTGPASRLAAKSPIRETMKESESSLDVSLQKKLETWEREKEKENLELDEFLFLEQAADEISFSSNSSFVLKILERDQQICKGHRMSSTPVKAVPQKTNPADPISHCNRSEDLDHTAREKESECEVAPKQLHSLSSADELREQPCKIRKAVQKSTSENQTEWNARDDEGVPNSDSSTDSEEQLDVTIKPSTEDRERGISSREDSPQVCDDKGPFKDTRTQEDKRRDVDLDLSDKDYSSDESIMESIKHKVSEPSRSSSLSLSKMDFDDERTWTDLEENLCNHDVVLGNESTYGTPQTCYPNNEIGILDKTIKRKIAPVKRGEDLSKSRRSRSPPTSELMMKFFPSLKPKPKSDSHLGNELKLNISQDQPPGDNARSQVLREKIIELETEIEKFKAENASLAKLRIERESALEKLRKEIADFEQQKAKELARIEEFKKEEMRKLQKERKVFEKYTTAARTFPDKKEREEIQDFKTANSRFTGRFEKKGNQMVKYTQPSQKPDTNVSQREHRPPGRNKSDGKIPTGCLEESRSHREQPRGGEEGQACEHICSISKQSDFFRNPGRKIQEKLSSNAR

SEQ ID NO: 898437 - protein, 587 aa, Homo sapiens
MFSSLHSALLTDSFIILSFLAQNKLCFIQFTKKMESSDVNKRLEKLSALDYKIFYYEIPGPINKTTERHLAINCVHDRVVCWWPLVNDDAWPWAPISSEKDRANLLLLGYAQGRLEVLSSVRTEWDPLDVRFGTKQPYQVFTVEHSVSVDKEPMADSCIYECIRNKIQCVSVTRIPLKSKAISCCRNVTEDKLILGCEDSSLILYETHRRVTLLAQTELLPSLISCHPSGAILLVGSNQGELQIFDMALSPINIQLLAEDRLPRETLQFSKLFDASSSLVQMQWIAPQVVSQKGEGSDIYDLLFLRFERGPLGVLLFKLGVFTRGQLGLIDIIFQYIHCDEIYEAINILSSMNWDTLGHQCFISMSAIVNHLLRQKLTPEREAQLETSLGTFYAPTRPLLDSTILEYRDQISKYARRFFHHLLRYQRFEKAFLLAVDVGARDLFMDIHYLALDKGELALAEVARKRASDIDAESITSGVELLGPLDRGDMLNEAFIGLSLAPQGEDSFPDNLPPSCPTHRHILQQRILNGSSNRQIIDRRNELEKDICSGFLMTNTCNAEDGELREDGREQEIRDGGSLKMIHFGLV

SEQ ID NO: 898438 - protein, 613 aa, Homo sapiens
MRREFCWDAYSKAAGSRASSPLPRQDRDSFCHQMSFCLTELHLWSLKNTLHIADRDIGIYQYYDKKDPPATEHGNLEKKQKLAESRDYPWTLKNRRPEKLRDSLKELEELMQNSRCVLSKWKNKYVCQPGSGVLVSLSLSGPQLEKVVIDRSLVGKLISDTISDALLTDSFIILSFLAQNKLCFIQFTKKMESSDVNKRLEKLSALDYKIFYYEIPGPINKTTERHLAINCVHDRVVCWWPLVNDDAWPWAPISSEKDRANLLLLGYAQGRLEVLSSVRTEWDPLDVRFGTKQPYQVFTVEHSVSVDKEPMADSCIYECIRNKIQCVSVTRIPLKSKAISCCRNVTEDKLILGCEDSSLILYETHRRVTLLAQTELLPSLISCHPSGAILLVGSNQGELQIFDMALSPINIQLLAEDRLPRETLQFSKLFDASSSLVQMQWIAPQVVSQKGEGSDIYDLLFLRFERGPLGVLLFKLGVFTRGQLGLIDIIFQYIHCDEIYEAINILSSMNWDTLGHQCFISMSAIVNHLLRQKLTPEREAQLETSLGTFYAPTRPLLDSTILEYRDQISKYARRFFHHLLRYQRFEKAFLLAVDVGARDLFMNSWDPWTEGIC

SEQ ID NO: 898439 - protein, 584 aa, Homo sapiens
MRREFCWDAYSKAAGSRASSPLPRQDRDSFCHQMSFCLTELHLWSLKNTLHIADRDIGIYQYYDKKDPPATEHGNLEKKQKLAESRDYPWTLKNRRPEKLRDSLKELEELMQNSRCVLSKWKNKYVCQPGSGVLVSLSLSGPQLEKVVIDRSLVGKLISDTISDALLTDSFIILSFLAQNKLCFIQFTKKMESSDVNKRLEKLSALDYKIFYYEIPGPINKTTERHLAINCVHDRVVCWWPLVNDDAWPWAPISSEKDRANLLLLGYAQGRLEVLSSVRTEWDPLDVRFGTKQPYQVFTVEHSVSVDKEPMADSCIYECIRNKIQCVSVTRIPLKSKAISCCRNVTEDKLILGCEDSSLILYETHRRVTLLAQTELLPSLISCHPSGAILLVGSNQGELQIFDMALSPINIQLLAEDRLPRETLQFSKLFDASSSLVQMQWIAPQVVSQKGEGSDIYDLLFLRFERGPLGVLLFKLGVFTRGQLGLIDIIFQYIHCDEIYEAINILSSMNWDTLGHQCFISMSAIVNHLLRQKLTPEREAQLETSLGTFYAPTRPLLDSTILEYRDQISKYARRFFHHLLRNSC

SEQ ID NO: 898440 - protein, 615 aa, Homo sapiens
MRREFCWDAYSKAAGSRASSPLPRQDRDSFCHQMSFCLTELHLWSLKNTLHIADRDIGIYQYYDKKDPPATEHGNLEKKQKLAESRDYPWTLKNRRPEKLRDSLKELEELMQNSRCVLSKWKNKYVCQPGSGVLVSLSLSGPQLEKVVIDRSLVGKLISDTISDALLTDSFIILSFLAQNKLCFIQFTKKMESSDVNKRLEKLSALDYKIFYYEIPGPINKTTERHLAINCVHDRVVCWWPLVNDDAWPWAPISSEKDRANLLLLGYAQGRLEVLSSVRTEWDPLDVRFGTKQPYQVFTVEHSVSVDKEPMADSCIYECIRNKIQCVSVTRIPLKSKAISCCRNVTEDKLILGCEDSSLILYETHRRVTLLAQTELLPSLISCHPSGAILLVGSNQGELQIFDMALSPINIQLLAEDRLPRETLQFSKLFDASSSLVQMQWIAPQVVSQKGEGSDIYDLLFLRFERGPLGVLLFKLGVFTRGQLGLIDIIFQYIHCDEIYEAINILSSMNWDTLGHQCFISMSAIVNHLLRQKLTPEREAQLETSLGTFYAPTRPLLDSTILEYRDQISKYARRFFHHLLRYQRFEKAFLLAVDVGARDLFMVLGHMCGTCRFVT

SEQ ID NO: 898441 - protein, 554 aa, Homo sapiens
MESSDVNKRLEKLSALDYKIFYYEIPGPINKTTERHLAINCVHDRVVCWWPLVNDDAWPWAPISSEKDRANLLLLGYAQGRLEVLSSVRTEWDPLDVRFGTKQPYQVFTVEHSVSVDKEPMADSCIYECIRNKIQCVSVTRIPLKSKAISCCRNVTEDKLILGCEDSSLILYETHRRVTLLAQTELLPSLISCHPSGAILLVGSNQGELQIFDMALSPINIQLLAEDRLPRETLQFSKLFDASSSLVQMQWIAPQVVSQKGEGSDIYDLLFLRFERGPLGVLLFKLGVFTRGQLGLIDIIFQYIHCDEIYEAINILSSMNWDTLGHQCFISMSAIVNHLLRQKLTPEREAQLETSLGTFYAPTRPLLDSTILEYRDQISKYARRFFHHLLRYQRFEKAFLLAVDVGARDLFMDIHYLALDKGELALAEVARKRASDIDAESITSGVELLGPLDRGDMLNEAFIGLSLAPQGEDSFPDNLPPSCPTHRHILQQRILNGSSNRQIIDRRNELEKDICSGFLMTNTCNAEDGELREDGREQEIRDGGSLKMIHFGLV

SEQ ID NO: 898442 - protein, 587 aa, Homo sapiens; identical to SEQ ID NO: 898437

SEQ ID NO: 898443 - protein, 671 aa, Homo sapiens
MRREFCWDAYSKAAGSRASSPLPRQDRDSFCHQMSFCLTELHLWSLKNTLHIADRDIGIYQYYDKKDPPATEHGNLEKKQKLAESRDYPWTLKNRRPEKLRDSLKELEELMQNSRCVLSKWKNKYVCQPGSGVLVSLSLSGPQLEKVVIDRSLVGKLISDTISDALLTDSFIILSFLAQNKLCFIQFTKKMESSDVNKRLEKLSALDYKIFYYEIPGPINKTTERHLAINCVHDRVVCWWPLVNDDAWPWAPISSEKDRANLLLLGYAQGRLEVLSSVRTEWDPLDVRFGTKQPYQVFTVEHSVSVDKEPMADSCIYECIRNKIQCVSVTRIPLKSKAISCCRNVTEDKLILGCEDSSLILYETHRRVTLLAQTELLPSLISCHPSGAILLVGSNQGELQIFDMALSPINIQLLAEDRLPRETLQFSKLFDASSSLVQMQWIAPQVVSQKGEGSDIYDLLFLRFERGPLGVLLFKLGVFTRGQLGLIDIIFQYIHCDEIYEAINILSSMNWDTLGHQCFISMSAIVNHLLRQKLTPEREAQLETSLGTFYAPTRPLLDSTILEYRDQISKYARRFFHHLLRYQRFEKAFLLAVDVGARDLFMDIHYLALDKGELALAEVARKRASDIDAESITSGVERATTIMNTNIHGQHLQQALVTTYSYKPQNISGQG

SEQ ID NO: 898444 - protein, 77 aa, Homo sapiens
SLRCSRHSHLATSSPLPCARRAGIGPGESGAVVRCSTVCGEEKGRRGENCTGSRRSSHRPAVGLFTIGSKGKRRRSI

SEQ ID NO: 898445 - protein, 367 aa, Homo sapiens
FESGAGDNTSIKDKFEAAGGVDIGSWFCAGNENTSEDKSAPKAKAKKSSESRGIYPYMVPGAGMGSWDGAMIWSETKFAHQSEASFPVEDESRKQTRTGEKTRPWSCRCKHEANMDPRDLEKLICMIEMTEDPSVHEIANNALYNSADYSYSHEVVRNVGGISVIESLLNNPYPSVRQKALNALNNISVAAENHRKVKTYLNQVCEDTVTYPLNSNVQLAGLRLIRHLTITSEYQHMVTNYISEFLRLLTVGSGETKDHVLGMLLNFSKNPSMTKDLLIANAPTSLINIFSKKETKENILNALSLFENINYHFKRRAKAFTQDKFSKNSLYFLFQRPKACAKKLRALAAECNDPEVKERVELLISKL

SEQ ID NO: 898446 - protein, 192 aa, Homo sapiens
MSAAGLKITGSKETKRRLLLISIDWVYCQEKQEERRELPRIITGPPPEAAVVAFEWLKTSTLTGLHPQLPLSLPQPECALPYLVRAFSRGDYMGRIQEVGWVTAGLVIWAGTCYYIYKFTKGRAQSVRTLARNGSTVKMETVVGVQSQTLAINEAEIKTKPQVEIGAETGARSGPGAEVETKATAILLISKL

SEQ ID NO: 898447 - protein, 146 aa, Homo sapiens [sequence omitted]

SEQ ID NO: 898448 - protein, 66 aa, Homo sapiens
APTPGPDQPGERATGKPPLVRFGPSSGRFGAKVFELICEDSRAIHKVRKYSRKRQLLEGQRIRGWW

SEQ ID NO: 898449 - protein, 312 aa, Homo sapiens
MANRTVKDAHSIHGTNPQYLVEKIIRTRIYESKYWKEECFGLTAELVVDKAMELRFVGGVYGGNIKPTPFLCLTLKMLQIQPEKDIIVEFIKNEDFKYVRMLGALYMRLTGTAIDCYKYLEPLYNDYRKIKSQNRNGEFELMHVDEFIDELLHSERVCDIILPRLQKRYVLEEAEQLEPRVSALEEDMDDVESSEEEEEEDEKLERVPSPDHRRRSYRDLDKPRRSPTLRYRRSRSRSPRRRSRSPKRRSPSPRRERHRSKSPRRHRSRSRDRRHRSRSKSPGHHRSHRHRSHSKSPERSKKSHKKSRRGNE

SEQ ID NO: 898450 - protein, 146 aa, Homo sapiens [sequence omitted]

SEQ ID NO: 898451 - protein, 146 aa, Homo sapiens [sequence omitted]

SEQ ID NO: 898452 - protein, 146 aa, Homo sapiens [sequence omitted]

SEQ ID NO: 898453 - protein, 146 aa, Homo sapiens [sequence omitted]

SEQ ID NO: 898454 - protein, 149 aa, Homo sapiens [sequence omitted]

SEQ ID NO: 898455 - protein, 146 aa, Homo sapiens [sequence omitted]

SEQ ID NO: 898456 - protein, 148 aa, Homo sapiens
EDPRREVEVEVKEGVSWKECHHLITAGEATETWTSPVALPHCATGGVGAGLPEGGVDLPKGEAPPLAEKGIGARVQDVTAAGPEIGGTDPVPSPQVITVVTDTGATQSLPKGLRRATRRAGEGMSNGLSLVLVHMASCGYKDICMWKD

SEQ ID NO: 898457 - protein, 312 aa, Homo sapiens; identical to SEQ ID NO: 898449

SEQ ID NO: 898458 - protein, 412 aa, Homo sapiens
MDTSPSRKYPVKKRVKIHPNTVMVKYTSHYPQPGDDGYEEINEGYGNFMEENPKKGLLSEMKKKGRAFFGTMDTLPPPTEDPMINEIGQFQSFAEKNIFQSRKMWIVLFGSALAHGCVALITRLVSDRSKVPSLELIFIRSVFQVLSVLVVCYYQEAPFGPSGYRLRLFFYGVCNVISITCAYTSFSIVPPSNGTTMWRATTTVFSAILAFLLVDEKMAYVDMATVVCSILGVCLVMIPNIVDEDNSLLNAWKEAFGYTMTVMAGLTTALSMIVYRSIKEKISMWTALFTFGWTGTIWGISTMFILQEPIIPLDGETWSYLIAICVCSTAAFLGVYYALDKFHPALVSTVQHLEIVVAMVLQLLVLHIFPSIYDVFGGVIIMISVFVLAGYKLYWRNLRRQDYQEILDSPIK

SEQ ID NO: 898459 - protein, 412 aa, Homo sapiens; identical to SEQ ID NO: 898458

SEQ ID NO: 898460 - protein, 412 aa, Homo sapiens; identical to SEQ ID NO: 898458

SEQ ID NO: 898461 - protein, 412 aa, Homo sapiens; identical to SEQ ID NO: 898458

SEQ ID NO: 898462 - protein, 412 aa, Homo sapiens; identical to SEQ ID NO: 898458

SEQ ID NO: 898463 - protein, 412 aa, Homo sapiens; identical to SEQ ID NO: 898458

SEQ ID NO: 898464 - protein, 412 aa, Homo sapiens; identical to SEQ ID NO: 898458

SEQ ID NO: 898465 - protein, 412 aa, Homo sapiens; identical to SEQ ID NO: 898458

SEQ ID NO: 898466 - protein, 412 aa, Homo sapiens; identical to SEQ ID NO: 898458

SEQ ID NO: 898467 - protein, 93 aa, Homo sapiens
KQTGQVHKHCIAMQVRHLDGSTNMRTDRSGTICSSELPGAFEAAGFHLNEHLYNMIIRRYSDESGNMDFDNFISCLVRLDAMFLRSHVNMRTD

SEQ ID NO: 898468 - protein, 282 aa, Homo sapiens
MFLVNSFLKGGGGGGGGGGGLGGGLGNVLGGLISGAGGGGGGGGGGGGGGGGGGGGTAMRILGGVISAISEAAAQYNPEPPPPRTHYSNIEANESEEVRQFRRLFAQLAGDDMEVSATELMNILNKVVTRHPDLKTDGFGIDTCRSMVAVMDSDTTGKLGFEEFKYLWNNIKRWQAIYKQFDTDRSGTICSSELPGAFEAAGFHLNEHLYNMIIRRYSDESGNMDFDNFISCLVRLDAMFRAFKSLDKDGTGQIQVNIQGVAAADYVFLNWEPQTRPLTALL

SEQ ID NO: 898469 - protein, 282 aa, Homo sapiens; identical to SEQ ID NO: 898468

SEQ ID NO: 898470 - protein, 282 aa, Homo sapiens; identical to SEQ ID NO: 898468

SEQ ID NO: 898471 - protein, 282 aa, Homo sapiens; identical to SEQ ID NO: 898468

SEQ ID NO: 898472 - protein, 170 aa, Homo sapiens
MEVSATELMNILNKVVTRHPDLKTDGFGIDTCRSMVAVMDSDTTGKLGFEEFKYLWNNIKRWQAIYKQFDTDRSGTICSSELPGAFEAAGFHLNEHLYNMIIRRYSDESGNMDFDNFISCLVRLDAMFRAFKSLDKDGTGQIQVNIQGVAAADYVFLNWEPQTRPLTALL

SEQ ID NO: 898473 - protein, 292 aa, Homo sapiens
MFLVNSFLKGGGGGGGGGGGLGGGLGNVLGGLISGAGGGGGGGGGGGGGGGGGGGGTAMRILGGVISAISEAAAQYNPEPPPPRTHYSNIEANESEEVRQFRRLFAQLAGDDMEVSATELMNILNKVVTRHPDLKTDGFGIDTCRSMVAVMDLSLFLTPSHQSDTTGKLGFEEFKYLWNNIKRWQAIYKQFDTDRSGTICSSELPGAFEAAGFHLNEHLYNMIIRRYSDESGNMDFDNFISCLVRLDAMFRAFKSLDKDGTGQIQVNIQGVAAADYVFLNWEPQTRPLTALL

SEQ ID NO: 898474 - protein, 292 aa, Homo sapiens; identical to SEQ ID NO: 898473

SEQ ID NO: 898475 - protein, 283 aa, Homo sapiens
MFLVNSFLKGGGGGGGGGGGLGGGLGNVLGGLISGAGGGGGGGGGGGGGGGGGGGGTAMRILGGVISAISEAAAQYNPEPPPPRTHYSNIEANESEEVRQFRRLFAQLAGDDMEVSATELMNILNKVVTRHPDLKTDGFGIDTCRSMVAVMDSDTTGKLGFEEFKYLWNNIKRWQAIYKQFDTDRSGTICSSELPGAFEAAGFHLNEHLYNMIIRRYSDESGNMDFDNFISCLVRLDAMFRAFKSLDKDGTGQIQVNIQGGKDPHIGVWVPGRTPPLSPSYQL

SEQ ID NO: 898476 - protein, 125 aa, Homo sapiens
KQTGQVHKHCIAMQVRHLDGSTNMRTDRSGTICSSELPGAFEAAGFHLNEHLYNMIIRRYSDESGNMDFDNFISCLVRLDAMFRAFKSLDKDGTGQIQVNIQGVAAADYVFLNWEPQTRPLTALL

SEQ ID NO: 898477 - protein, 282 aa, Homo sapiens; identical to SEQ ID NO: 898468

SEQ ID NO: 898478 - protein, 282 aa, Homo sapiens; identical to SEQ ID NO: 898468

SEQ ID NO: 898479 - protein, 256 aa, Homo sapiens
MFLVNSFLKGGGGGGGGGGGLGGGLGNVLGGLISGAGGGGGGGGGGGGGGGGGGGGTAMRILGGVISAISEAAAQYNPEPPPPRTHYSNIEANESEEVRQFRRLFAQLAGDDMEVSATELMNILNKVVTRHPDLKTDGFGIDTCRSMVAVMDSDTTGKLGFEEFKYLWNNIKRWQAIYKQFDTDRSGTICSSELPGAFEAAGFHLNEHLYNMIIRRYSDESGNMDFDNFISCLVRLDAMFPFKSLCTEMALERIDE

SEQ ID NO: 898480 - protein, 249 aa, Homo sapiens
MFLVNSFLKGGGGGGGGGGGLGGGLGNVLGGLISGAGGGGGGGGGGGGGGGGGGGGTAMRILGGVISAISEAAAQYNPEPPPPRTHYSNIEANESEEVRQFRRLFAQLAGDDMEVSATELMNILNKVVTRHPDLKTDGFGIDTCRSMVAVMDSDTTGKLGFEEFKYLWNNIKRWQAIYKQFDTDRSGTICSSELPGAFEAAGFHLNEHLYNMIIRRSHPLRNLSPVPVPSLALVMPPNAPEGPLSVLGG

SEQ ID NO: 898481 - protein, 85 aa, Homo sapiens
MGQRLTSIDTCSINNDHLNAKKYLPQNHATIITPAGLNHHRGQPSIINRREHEARTIMRDYRDEIHYAGPQQTIAPNRDPTSDTT

SEQ ID NO: 898482 - protein, 205 aa, Homo sapiens
MFLVNSFLKGGGGGGGGGGGLGGGLGNVLGGLISGAGGGGGGGGGGGGGGGGGGGGTAMRILGGVISAISEAAAQYNPEPPPPRTHYSNIEANESEEVRQFRRLFAQLAGDDMEVSATELMNILNKVVTRHPDLKTDGFGIDTCRSMVAVMDSDTTGKLGFEEFKYLWNNIKRWQAIYKQFDTDRSGTICSSELPGAFEAAVPPE

SEQ ID NO: 898483 - protein, 191 aa, Homo sapiens
MFLVNSFLKGGGGGGGGGGGLGGGLGNVLGGLISGAGGGGGGGGGGGGGGGGGGGGTAMRILGGVISAISEAAAQYNPEPPPPRTHYSNIEANESEEVRQFRRLFAQLAGDDMEVSATELMNILNKVVTRHPDLKTDGFGIDTCRSMVAVMDSDTTGKLGFEEFKYLWNNIKRWQAYTNSSTLISLDQWTS

SEQ ID NO: 898484 - protein, 40 aa, Homo sapiens
MRNSNESCRRTQAKERRQRTDTNKPEKHTENEQSNEHKDT

SEQ ID NO: 898485 - protein, 282 aa, Homo sapiens; identical to SEQ ID NO: 898468

SEQ ID NO: 898486 - protein, 282 aa, Homo sapiens; identical to SEQ ID NO: 898468

SEQ ID NO: 898487 - protein, 224 aa, Homo sapiens
MRILGGVISAISEAAAQYNPEPPPPRTHYSNIEANESEEVRQFRRLFAQLAGDDMEVSATELMNILNKVVTRHPDLKTDGFGIDTCRSMVAVMDSDTTGKLGFEEFKYLWNNIKRWQAIYKQFDTDRSGTICSSELPGAFEAAGFHLNEHLYNMIIRRYSDESGNMDFDNFISCLVRLDAMFRAFKSLDKDGTGQIQVNIQGVAAADYVFLNWEPQTRPLTALL

SEQ ID NO: 898488 - protein, 252 aa, Homo sapiens
MFLVNSFLKGGGGGGGGGGGLGGGLGNVLGGLISGAGGGGGGGGGGGGGGGGGGGGTAMRILGGVISAISEAAAQYNPEPPDMEVSATELMNILNKVVTRHPDLKTDGFGIDTCRSMVAVMDSDTTGKLGFEEFKYLWNNIKRWQAIYKQFDTDRSGTICSSELPGAFEAAGFHLNEHLYNMIIRRYSDESGNMDFDNFISCLVRLDAMFRAFKSLDKDGTGQIQVNIQGVAAADYVFLNWEPQTRPLTALL

SEQ ID NO: 898489 - protein, 282 aa, Homo sapiens; identical to SEQ ID NO: 898468

SEQ ID NO: 898490 - protein, 85 aa, Homo sapiens; identical to SEQ ID NO: 898481

SEQ ID NO: 898491 - protein, 267 aa, Homo sapiens
MFLVNSFLKGGGGGGGGGGGLGGGLGNVLGGLISGAGGGGGGGGGGGGGGGGGGGGTAMRILGGVISAISEAAAQYNPEPPPPRTHYSNIEANESEEVRQFRRLFAQLAGDDMEVSATELMNILNKVVTRHPDLKTDGFGIDTCRSMVAVMDSDTTGKLGFEEFKYLWNNIKRWQAIYKQFDTDRSGTICSSELPGAFEAADSDESGNMDFDNFISCLVRLDAMFRAFKSLDKDGTGQIQVNIQGVAAADYVFLNWEPQTRPLTALL

SEQ ID NO: 898492 - protein, 288 aa, Homo sapiens
MFLVNSFLKGGGGGGGGGGGLGGGLGNVLGGLISGAGGGGGGGGGGGGGGGGGGGGTAMRILGGVISAISEAAAQYNPEPPPPRTHYSNIEANESEEVRQFRRLFAQLAGDDMEVSATELMNILNKVVTRHPDLKTDGFGIDTCRSMVAVMDSDTTGKLGFEEFKYLWNNIKRWQAIYKQFDTDRSGTICSSELPGAFEAAGFHLNEHLYNMIIRRYSDESGNMDFDNFISCLVRLDAMFRAFKSLDKDGTGQIQVNIQGVAAADYVFLNWEPQTRPLTALPLGSRTL

SEQ ID NO: 898493 - protein, 247 aa, Homo sapiens
MFLVNSFLKGGGGGGGGGGGLGGGLGNVLGGLISGAGGGGGGGGGGGGGGGGGGGGTAMRILGGVISAISEAAAQYNPEPPPPRTHYSNIEANESEEVRQFRRLFAQLAGDDMEVSATELMNILNKVVTRHPDLKTDGFGIDTCRSMVAVMDSDTTGKLGFEEFKYLWNNIKRWQAIYKQFDTDRSGTICSSELPGAFEAAGFHLNEHLYNMIIRRYSDESGNMDFDNFISCLVRLDAMFPARPRRK

SEQ ID NO: 898494 - protein, 129 aa, Homo sapiens
MFLVNSFLKGGGGGGGGGGGLGGGLGNVLGGLISGAGGGGGGGGGGGGGGGGGGGGTAMRILGGVISAISEAAAQYNPEPPPPRTHYSNIEANPWALGHSNKLCPRVSPFPPGPAHTHSVTSPLYLCQA

SEQ ID NO: 898495 - protein, 85 aa, Homo sapiens; identical to SEQ ID NO: 898481

SEQ ID NO: 898496 - protein, 149 aa, Homo sapiens
MFLVNSFLKGGGGGGGGGGGLGGGLGNVLGGLISGAGGGGGGGGGGGGGGGGGGGGTAMRILGGVISAISEAAAQYNPEPPPPRTHYSNIEANESEEVRQFRRLFAQLAGDDMEVSATELMNILNKVVTRQPDLKADGFGPIEGILRCS

SEQ ID NO: 898497 - protein, 184 aa, Homo sapiens
MAEPQPPSGGLTDEAALSCCSDADPSTKDFLLQQTMLRVKDPKKSLDFYTRVLGMTLIQKCDFPIMKFSLYFLAYEDKNDIPKEKDEKIAWALSRKATLELTHNWGTEDDETQSYHNGNSDPRGFGHIGIAVPDVYSACKRFEELGVKFVKKPDDGKMKGLAFIQDPDGYWIEILNPNKMATLM

SEQ ID NO: 898498 - protein, 184 aa, Homo sapiens; identical to SEQ ID NO: 898497

SEQ ID NO: 898499 - protein, 184 aa, Homo sapiens; identical to SEQ ID NO: 898497

SEQ ID NO: 898500 - protein, 184 aa, Homo sapiens; identical to SEQ ID NO: 898497

SEQ ID NO: 898501 - protein, 213 aa, Homo sapiens
HASRTRGSRTRGRTGPRRSVGDSSVPWVPSSVILQRSHGRTAAPALSCCSDADPSTKDFLLQQTMLRVKDPKKSLDFYTRVLGMTLIQKCDFPIMKFSLYFLAYEDKNDIPKEKDEKIAWALSRKATLELTHNWGTEDDETQSYHNGNSDPRGFGHIGIAVPDVYSACKRFEELGVKFVKKPDDGKMKGLAFIQDPDGYWIEILNPNKMATLM

SEQ ID NO: 898502 - protein, 119 aa, Homo sapiens [sequence omitted]

SEQ ID NO: 898503 - protein, 104 aa, Homo sapiens
RTRGSTHASGPTRRRKATLELTHNWGTEDDETQSYHNGNSDPRGFGHIGIAVPDVYSACKRFEELGVKFVKKPDDGKMKGLAFIQDPDGYWIEILNPNKMATLM

SEQ ID NO: 898504 - protein, 246 aa, Homo sapiens
MAEPQPPSGGLTDEAALSCCSDADPSTKDFLLQQTMLRVKDPKKSLDFYTRVLGMTLIQKCDFPIMKFSLYFLAYEDKNDIPKEKDEKIAWALSRKATLELTHNWGTEDDETQSYHNGNSDPRGFGHIGIAVPDVYSACKRFEELGVKFVKKPDDGKMKGLAFIQDPDGYWIEILNPNKGNNVIQDIYIPEASRTDGSLSRFKLFFSPFPLPISAVPFHLTVQSFWFSSSALSHVLEYSCVTLFFR

SEQ ID NO: 898505 - protein, 184 aa, Homo sapiens; identical to SEQ ID NO: 898497

SEQ ID NO: 898506 - protein, 184 aa, Homo sapiens; identical to SEQ ID NO: 898497

SEQ ID NO: 898507 - protein, 184 aa, Homo sapiens; identical to SEQ ID NO: 898497

SEQ ID NO: 898508 - protein, 287 aa, Homo sapiens
MAEPQPPSGGLTDEAALSCCSDADPSTKDFLLQQTMLRVKDPKKSLDFYTRVLGMTLIQKCDFPIMKFSLYFLAYEDKNDIPKEKDEKIAWALSRKATLELTHNGAAEDDEDDDVDTKKQKTDEDDYDSKKDNVIPKKKKAGVTYTPSIPISESKTWSPSSREAAPPPWRAPEMNGLFTTNRNHENLHTGGYKTQLQAAFFYNVFTKHIGCHAMTLTSVLVRPPFKIGDNSLGRRPAASVGPLKPGGTLTGTTLPPLLAANVFEYPAHLWTALISLFLLFLSFIFVL

SEQ ID NO: 898509 - protein, 184 aa, Homo sapiens; identical to SEQ ID NO: 898497

SEQ ID NO: 898510 - protein, 184 aa, Homo sapiens; identical to SEQ ID NO: 898497

SEQ ID NO: 898511 - protein, 184 aa, Homo sapiens; identical to SEQ ID NO: 898497

SEQ ID NO: 898512 - protein, 149 aa, Homo sapiens [sequence omitted]

SEQ ID NO: 898513 - protein, 166 aa, Homo sapiens
MAEPQPPSGGLTDEAALSCCSDADPSTKDFLLQQTMLRVKDPKKSLDFYTRVLGMTLIQKCDFPIMKFSLYFLAYEDKNDIPKEKDEKIAWALSRSYHNGNSDPRGFGHIGIAVPDVYSACKRFEELGVKFVKKPDDGKMKGLAFIQDPDGYWIEILNPNKMATLM

SEQ ID NO: 898514 - protein, 184 aa, Homo sapiens; identical to SEQ ID NO: 898497

SEQ ID NO: 898515 - protein, 184 aa, Homo sapiens; identical to SEQ ID NO: 898497

SEQ ID NO: 898516 - protein, 151 aa, Homo sapiens
MAEPQPPSGGLTDEAALSCCSDADPSTKDFLLQQTMLRVKDPKKSLDFYTRVLGMTLIQKCDFPIMKFSLYFLAYEDKNDIPKEKDEKIAWALSRKATLELTHNWGTEDDETQSYHNGNSDPRGFGHIGIAVPDVYSACKRERPCQPCLYC

SEQ ID NO: 898517 - protein, 106 aa, Homo sapiens
MAREFLAEFMSTYVMMEWLTGMLQLCLFAIVDQENNPALPGTHALVIGILVVIIRVYHGMNTGYAINPSRDLPPPHLHLHCWLGQTGLQVASSTWSSLAPPSHGSP

SEQ ID NO: 898518 - protein, 92 aa, Homo sapiens
LQLCLFAIVDQENNPALPGTHALVIGILVVIIRVYHGMNTGYAINPSRDLPPPHLHLHCWLGQTGLQVLPLPRPIPLRFSVGPLCVEVWGVM

SEQ ID NO: 898519 - protein, 69 aa, Homo sapiens
AAAYYYYYCSEFQASNDVRGHGVRLKTNKDSLYKVLVVCVLVEMKPVLYRQGVTQTLFYNFLHTLNVQV

SEQ ID NO: 898520 - protein, 142 aa, Homo sapiens
MVQASGHRRSTRGSKMVSWSVIAKIQEIWCEEDERKMAREFLAEFMSTYVMMEWLTGMLQLCLFAIVDQENNPALPGTHALVIGILVVIIRVYHGMNTGYAINPSRDLPPPHLHLHCWLGQTGLQVASSTWSSLAPPSHGSP

SEQ ID NO: 898521 - protein, 326 aa, Homo sapiens
MAAPEPLRPRLCRLVRGEQGYGFHLHGEKGRRGQFIRRVEPGSPAEAAALRAGDRLVEVNGVNVEGETHHQVVQRIKAVEGQTRLLVVDQETDEELRRRQLTCTEEMAQRGLPPAHDPWEPKPDWAHTGSHSSEAGKKDVSGPLRELRPRLCHLRKGPQGYGFNLHSDKSRPGQYIRSVDPGSPAARSGLRAQDRLIEVNGQNVEGLRHAEVVASIKAREDEARLLVVDPETDEHFKRLRVTPTEEHVEGPLPSPVTNGTSPAQLNGGSACSSRSDLPGSDKDTEESGLHLSPTAAEAKEKARAMRVNKRAPQMDWNRKREIFSNF

SEQ ID NO: 898522 - protein, 337 aa, Homo sapiens
MAAPEPLRPRLCRLVRGEQGYGFHLHGEKGRRGQFIRRVEPGSPAEAAALRAGDRLVEVNGVNVEGETHHQVVQRIKAVEGQTRLLVVDQETDEELRRRQLTCTEEMAQRGLPPAHDPWEPKPDWAHTGSHSSEAGKKDVSGPLRELRPRLCHLRKGPQGYGFNLHSDKSRPGQYIRSVDPGSPAARSGLRAQDRLIEVNGQNVEGLRHAEVVASIKAREDEARLLVVDPETDEHFKRLRVTPTEEHVEGPLPSPVTNGTSPAQLNGGSACSSRSDLPGSDKDTEDGSAWKQDPFQESGLHLSPTAAEAKEKARAMRVNKRAPQMDWNRKREIFSNF

SEQ ID NO: 898523 - protein, 380 aa, Homo sapiens
  misc_feature (38)..(38): Xaa can be any naturally occurring amino acid
  misc_feature (41)..(41): Xaa can be any naturally occurring amino acid
MARSGSARHLPGLRSPSTEPPQRLVQDVSGPLRSCASXCTXREGPQGYGFNLHSVRLVRGEQGYGFHLHGEKGRRGQFIRRVEPGSPAEAAALRAGDRLVEVNGVNVEGETHHQVVQRIKAVEGQTRLLVVDQETDEELRRRQLTCTEEMAQRGLPPAHDPWEPKPDWAHTGSHSSEAGKKDVSGPLRELRPRLCHLRKGPQGYGFNLHSDKSRPGQYIRSVDPGSPAARSGLRAQDRLIEVNGQNVEGLRHAEVVASIKAREDEARLLVVDPETDEHFKRLRVTPTEEHVEGPLPSPVTNGTSPAQLNGGSACSSRSDLPGSDKDTEDGSAWKQDPFQESGLHLSPTAAEAKEKARAMRVNKRAPQMDWNRKREIFSNF

SEQ ID NO: 898524 - protein, 242 aa, Homo sapiens
GHPGRTPATCCHCAAVMARSGSATPPARAPGAPPRSPPQRLVQDVSGPLRELRPRLCHLRKGPQGYGFNLHSDKSRPGQYIRSVDPGSPAARSGLRAQDRLIEVNGQNVEGLRHAEVVASIKAREDEARLLVVDPETDEHFKRLRVTPTEEHVEGPLPSPVTNGTSPAQLNGGSACSSRSDLPGSDKDTEDGSAWKQDPFQESGLHLSPTAAEAKEKARAMRVNKRAPQMDWNRKREIFSNF

SEQ ID NO: 898525 - protein, 202 aa, Homo sapiens
MPEDVSGPLRELRPRLCHLRKGPQGYGFNLHSDKSRPGQYIRSVDPGSPAARSGLRAQDRLIEVNGQNVEGLRHAEVVASIKAREDEARLLVVDPETDEHFKRLRVTPTEEHVEGPLPSPVTNGTSPAQLNGGSACSSRSDLPGSDKDTEDGSAWKQDPFQESGLHLSPTAAEAKEKARAMRVNKRAPQMDWNRKREIFSNF

SEQ ID NO: 898526 - protein, 337 aa, Homo sapiens; identical to SEQ ID NO: 898522

SEQ ID NO: 898527 - protein, 232 aa, Homo sapiens
MAAPEPLRPRLCRLVRGEQGYGFHLHGEKGRRGQFIRRVEPGSPAEAAALRAGDRLVEVNGVNVEGETHHQVVQRIKAVEGQTRLLVVDQETDEELRRRQLTCTEEMAQRGLPPAHDPWEPKPDWAHTGSHSSEAGKKDVSGPLRELRPRLCHLRKGPQGYGFNLHSDKSRPGQYIRSVDPGSPAARSGLRAQDRLIEVNGQNVEGLRHAEVVASIKAREDEARSTGTAVAS

SEQ ID NO: 898528 - protein, 136 aa, Homo sapiens
MAAPEPLRPRLCRLVRGEQGYGFHLHGEKGRRGQFIRRVEPGSPAEAAALRAGDRLVEVNGVNVEGETHHQVGASARPRPAAPSPSASPWGEQGSHGGPRGLPRGGRGRCREAAARRLRSPGAGSSVLHGGGGGHP

SEQ ID NO: 898529 - protein, 337 aa, Homo sapiens; identical to SEQ ID NO: 898522

SEQ ID NO: 898530 - protein, 217 aa, Homo sapiens
  misc_feature (51)..(51): Xaa can be any naturally occurring amino acid
  misc_feature (54)..(54): Xaa can be any naturally occurring amino acid
GRTPATCCHCAAVMARSGSARHLPGLRSPSTEPPQRLVQDVSGPLRSCASXCTXREGPQGYGFNLHSVRLVRGEQGYGFHLHGEKGRRGQFIRRVEPGSPAEAAALRAGDRLVEVNGVNVEGETHHQVVQRIKAVEGQTRLLVVDQETDEELRRRQLTCTEEMAQRGLPPAHDPWEPKPDWAHTGSHSSEAGKKLTERNLCFCFFSKKISSSTHVST

SEQ ID NO: 898531 - protein, 297 aa, Homo sapiens
RTPGPAQSGATAHVLPGMWATDPLLIAHSPQVVQRIKAVEGQTRLLVVDQETDEELRRRQLTCTEEMAQRGLPPAHDPWEPKPDWAHTGSHSSEAGKKDVSGPLRELRPRLCHLRKGPQGYGFNLHSDKSRPGQYIRSVDPGSPAARSGLRAQDRLIEVNGQNVEGLRHAEVVASIKAREDEARLLVVDPETDEHFKRLRVTPTEEHVEGPLPSPVTNGTSPAQLNGGSACSSRSDLPGSDKDTEDGSAWKQDPFQESGLHLSPTAAEAKEKARAMRVNKRAPQMDWNRKREIFSNF

SEQ ID NO: 898532 - protein, 406 aa, Homo sapiens
GRAWDGSGGSFRAPGGPLCPVHTKLLPQPLLAGPTGVGRLIFLECESKQSRHRSQPHGGLWRENKTAGLGAPAPRSGGEPGAGGRTGRALRDNRPRRPTATVHPTWCFLPPCLCATLASSQRNSPSNPGRRLGPSGRLLGLKTGFAQVPTAKALSQAAWVPGVFATETWACPWGARYRVWAVAAPPGSGLWRREAGARDRPCPLGLQDVSGPLRELRPRLCHLRKGPQGYGFNLHSDKSRPGQYIRSVDPGSPAARSGLRAQDRLIEVNGQNVEGLRHAEVVASIKAREDEARLLVVDPETDEHFKRLRVTPTEEHVEGPLPSPVTNGTSPAQLNGGSACSSRSDLPGSDKDTEDGSAWKQDPFQESGLHLSPTAAEAKEKARAMRVNKRAPQMDWNRKREIFSNF

SEQ ID NO: 898533 - protein, 161 aa, Homo sapiens
SRKSLTRRRHPRTLRAQDRLIEVNGQNVEGLRHAEVVASIKAREDEARLLVVDPETDEHFKRLRVTPTEEHVEGPLPSPVTNGTSPAQLNGGSACSSRSDLPGSDKDTEDGSAWKQDPFQESGLHLSPTAAEAKEKARAMRVNKRAPQMDWNRKREIFSNF

SEQ ID NO: 898534 - protein, 161 aa, Homo sapiens
MAAPEPLRPRLCRLVRGEQGYGFHLHGEKGRRGQFIRRVEPGSPAEAAALRAGDRLVEVNGVNVEGETHHQVVQRIKAVEGQTRLLVVDQETDEELRRRQLTCTEEMAQRGLPPAHDPWEPKPDWAHTGSHSSEAGKKLTERNLCFCFFSKKISSSTHVST

SEQ ID NO: 898535 - protein, 168 aa, Homo sapiens
MSLFDLFRGFFGFPGPRSHRDPFFGGMTRDEDDDEEEEEEGGSWGRGNPRFHSPQHPPEEFGFGFSFSPGGGIRFHDNFGFDDLVRDFNSIFSDMGAWTLPSHPPELPGPESETPGERLREGQTLRDSMLKYPDSHQPRIFLGGSWRVMQEVNPPNPSTRLGLPEAIS

SEQ ID NO: 898536 - protein, 168 aa, Homo sapiens; identical to SEQ ID NO: 898535

SEQ ID NO: 898537 - protein, 168 aa, Homo sapiens; identical to SEQ ID NO: 898535

SEQ ID NO: 898538 - protein, 214 aa, Homo sapiens
TTRPTEQESAAQHTAGSEAWVSGLRRFPPSANGPLEGFKGSRPSTGMSLFDLFRGFFGFPGPRSHRDPFFGGMTRDEDDDEEEEEEGGSWGRGNPRFHSPQHPPEEFGFGFSFSPGGGIRFHDNFGFDDLVRDFNSIFSDMGAWTLPSHPPELPGPESETPGERLREGQTLRDSMLKYPDSHQPRIFLGGSWRVMQEVNPPNPSTRLGLPEAIS

SEQ ID NO: 898539 - protein, 168 aa, Homo sapiens; identical to SEQ ID NO: 898535

SEQ ID NO: 898540 - protein, 168 aa, Homo sapiens; identical to SEQ ID NO: 898535

SEQ ID NO: 898541 - protein, 168 aa, Homo sapiens; identical to SEQ ID NO: 898535

SEQ ID NO: 898542 - protein, 140 aa, Homo sapiens
MELYDDEEEEEEGGSWGRGNPRFHSPQHPPEEFGFGFSFSPGGGIRFHDNFGFDDLVRDFNSIFSDMGAWTLPSHPPELPGPESETPGERLREGQTLRDSMLKYPDSHQPRIFLGGSWRVMQEVNPPNPSTRLGLPEAIS

SEQ ID NO: 898543 - protein, 120 aa, Homo sapiens
MSLFDLFRGFFGFPGPRSFSPGGGIRFHDNFGFDDLVRDFNSIFSDMGAWTLPSHPPELPGPESETPGERLREGQTLRDSMLKYPDSHQPRIFLGGSWRVMQEVNPPNPSTRLGLPEAIS

SEQ ID NO: 898544 - protein, 124 aa, Homo sapiens
MSLFDLFRGFFGFPGPRSHRDPFFGGMTRDEDDDEEEEEEGGSWGRGNPRFHSPQHPPEEFGFGFSFSPGGGIRFHDNFGFDDLVRDFNSIFSDMGAWTLPSHPPGVWLSLRGNLWFLVGWWVK

SEQ ID NO: 898545 - protein, 99 aa, Homo sapiens
HIAEDAIEISYKVIKAEVIVETYPSSWAWTLPSHPPELPGPESETPGERLREGQTLRDSMLKYPDSHQPRIFLGGSWRVMQEVNPPNPSTRLGLPEAIS

SEQ ID NO: 898546 - protein, 168 aa, Homo sapiens; identical to SEQ ID NO: 898535

SEQ ID NO: 898547 - protein, 176 aa, Homo sapiens
MSLFDLFRGFFGFPGPRSHRDPFFGGMTRDEDDDEEEEEEGGSWGRGNPRFHSPQHPPEEFGFGFSFSPGGGIRFHDNFGFDDLVRDFNSIFSDMGAWTLPSHPPANTCHLSAELPGPESETPGERLREGQTLRDSMLKYPDSHQPRIFLGGSWRVMQEVNPPNPSTRLGLPEAIS

SEQ ID NO: 898548 - protein, 168 aa, Homo sapiens; identical to SEQ ID NO: 898535

SEQ ID NO: 898549 - protein, 172 aa, Homo sapiens
KEQAVPVWEYGWGFFGFPGPRSHRDPFFGGMTRDEDDDEEEEEEGGSWGRGNPRFHSPQHPPEEFGFGFSFSPGGGIRFHDNFGFDDLVRDFNSIFSDMGAWTLPSHPPELPGPESETPGERLREGQTLRDSMLKYPDSHQPRIFLGGSWRVMQEVNPPNPSTRLGLPEAIS

SEQ ID NO: 898550 - protein, 168 aa, Homo sapiens; identical to SEQ ID NO: 898535

SEQ ID NO: 898551 - protein, 168 aa, Homo sapiens; identical to SEQ ID NO: 898535

SEQ ID NO: 898552 - protein, 168 aa, Homo sapiens; identical to SEQ ID NO: 898535

SEQ ID NO: 898553 - protein, 168 aa, Homo sapiens; identical to SEQ ID NO: 898535

SEQ ID NO: 898554 - protein, 145 aa, Homo sapiens
VARSGWRLRHEGPLEGFKGSRPSTGMSLFDLFRGFFGFPGPRSFSPGGGIRFHDNFGFDDLVRDFNSIFSDMGAWTLPSHPPELPGPESETPGERLREGQTLRDSMLKYPDSHQPRIFLGGSWRVMQEVNPPNPSTRLGLPEAIS

SEQ ID NO: 898555 - protein, 176 aa, Homo sapiens; identical to SEQ ID NO: 898547

SEQ ID NO: 898556 - protein, 126 aa, Homo sapiens
MSLFDLFRGFFGFPGPRSHRDPFFGGMTRDEDDDEEEEEEGGSWGRGNPRFHSPQHPPEEFGFGFSFSPGGGIRFHDNFGFDDLNFQVLSQRHLVRDYGRDRHFGTQCLSIQIVTSPGSFWGGLGE

SEQ ID NO: 898557 - protein, 957 aa, Homo sapiens
MLFTLPGLKLLIASFEQALFIMNFQTQKSRESRITNPHEPITQLQKLSIHGHLVHPCLLPCFPSFCRGSFLLRQSVALLPRLECSGATSAHCNLRLPGSSDSPASASQVAGITDARHHTWLIFVFLLEMGFHHVGQAGLELLTSSDPPALASQNAGITGVNHGAWPLYRLFIEVESEGLRKPRGKMRVWRMFVPKALSLLPDSMKYTMRHPPLGFVASVDDVSHLEPVQSWSSAGSCASEEGPKRVPLLSSSLEVPGCYYCPREVMMNDGCVQWQFAPLRQGLPLGPDRALPAGRNPCARQDSNSVACLLLPSLQEWSPSGLESHIFHDAPLSSFDSTPTSRESEFRVLGLMHLLLKLRPSPVFTFLLFFFVAQGYEGLIRCWAWSLLAFLTLLLTATAIIIRVTTYSIPYCLPGIKLSALHILSHLILIMTLGKRYHLNPIDSWFARLGGMKDPGDNARENSDPGAPGWMFFMPVNHSFITCLELGTPLKVRFWLEVVDHTYNPSTLGDQGRRTAGGQEFKTSVGNSKTLSLQKILKLAGCGGMCLKFQLLRRLRWEDHLTQEFEVTVSYDGTTALQPRQQRETLSLKYIEVFHTNTSLPSVPTSATCYNEYYNTQYVINVVSGMFDNMITTITCVPSQAQCPRLGEVGQGTQPENARPQEAIWFSRHCLLKELPMPDRRPKMIEDTMSAFKWLGTFMIVVQTNEAFTSFFYVIIQQIFAPTCAEHCDEASVTQNNTAKTPPDEPPPTTHQYSRGWFNGVFLEYEVGAGIRGGKGTSVYLISYVLFIISKSAEGELYLEPIESKSDKMKMLMKIWRNETLMGFAGNLSQCCVVNVGVPFEFIMLNPNPQSNGIKRWGLWGWVWWLHDCNPSTLGCWQGADHLKPGVSDQPGQHGETPSVLKIQKLARCDGVHLYFQPLGRLRQENSLNPVGGDFSEPRSCHCTPAWVTERDSISKK

SEQ ID NO: 898558 - protein, 970 aa, Homo sapiens
MLFTLPGLKLLIASFEQTLFIMNFQTQKSRESRITNPHEPITQLQKLSIHGHLVHPCLLPCFPSFCRGSFLLRQSVALLPRLECSGATSAHCNLRLPGSSDSPASASQVAGITDARHHTWLIFVFLLEMGFHHVGQAGLELLTSSDPARLGLPKCWDYRCEPRCLATVQVIYKKLESEGLRKPEGQMRVLEDFVPKALSLLPEQHEVTMRHPPLGFVASVDDVSHLEPVQSWSSAGSCASEEGPKRVPLLSSSLEVPGCYYCPREVMMNDGCVQWQFAPLRQGLPLGPDRALPAGRNPCARQDSNSVACLLLPSLQEWSPSGLESHIFHDAPLSSIDSTPTSRESEFRVLGLMHLLLKLRPSPVFTFLLFFFVAQGYEGLIRCWAWSLLAFLTLLLTATAIIIRVTTYSIPYCLPGIKLSALHILSHLILIMTLGKRYHLNPIDSWFARLGGMKDPGDNARENSDPGAPGWMFFMPVNHSFITCLELGTPLKVRFWLEVVDHTYNPSTLGDQGRRTAGGQEFKTSVGNSKTLSLQKILKLAGCGGMCLKFQLLRRLRWEDHLTQEFEVTVSYDGTTALQPRQQRETLSLKYIEVFHTNTSLPSVPTSATCYNEYYNTQYVINVVSGMFDNMITTITCVPSQAQCPRLGEVGQGTQPENARPQEAIWFSRHCLLKELPMPDRRPKMIEDTMSAFKWLGTFMIVVQTNEAFTSFFYVIIQQIFAPTCAEHCDEASVTQNNTAKTPPDEPPPTTHQYSRGWFNGVFLEYEVGAGIRGGKGTSVYLISYVLFIISKSAEGELYLEPIESKSDKMKMLMKIWRNETLMGFAGNLSQCCVVNVGVPFEFIMLNPNPQSNGIKRWGLWGWVWWLMTVTQHFGMLAGGRSLEARSLRQPGQHGETPSVLKIQKLARCDGVHLYFQPLGRLRQENSLNPVGGDFSEAEIVPLHSSLGDRARLHLKKIIKMWGLWEVVRS

SEQ ID NO: 898559 - protein, 451 aa, Homo sapiens
MEFKTSVGNSKTLSLQKILKLAGCGGMCLKFQLLRRLRWEDHLTQEFEVTVSYDGTTALQPRQQRETLSLKYIEVFHTNTSLPSVPTSATCYNEYYNTQYVINVVSGMFDNMITTITCVPSQAQCPRLGEVGQGTQPENARPQEAIWFSRHCLLKELPMPDRRPKMIEDTMSAFKWLGTFMIVVQTNEAFTSFFYVIIQQIFAPTCAEHCDEASVTQNNTAKTPPDEPPPTTHQYSRGWFNGVFLEYEVGAGIRGGKGTSVYLISYVLFIISKSAEGELYLEPIESKSDKMKMLMKIWRNETLMGFAGNLSQCCVVNVGVPFEFIMLNPNPQSNGIKRWGLWGWVWWLMTVTQHFGMLAGGRSLEARSLRSAWPHGETPSVLKIQKLARCDGVHLYFQPLGRLRQENSLNPVGGDFSEAEIVPLHSSLGDRARLHLKKIIKMWGLWEVVRS

SEQ ID NO: 898560 - protein, 763 aa, Homo sapiens
MRHPPLGFVASVDDVSHLEPVQSWSSAGSCASEEGPKRVPLLSSSLEVPGCYYCPREVMMNDGCVQWQFAPLRQGLPLGPDRALPAGRNPCARQDSNSVACLLLPSLQEWSPSGLESHIFHDAPLSSFDSTPTSRESEFRVLGLMHLCLKLRPSPVFTFLLFFFVAQGYEGLIRCWAWSLLAFLTLLLTATAIIIRVTTYSIPYCLPGIEAKCFTYIKSFNPHNDPMKEIPSQPNCSWFARLGGMKDPGDNARENSDPGAPGWMFFMPVNHSFITCLELGTPLKVRFWLEVVDHTYNPSTLGDQGRRTAGGQEFKTSVGNSKTLSLQKILKLAGCGGMCLKFQLLRRLRWEDHLTQEFEVTVSYDGTTALQPRQQRETLSLKYIEVFHTNTSLPSVPTSATCYNEYYNTQYVINVVSGMFDNMITTITCVPSQAQCPRLGEVGQGTQPKDARPQEAIWFSRHCLLKELPMPDRRPKMIEDTMSAFKWLGTFMIVVQTNEAFTSFFYVIIQQIFAPTCAEHCDRPPVTQNNTAKTPPDEPPPTTHQYSRGWFNGVFLEYEVGAGIRGGKGTSVYLISYVLFIISKSAEGELYLEPIESKSDKMKMLMKIWRNETLMGFAGNLSQCCVVNVGVPFEFIMLNPNPQSNGIKRWGLWGWVWWLMTVTQHFGMLAGGRSLEARSLRSAWPTWRNPICTKNTKIEPGVMAYICNFSHSGELRQENSLNPVGGDFSEAEIVPLHSSLGDRARLHLKKIIKMWGLWEVVRS

SEQ ID NO: 898561 - protein, 540 aa, Homo sapiens
MPFAEDKTYKYICRNFSNFCNVDVVEILPYLPCLTARDQDRLRATCTLSGNRDTLWHLFNTLQRRPGWVEYFIAALRGCELVDLADEVASVYQSYQPRTSDRPPDPLEPPSLPAERPGPPTPAAAHSIPYNSCREKEPSYPMPVQETQAPESPGENSEQALQTLSPRAIPRNPDGGPLESSSDLAALSPLTSSGHQEQDTELGSTHTAGATSSLTPSRGPVSPSVSFQPLARSTPRASRLPGPTGSVVSTGTSFSSSSPGLASAGAAEGKQGAESDQAEPIICSSGAEAPANSLPSKVPTTLMPVNTVALKVPANPASVSTVPSKLPTSSKPPGAVPSNALTNPAPSKLPINSTRAGMVPSKVPTSMVLTKVSASTVPTDGSSRNEETPAAPTPAGATGGSSAWLDSSSENRGLGSELSKPGVLASQVDSPFSGCFEDLAISASTSLGMGPCHGPEENEYKSEGTFGIHVAENPSIQLLEGNPGPPADPDGGPRPQADRKFQEREVPCHRPSPGALWLQVAVTGVLVVTLLVVLYRRRLH

SEQ ID NO: 898562 - protein, 540 aa, Homo sapiens; identical to SEQ ID NO: 898561

SEQ ID NO: 898563 - protein, 540 aa, Homo sapiens; identical to SEQ ID NO: 898561

SEQ ID NO: 898564 - protein, 137 aa, Homo sapiens
MPFAEDKTYKYICRNFSNFCNVDVVEILPYLPCLTARDQDRLRATCTLSGNRDTLWHLFNTLQRRPGWVEYFIAALRGCELVDLADEVASVYQSYQPRERPALALLDPQPAPWPPLSFSLSLYFLPFSVILFLVTVK

SEQ ID NO: 898565 - protein, 540 aa, Homo sapiens; identical to SEQ ID NO: 898561

SEQ ID NO: 898566 - protein, 949 aa, Homo sapiens
MNFQTQKSRESRITNPHEPITQLQKLSIHGHLVHPCLLPCFPSFCRGSFLLRQSVALLPRLECSGATSAHCNLRLPGSSDSPASASQVAGITDARHHTWLIFVFLLEMGFHHVGQAGLELLTSSDPPALASQNAGITGVNHGAWPLYRLFIEVESEGLKKAKGQMRVWRILCPKALSLLPEQHEVTMRHPPLGFVASVDDVSHLEPVQSWSSAGSCASEEGPKRVPLLSSSLEVPGCYYCPREVMMNDGCVQWQFAPLRQGLPLGPDRALPAGRNPCARQDSNSVACLLLPSLQEWSPSGLESHIFHDAPLSSFDSTPTSRESEFRVLGLMHLLLKLRPSPVFTFLLFFFVAQGYEGLIRCWAWSLLAFLTLLLTATAIIIRVTTYSIPYCLPGIKLSALHILSHLILIMTLGKRYHLNPIDSWFARLGGMKDPGDNARENSDPGAPGWMFFMPVNHSFITCLELGTPLKVRFWLEVVDHTYNPSTLGDQGRRTAGGQEFKTSVGNSKTLSLQKILKLAGCGGMCLKFQLLRRLRWEDHLTQEFEVTVSYDGTTALQPRQQRETLSLKYIEVFHTNTSLPSVPTSATCYNEYYNTQYVINVVSGMFDNMITTITCVPSQAQCPRLGEVGQGTQPENARPQEAIWFSRHCLLKELPMPDRRPKMIEDTMSAFKWLGTFMIVVQTNEAFTSFFYVIIQQIFAPTCAEHCDEASVTQNNTAKTPPDEPPPTTHQYSRGWFNGVFLEYEVGAGIRGGKGTSVYLISYVLFIISKSAEGELYLEPIESKSDKMKADENMEEMKLLMGFAGNLSQCCVVNVGVPFEFIMLNPNPQSNGIKRWGLWGWVWWLYDCNPSTLGCWQGADHLKPGVSDQPGQHGETPSVLKIQKLARCDGVHLYFQPLGRLRQENSLNPVGGDFSEAEIVPLHSSLGDRARLHLKKIIKMWGLWEVVRS

SEQ ID NO: 898567 - protein, 540 aa, Homo sapiens; identical to SEQ ID NO: 898561

SEQ ID NO: 898568 - protein, 540 aa, Homo sapiens; identical to SEQ ID NO: 898561

SEQ ID NO: 898569 - protein, 540 aa, Homo sapiens; identical to SEQ ID NO: 898561

SEQ ID NO: 898570 - protein, 200 aa, Homo sapiens
MVHAFLIHTLRAPNTEDTGLCRVLYSCVFGAEKSPDDPRPHGAERDRLLRKEQILAVARQVESMCRLQQQASGRPPMDLQPQSSDEQVPLHEAPRGAFRLAAENPFQEPRTVVWLGVLSLGFALVLDAHENLLLAEGTLRLLTRLLLDHLRLLAPSTSLLLRADRIEGILTRFLPHGQLLFLNDQFVQGLEKEFSAAWPR

SEQ ID NO: 898571 - protein, 528 aa, Homo sapiens
PRGRGEGGESWPPPVFRVRGFVGVALTCSSATADPPSALSSRRSVPPGQLCEAAAGEGTMGTVHARSLEPLPSSGPDFGGLGEEAEFVEVEPEAKQEILENKDVVVQHVHFDGLGRTKDDIIICEIGDVFKAKNLIEVMRKSHEAREKLLRLGIFRQVDVLIDTCQGDDALPNGLDVTFEVTELRRLTGSYNTMVGNNEGSMVLGLKLPNLLGRAEKVTFQFSYGTKETSYGLSFFKPRPGNFERNFSVNLYKVTGQFPWSSLRETDRGMSAEYSFPIWKTSHTVKWEGVWRELGCLSRTASFAVRKESGHSLKSSLSHAMVIDSRNSSILPRRGALLKVNQELAGYTGGDVSFIKEDFELQLNKQLIFDSVFSASFWGGMLVPIGDKPSSIADRFYLGGPTSVRGFSMHSIGPQSEGDYLGGEAYWAGGLHLYTPLPFRPGQGGFGELFRTHFFLNAGNLCNLNYGEGPKAHIRKLAECIRWSYGAGIVLRLGNIARLELNYCVPMGVQTGDRICDGVQFGAGIRFL

SEQ ID NO: 898572 - protein, 355 aa, Homo sapiens
AEGARRRRGIMAAPSVPRPGVCGSCLDLQLRHRGPAFCPQQQTLCPARAALRGSGWRGNHGDCARPVTTSELTTKPRTCSLAIADGTFLLPGPYSCPYLYLKGTTTEFSAAPSKDKTQKVVVQHVHFDGLGRTKDDIIICEIGDVFKAKNLIEVMRKSHEAREKLLRLGIFRQVDVLIDTCQGDDALPNGLDVTFEVTELRRLTGSYNTMVGNNEGSMVLGLKLPNLLGRAEKVTFQFSYGTKETSYGLSFFKPRPGNFERNFSVNLYKVTGQFPWEPKWNCSVYLCEAEGGVHLLTPQPASYPDVSSCRGSLRKTGCCYSCEEDSCQVRINTTILWHQGCETEVNITFCEGSLP

SEQ ID NO: 898573 - protein, 374 aa, Homo sapiens
PRGRGEGGESWPPPVFRVRGFVGVALTCSSATADPPSALSSRRSVPPGQLCEAAAGEGTMGTVHARSLEPLPSSGPDFGGLGEEAEFVEVEPEAKQEILENKDVVVQHVHFDGLGRTKDDIIICEIGDVFKAKNLIEVMRKSHEAREKLLRLGIFRQVDVLIDTCQGDDALPNGLDVTFEVTELRRLTGSYNTMVGNNEGSMVLGLKLPNLLGRAEKVTFQFSYGTKETSYGLSFFKPRPGNFERNFSVNLYKVTGQFPWSSLRETDRGMSAEYSFPIWKTSHTVKWEGVWRELGCLSRTASFAVRKESGHSLKSSLSHAMVIDSRNSSILPRRGALLKVNQELAGYTGGDVSFIKEDFELQLNKQLIFDSVSI

SEQ ID NO: 898574 - protein, 438 aa, Homo sapiens
MKRKEENIGTITDVVVQHVHFDGLGRTKDDIIICEIGDVFKAKNLIEVMRKSHEAREKLLRLGIFRQVDVLIDTCQGDDALPNGLDVTFEVTELRRLTGSYNTMVGNNEGSMVLGLKLPNLLGRAEKVTFQFSYGTKETSYGLSFFKPRPGNFERNFSVNLYKVTGQFPWSSLRETDRGMSAEYSFPIWKTSHTVKWEGVWRELGCLSRTASFAVRKESGHSLKSSLSHAMVIDSRNSSILPRRGALLKVNQELAGYTGGDVSFIKEDFELQLNKQLIFDSVFSASFWGGMLVPIGDKPSSIADRFYLGGPTSVRGFSMHSIGPQSEGDYLGGEAYWAGGLHLYTPLPFRPGQGGFGELFRTHFFLNAGNLCNLNYGEGPKAHIRKLAECIRWSYGAGIVLRLGNIARLELNYCVPMGVQTGDRICDGVQFGAGIRFL

SEQ ID NO: 898575 - protein, 494 aa, Homo sapiens
PRGRGEGGESWPPPVFRVRGFVGVALTCSSATADPPSALSSRRSVPPGQLCEAAAGEGTMGTVHARSLEPLPSSGPDFGGLGEEAEFVEVEPEAKQEILENKDVMRKSHEAREKLLRLGIFRQVDVLIDTCQGDDALPNGLDVTFEVTELRRLTGSYNTMVGNNEGSMVLGLKLPNLLGRAEKVTFQFSYGTKETSYGLSFFKPRPGNFERNFSVNLYKVTGQFPWSSLRETDRGMSAEYSFPIWKTSHTVKWEGVWRELGCLSRTASFAVRKESGHSLKSSLSHAMVIDSRNSSILPRRGALLKVNQELAGYTGGDVSFIKEDFELQLNKQLIFDSVFSASFWGGMLVPIGDKPSSIADRFYLGGPTSVRGFSMHSIGPQSEGDYLGGEAYWAGGLHLYTPLPFRPGQGGFGELFRTHFFLNAGNLCNLNYGEGPKAHIRKLAECIRWSYGAGIVLRLGNIARLELNYCVPMGVQTGDRICDGVQFGAGIRFL

SEQ ID NO: 898576 - protein, 340 aa, Homo sapiens
PRGRGEGGESWPPPVFRVRGFVGVALTCSSATADPPSALSSRRSVPPGQLCEAAAGEGTMGTVHARSLEPLPSSGPDFGGLGEEAEFVEVEPEAKQEILENKDVVVQHVHFDGLGRTKDDIIICEIGDVFKAKNLIEVMRKSHEAREKLLRLGIFRQVDVLIDTCQGDDALPNGLDVTFEVTELRRLTGSYNTMVGNNEGSMVLGLKLPNLLGRAEKVTFQFSYGTKETSYGLSFFKPRPGNFERNFSVNLYKVTGQFPWEPKWNCSVYLCEAEGGVHLLTPQPASYPDVSSCRGSLRKTGCCYSCEEDSCQVRINTTILWHQGCETEVNITFCEGSLPR

SEQ ID NO: 898577 - protein, 528 aa, Homo sapiens; identical to SEQ ID NO: 898571

SEQ ID NO: 898578 - protein, 77 aa, Homo sapiens
  misc_feature (15)..(16): Xaa can be any naturally occurring amino acid
PGGARPGPDPYSLKXXVSVGRAPKLIFVSWLSASAGRTGPGLSSGLATSLGWNLITASPWEYRQATGYVMASSLELG

SEQ ID NO: 898579 - protein, 516 aa, Homo sapiens
MSPWFRGRADMGVRTCSSATADPPSALSSRRSVPPGQLCEAAAGEGTMGTVHARSLEPLPSSGPDFGGLGEEAEFVEVEPEAKQEILENKDVVVQHVHFDGLGRTKDDIIICEIGDVFKAKNLIEVMRKSHEAREKLLRLGIFRQVDVLIDTCQGDDALPNGLDVTFEVTELRRLTGSYNTMVGNNEGSMVLGLKLPNLLGRAEKVTFQFSYGTKETSYGLSFFKPRPGNFERNFSVNLYKVTGQFPWSSLRETDRGMSAEYSFPIWKTSHTVKWEGVWRELGCLSRTASFAVRKESGHSLKSSLSHAMVIDSRNSSILPRRGALLKVNQELAGYTGGDVSFIKEDFELQLNKQLIFDSVFSASFWGGMLVPIGDKPSSIADRFYLGGPTSVRGFSMHSIGPQSEGDYLGGEAYWAGGLHLYTPLPFRPGQGGFGELFRTHFFLNAGNLCNLNYGEGPKAHIRKLAECIRWSYGAGIVLRLGNIARLELNYCVPMGVQTGDRICDGVQFGAGIRFL

SEQ ID NO: 898580 - protein, 607 aa, Homo sapiens
PRGRGEGGESWPPPVFRVRGFVGVALTCSSATADPPSALSSRRSVPPGQLCEAAAGEGTMGTVHARSLEPLPSSGPDFGGLGEEAEFVEVEPEAKQEILENKDVVVQHVHFDGLGRTKDDIIICEIGDVFKAKNLIEVMRKSHEAREKLLRLGIFRQVDVLIDTCQGDDALPNGLDVTFEVTELRRLTGSYNTMVGNNEGSMVLGLKLPNLLGRAEKVTFQFSYGTKETSYGLSFFKPRPGNFERKKEAQQIIEYTGLIEKFKIGGLFVKRTMTESAATSAVTTCCRFPLEDEPYGRSVKSVDLNVCKFYITVSAFKALIPLSPSFSVNLYKVTGQFPWSSLRETDRGMSAEYSFPIWKTSHTVKWEGVWRELGCLSRTASFAVRKESGHSLKSSLSHAMVIDSRNSSILPRRGALLKVNQELAGYTGGDVSFIKEDFELQLNKQLIFDSVFSASFWGGMLVPIGDKPSSIADRFYLGGPTSVRGFSMHSIGPQSEGDYLGGEAYWAGGLHLYTPLPFRPGQGGFGELFRTHFFLNAGNLCNLNYGEGPKAHIRKLAECIRWSYGAGIVLRLGNIARLELNYCVPMGVQTGDRICDGVQFGAGIRFL

SEQ ID NO: 898581 - protein, 259 aa, Homo sapiens
MSAEYSFPIWKTSHTVKWEGVWRELGCLSRTASFAVRKESGHSLKSSLSHAMVIDSRNSSILPRRGALLKVNQELAGYTGGDVSFIKEDFELQLNKQLIFDSVFSASFWGGMLVPIGDKPSSIADRFYLGGPTSVRGFSMHSIGPQSEGDYLGGEAYWAGGLHLYTPLPFRPGQGGFGELFRTHFFLNAGNLCNLNYGEGPKAHIRKLAECIRWSYGAGIVLRLGNIARLELNYCVPMGVQTGDRICDGVQFGAGIRFL

SEQ ID NO: 898582 - protein, 208 aa, Homo sapiens
PRGRGEGGESWPPPVFRVRGFVGVALTCSSATADPPSALSSRRSVPPGQLCEAAAGEGTMGTVHARSLEPLPSSGPDFGGLGEEAEFVEVEPEAKQEILENKDVVVQHVHFDGLGRTKDDIIICEIGELFRTHFFLNAGNLCNLNYGEGPKAHIRKLAECIRWSYGAGIVLRLGNIARLELNYCVPMGVQTGDRICDGVQFGAGIRFL

SEQ ID NO: 898583 - protein, 340 aa, Homo sapiens
RGSRACASVRVAGEEGSLTTRKFEYHSSMECDLMETDILESLEDLGYKGPLLEDGALSQAVSAGASSPEFTKLCAWLVSELRVLCKLEENVQATNSPSEAEEFQLEVSGLLGEMNCPYLSLTSGDVTKRLLIQKNCLLLLTYLISELEAARMLCVNAPPKKAQEGGGSEVFQELKGICIALGMSKPPANITMFQFFSGIEKKLKETLAKVPPNHVGKPLLKKPMGPAHWEKIEAINQAIANEYEVRRKLLIKRLDVTVQSFGWSDRAKSQTEKLAKVYQPKRSVLSPKTTISVAHLLAARQDLSKILRTSSGSIREKTACAINKVIRVPLIFSKCIYFCS

SEQ ID NO: 898584 - protein, 340 aa, Homo sapiens; identical to SEQ ID NO: 898583

SEQ ID NO: 898585 - protein, 546 aa, Homo sapiens
RGSRACASVRVAGEEGSLTTRKFEYHSSMECDLMETDILESLEDLGYKGPLLEDGALSQAVSAGASSPEFTKLCAWLVSELRVLCKLEENVQATNSPSEAEEFQLEVSGLLGEMNCPYLSLTSGDVTKRLLIQKNCLLLLTYLISELEAARMLCVNAPPKKAQEGGGSEVFQELKGICIALGMSKPPANITMFQFFSGIEKKLKETLAKVPPNHVGKPLLKKPMGPAHWEKIEAINQAIANEYEVRRKLLIKRLDVTVQSFGWSDRAKSQTEKLAKVYQPKRSVLSPKTTISVAHLLAARQDLSKILRTSSGSIREKTACAINKVLMGRVPDRGGRPNEIEPPPPEMPPWQKRQDGPQQQTGGRGGGRGGYEHSSYGGRGGHEQGGGRGGRGGYDHGGRGGGRGNKHQGGWTDGGSGGGGGYQDGGYRDSGFQPGGYHGGHSSGGYQGGGYGGFQTSSSYTGSGYQGGGYQQDNRYQDGGHHGDRGGGRGGRGGRGGRGGRAGQGGGWGGRGSQNYHQGGQFEQHFQHGGYQYNHSGFGQGRHYTS

SEQ ID NO: 898586 - protein, 546 aa, Homo sapiens; identical to SEQ ID NO: 898585

SEQ ID NO: 898587 - protein, 162 aa, Homo sapiens
MALRVTRNSKINAENKAKINMAGAKRVPTAPAATSKPGLRPRTALGDIGNKVSEQLQAKMPMKKEAKPSATGKVIDKKLPKPLEKVPMLVPVPVSEPVPEPEPEPEPEPVKEEKLSPEPILVDTASPSPMETSGCAPAEEDLCQAFSDVILAVNDVDARRWS

SEQ ID NO: 898588 - protein, 162 aa, Homo sapiens; identical to SEQ ID NO: 898587

SEQ ID NO: 898589 - protein, 124 aa, Homo sapiens
  misc_feature (17)..(17): Xaa can be any naturally occurring amino acid
EDGRAGLGVRGERVGGXGQVKMPMKKEAKPSATGKVIDKKLPKPLEKVPMLVPVPVSEPVPEPEPEPEPEPVKEEKLSPEPILVDTASPSPMETSGCAPAEEDLCQAFSDVILAVNDVDARRWS

SEQ ID NO: 898590 - protein, 162 aa, Homo sapiens; identical to SEQ ID NO: 898587

SEQ ID NO: 898591 - protein, 162 aa, Homo sapiens; identical to SEQ ID NO: 898587

SEQ ID NO: 898592 - protein, 162 aa, Homo sapiens; identical to SEQ ID NO: 898587

SEQ ID NO: 898593 - protein, 162 aa, Homo sapiens; identical to SEQ ID NO: 898587

SEQ ID NO: 898594 - protein, 162 aa, Homo sapiens; identical to SEQ ID NO: 898587

SEQ ID NO: 898595 - protein, 162 aa, Homo sapiens; identical to SEQ ID NO: 898587

SEQ ID NO: 898596 - protein, 233 aa, Homo sapiens [sequence omitted]

SEQ ID NO: 898597 - protein, 162 aa, Homo sapiens; identical to SEQ ID NO: 898587

SEQ ID NO: 898598 - protein, 162 aa, Homo sapiens; identical to SEQ ID NO: 898587

SEQ ID NO: 898599 - protein, 162 aa, Homo sapiens; identical to SEQ ID NO: 898587

SEQ ID NO: 898600 - protein, 162 aa, Homo sapiens; identical to SEQ ID NO: 898587

SEQ ID NO: 898601 - protein, 162 aa, Homo sapiens; identical to SEQ ID NO: 898587

SEQ ID NO: 898602 - protein, 162 aa, Homo sapiens; identical to SEQ ID NO: 898587

SEQ ID NO: 898603 - protein, 162 aa, Homo sapiens; identical to SEQ ID NO: 898587

SEQ ID NO: 898604 - protein, 162 aa, Homo sapiens; identical to SEQ ID NO: 898587

SEQ ID NO: 898605 - protein, 1259 aa, Homo sapiens
DLFHDDKDPVPATTPGKGSSSKISVRSARPPMKVSNKEHKKTVGHQFRTSLHLLMETLNATTPHYVRCIKPNDEKLPFHFDPKRAVQQLRACGVLETIRISAAGYPSRWAYHDFFNRYRVLVKKRELANTDKKAICRSVLENLIKDPDKFQFGRTKIFFRAGQVAYLEKLRADKFRTATIMIQKTVRGWLQKVKYHRLKGATLTLQRYCRGHLARRLAEHLRRIRAAVVLQKHYRMQRARQAYQRVRRAAVVIQAFTRAMFVRRTYRQVLMEHKATTIQKHVRGWMARRHFQRLRDAAIVIQCAFRMLKARRELKALRIEARSAEHLKRLNVGMENKVVQLQRKIDEQNKEFKTLSEQLSVTTSTYTMEVERLKKELVHYQQSPGEDTSLRLQEEVESLRTELQRAHSERKILEDAHSREKDELRKRVADLEQENALLKDEKEQLNNQILCQSKDEFAQNSVKENLMKKELEEERSRYQNLVKEYSQLEQRYDNLRDEMTIIKQTPGHRRNPSNQSSLESDSNYPSISTSEIGDTEDALQQVEEIGLEKAAMDMTVFLKLQKRVRELEQERKKLQVQLEKREQQDSKKVQAEPPQTDIDLDPNADLAYNSLKRQELESENKKLKNDLNELRKAVADQATQNNSSHGSPDSYSLLLNQLKLAHEELEVRKEEVLILRTQIVSADQRRLAGRNAEPNINARSSWPNSEKHVDQEDAIEAYHGVCQTNSKTEDWGYLNEDGELGLAYQGLKQVARLLEAQLQAQSLEHEEEVEHLKAQLEALKEEMDKQQQTFCQTLLLSPEAQVEFGVQQEISRLTNENLDLKELVEKLEKNERKLKKQLKIYMKKAQDLEAAQALAQSERKRHELNRQVTVQRKEKDFQGMLEYHKEDEALLIRNLVTDLKPQMLSGTVPCLPAYILYMCIRHADYTNDDLKVHSLLTSTINGIKKVLKKHNDDFEMTSFWLSNTCRLLHCLKQYSGDEGFMTQNTAKQNEHCLKNFDLTEYRQVLSDLSIQIYQQLIKIAEGVLQPMIVSAMLENESIQGLSGVKPTGYRKRSSSMADGDNSYCLEAIIRQMNAFHTVMCDQGLDPEIILQVFKQLFYMINAVTLNNLLLRKDVCSWSTGMQLRYNISQLEEWLRGRNLHQSGAVQTMEPLIQAAQLLQLKKKTQEDAEAICSLCTSLSTQQIVKILNLYTPLNEFEERVTVAFIRTIQAQLQERNDPQQLLLDAKHMFPVLFPFNPSSLTMDSIHIPACLNLEFLNEV

SEQ ID NO: 898606 - protein, 619 aa, Homo sapiens
VACSSWKKLKNDLNELRKAVADQATQNNSSHGSPDSYSLLLNQLKLAHEELEVRKEEVLILRTQIVSADQRRLAGRNAEPNINARSSWPNSEKHVDQEDAIEAYHGVCQTNRLLEAQLQAQSLEHEEEVEHLKAQLEALKEEMDKQQQTFCQTLLLSPEAQVEFGVQQEISRLTNENLDLKELVEKLEKNERKLKKQLKIYMKKAQDLEAAQALAQSERKRHELNRQVTVQRKEKDFQGMLEYHKEDEALLIRNLVTDLKPQMLSGTVPCLPAYILYMCIRHADYTNDDLKVHSLLTSTINGIKKVLKKHNDDFEMTSFWLSNTCRLLHCLKQYSGDEGFMTQNTAKQNEHCLKNFDLTEYRQVLSDLSIQIYQQLIKIAEGVLQPMIVSAMLENESIQGLSGVKPTGYRKRSSSMADGDNSYCLEAIIRQMNAFHTVMCDQGLDPEIILQVFKQLFYMINAVTLNNLLLRKDVCSWSTGMQLRYNISQLEEWLRGRNLHQSGAVQTMEPLIQAAQLLQLKKKTQEDAEAICSLCTSLSTQQIVKILNLYTPLNEFEERVTVAFIRTIQAQLQERNDPQQLLLDAKHMFPVLFPFNPSSLTMDSIHIPACLNLEFLNEV

SEQ ID NO: 898607 - protein, 290 aa, Homo sapiens
  misc_feature (10)..(10): Xaa can be any naturally occurring amino acid
  misc_feature (16)..(16): Xaa can be any naturally occurring amino acid
WFQTGRRGQXWITQNXVISKSSCLKNFDLTEYRQVLSDLSIQIYQQLIKIAEGVLQPMIVSAMLENESIQGLSGVKPTGYRKRSSSMADGDNSYCLEAIIRQMNAFHTVMCDQGLDPEIILQVFKQLFYMINAVTLNNLLLRKDVCSWSTGMQLRYNISQLEEWLRGRNLHQSGAVQTMEPLIQAAQLLQLKKKTQEDAEAICSLCTSLSTQQIVKILNLYTPLNEFEERVTVAFIRTIQAQLQERNDPQQLLLDAKHMFPVLFPFNPSSLTMDSIHIPACLNLEFLNEV

SEQ ID NO: 898608 - protein, 145 aa, Homo sapiens
LSDLNGKVTRYNISQLEEWLRGRNLHQSGAVQTMEPLIQAAQLLQLKKKTQEDAEAICSLCTSLSTQQIVKILNLYTPLNEFEERVTVAFIRTIQAQLQERNDPQQLLLDAKHMFPVLFPFNPSSLTMDSIHIPACLNLEFLNEV

SEQ ID NO: 898609 - protein, 1233 aa, Homo sapiens
DLFHDDKDPVPATTPGKGSSSKISVRSARPPMKVSNKEHKKTVGHQFRTSLHLLMETLNATTPHYVRCIKPNDEKLPFHFDPKRAVQQLRACGVLETIRISAAGYPSRWAYHDFFNRYRVLVKKRELANTDKKAICRSVLENLIKDPDKFQFGRTKIFFRAGQVAYLEKLRADKFRTATIMIQKTVRGWLQKVKYHRLKGATLTLQRYCRGHLARRLAEHLRRIRAAVVLQKHYRMQRARQAYQRVRRAAVVIQAFTRAMFVRRTYRQVLMEHKATTIQKHVRGWMARRHFQRLRDAAIVIQCAFRMLKARRELKALRIEARSAEHLKRLNVGMENKVVQLQRKIDEQNKEFKTLSEQLSVTTSTYTMEVERLKKELVHYQQSPGEDTSLRLQEEVESLRTELQRAHSERKILEDAHSREKDELRKRVADLEQENALLKDEKEQLNNQILCQSKDEFAQNSVKENLMKKELEEERSRYQNLVKEYSQLEQRYDNLRDEMTIIKQTPGHRRNPSNQSSLESDSNYPSISTSEIGDTEDALQQVEEIGLEKAAMDMTVFLKLQKRVRELEQERKKLQVQLEKREQQDSKKVQAEPPQTDIDLDPNADLAYNSLKRQELESENKKLKNDLNELRKAVADQATQNNSSHGSPDSYSLLLNQLKLAHEELEVRKEEVLILRTQIVSADQRRLAGRNAEPNINARSSWPNSEKHVDQEDAIEAYHGVCQTNRLLEAQLQAQSLEHEEEVEHLKAQLEALKEEMDKQQQTFCQTLLLSPEAQVEFGVQQEISRLTNENLDLKELVEKLEKNERKLKKQLKIYMKKAQDLEAAQALAQSERKRHELNRQVTVQRKEKDFQGMLEYHKEDEALLIRNLVTDLKPQMLSGTVPCLPAYILYMCIRHADYTNDDLKVHSLLTSTINGIKKVLKKHNDDFEMTSFWLSNTCRLLHCLKQYSGDEGFMTQNTAKQNEHCLKNFDLTEYRQVLSDLSIQIYQQLIKIAEGVLQPMIVSAMLENESIQGLSGVKPTGYRKRSSSMADGDNSYCLEAIIRQMNAFHTVMCDQGLDPEIILQVFKQLFYMINAVTLNNLLLRKDVCSWSTGMQLRYNISQLEEWLRGRNLHQSGAVQTMEPLIQAAQLLQLKKKTQEDAEAICSLCTSLSTQQIVKILNLYTPLNEFEERVTVAFIRTIQAQLQERNDPQQLLLDAKHMFPVLFPFNPSSLTMDSIHIPACLNLEFLNEV

SEQ ID NO: 898610 - protein, 418 aa, Homo sapiens
MKKAQDLEAAQALAQSERKRHELNRQVTVQRKEKDFQGMLEYHKEDEALLIRNLVTDLKPQMLSGTVPCLPAYILYMCIRHADYTNDDLKVHSLLTSTINGIKKVLKKHNDDFEMTSFWLSNTCRLLHCLKQYSGDEGFMTQNTAKQNEHCLKNFDLTEYRQVLSDLSIQIYQQLIKIAEGVLQPMIVSAMLENESIQGLSGVKPTGYRKRSSSMADGDNSYCLEAIIRQMNAFHTVMCDQGLDPEIILQVFKQLFYMINAVTLNNLLLRKDVCSWSTGMQLRYNISQLEEWLRGRNLHQSGAVQTMEPLIQAAQLLQLKKKTQEDAEAICSLCTSLSTQQIVKILNLYTPLNEFEERVTVAFIRTIQAQLQERNDPQQLLLDAKHMFPVLFPFNPSSLTMDSIHIPACLNLEFLNEV

SEQ ID NO: 898611 - protein, 1233 aa, Homo sapiens; identical to SEQ ID NO: 898609

SEQ ID NO: 898612 - protein, 582 aa, Homo sapiens
MISSVCVSSYRGRKSGNKPPSKTCLKEEMAKGEASEKIIINVGGTRHETYRSTLRTLPGTRLAWLADPDGGGRPETDGGGVGSSGSSGGGGCEFFFDRHPGVFAYVLNYYRTGKLHCPADVCGPLFEEELTFWGIDETDVEPCCWMTYRQHRDAEEALDIFESPDGGGSGAGPSDEAGDDERELALQRLGPHEGGAGHGAGSGGCRGWQPRMWALFEDPYSSRAARVVAFASLFFILVSITTFCLETHEAFNIDRNVTEILRVGNITSVHFRREVETEPILTYIEGVCVLWFTLEFLVRIVCCPDTLDFVKNLLNIIDFVAILPFYLEVGLSGLSSKAARDVLGFLRVVRFVRILRIFKLTRHFVGLRVLGHTLRASTNEFLLLIIFLALGVLIFATMIYYAERIGARPSDPRGNDHTDFKNIPIGFWWAVVTMTTLGYGDMYPKTWSGMLVGALCALAGVLTIAMPVPVIVNNFGMYYSLAMAKQKLPKKRKKHVPRPAQLESPMYCKSEETSPRDSTCSDTSPPAREEGMIERKRAGEIRGWEGKSLFPQWPREFPNGPQTLGFGMCFVWGFPKHKDVPL

SEQ ID NO: 898613 - protein, 631 aa, Homo sapiens
MISSVCVSSYRGRKSGNKPPSKTCLKEEMAKGEASEKIIINVGGTRHETYRSTLRTLPGTRLAWLADPDGGGRPETDGGGVGSSGSSGGGGCEFFFDRHPGVFAYVLNYYRTGKLHCPADVCGPLFEEELTFWGIDETDVEPCCWMTYRQHRDAEEALDIFESPDGGGSGAGPSDEAGDDERELALQRLGPHEGGAGHGAGSGGCRGWQPRMWALFEDPYSSRAARVVAFASLFFILVSITTFCLETHEAFNIDRNVTEILRVGNITSVHFRREVETEPILTYIEGVCVLWFTLEFLVRIVCCPDTLDFVKNLLNIIDFVAILPFYLEVGLSGLSSKAARDVLGFLRVVRFVRILRIFKLTRHFVGLRVLGHTLRASTNEFLLLIIFLALGVLIFATMIYYAERIGARPSDPRGNDHTDFKNIPIGFWWAVVTMTTLGYGDMYPKTWSGMLVGALCALAGVLTIAMPVPVIVNNFGMYYSLAMAKQKLPKKRKKHVPRPAQLESPMYCKSEETSPRDSTCSDTSPPAREEGMIERKRADSKQNGDANAVLSDEEGAGLTQPLASSPTPEERRALRRSTTRDRNKKAAAASCSALGTMPAPMVVSGKRPAKTPSRPTMPRLKSSPSLKAAPT

SEQ ID NO: 898614 - protein, 631 aa, Homo sapiens; identical to SEQ ID NO: 898613

SEQ ID NO: 898615 - protein, 652 aa, Homo sapiens
MISSVCVSSYRGRKSGNKPPSKTCLKEEMAKGEASEKIIINVGGTRHETYRSTLRTLPGTRLAWLADPDGGGRPETDGGGVGSSGSSGGGGCEFFFDRHPGVFAYVLNYYRTGKLHCPADVCGPLFEEELTFWGIDETDVEPCCWMTYRQHRDAEEALDIFESPDGGGSGAGPSDEAGDDERELALQRLGPHEGGAGHGAGSGGCRGWQPRMWALFEDPYSSRAARVVAFASLFFILVSITTFCLETHEAFNIDRNVTEILRVGNITSVHFRREVETEPILTYIEGVCVLWFTLEFLVRIVCCPDTLDFVKNLLNIIDFVAILPFYLEVGLSGLSSKAARDVLGFLRVVRFVRILRIFKLTRHFVGLRVLGHTLRASTNEFLLLIIFLALGVLIFATMIYYAERIGARPSDPRGNDHTDFKNIPIGFWWAVVTMTTLGYGDMYPKTWSGMLVGALCALAGVLTIAMPVPVIVNNFGMYYSLAMAKQKLPKKRKKHVPRPAQLESPMYCKSEETSPRDSTCSDTSPPAREEGMIERKRADSKQNGDANAVLSDEEGAGLTQPLASSPTPEERRALRRSTTRDRNKKAAAASCSALGTMPAPMVVSGKGMASQAGQVGSPHRAESPESPTKSLRSPPPLRPWPPSPLPWMHPHF

SEQ ID NO: 898616 - protein, 121 aa, Homo sapiens
MRQRAPRRQRKQQANDKKQRQKRTDEARAKKGEATRQAAGKAEDTEQTARETKRREETQKRNNGKRSDKTREQTRRGRRAQQTEKTAKTKQAGERAEQGEKNEEKQRRGGGRPREETTPQN

SEQ ID NO: 898617 - protein, 354 aa, Homo sapiens
MISSVCVSSYRGRKSGNKPPSKTCLKEEMAKGEASEKIIINFVAILPFYLEVGLSGLSSKAARDVLGFLRVVRFVRILRIFKLTRHFVGLRVLGHTLRASTNEFLLLIIFLALGVLIFATMIYYAERIGARPSDPRGNDHTDFKNIPIGFWWAVVTMTTLGYGDMYPKTWSGMLVGALCALAGVLTIAMPVPVIVNNFGMYYSLAMAKQKLPKKRKKHVPRPAQLESPMYCKSEETSPRDSTCSDTSPPAREEGMIERKRADSKQNGDANAVLSDEEGAGLTQPLASSPTPEERRALRRSTTRDRNKKAAAASCSALGTMPAPMVVSGKRPAKTPSRPTMPRLKSSPSLKAAPT

SEQ ID NO: 898618 - protein, 641 aa, Homo sapiens
MISSVCVSSYRGRKSGNKPPSKTCLKEEMAKGEASEKIIINVGGTRHETYRSTLRTLPGTRLAWLADPDGGGRPETDGGGVGSSGSSGGGGCEFFFDRHPGVFAYVLNYYRTGKLHCPADVCGPLFEEELTFWGIDETDVEPCCWMTYRQHRDAEEALDIFESPDGGGSGAGPSDEAGDDERELALQRLGPHEGGAGHGAGSGGCRGWQPRMWALFEDPYSSRAARVVAFASLFFILVSITTFCLETHEAFNIDRNVTEILRVGNITSVHFRREVETEPILTYIEGVCVLWFTLEFLVRIVCCPDTLDFVKNLLNIIDFVAILPFYLEVGLSGLSSKAARDVLGFLRVVRFVRILRIFKLTRHFVGLRVLGHTLRASTNEFLLLIIFLALGVLIFATMIYYAERIGARPSDPRGNDHTDFKNIPIGFWWAVVTMTTLGYGDMYPKTWSGMLVGALCALAGVLTIAMPVPVIVNNFGMYYSLAMAKQKLPKKRKKHVPRPAQLESPMYCKSEETSPRDSTCSDTSPPAREEGMIERKRADSKQNGDANAVLSDEEGAGLTQPLASSPTPEERRALRRSTTRDRNKKAAAASCSALGTMPAPMVVSGKGHWPRDFLLITECASCGLSAWRVATGYQAFRRRSG

SEQ ID NO: 898619 - protein, 384 aa, Homo sapiens
MSRSKRDNNFYSVEIGDSTFTVLKRYQNLKPIGSGAQGIVCAAYDAILERNVAIKKLSRPFQNQTHAKRAYRELVLMKCVNHKNIIGLLNVFTPQKSLEEFQDVYIVMELMDANLCQVIQMELDHERMSYLLYQMLCGIKHLHSAGIIHRDLKPSNIVVKSDCTLKILDFGLARTAGTSFMMTPYVVTRYYRAPEVILGMGYKENVDLWSVGCIMGEMVCHKILFPGRDYIDQWNKVIEQLGTPCPEFMKKLQPTVRTYVENRPKYAGYSFEKLFPDVLFPADSEHNKLKASQARDLLSKMLVIDASKRISVDEALQHPYINVWYDPSEAEAPPPKIPDKQLDEREHTIEEWKELIYKEVMDLEERTKNGVIRGQPSPLAQVQQ

SEQ ID NO: 898620 - protein, 384 aa, Homo sapiens; identical to SEQ ID NO: 898619

SEQ ID NO: 898621 - protein, 384 aa, Homo sapiens; identical to SEQ ID NO: 898619

SEQ ID NO: 898622 - protein, 142 aa, Homo sapiens
MKCVNHKNIIGLLNVFTPQKSLEEFQDVYIVMELMDANLCQVIQMELDHERMSYLLYQMLCGIKHLHSAGIIHRDLKPSNIVVKSDCTLKILDFGLARTAGTSFMMTPYVVTRYYRAPEVILGMGYKENGGRMGKGIFTRLQ

SEQ ID NO: 898623 - protein, 349 aa, Homo sapiens
MSRSKRDNNFYSVEIGDSTFTVLKRYQNLKPIGSGAQGIVCAAYDAILERNVAIKKLSRPFQNQTHAKRAYRELVLMKCVNHKNIIGLLNVFTPQKSLEEFQDVYIVMELMDANLCQVIQMELDHERMSYLLYQMLCGIKHLHSAGIIHRDLKPSNIVVKSDCTLKILDFGLARTAGTSFMMTPYVVTRYYRAPEVILGMGYKENVDLWSVGCIMGEMVCHKLGTPCPEFMKKLQPTVRTYVENRPKYAGYSFEKLFPDVLFPADSEHNKLKASQARDLLSKMLVIDASKRISVDEALQHPYINVWYDPSEAEAVSYFLNVYRTYCILRVRMTVRFGGDLLILNKNVDT

SEQ ID NO: 898624 - protein, 384 aa, Homo sapiens
MSRSKRDNNFYSVEIGDSTFTVLKRYQNLKPIGSGAQGIVCAAYDAILERNVAIKKLSRPFQNQTHAKRAYRELVLMKCVNHKNIIGLLNVFTPQKSLEEFQDVYIVMELMDANLCQVIQMELDHERMSYLLYQMLCGIKHLHSAGIIHRDLKPSNIVVKSDCTLKILDFGLARTAGTSFMMTPYVVTRYYRAPEVILGMGYKENVDIWSVGCIMGEMIKGGVLFPGTDHIDQWNKVIEQLGTPCPEFMKKLQPTVRTYVENRPKYAGYSFEKLFPDVLFPADSEHNKLKASQARDLLSKMLVIDASKRISVDEALQHPYINVWYDPSEAEAPPPKIPDKQLDEREHTIEEWKELIYKEVMDLEERTKNGVIRGQPSPLAQVQQ

SEQ ID NO: 898625 - protein, 169 aa, Homo sapiens
MSRSKRDNNFYSVEIGDSTFTVLKRYQNLKPIGSGAQGIVCAAYDAILERNVAIKKLSRPFQNQTHAKRAYRELVLMKCVNHKNIIGLLNVFTPQKSLEEFQDVYIVMELMDANLCQVIQMELDHERMSYLLYQMLCGIKHLHSAGIIHRVSRRNYRHTLCFLIEVKFM

SEQ ID NO: 898626 - protein, 384 aa, Homo sapiens; identical to SEQ ID NO: 898619

SEQ ID NO: 898627 - protein, 384 aa, Homo sapiens; identical to SEQ ID NO: 898619

SEQ ID NO: 898628 - protein, 218 aa, Homo sapiens [sequence omitted]

SEQ ID NO: 898629 - protein, 218 aa, Homo sapiens [sequence omitted]

SEQ ID NO: 898630 - protein, 218 aa, Homo sapiens [sequence omitted]

SEQ ID NO: 898631 - protein, 753 aa, Homo sapiens
AGQPRRGSALRAWRCGAAALATFPAPALPGLMYRALYAFRSAEPNALAFAAGETFLVLERSSAHWWLAARARSGETGYVPPAYLRRLQGLEQDVLQAIDRAIEAVHNTAMRDGGKYSLEQRGVLQKLIHHRKETLSRRGPSASSVAVMTSSTSDHHLDAAAARQPNGVCRAGFERQHSLPSSEHLGADGGLYQIPLPSSQIPPQPRRAAPTTPPPPVKRRDREALMASGSGGHNTMPSGGNSVSSGSSVSSTSLDTLYTSSSPSEPGSSCSPTPPPVPRRGTHTTVSQVQPPPSKASAPEPPAEEEVATGTTSASDDLEALGTLSLGTTEEKAAAEAAVPRTIGAELMELVRRNTGLSHELCRVAIGIIVGHIQASVPASSPVMEQVLLSLVEGKDLSMALPSGQVCHDQQRLEVIFADLARRKDDAQQRSWALYEDEGVIRCYLEELLHILTDADPEVCKKMCKRNEFESVLALVAYYQMEHRASLRLLLLKCFGAMCSLDAAIISTLVSSVLPVELARDMQTDTQDHQKLCYSALILAMVFSMGEAVPYAHYEHLGTPFAQFLLNIVEDGLPLDTTEQLPDLCVNLLLALNLHLPAADQNVIMAALSKHANVKIFSEKLLLLLNRGDDPVRIFKHEPQPPHSVLKFLQDVFGSPATAAIFYHTDMMALIDITVRHIADLSPGDKGPFGAGQRPWPGVPRLLEPGSTPSREPHPVERSGVPALTSSWASGCPRPLHPALQLVIDSAFGGRSV

SEQ ID NO: 898632 - protein, 224 aa, Homo sapiens
MTSSTSDHHLDAAAARQPNGVCRAGFERQHSLPSSEHLGADGGLYQIPLPSSQIPPQPRRAAPTTPPPPVKRRDREALMASGSGGKNLPSGVIWVHGSSVSSTSWKALYSSSPFDKIQVLNHTPLVPRPHPPFHSNPSTSITMTPWAREMATVIHRLLGTETRCHVAAASSAAIGRCVTLDSSQLSPDPQPQRNEQHLACPECASYVADSTRQRPAPHAMAYSG

SEQ ID NO: 898633 - protein, 746 aa, Homo sapiens
AGQPRRGSALRAWRCGAAALATFPAPALPGLMYRALYAFRSAEPNALAFAAGETFLVLERSSAHWWLAARARSGETGYVPPAYLRRLQGLEQDVLQAIDRAIEAVHNTAMRDGGKYSLEQRGVLQKLIHHRKETLSRRGPSASSVAVMTSSTSDHHLDAAAARQPNGVCRAGFERQHSLPSSEHLGADGGLYQIPPQPRRAAPTTPPPPVKRRDREALMASGSGGHNTMPSGGNSVSSGSSVSSTSLDTLYTSSSPSEPGSSCSPTPPPVPRRGTHTTVSQVQPPPSKASAPEPPAEEEVATGTTSASDDLEALGTLSLGTTEEKAAAEAAVPRTIGAELMELVRRNTGLSHELCRVAIGIIVGHIQASVPASSPVMEQVLLSLVEGKDLSMALPSGQVCHDQQRLEVIFADLARRKDDAQQRSWALYEDEGVIRCYLEELLHILTDADPEVCKKMCKRNEFESVLALVAYYQMEHRASLRLLLLKCFGAMCSLDAAIISTLVSSVLPVELARDMQTDTQDHQKLCYSALILAMVFSMGEAVPYAHYEHLGTPFAQFLLNIVEDGLPLDTTEQLPDLCVNLLLALNLHLPAADQNVIMAALSKHANVKIFSEKLLLLLNRGDDPVRIFKHEPQPPHSVLKFLQDVFGSPATAAIFYHTDMMALIDITVRHIADLSPGDKLRMEYLSLMHAIVRTTPYLQHRHRLPDLQAILRRILNEEETSPQCQMDRMIVREMCKEFLVLGEAPS

SEQ ID NO: 898634 - protein, 746 aa, Homo sapiens; identical to SEQ ID NO: 898633

SEQ ID NO: 898635 - protein, 719 aa, Homo sapiens
AGQPRRGSALRAWRCGAAALATFPAPALPGLMYRALYAFRSAEPNALAFAAGETFLVLERSSAHWWLAARARSGETGYVPPAYLRRLQGLEQDVLQAIDRAIEAVHNTAMRDGGKYSLEQRGVLQKLIHHRKETLSRRGPSASSVAVMTSSTSDHHLDAAAARQPNGVCRAGFERQHSLPSSEHLGADGGLYQIPPQPRRAAPTTPPPPVKRRDREALMASGSGGHNTMPSGGNSVSSGSSVSSTSLDTLYTSSSPSEPGSSCSPTPPPVPRRGTHTTVSQVQPPPSKASAPEPPAEEEVATGTTSASDDLEALGTLSLGTTEEKAAAEAAVPRTIGAELMELVRRNTGLSHELCRVAIGIIVGHIQASVPASSPVMEQVLLSLVEGKDLSMALPSGQVCHDQQRLEVIFADLARRKDDAQQRSWALYEDEGVIRCYLEELLHILTDADPEVCKKMCKRNEFESVLALVAYYQMEHRASLRLLLLKCFGAMCSLDAAIISTLVSSVLPVELARDMQTDTQEHLGTPFAQFLLNIVEDGLPLDTTEQLPDLCVNLLLALNLHLPAADQNVIMAALSKHANVKIFSEKLLLLLNRGDDPVRIFKHEPQPPHSVLKFLQDVFGSPATAAIFYHTDMMALIDITVRHIADLSPGDKLRMEYLSLMHAIVRTTPYLQHRHRLPDLQAILRRILNEEETSPQCQMDRMIVREMCKEFLVLGEAPS

SEQ ID NO: 898636 - protein, 774 aa, Homo sapiens
AGQPRRGSALRAWRCGAAALATFPAPALPGLMYRALYAFRSAEPNALAFAAGETFLVLERSSAHWWLAARARSGETGYVPPAYLRRLQGLEQDVLQAIDRAIEAVHNTAMRDGGKYSLEQRGVLQKLIHHRKETLSRRGPSASSVAVMTSSTSDHHLDAAAARQPNGVCRAGFERQHSLPSSEHLGADGGLYQIPPQPRRAAPTTPPPPVKRRDREALMASGSGGHNTMPSGGNSVSSGSSVSSTSLDTLYTSSSPSEPGSSCSPTPPPVPRRGTHTTVSQVQPPPSKASAPEPPAEEEVATGTTSASDDLEALGTLSLGTTEEKAAAEAAVPRTIGAELMELVRRNTGLSHELCRVAIGIIVGHIQASVPASSPVMEQVLLSLVEGKDLSMALPSGQVCHDQQRLEVIFADLARRKDDAQQRSWALYEDEGVIRCYLEELLHILTDADPEVCKKMCKRNEFESVLALVAYYQMEHRASLRLLLLKCFGAMCSLDAAIISTLVSSVLPVELARDMQTDTQDHQKLCYSALILAMVFSMGEAVPYAHYEHLGTPFAQFLLNIVEDGLPLDTTEQLPDLCVNLLLALNLHLPGGVGPGWAVAEHMVALRLSTLSIPMSFLAADQNVIMAALSKHANVKIFSEKLLLLLNRGDDPVRIFKHEPQPPHSVLKFLQDVFGSPATAAIFYHTDMMALIDITVRHIADLSPGDKLRMEYLSLMHAIVRTTPYLQHRHRLPDLQAILRRILNEEETSPQCQMDRMIVREMCKEFLVLGEAPS

SEQ ID NO: 898637 - protein, 746 aa, Homo sapiens; identical to SEQ ID NO: 898633

SEQ ID NO: 898638 - protein, 753 aa, Homo sapiens
AGQPRRGSALRAWRCGAAALATFPAPALPGLMYRALYAFRSAEPNALAFAAGETFLVLERSSAHWWLAARARSGETGYVPPAYLRRLQGLEQDVLQAIDRAIEAVHNTAMRDGGKYSLEQRGVLQKLIHHRKETLSRRGPSASSVAVMTSSTSDHHLDAAAARQPNGVCRAGFERQHSLPSSEHLGADGGLYQIPLPSSQIPPQPRRAAPTTPPPPVKRRDREALMASGSGGHNTMPSGGNSVSSGSSVSSTSLDTLYTSSSPSEPGSSCSPTPPPVPRRGTHTTVSQVQPPPSKASAPEPPAEEEVATGTTSASDDLEALGTLSLGTTEEKAAAEAAVPRTIGAELMELVRRNTGLSHELCRVAIGIIVGHIQASVPASSPVMEQVLLSLVEGKDLSMALPSGQVCHDQQRLEVIFADLARRKDDAQQRSWALYEDEGVIRCYLEELLHILTDADPEVCKKMCKRNEFESVLALVAYYQMEHRASLRLLLLKCFGAMCSLDAAIISTLVSSVLPVELARDMQTDTQDHQKLCYSALILAMVFSMGEAVPYAHYEHLGTPFAQFLLNIVEDGLPLDTTEQLPDLCVNLLLALNLHLPAADQNVIMAALSKHANVKIFSEKLLLLLNRGDDPVRIFKHEPQPPHSVLKFLQDVFGSPATAAIFYHTDMMALIDITVRHIADLSPGDKLRMEYLSLMHAIVRTTPYLQHRHRLPDLQAILRRILNEEETSPQCQMDRMIVREMCKEFLVLGEAPS

SEQ ID NO: 898639 - protein, 442 aa, Homo sapiens
AGQPRRGSALRAWRCGAAALATFPAPALPGLMYRALYAFRSAEPNALAFAAGETFLVLERSSAHWWLAARARSGETGYVPPAYLRRLQGLEQDVLQAIDRAIEAVHNTAMRDGGKYSLEQRGVLQKLIHHRKETLSRRGPSASSVAVMTSSTSDHHLDAAAARQPNGVCRAGFERQHSLPSSEHLGADGGLYQIPLPSSQIPPQPRRAAPTTPPPPVKRRDREALMASGSGGHNTMPSGGNSVSSGSSVSSTSLDTLYTSSSPSEPGSSCSPTPPPVPRRGTHTTVSQVQPPPSKASAPEPPAEEEVATGTTSASDDLEALGTLSLGTTEEKAAAEAAVPRTIGAELMELVRRNTGLSHELCRVAIGIIVGHIQASVPASSPVMEQVLLSLVEGKVRVGGTAGPPCYPPCSHRHTLVQPVHYRYFSSSGSELLLCWALGTLS

SEQ ID NO: 898640 - protein, 263 aa, Homo sapiens
AGQPRRGSALRAWRCGAAALATFPAPALPGLMYRALYAFRSAEPNALAFAAGETFLVLERSSAHWWLAARARSGETGYVPPAYLRRLQVYTAVPCPPQGLEQDVLQAIDRAIEAVHNTAMRDGGKYSLEQRGVLQKLIHHRKETLSRRGPSASSVAVMTSSTSDHHLDAAAARQPNGVCRAGFERQHSLPSSEHLGADGGLYQIPLPSSQIPPQPRRAAPTTPPPPVKRRDREALMASGSGGTKPLPPGVTLCTSESSVQRQL

SEQ ID NO: 898641 - protein, 707 aa, Homo sapiens
RRARGAAGRAAARGGRGQARGLHGPRLRRPRGLEGTRSAAGAAQRPGPRSTLRKLVFLRSALRAGYIVLLRWPGEVAADLPSPPDSGRAATPASHWREAGGGEGVGEWRRGGGGVLPFNPPQEVVPLSPKAEGPSWGWVRAEGTDPFRAVPSSQIPPQPRRAAPTTPPPPVKRRDREALMASGSGGHNTMPSGGNSVSSGSSVSSTSLDTLYTSSSPSEPGSSCSPTPPPVPRRGTHTTVSQVQPPPSKASAPEPPAEEEVATGTTSASDDLEALGTLSLGTTEEKAAAEAAVPRTIGAELMELVRRNTGLSHELCRVAIGIIVGHIQASVPASSPVMEQVLLSLVEGKDLSMALPSGQVCHDQQRLEVIFADLARRKDDAQQRSWALYEDEGVIRCYLEELLHILTDADPEVCKKMCKRNEFESVLALVAYYQMEHRASLRLLLLKCFGAMCSLDAAIISTLVSSVLPVELARDMQTDTQDHQKLCYSALILAMVFSMGEAVPYAHYEHLGTPFAQFLLNIVEDGLPLDTTEQLPDLCVNLLLALNLHLPAADQNVIMAALSKHANVKIFSEKLLLLLNRGDDPVRIFKHEPQPPHSVLKFLQDVFGSPATAAIFYHTDMMALIDITVRHIADLSPGDKLRMEYLSLMHAIVRTTPYLQHRHRLPDLQAILRRILNEEETSPQCQMDRMIVREMCKEFLVLGEAPS

SEQ ID NO: 898642 - protein, 391 aa, Homo sapiens
LATKHTLLGHIQASVPASSPVMEQVLLSLVEGKDLSMALPSGQVCHDQQRLEVIFADLARRKDDAQQRSWALYEDEGVIRCYLEELLHILTDADPEVCKKMCKRNEFESVLALVAYYQMEHRASLRLLLLKCFGAMCSLDAAIISTLVSSVLPVELARDMQTDTQDHQKLCYSALILAMVFSMGEAVPYAHYEHLGTPFAQFLLNIVEDGLPLDTTEQLPDLCVNLLLALNLHLPAADQNVIMAALSKHANVKIFSEKLLLLLNRGDDPVRIFKHEPQPPHSVLKFLQDVFGSPATAAIFYHTDMMALIDITVRHIADLSPGDKLRMEYLSLMHAIVRTTPYLQHRHRLPDLQAILRRILNEEETSPQCQMDRMIVREMCKEFLVLGEAPS

SEQ ID NO: 898643 - protein, 355 aa, Homo sapiens [sequence omitted]

SEQ ID NO: 898644 - protein, 169 aa, Homo sapiens
NIWHGTRLGGAQILTRLMNVIEKERVPYTDDGLEAIIFTAQGDMRQALNNLQSTFSGFGFINSENVFKVCDEPHPLLVKEMIQHCVNANIDEAYKILAHLWHLGYSPEDIIGNIFRVCKTFQMAEYLKLEFIKEIGYTHMKIAEGVNSLLQMAGLLARLCQKTMAPVAS

SEQ ID NO: 898645 - protein, 371 aa, Homo sapiens
RQGAVPRVAGRGRGGARMEVEAVCGGAGEVEAQDSDPAPAFSKAPGSAGHYELPWVEKYRPVKLNEIVGNEDTVSRLEVFAREGNVPNIIIAGPPGTGKTTSILCLARALLGPALKDAMLELNASNDRGIDVVRNKIKMFAQQKVTLPKGRHKIIILDEADSMTDGAQQALRRTMEIYSKTTRFALACNASDKIIEPIQSRCAVLRYTKLTDAQILTRLMNVIEKERVPYTDDGLEAIIFTAQGDMRQALNNLQSTFSGFGFINSENVFKVCDEPHPLLVKEMIQHCVNANIDEAYKILAHLWHLGYSPEDIIGNIFRVCKTFQMAEYLKLEFIKEIGYTHMKIAEGVNSLLQMAGLLARLCQKTMAPVAS

SEQ ID NO: 898646 - protein, 354 aa, Homo sapiens
MEVEAVCGGAGEVEAQDSDPAPAFSKAPGSAGHYELPWVEKYRPVKLNEIVGNEDTVSRLEVFAREGNVPNIIIAGPPGTGKTTSILCLARALLGPALKDAMLELNASNDRGIDVVRNKIKMFAQQKVTLPKGRHKIIILDEADSMTDGAQQALRRTMEIYSKTTRFALACNASDKIIEPIQSRCAVLRYTKLTDAQILTRLMNVIEKERVPYTDDGLEAIIFTAQGDMRQALNNLQSTFSGFGFINSENVFKVCDEPHPLLVKEMIQHCVNANIDEAYKILAHLWHLGYSPEDIIGNIFRVCKTFQMAEYLKLEFIKEIGYTHMKIAEGVNSLLQMAGLLARLCQKTMAPVAS

SEQ ID NO: 898647 - protein, 371 aa, Homo sapiens; identical to SEQ ID NO: 898645

SEQ ID NO: 898648 - protein, 371 aa, Homo sapiens; identical to SEQ ID NO: 898645

SEQ ID NO: 898649 - protein, 337 aa, Homo sapiens
RQGAVPRVAGRGRGGARMEVEAVCGGAGEVEAQDSDPAPAFSKAPGSAGHYELPWVEKYRPVKLNEIVGNEDTVSRLEVFAREGNVPNIIIAGPPGTGKTTSILCLARALLGPALKDAMLELNASNDSMTDGAQQALRRTMEIYSKTTRFALACNASDKIIEPIQSRCAVLRYTKLTDAQILTRLMNVIEKERVPYTDDGLEAIIFTAQGDMRQALNNLQSTFSGFGFINSENVFKVCDEPHPLLVKEMIQHCVNANIDEAYKILAHLWHLGYSPEDIIGNIFRVCKTFQMAEYLKLEFIKEIGYTHMKIAEGVNSLLQMAGLLARLCQKTMAPVAS

SEQ ID NO: 898650 - protein, 251 aa, Homo sapiens
MCPTSSLRGIDVVRNKIKMFAQQKVTLPKGRHKIIILDEADSMTDGAQQALRRTMEIYSKTTRFALACNASDKIIEPIQSRCAVLRYTKLTDAQILTRLMNVIEKERVPYTDDGLEAIIFTAQGDMRQALNNLQSTFSGFGFINSENVFKVCDEPHPLLVKEMIQHCVNANIDEAYKILAHLWHLGYSPEDIIGNIFRVCKTFQMAEYLKLEFIKEIGYTHMKIAEGVNSLLQMAGLLARLCQKTMAPVAS

SEQ ID NO: 898651 - protein, 406 aa, Homo sapiens
TPKNRLGTRLGVGRGGARMEVEAVCGGAGEVEAQDSDPAPAFSKAPGSAGHYELPWVEKYRPVKLNEIVGNEDTVSRLEVFAREGNVPNIIIAGSEVTEMQTAVNITQELPEVLLVVGSLYWRSHSQGPPGTGKTTSILCLARALLGPALKDAMLELNASNDRGIDVVRNKIKMFAQQKVTLPKGRHKIIILDEADSMTDGAQQALRRTMEIYSKTTRFALACNASDKIIEPIQSRCAVLRYTKLTDAQILTRLMNVIEKERVPYTDDGLEAIIFTAQGDMRQALNNLQSTFSGFGFINSENVFKVCDEPHPLLVKEMIQHCVNANIDEAYKILAHLWHLGYSPEDIIGNIFRVCKTFQMAEYLKLEFIKEIGYTHMKIAEGVNSLLQMAGLLARLCQKTMAPVAS

SEQ ID NO: 898652 - protein, 169 aa, Homo sapiens; identical to SEQ ID NO: 898644

SEQ ID NO: 898653 - protein, 163 aa, Homo sapiens
TPKNRLGTRLGVGRGGARMEVEAVCGGAGEVEAQDSDPAPAFSKAPGSAGHYELPWVEKYRPVKLNEIVGNEDTVSRLEVFAREGNVPNIIIAGPPGTGKTTSILCLARALLGPALKDAMLELNASNDRGIDVVRNKIKMFAQQKVTLPKGRHKIIILDEADR

SEQ ID NO: 898654 - protein, 354 aa, Homo sapiens; identical to SEQ ID NO: 898646

SEQ ID NO: 898655 - protein, 354 aa, Homo sapiens; identical to SEQ ID NO: 898646

SEQ ID NO: 898656 - protein, 354 aa, Homo sapiens; identical to SEQ ID NO: 898646

SEQ ID NO: 898657 - protein, 338 aa, Homo sapiens
TPKNRLGTRLGVGRGGARMEVEAVCGGAGEVEAQDSDPAPAFSKAPGSAGHYELPWVEKYRPVKLNEIVGNEDTVSRLEVFAREGNVPNIIIAGPPGTGKTTSILCLARALLGPALKDAMLELNASNDSMTDGAQQALRRTMEIYSKTTRFALACNASDKIIEPIQSRCAVLRYTKLTDAQILTRLMNVIEKERVPYTDDGLEAIIFTAQGDMRQALNNLQSTFSGFGFINSENVFKVCDEPHPLLVKEMIQHCVNANIDEAYKILAHLWHLGYSPEDIIGNIFRVCKTFQMAEYLKLEFIKEIGYTHMKIAEGVNSLLQMAGLLARLCQKTMAPVAS

SEQ ID NO: 898658 - protein, 321 aa, Homo sapiens
RQGAVPRVAGRGRGGARMEVEAVCGGAGEVEAQDSDPAPAFSKAPGSAGHYELPWVEKYRPVKLNEIVGNEDTVSRLEVFAREGNVPNIIIAGPPGTGKTTSILCLARALLGPALKDAMLELNASNDRGIDVVRNKIKMFAQQKVTLPKGRHKIIILDEADSMTDGAQQALRRTMEIYSKTTRFALACNASDKIIEPIQSRCAVLRYTKLTDAQILTRLMNVIEKERVPYTDDGLEAIIFTAQGDMRQALNNLQSTFSGFGFINSENVFKVCDEPHPLLVKEMIQHCVNANIDEAYKGWPPSPRPGRGTAHFLGRGEREPF

SEQ ID NO: 898659 - protein, 253 aa, Homo sapiens
MLELNASNDRGIDVVRNKIKMFAQQKVTLPKGRHKIIILDEADSMTDGAQQALRRTMEIYSKTTRFALACNASDKIIEPIQSRCAVLRYTKLTDAQILTRLMNVIEKERVPYTDDGLEAIIFTAQGDMRQALNNLQSTFSGFGFINSENVFKVCDEPHPLLVKEMIQHCVNANIDEAYKILAHLWHLGYSPEDIIGNIFRVCKTFQMAEYLKLEFIKEIGYTHMKIAEGVNSLLQMAGLLARLCQKTMAPVAS

SEQ ID NO: 898660 - protein, 331 aa, Homo sapiens
RQGAVPRVAGRGRGGARMEVEAVCGGAGEVEAQDSDPAPAFSKAPGSAGHYELPWVEKYRPVKLNEIVGNEDTVSRLEVFAREGNVPNIIIAGPPGTGKTTSILCLARALLGPALKDAMLELNASNDRGIDVVRNKIKMFAQQKVTLPKGRHKIIILDEADSMTDGAQQALRRTMEIYSKTTRFALACNASDKIIEPIQSRCAVLRYTKLTDAQILTRLMNVIEKERVPYTDDGLEAIIFTAQGDMRQALNNWVTSQDWFLPVSTCSRSVKSPPCGRVVPWCALGASGWSWGGPRILASGIKGPGSGPKGLGAGETGASSSGLLLPPGVLP

SEQ ID NO: 898661 - protein, 277 aa, Homo sapiens
KGRAGPAGARPCGSQDSSPGASSPYATRNPSQGPGDSGGVGQDRGGGAQQRPPAPPKAGRSSEPGAGPARGFPEGPAQPEGGTEGGASAGAATKACATLRGAGELGGEPGACQARAAAASDRRARRVDLRSPRPATMTIMVEDIMKLLCSLSGERKMKAAVKHSGKGALVTGAMAFVGGLVGGPPGLAVGGAVGGLLGAWMTSGQFKPVPQILMELPPAEQQRLFNEAAAIIRHLEWTDAVQLTALVMGSEALQQQLLAMLVNYVTKELRAEIQYDD

SEQ ID NO: 898662 - protein, 141 aa, Homo sapiens
MTIMVEDIMKLLCSLSGERKMKAAVKHSGKGALVTGAMAFVGGLVGGPPGLAVGGAVGGLLGAWMTSGQFKPVPQILMELPPAEQQRLFNEAAAIIRHLEWTDAVQLTALVMGSEALQQQLLAMLVNYVTKELRAEIQYDD

SEQ ID NO: 898663 - protein, 141 aa, Homo sapiens; identical to SEQ ID NO: 898662

SEQ ID NO: 898664 - protein, 277 aa, Homo sapiens; identical to SEQ ID NO: 898661

SEQ ID NO: 898665 - protein, 181 aa, Homo sapiens
MTIMVEDIMKLLCSLSGERKMKAAVKHSGKGALVTGAMAFVGGLVGGPPGLAVGSSLRHRIALNRLLSYLLWPLTLSQTCLVHSLDSFEEYWAGGAVGGLLGAWMTSGQFKPVPQILMELPPAEQQRLFNEAAAIIRHLEWTDAVQLTALVMGSEALQQQLLAMLVNYVTKELRAEIQYDD

SEQ ID NO: 898666 - protein, 243 aa, Homo sapiens
KGRAGPAGARPCGSQDSSPGASSPYATRNPSQGPGDSGGVGQDRGGGAQQRPPAPPKAGRSSEPGAGPARGFPEGPAQPEGGTEGGASAGAATKACATLRGAGELGGEPGACQARAAAASDRRARRVDLRSPRPATMTIMVEDIMKLLCSLSGERKMKAAVKHSGKGALVTGAMAFVGGLVGGPPGLAVGGAVGGLLGAWMTSGQFKPVPQILMELPPAEQQRLFNEAAAIIRPCSSSCWPCW

SEQ ID NO: 898667 - protein, 277 aa, Homo sapiens; identical to SEQ ID NO: 898661

SEQ ID NO: 898668 - protein, 149 aa, Homo sapiens
KGRAGPAGARPCGSQDSSPGASSPYATRNPSQGPGDSGGVGQDRGGGAQQRPPAPPKAGRSSEPGAGPARGFPEGPAQPEGGTEGGASAGAATKACATLRGAGELGGEPGACQARAAAASDRRARRVDLRSPRGGCRGAVRCLDDKWTV

SEQ ID NO: 898669 - protein, 277 aa, Homo sapiens; identical to SEQ ID NO: 898661

SEQ ID NO: 898670 - protein, 277 aa, Homo sapiens; identical to SEQ ID NO: 898661

SEQ ID NO: 898671 - protein, 317 aa, Homo sapiens
KGRAGPAGARPCGSQDSSPGASSPYATRNPSQGPGDSGGVGQDRGGGAQQRPPAPPKAGRSSEPGAGPARGFPEGPAQPEGGTEGGASAGAATKACATLRGAGELGGEPGACQARAAAASDRRARRVDLRSPRPATMTIMVEDIMKLLCSLSGERKMKAAVKHSGKGALVTGAMAFVGGLVGGPPGLAVGSSLRHRIALNRLLSYLLWPLTLSQTCLVHSLDSFEEYWAGGAVGGLLGAWMTSGQFKPVPQILMELPPAEQQRLFNEAAAIIRHLEWTDAVQLTALVMGSEALQQQLLAMLVNYVTKELRAEIQYDD

SEQ ID NO: 898672 - protein, 88 aa, Homo sapiens
KICSLHSLPPPPTSGQFKPVPQILMELPPAEQQRLFNEAAAIIRHLEWTDAVQLTALVMGSEALQQQLLAMLVNYVTKELRAEIQYDD

SEQ ID NO: 898673 - protein, 277 aa, Homo sapiens; identical to SEQ ID NO: 898661

SEQ ID NO: 898674 - protein, 378 aa, Homo sapiens [sequence omitted]

SEQ ID NO: 898675 - protein, 354 aa, Homo sapiens
MRAAAAPGLTAPWRLLQCCELEAGELGMAVPAAAMGPSALGQSGPGSMAPWCSVSSGPSRYVLGMQELFRGHSKTREFLAHSAKVHSVAWSCDGRRLASGSFDKTASVFLLEKDRLVKENNYRGHGDSVDQLCWHPSNPDLFVTASGDKTIRIWDVRTTKCIATVNTKGENINICWSPDGQTIAVGNKDDVVTFIDAKTHRSKAEEQFKFEVNEISWNNDNNMFFLTNGNGCINILSYPELKPVQSINAHPSNCICIKFDPMGKYFATGSADALVSLWDVDELVCVRCFSRLDWPVRTLSFSHDGKMLASASEDHFIDIAEVETGNFMRIYRLSPLAVRTSLVISSLHVTTSPA

SEQ ID NO: 898676 - protein, 378 aa, Homo sapiens [sequence omitted]

SEQ ID NO: 898677 - protein, 378 aa, Homo sapiens [sequence omitted]

SEQ ID NO: 898678 - protein, 378 aa, Homo sapiens [sequence omitted]

SEQ ID NO: 898679 - protein, 354 aa, Homo sapiens; identical to SEQ ID NO: 898675

SEQ ID NO: 898680 - protein, 382 aa, Homo sapiens
MRAAAAPGLTAPWRLLQCCELEAGELGMAVPAAAMGPSALGQSGPGSMAPWCSVSSGPSRYVLGMQELFRGHSKTREFLAHSAKVHSVAWSCDGRRLASGSFDKTASVFLLEKDRLVKENNYRGHGDSVDQLCWHPSNPDLFVTASGDKTIRIWDVRTTKCIATVNTKGENINICWSPDGQTIAVGNKDDVVTFIDAKTHRSKAEEQFKFEVNEISWNNDNNMFFLTNGNGCINILSYPELKPVQSINAHPSNCICIKFDPMGKYFATGSADALVSLWDVDELVCVRCFSRLDWPVRTLSFSHDGKMLASASEDHFIDIAEVETDLGSLQPLPPGFKLFSCLSLPSSWDYRLLPPLLANFCIFSGDGVLPCWAGWSRTPDLT

SEQ ID NO: 898681 - protein, 274 aa, Homo sapiens
MRAAAAPGLTAPWRLLQCCELEAGELGMAVPAAAMGPSALGQSGPGSMAPWCSVSSGPSRYVLGMQELFRGHSKTREFLAHSAKVHSVAFIDAKTHRSKAEEQFKFEVNEISWNNDNNMFFLTNGNGCINILSYPELKPVQSINAHPSNCICIKFDPMGKYFATGSADALVSLWDVDELVCVRCFSRLDWPVRTLSFSHDGKMLASASEDHFIDIAEVETGDKLWEVQCESPTFTVAWHPKRPLLAFACDDKDGKYDSSREAGTVKLFGLPNDS

SEQ ID NO: 898682 - protein, 378 aa, Homo sapiens [sequence omitted]

SEQ ID NO: 898683 - protein, 378 aa, Homo sapiens [sequence omitted]

SEQ ID NO: 898684 - protein, 378 aa, Homo sapiens [sequence omitted]

SEQ ID NO: 898685 - protein, 378 aa, Homo sapiens [sequence omitted]

SEQ ID NO: 898686 - protein, 359 aa, Homo sapiens
MRAAAAPGLTAPWRLLQCCELEAGELGMAVPAAAMGPSALGQSGPGSMAPWCSVSSGPSRYVLGMQELFRGHSKTREFLAHSAKVHSVAWSCDGRRLASGSFDKTASVFLLEKDRLVKENNYRGHGDSVDQLCWHPSNPDLFVTASGDKTIRIWDVRTTKCIATVNTKGENINICWSPDGQTIAVGNKDDVVTFIDAKTHRSKAEEQFKFEVNEISWNNDNNMFFLTNGNGCINILSYPELKPVQSINAHPSNCICIKFDPMGKYFATGSADALVSLWDVDELVCVRCFSRLDWPVRTLSFSHDGKMLASASEDHFIDIAEVETVQQTHSASQKAAGPLAKRPVCSIVIIPPSLLPFES

SEQ ID NO: 898687 - protein, 302 aa, Homo sapiens
MRAAAAPGLTAPWRLLQCCELEAGELGMAVPAAAMGPSALGQSGPGSMAPWCSVSSGPSRYVLGMQELFRGHSKTREFLAHSAKVHSVAWSCDGRRLASGSFDKTASVFLLEKDRLVKENNYRGHGDSVDQLCWHPSNPDLFVTASGDKTIRIWDVRTTKCIATVNTKGENINICWSPDGQTIAVGNKDDVVTFIDAKTHRSKAEEQFKFEVNEISWNNDNNMFFLTNGNGCINILSYPELKPVQSINAHPSNCICIKFDPMGKYFATGSADALVSLWDVDELVCVRCFSSWMAFRTSQLSP

SEQ ID NO: 898688 - protein, 64 aa, Homo sapiens
MFLQYYLNEQGDRVYTLKKFDPMGQQTCSAHPARFSPDDKYSRHRITIKKRFKVLMTQQPRPVL

SEQ ID NO: 898689 - protein, 64 aa, Homo sapiens; identical to SEQ ID NO: 898688

SEQ ID NO: 898690 - protein, 64 aa, Homo sapiens; identical to SEQ ID NO: 898688

SEQ ID NO: 898691 - protein, 69 aa, Homo sapiens
IRFIAHIGIGLRQDRHEGPLQTERWTELGPLAYKRSCFSSITQPILLGSPQMTNTLDTESPSRNASRCS

SEQ ID NO: 898692 - protein, 111 aa, Homo sapiens
MAGGLATQTTFLHERQEVLNTYDKHLSIRARGAGSINRRIPTHNSRNTPYHRQQEVQISYARPRIWTPPPNFLQHQQHVCYRDINVTGSSNATATHHCSSKNVNHRICNHT

SEQ ID NO: 898693 - protein, 81 aa, Homo sapiens
DHCRLSGGPNWDRWLISDHVSPVLPQRAGRSSLYAEGEERKQGVNRHGEKCRWEEWVRSYVELPSWVRGTRKSRTEVGKNR

SEQ ID NO: 898694 - protein, 64 aa, Homo sapiens; identical to SEQ ID NO: 898688

SEQ ID NO: 898695 - protein, 64 aa, Homo sapiens; identical to SEQ ID NO: 898688

SEQ ID NO: 898696 - protein, 415 aa, Homo sapiens
RCFPCRGEGSDYNSQRVWRPQQWAVEFPGRPRSSGGSGSLCRPRKPGVGGTQTRAVRPAVCSADSARPHLPLRRADMKDSLVLLGRVPAHPDSRCWFLAWNPAGTLLASCGGDRRIRIWGTEGDSWICKSVLSEGHQRTVRKVAWSPCGNYLASASFDATTCIWKKNQDDFECVTTLEGHENEVKSVAWAPSGNLLATCSRDKSVWVWEVDEEDEYECVSVLNSHTQDVKHVVWHPSQELLASASYDDTVKLYREEEDDWVCCATLEGHESTVWSLAFDPSGQRLASCSDDRTVRIWRQYLPGNEQGVACSGSDPSWKCICTLSGFHSRTIYDIAWCQLTGALATACGDDAIRVFQEDPNSDPQQPTFSLTAHLHQAHSQDVNCVAWNPKEPGLLASCSDDGEVAFWKYQRPEGL

SEQ ID NO: 898697 - protein, 415 aa, Homo sapiens; identical to SEQ ID NO: 898696

SEQ ID NO: 898698 - protein, 375 aa, Homo sapiens
KPLARYEAWCAQTRAVRPAVCSADSARPHLPLRRADMKDSLVLLGRVPAHPDSRCWFLAWNPAGTLLASCGGDRRIRIWGTEGDSWICKSVLSEGHQRTVRKVAWSPCGNYLASASFDATTCIWKKNQDDFECVTTLEGHENEVKSVAWAPSGNLLATCSRDKSVWVWEVDEEDEYECVSVLNSHTQDVKHVVWHPSQELLASASYDDTVKLYREEEDDWVCCATLEGHESTVWSLAFDPSGQRLASCSDDRTVRIWRQYLPGNEQGVACSGSDPSWKCICTLSGFHSRTIYDIAWCQLTGALATACGDDAIRVFQEDPNSDPQQPTFSLTAHLHQAHSQDVNCVAWNPKEPGLLASCSDDGEVAFWKYQRPEGL

SEQ ID NO: 898699 - protein, 310 aa, Homo sapiens
RCFPCRGEGSDYNSQRVWRPQQWAVEFPGRPRSSGGSGSLCRPRKPGVGGTQTRAVRPAVCSADSARPHLPLRRADMKDSLVLLGRVPAHPDSRCWFLAWNPAGTLLASCGGDRRIRIWGTEGDSWICKSVLSEGHQRTVRKVAWSPCGNYLASASFDATTCIWKKNQDDFECVTTLEGHENEVKSVAWAPSGNLLATCSRDKSVWVWEVDEEDEYECVSVLNSHTQDVKHVVWHPSQELLASASYDDTVKLYREEEDDWVCCATLEGHESTVWSLAFDPSGQRLASCSDDRTVRIWRQYLPGNEQGEVH

SEQ ID NO: 898700 - protein, 406 aa, Homo sapiens
RCFPCRGEGSDYNSQRVWRPQQWAVEFPGRPRSSGGSGSLCRPRKPGVGGTQTRAVRPAVCSADSARPHLPLRRADMKDSLVLLGRWFLAWNPAGTLLASCGGDRRIRIWGTEGDSWICKSVLSEGHQRTVRKVAWSPCGNYLASASFDATTCIWKKNQDDFECVTTLEGHENEVKSVAWAPSGNLLATCSRDKSVWVWEVDEEDEYECVSVLNSHTQDVKHVVWHPSQELLASASYDDTVKLYREEEDDWVCCATLEGHESTVWSLAFDPSGQRLASCSDDRTVRIWRQYLPGNEQGVACSGSDPSWKCICTLSGFHSRTIYDIAWCQLTGALATACGDDAIRVFQEDPNSDPQQPTFSLTAHLHQAHSQDVNCVAWNPKEPGLLASCSDDGEVAFWKYQRPEGL

SEQ ID NO: 898701 - protein, 364 aa, Homo sapiens
RCFPCRGEGSDYNSQRVWRPQQWAVEFPGRPRSSGGSGSLCRPRKPGVGGTQTRAVRPAVCSADSARPHLPLRRADMKDSLVLLGRVPAHPDSRCWFLAWNPAGTLLASCGGDRRIRIWGTEGDSWICKSVLSEGHQRTVRKVAWSPCGNYLASASFDATTCIWKKNQDDFECVTTLEGHENEVKSVAWAPSGNLLATCSRDKSVWVWEVDEEDEYECVSVLNSHTQDVKHVVWHPSQELLASASYDDTVKLYREEEDDWVCCATLEGHESTVWSLAFDPSGQRLASCSDDRTVRIWRQYLPGNEQGVACSGSDPSWKCICTLSGFHSRTIYDIAWCQLTGALATACGDGFFCWASLSFSSAAT

SEQ ID NO: 898702 - protein, 336 aa, Homo sapiens
RCFPCRGEGSDYNSQRVWRPQQWAVEFPGRPRSSGGSGSLCRPRKPGVGGTQTRAVRPAVCSADSARPHLPLRRADMKDSLVLLGRVPAHPDSRCWFLAWNPAGTLLASCGGDRRIRIWGTEGDSWICKSVLSEGHQRTVRKVAWSPCGNYLASASFDATTCIWKKNQDDFECVTTLEGHENEVKSVAWAPSGNLLATCSRDKSVWVWEVDEEDEYECVSVLNSHTQDVKHVVWHPSQELLASASYDDTVKLYREEEDDWVCCATLEGHESTVWSLAFDPSGQRLASCSDDRTVRIWRQYLPGNEQGVACSGSDPSWKCICTLSGFHSRTIYDIAW

SEQ ID NO: 898703 - protein, 310 aa, Homo sapiens; identical to SEQ ID NO: 898699

SEQ ID NO: 898704 - protein, 166 aa, Homo sapiens
RCFPCRGEGSDYNSQRVWRPQQWAVEFPGRPRSSGGSGSLCRPRKPGVGGTQTRAVRPAVCSADSARPHLPLRRADMKDSLVLLGRVPAHPDSRCWFLAWNPAGTLLASCGGDRRIRIWGTEGDSWICKSVLSEGHQRTVRKVAWSPCGNYLASASFDATILFRLG

SEQ ID NO: 898705 - protein, 239 aa, Homo sapiens
RCFPCRGEGSDYNSQRVWRPQQWAVEFPGRPRSSGGSGSLCRPRKPGVGGTQTRAVRPAVCSADSARPHLPLRRADMKDSLVLLGRVPAHPDSRCWFLAWNPAGTLLASCGGDRRIRIWGTEGDSWICKSVLSEGHQRTVRKVAWSPCGNYLASASFDATTCIWKKNQDDFECVTTLEGHENEVKSVAWAPSGNLLATCSRDKSVWVWEGEARSLQVDWEPPDSPLCLPAPLRCDGNWG

SEQ ID NO: 898706 - protein, 111 aa, Homo sapiens
NEVKSVAWAPSGNLLATCSRDKSVWVWEGEARSLQVDWEPPDSPLCVPDRVGSWVPFFSPTVDEEDEYECVSVLNSHTQDVKHVVWHPSQEVRVKQGLLWEGLWCAGLCPA

SEQ ID NO: 898707 - protein, 415 aa, Homo sapiens; identical to SEQ ID NO: 898696

SEQ ID NO: 898708 - protein, 310 aa, Homo sapiens; identical to SEQ ID NO: 898699

SEQ ID NO: 898709 - protein, 389 aa, Homo sapiens
RCFPCRGEGSDYNSQRVWRPQQWAVEFPGRPRSSGGSGSLCRPRKPGVGGTQTRAVRPAVCSADSARPHLPLRRADMKDLLASCGGDRRIRIWGTEGDSWICKSVLSEGHQRTVRKVAWSPCGNYLASASFDATTCIWKKNQDDFECVTTLEGHENEVKSVAWAPSGNLLATCSRDKSVWVWEVDEEDEYECVSVLNSHTQDVKHVVWHPSQELLASASYDDTVKLYREEEDDWVCCATLEGHESTVWSLAFDPSGQRLASCSDDRTVRIWRQYLPGNEQGVACSGSDPSWKCICTLSGFHSRTIYDIAWCQLTGALATACGDDAIRVFQEDPNSDPQQPTFSLTAHLHQAHSQDVNCVAWNPKEPGLLASCSDDGEVAFWKYQRPEGL

SEQ ID NO: 898710 - protein, 311 aa, Homo sapiens [sequence omitted]

SEQ ID NO: 898711 - protein, 336 aa, Homo sapiens; identical to SEQ ID NO: 898702

SEQ ID NO: 898712 - protein, 183 aa, Homo sapiens
MLCHPVILFLPVQLHCVIKLYREEEDDWVCCATLEGHESTVWSLAFDPSGQRLASCSDDRTVRIWRQYLPGNEQGVACSGSDPSWKCICTLSGFHSRTIYDIAWCQLTGALATACGDDAIRVFQEDPNSDPQQPTFSLTAHLHQAHSQDVNCVAWNPKEPGLLASCSDDGEVAFWKYQRPEGL

SEQ ID NO: 898713 - protein, 144 aa, Homo sapiens
RCFPCRGEGSDYNSQRVWRPQQWAVEFPGRPRSSGGSGSLCRPRKPGVGGTQTRAVRPAVCSADSARPHLPLRWFLAWNPAGTLLASCGGDRRIRIWGTEGDSWICKSVLSEGHQRTVRKVAWSPCGNYLASASFDATILFRLG

SEQ ID NO: 898714 - protein, 381 aa, Homo sapiens
MKTVKEKKECQRLRKSAKTRRVTQRKPSSGPVCWLCLREPGDPEKLGEFLQKDNISVHYFCLILSSKLPQRGQSNRGFHGFLPEDIKKEAARASRKICFVCKKKGAAINCQKDQCLRNFHLPCGQERGCLSQFFGEYKSFCDKHRPTQNIQHGHVGEESCILCCEDLSQQSVENIQSPCCSQAIYHRKCIQKYAHTSAKHFFKCPQCNNRKEFPQEMLRMGIHIPDRDAAWELEPGAFSDLYQRYQHCDAPICLYEQGRDSFEDEGRWCLILCATCGSHGTHRDCSSLRSNSKKWECEECSPAAATDYIPENSGDIPCCSSTFHPEEHFCRDNTLEENPGLSWTDWPEPSLLEKPESSRGRRSYSWRSKGVRITNSCKKSK

SEQ ID NO: 898715 - protein, 227 aa, Homo sapiens [sequence omitted]

SEQ ID NO: 898716 - protein, 327 aa, Homo sapiens
MKTVKEKKECQRLRKSAKTRRVTQRKPSSGPVCWLCLREPGDPEKLGEFLQKDNISVHYFCLILSSKLPQRGQSNRGFHGFLPEDIKKEAARASRKICFVCKKKGAAINCQKDQCLRNFHLPCGQERGCLSQFFGEYKSFCDKHRPTQNIQHGHVGEESCILCCEDLSQQSVENIQSPCCSQAIYHRKCIQKYAHTSAKHFFKCPQCNNRKEFPQEMLRMGIHIPDRRWCLILCATCGSHGTHRDCSSLRSNNYIPENSGDIPCCSSTFHPEEHFCRDNTLEENPGLSWTDWPEPSLLEKPESSRGRRSYSWRSKGVRITNSCKKSK

SEQ ID NO: 898717 - protein, 293 aa, Homo sapiens
MKTVKEKKECQRLRKSAKTRRVTQRKPSSGPVCWLCLREPGDPEKLGEFLQKDNISVHYFCLILSSKLPQRGQSNRGFHGFLPEDIKKEAARASRKICFVCKKKGAAINCQKDQCLRNFHLPCGQERGCLSQFFGEYKSFCDKHRPTQNIQHGHVGEESCILCCEDLSQQSVENIQSPCCSQAIYHRKCIQKYAHTSAKHFFKCPQCNNRKEFPQEMLRMGIHIPDRDAAWELEPGAFSDLYQRYQHCDAPICLYEQGRDSFEDEGEHSGTVRQGSRASSETMSQAKRSLSGA

SEQ ID NO: 898718 - protein, 277 aa, Homo sapiens
MKTVKEKKECQRLRKSAKTRRVTQRKPSSGPVCWLCLREPGDPEKLGEFLQKDNISVHYFCLILSSKLPQRGQSNRGFHGFLPEDIKKEAARASRKICFVCKKKGAAINCQKDQCLRNFHLPCGQERGCLSQFFGEYKSFCDKHRPTQNIQHGHVGEESCILCCEDLSQQSVENIQSPCCSQAIYHRKCIQVGLFPPWVPSTIALVLCLEPENPGNAQVCLSFGAPCWRPVLRAGFRQLEESQSSLWSFLAYRTSHMIRFRISKIFSIARANGLIPE

SEQ ID NO: 898719 - protein, 342 aa, Homo sapiens
MKTVKEKKECQRLRKSAKTRRVTQRKPSSGPVCWLCLREPGDPEKLGEFLQKDNISVHYFCLILSSKLPQRGQSNRGFHGFLPEDIKKEAARASRKICFVCKKKGAAINCQKDQCLRNFHLPCGQERGCLSQFFGEYKSFCDKHRPTQNIQHGHVGEESCILCCEDLSQQSVENIQSPCCSQAIYHRKCIQKYAHTSAKHFFKCPQCNNRKEFPQEMLRMGIHIPDRRWCLILCATCGSHGTHRDCSSLRSNSKKWECEECSPAAATDYIPENSGDIPCCSSTFHPEEHFCRDNTLEENPGLSWTDWPEPSLLEKPESSRGRRSYSWRSKGVRITNSCKKSK

SEQ ID NO: 898720 - protein, 342 aa, Homo sapiens; identical to SEQ ID NO: 898719

SEQ ID NO: 898721 - protein, 342 aa, Homo sapiens; identical to SEQ ID NO: 898719

SEQ ID NO: 898722 - protein, 342 aa, Homo sapiens; identical to SEQ ID NO: 898719

SEQ ID NO: 898723 - protein, 230 aa, Homo sapiens [sequence omitted]

SEQ ID NO: 898724 - protein, 261 aa, Homo sapiens
MKTVKEKKECQRLRKSAKTRRVTQRKPSSGPVCWLCLREPGDPEKLGEFLQKDNISVHYFCLILSSKLPQRGQSNRGFHGFLPEDIKKEAARASRKICFVCKKKGAAINCQKDQCLRNFHLPCGQERGCLSQFFGEYKSFCDKHRPTQNIQHGHVGEESCILCCEDLSQQSVENIQSPCCSQAIYHRKCIQKYAHTSAKHFFKCPQCNNRKEFPQEMPNFLREYKPFCDNIAQHSTPNMGMWGGKLQSIVVKTYPNSSVEN

SEQ ID NO: 898725 - protein, 170 aa, Homo sapiens
MPEIEILSSKLPQRGQSNRGFHGFLPEDIKKEAARASRKICFVCKKKGAAINCQKDQCLRNFHLPCGQERGCLSQFFGEYKSFCDKHRPTQNIQHGHVGEESCILCCEDLSQQSVENIQSPCCSQAIYHRKCIQKYAHTSAKHFFKCPQCNNRKEFPQEMLRMGIHIPDR

SEQ ID NO: 898726 - protein, 342 aa, Homo sapiens; identical to SEQ ID NO: 898719

SEQ ID NO: 898727 - protein, 342 aa, Homo sapiens; identical to SEQ ID NO: 898719

SEQ ID NO: 898728 - protein, 318 aa, Homo sapiens
MLSESSSFLKGVMLGSIFCALITMLGHIRIGHGNRMHHHEHHHLQAPNKEDILKISEDERMELSKSFRVYCIILVKPKDVSLWAAVKETWTKHCDKAEFFSSENVKVFESINMDTNDMWLMMRKAYKYAFDKYRDQYNWFFLARPTTFAIIENLKYFLLKKDPSQPFYLGHTIKSGDLEYVGMEGGIVLSVESMKRLNSLLNIPEKCPEQGGMIWKISEDKQLAVCLKYAGVFAENAEDADGKDVFNTKSVGLSIKEAMTYHPNQVVEGCCSDMAVTFNGLTPNQMHVMMYGVYRLRAFGHIFNDALVFLPPNGSDND

SEQ ID NO: 898729 - protein, 224 aa, Homo sapiens
MLGHIRIGHGNRMHHHEHHHLQAPNKEDILKISEDERMELSKSFRVYCIILVKPKDVSLWAAVKETWTKHCDKAEFFSSENVKVFESINMDTNDMWLMMRKAYKYAFDKYRDQYNWFFLARPTTFAIIENLKYFLLKKDPSQPFYLGHTIKSGDLEYVGMEGGIVLSVESMKRLNSLLNSKNFWTEGIDILNKRSDGSNSGLDMRGEYNNRGWYHVGFACPVFA

SEQ ID NO: 898730 - protein, 318 aa, Homo sapiens; identical to SEQ ID NO: 898728

SEQ ID NO: 898731 - protein, 347 aa, Homo sapiens
YMIKSSSVPEQFVFGGCVSCPQAVLDTGKMLSESSSFLKGVMLGSIFCALITMLGHIRIGHGNRMHHHEHHHLQAPNKEDILKISEDERMELSKSFRVYCIILVKPKDVSLWAAVKETWTKHCDKAEFFSSENVKVFESINMDTNDMWLMMRKAYKYAFDKYRDQYNWFFLARPTTFAIIENLKYFLLKKDPSQPFYLGHTIKSGDLEYVGMEGGIVLSVESMKRLNSLLNIPEKCPEQGGMIWKISEDKQLAVCLKYAGVFAENAEDADGKDVFNTKSVGLSIKEAMTYHPNQVVEGCCSDMAVTFNGLTPNQMHVMMYGVYRLRAFGHIFNDALVFLPPNGSDND

SEQ ID NO: 898732 - protein, 318 aa, Homo sapiens; identical to SEQ ID NO: 898728

SEQ ID NO: 898733 - protein, 82 aa, Homo sapiens
FAALVSWRSPPLARPTREHRLQLEQPGQERNGVVRQRERKPVRGCAFLSPSRSRRGLECNGVISAHPNLHLPDRAIALQPGQ

SEQ ID NO: 898734 - protein, 318 aa, Homo sapiens; identical to SEQ ID NO: 898728

SEQ ID NO: 898735 - protein, 117 aa, Homo sapiens
MLSESSSFLKGVMLGSIFCALITMLGHIRIGHGNRMHHHEHHHLQAPNKEDILKISEDERMELSKSFRVYCIILVKPKDVSLWAAVKETWTKHCDKAEFFSSENVKVFESIIRCPIS

SEQ ID NO: 898736 - protein, 140 aa, Homo sapiens
SLVLLSVPVGQAGMQQRGLAIVALAVCAALHASEAILPIASSCCTEVSHHISRRLLERVNMCRIQRADGDCDLAAVILHVKRRRICVSPHNHTVKQWMKVQAAKKNGKGNVCHRKKHHGKRNSNRAHQGKHETYGHKTPY

SEQ ID NO: 898737 - protein, 140 aa, Homo sapiens; identical to SEQ ID NO: 898736

SEQ ID NO: 898738 - protein, 145 aa, Homo sapiens
DSTLPTLRVVLVILWQLLHVGPLRARVGTVHGLKEASSPAILPIASSCCTEVSHHISRRLLERVNMCRIQRADGDCDLAAVILHVKRRRICVSPHNHTVKQWMKVQAAKKNGKGNVCHRKKHHGKRNSNRAHQGKHETYGHKTPY

SEQ ID NO: 898739 - protein, 140 aa, Homo sapiens; identical to SEQ ID NO: 898736

SEQ ID NO: 898740 - protein, 110 aa, Homo sapiens [sequence omitted]

SEQ ID NO: 898741 - protein, 230 aa, Homo sapiens [sequence omitted]

SEQ ID NO: 898742 - protein, 230 aa, Homo sapiens [sequence omitted]

SEQ ID NO: 898743 - protein, 149 aa, Homo sapiens
TTTKFAPRRLETQAFLSQLWKEYAKGDSRYILGDNFTVCMETITACLWGPLSLWVVIAFLRQHPLRFILQLVVSVGQIYGDVLYFLTEHRDGFQHGELGHPLYFWFYFVFMNALWLVLPGVLVLDAVKHLTHAQSTLDAKATKAKSKKN

SEQ ID NO: 898744 - protein, 230 aa, Homo sapiens [sequence omitted]

SEQ ID NO: 898745 - protein, 230 aa, Homo sapiens [sequence omitted]

SEQ ID NO: 898746 - protein, 85 aa, Homo sapiens
PLPSRALVSALHPAPAPSPSSPRLRGQPSACQRETLCHPPPPPPFCACARPPATARLSRGQKIRLLIGQRDWRVLVRIDRLCVPF

SEQ ID NO: 898747 - protein, 154 aa, Homo sapiens [sequence omitted]

SEQ ID NO: 898748 - protein, 154 aa, Homo sapiens [sequence omitted]

SEQ ID NO: 898749 - protein, 154 aa, Homo sapiens [sequence omitted]

SEQ ID NO: 898750 - protein, 71 aa, Homo sapiens
MDSMFMSLEIIQQAVPVQVLTLILYPENTVGQRMKRVFEHFHYSSFKQGGGRPVFLKEFAVTSLEQYFFLA

SEQ ID NO: 898751 - protein, 154 aa, Homo sapiens [sequence omitted]

SEQ ID NO: 898752 - protein, 92 aa, Homo sapiens
HDLEVAQTTALPDEDDDLLRTKLEPRTAAYKTRLLTLPRVALQRLGFPLQSSEPGPRRGLASYGDEGRVRAEGRRPSCRASSISSRRKVMDQ

SEQ ID NO: 898753 - protein, 154 aa, Homo sapiens [sequence omitted]

SEQ ID NO: 898754 - protein, 154 aa, Homo sapiens [sequence omitted]

SEQ ID NO: 898755 - protein, 154 aa, Homo sapiens [sequence omitted]

SEQ ID NO: 898756 - protein, 33 aa, Homo sapiens
MLGDADRSGSRKLVSIDQESRSLSGMNHDKIAP

SEQ ID NO: 898757 - protein, 141 aa, Homo sapiens
HPNHHRHNPQTTARYEAGCAAASGVSVAVLGTRTSAWPSELWRRESNGPVKVWGSIKGLTEGLHGFHVHEFGDNTAGCTSAGPHFNPLSRKHGGPKDEERHVGDLGNVTADKDGVADVSIEDSVISLSGDHCIIGRTLVGP

SEQ ID NO: 898758 - protein, 42 aa, Homo sapiens
MATKAVCVLKGDGPVAGHHQFRAEVMDQCSADDSEYSMIRYR

SEQ ID NO: 898759 - protein, 70 aa, Homo sapiens
TPTTTATTHKLRLGTRLGVLQRLGFPLQSSEPGPRRGLASYGDEGRVRAEGRRPSCRASSISSRRKVMDQ

SEQ ID NO: 898760 - protein, 70 aa, Homo sapiens; identical to SEQ ID NO: 898759

SEQ ID NO: 898761 - protein, 31 aa, Homo sapiens
MAFGNNPPDGSSGGHRQGHSPKRVHTERNII

SEQ ID NO: 898762 - protein, 141 aa, Homo sapiens; identical to SEQ ID NO: 898757

SEQ ID NO: 898763 - protein, 154 aa, Homo sapiens [sequence omitted]

SEQ ID NO: 898764 - protein, 154 aa, Homo sapiens [sequence omitted]

SEQ ID NO: 898765 - protein, 154 aa, Homo sapiens [sequence omitted]

SEQ ID NO: 898766 - protein, 154 aa, Homo sapiens [sequence omitted]

SEQ ID NO: 898767 - protein, 154 aa, Homo sapiens [sequence omitted]

SEQ ID NO: 898768 - protein, 154 aa, Homo sapiens [sequence omitted]

SEQ ID NO: 898769 - protein, 345 aa, Homo sapiens
MKQLKRKRKSNFSVQETQTLLKEITKRKEVIFSKQLNTTINVMKRMAWEEIAQCVNAVGEGEQRTGTEVKRRYLDWRALMKRKRMKANIKLVGSGFPLPSSDLDDSLTEEIDEKIGFRNDANFDWQNVADFRDAGGSLTEVKVEEEERDPQSPEFEIEEEEEMLSSVIPDSRRENELPDFPHIDEFFTLNSTPSRSAYDEPHLLVNIEKQKLELEKRRLDIEAERLQVEKERLQIEKERLRHLDMEHERLQLEKERLQIEREKLRLQIVNSEKPSLENELGQGEKSMLQPQDIETEKLKLERERLQLEKDRLQFLKFESEKLQIEKERLQVEKDRLRIQKEGHLQ

SEQ ID NO: 898770 - protein, 345 aa, Homo sapiens; identical to SEQ ID NO: 898769

SEQ ID NO: 898771 - protein, 345 aa, Homo sapiens; identical to SEQ ID NO: 898769

SEQ ID NO: 898772 - protein, 414 aa, Homo sapiens
CDRWSARGGRTAMSAEGAEPGPGSGSGPGPGPLCPEHGQALSWFCGSERRPVCAACAGLGGRCRGHRIRRAEERAEELRNKIVDQCERLQLQSAAITKYVADVLPGKNQRAVSMASAARELVIQRLSLVRSLCESEEQRLLEQVHGEEERAHQSILTQRVHWAEALQKLDTIRTGLVGMLTHLDDLQLIQKEQEIFERTEEAEGILDPQESEMLNFNEKCTRSPLLTQLWATAVLGSLSGTEDIRIDERTVSPFLQLSDDRKTLTFSTKKSKACADGPERFDHWPNALAATSFQNGLHAWMVNVQNSCAYKVGVASGHLPRKGSGSDCRLGHNAFSWVFSRYDQEFRFSHNGQHEPLGLLRGPAQLGVVLDLQVQELLFYEPASGTVLCAHHVSFPGPLFPVFAVADQTISIVR

SEQ ID NO: 898773 - protein, 414 aa, Homo sapiens; identical to SEQ ID NO: 898772

SEQ ID NO: 898774 - protein, 213 aa, Homo sapiens
CDRWSARGGRTAMSAEGAEPGPGSGSGPGPGPLCPEHGQALSWFCGSERRPVCAACAGLGGRCRGHRIRRAEERAEELRNKIVDQCERLQLQSAAITKYVADVLPGKNQRAVSMASAARELVIQRLSLVRSLCESEEQRLLEQVHGEEERAHQSILTQRVHWAEALQKLDTIRTGLVGMLTHLDDLQLIAQRTYGSMRGQSAPSCNCQMIERP

SEQ ID NO: 898775 - protein, 232 aa, Homo sapiens
CDRWSARGGRTAMSAEGAEPGPGSGSGPGPGPLCPEHGQALSWFCGSERRPVCAACAGLGGRCRGHRIRRAEERAEELRNKIVDQCERLQLQSAAITKYVADVLPGKNQRAVSMASAARELVIQRLSLVRSLCESEEQRLLEQVHGEEERAHQSILTQRVHWAEALQKLDTIRTGLVGMLTHLDDLQLIQKEQEIFERTEEAEGILDPQDFVSHTMGSTSPWGCCGAQPSWV

SEQ ID NO: 898776 - protein, 68 aa, Homo sapiens
GLRKRDRRKSIALSCWTGEEERAHQSILTQRVHWAEALQKLDTIRTGLVGMLTHLDDLQLISQARVRA

SEQ ID NO: 898777 - protein, 227 aa, Homo sapiens
TRGNNLDPFQRQNFKPKQGIDPRSEMLNFNEKCTRSPLLTQLWATAVLGSLSGTEDIRIDERTVSPFLQLSDDRKTLTFSTKKSKACADGPERFDHWPNALAATSFQNGLHAWMVNVQNSCAYKVGVASGHLPRKGSGSDCRLGHNAFSWVFSRYDQEFRFSHNGQHEPLGLLRGPAQLGVVLDLQVQELLFYEPASGTVLCAHHVSFPGPLFPVFAVADQTISIVR

SEQ ID NO: 898778 - protein, 414 aa, Homo sapiens; identical to SEQ ID NO: 898772

SEQ ID NO: 898779 - protein, 473 aa, Homo sapiens
RAPAPGPWRRRWRELLSEQRLRTERTWPRSPGLGRGAAAAGARTAGAGLLRLLLGCGALVGGLRPVTMTTPANAQNASKTWELSLYELHRTPQEAIMDGTEIAVSPRSLHSELMCPICLDMLKNTMTTKECLHRFCSDCIVTALRSGNKECPTCRKKLVSKRSLRPDPNFDALISKIYPSREEYEAHQDRVLIRLSRLHNQQALSSSIEEGLRMQAMHRAQRVRRPIPGSDQTTTMSGGEGEPGEGEGDGEDVSSDSAPDSAPGPAPKRPRGGGAGGSSVGTGGGGTGGVGGGAGSEDSGDRGGTLGGGTLGPPSPPGAPSPPEPGGEIELVFRPHPLLVEKGEYCQTRYVKTTGNATVDHLSKYLALRIALERRQQQEAGEPGGPGGGASDTGGPDGCGGEGGGAGGGDGPEEPALPSLEGVSEKQYTIYIAPGGGAFTTLNGSLTLELVNEKFWKVSRPLELCYAPTKDPK

SEQ ID NO: 898780 - protein, 349 aa, Homo sapiens
RAPAPGPWRRRWRELLSEQRLRTERTWPRSPGLGRGAAAAGARTAGAGLLRLLLGCGALVGGLRPVTMTTPANAQNASKTWELSLYELHRTPQEAIMDGTEIAVSPRSLHSELMCPICLDMLKNTMTTKECLHRFCSDCIVTALRSGNKECPTCRKKLVSKRSLRPDPNFDALISKIYPSREEYEAHQDRVLIRLSRLHNQQALSSSIEEGLRMQAMHRAQRVRRPIPGSDQTTTMSGGEGEPGEGEGDGEDVSSDSAPDSAPGPAPKRPRGGGAGGSSVGTGGGGTGGVGGGAGSEDSGDRGGTLGGGTLGPPSPPGAPSPPEPGGEIELVFRPHPLLVEKGEYCQTR

SEQ ID NO: 898781 - protein, 238 aa, Homo sapiens
MSGGEGEPGEGEGDGEDVSSDSAPDSAPGPAPKRPRGGGAGGSSVGTGGGGTGGVGGGAGSEDSGDRGGTLGGGTLGPPSPPGAPSPPEPGGEIELVFRPHPLLVEKGEYCQTRYVKTTGNATVDHLSKYLALRIALERRQQQEAGEPGGPGGGASDTGGPDGCGGEGGGAGGGDGPEEPALPSLEGVSEKQYTIYIAPGGGAFTTLNGSLTLELVNEKFWKVSRPLELCYAPTKDPK

SEQ ID NO: 898782 - protein, 377 aa, Homo sapiens
MDGTEIAVSPRSLHSELMCPICLDMLKNTMTTKECLHRFCSDCIVTALRSGNKECPTCRKKLVSKRSLRPDPNFDALISKIYPSREEYEAHQDRVLIRLSRLHNQQALSSSIEEGLRMQAMHRAQRVRRPIPGSDQTTTMSGGEGEPGEGEGDGEDVSSDSAPDSAPGPAPKRPRGGGAGGSSVGTGGGGTGGVGGGAGSEDSGDRGGTLGGGTLGPPSPPGAPSPPEPGGEIELVFRPHPLLVEKGEYCQTRYVKTTGNATVDHLSKYLALRIALERRQQQEAGEPGGPGGGASDTGGPDGCGGEGGGAGGGDGPEEPALPSLEGVSEKQYTIYIAPGGGAFTTLNGSLTLELVNEKFWKVSRPLELCYAPTKDPK

SEQ ID NO: 898783 - protein, 238 aa, Homo sapiens; identical to SEQ ID NO: 898781

SEQ ID NO: 898784 - protein, 119 aa, Homo sapiens
STGDKEAGVIDQDTGIPHGPPVPPAQPANKRTQMRTRGFYTKYLYEILLYCTEWGKTRPHLLPFLLPCNVPSIRGVGEGEEPSHSRPPTNNKRAFFLFEKKKATRKLEEPADSQQPQTW

SEQ ID NO: 898785 - protein, 106 aa, Homo sapiens
MLSCTLSPSAPANSVTSGGHTHVTPAVLDSSSDGTSVALQEPPPRLVGTQVSGPYLPSRSEGSEVRGDGAASASASACPLPPSGIRAAQGLQSQRRESTSRGVLTT

SEQ ID NO: 898786 - protein, 106 aa, Homo sapiens; identical to SEQ ID NO: 898785

SEQ ID NO: 898787 - protein, 106 aa, Homo sapiens; identical to SEQ ID NO: 898785

SEQ ID NO: 898788 - protein, 108 aa, Homo sapiens
MAPPVAERGLKSVVWQKIKATVFDDCKKEGEWKIMLLDEFTTKLLASCCKMTDLLEEGITVTDEDIRKQEERVQQVRKKLEEALMADILSRAADTEELDIEMDSGDEA

SEQ ID NO: 898789 - protein, 592 aa, Homo sapiens
MAPPVAERGLKSVVWQKIKATVFDDCKKEGEWKIMLLDEFTTKLLASCCKMTDLLEEGITVVENIYKNREPVRQMKALYFITPTSKSVDCFLHDFASKSENKYKAAYIYFTDFCPDNLFNKIKASCSKSIRRCKEINISFIPHESQVYTLDVPDAFYYCYSPDPGNAKGKDAIMETMADQIVTVCATLDENPGVRYKSKPLDNASKLAQLVEKKLEDYYKIDEKSLIKGKTHSQLLIIDRGFDPVSTVLHELTFQAMAYDLLPIENDTYKYKTDGKEKEAILEEEDDLWVRIRHRHIAVVLEEIPKLMKEISSTKKATEGKTSLSALTQLMKKMPHFRKQITKQVVHLNLAEDCMNKFKLNIEKLCKTEQDLALGTDAEGQKVKDSMRVLLPVLLNKNHDNCDKIRAILLYIFSINGTTEENLDRLIQNVKIENESDMIRNWSYLGVPIVPQSQQGKPLRKDRSAEETFQLSRWTPFIKDIMEDAIDNRLDSKEWPYCSQCPAVWNGSGAVSARQKPRANYLEDRKNGSKLIVFVIGGITYSEVRCAYEVSQAHKSCEVIIGSTHVLTPKKLLDDIKMLNKPKDKVSLIKDE

SEQ ID NO: 898790 - protein, 323 aa, Homo sapiens
YQLFLITNKRRICSHQDDLWVRIRHRHIAVVLEEIPKLMKEISSTKKATEGKTSLSALTQLMKKMPHFRKQITKQVVHLNLAEDCMNKFKLNIEKLCKTEQDLALGTDAEGQKVKDSMRVLLPVLLNKNHDNCDKIRAILLYIFSINGTTEENLDRLIQNVKIENESDMIRNWSYLGVPIVPQSQQGKPLRKDRSAEETFQLSRWTPFIKDIMEDAIDNRLDSKEWPYCSQCPAVWNGSGAVSARQKPRANYLEDRKNGSKLIVFVIGGITYSEVRCAYEVSQAHKSCEVIIGSTHVLTPKKLLDDIKMLNKPKDKVSLIKDE

SEQ ID NO: 898791 - protein, 440 aa, Homo sapiens
MAPPVAERGLKSVVWQKIKATVFDDCKKEGEWKIMLLDEFTTKLLASCCKMTDLLEEGITVVENIYKNREPVRQMKALYFITPTSKSVDCFLHDFASKSENKYKAAYIYFTDFCPDNLFNKIKASCSKSIRRCKEINISFIPHESQVYTLDVPDAFYYCYSPDPGNAKGKDAIMETMADQIVTVCATLDENPGVRYKSKPLDNASKLAQLVEKKLEDYYKIDEKSLIKGKTHSQLLIIDRGFDPVSTVLHELTFQAMAYDLLPIENDTYKYKTDGKEKEAILEEEDDLWVRIRHRHIAVVLEEIPKLMKEISSTKKATEGKTSLSALTQLMKKMPHFRKQITKQVVHLNLAEDCMNKFKLNIEKLCKTEQDLALGTDAEGQKVKDSMRVLLPVLLNKNHDNCDKIRAILLYIFSINGNGDNHFLISILLLIIKESLKTER

SEQ ID NO: 898792 - protein, 272 aa, Homo sapiens
MAPPVAERGLKSVVWQKIKATVFDDCKKEGEWKIMLLDEFTTKLLASCCKMTDLLEEGITVVENIYKNREPVRQMKALYFITPTSKSVDCFLHDFASKSENKYKAAYIYFTDFCPDNLFNKIKASCSKSIRRCKEINISFIPHESQVYTLDVPDAFYYCYSPDPGNAKGKDAIMETMADQIVTVCATLDENPGVRYKSKPLDNASKLAQLVEKKLEDYYKIDEKSLIKGKTHSQLLIIDRGFDPVSTVLHELTFQAMAYDLLPIENDTYKQV

SEQ ID NO: 898793 - protein, 406 aa, Homo sapiens
MASPRTRKVLKEVRVQDENNVCFECGAFNPQWVSVTYGIWICLECSGRHRGLGVHLSFVRSVTMDKWKDIELEKMKAGGNAKFREFLESQEDYDPCWSLQEKYNSRAAALFRDKVVALAEGREWSLESSPAQNWTPPQPRTLPSMVHRVSGQPQSVTASSDKAFEDWLNDDLGSYQGAQGNRYVGFGNTPPPQKKEDDFLNNAMSSLYSGWSSFTTGASRFASAAKEGATKFGSQASQKASELGHSLNENVLKPAQEKVKEGKIFDDVSSGVSQLASKVQGVGSKGWRDVTTFFSGKAEGPLDSPSEGHSYQNSGLDHFQNSNIDQSFWETFGSAEPTKTRKSPSSDSWTCADTSTERRSSDSWEVWGSASTNRNSNSDGGEGGEGTKKAVPPAVPTDDGWDNQNW

SEQ ID NO: 898794 - protein, 244 aa, Homo sapiens
MASPRTRKVLKEVRVQDENNVCFECGAFNPQWVSVTYGIWICLECSGRHRGLGVHLSFVRSVTMDKWKDIELEKMKAGGNAKFREFLESQEDYDPCWSLQEKYNSRAAALFRDKVVALAEGREWSLESSPAQNWTPPQPRTLPSMVHRVSGQPQSVTASSDKAFEDWLNDDLGSYQGAQGNRYVGFGNTPPPQKKEDDFLNNAMSSLYSGWSSFTTGASRFASAAKEGRAPVTCPCGHSGPVSS

SEQ ID NO: 898795 - protein, 353 aa, Homo sapiens
MRTTFVRSVTMDKWKDIELEKMKAGGNAKFREFLESQEDYDPCWSLQEKYNSRAAALFRDKVVALAEGREWSLESSPAQNWTPPQPRTLPSMVHRVSGQPQSVTASSDKAFEDWLNDDLGSYQGAQGNRYVGFGNTPPPQKKEDDFLNNAMSSLYSGWSSFTTGASRFASAAKEGATKFGSQASQKASELGHSLNENVLKPAQEKVKEGKIFDDVSSGVSQLASKVQGVGSKGWRDVTTFFSGKAEGPLDSPSEGHSYQNSGLDHFQNSNIDQSFWETFGSAEPTKTRKSPSSDSWTCADTSTERRSSDSWEVWGSASTNRNSNSDGGEGGEGTKKAVPPAVPTDDGWDNQNW

SEQ ID NO: 898796 - protein, 298 aa, Homo sapiens
MESAEPTVEASRVAHEAGIAGVSAPEPEQPLRAEGHPGLRVSGQPQSVTASSDKAFEDWLNDDLGSYQGAQGNRYVGFGNTPPPQKKEDDFLNNAMSSLYSGWSSFTTGASRFASAAKEGATKFGSQASQKASELGHSLNENVLKPAQEKVKEGKIFDDVSSGVSQLASKVQGVGSKGWRDVTTFFSGKAEGPLDSPSEGHSYQNSGLDHFQNSNIDQSFWETFGSAEPTKTRKSPSSDSWTCADTSTERRSSDSWEVWGSASTNRNSNSDGGEGGEGTKKAVPPAVPTDDGWDNQNW

SEQ ID NO: 898797 - protein, 416 aa, Homo sapiens
MASPRTRKVLKEVRVQDENNVCFECGAFNPQWVSVTYGIWICLECSGRHRGLGVHLSFVRSVTMDKWKDIELEKMKAGGNAKFREFLESQEDYDPCWSLQEKYNSRAAALFRDKVVALAEGREWSLESSPAQNWTPPQPRTLPSMVHRVSGQPQSVTASSDKAFEDWLNDDLGSYQGAQGNRYVGFGNTPPPQKKEDDFLNNAMSSLYSGWSSFTTGASRFASAAKEGATKFGSQASQKFWGHKQQPEPASELGHSLNENVLKPAQEKVKEGKIFDDVSSGVSQLASKVQGVGSKGWRDVTTFFSGKAEGPLDSPSEGHSYQNSGLDHFQNSNIDQSFWETFGSAEPTKTRKSPSSDSWTCADTSTERRSSDSWEVWGSASTNRNSNSDGGEGGEGTKKAVPPAVPTDDGWDNQNW

SEQ ID NO: 898798 - protein, 406 aa, Homo sapiens; identical to SEQ ID NO: 898793

SEQ ID NO: 898799 - protein, 158 aa, Homo sapiens
METLGPLRPGQPLTVTSPSALILLLLAFSSVQGVGSKGWRDVTTFFSGKAEGPLDSPSEGHSYQNSGLDHFQNSNIDQSFWETFGSAEPTKTRKSPSSDSWTCADTSTERRSSDSWEVWGSASTNRNSNSDGGEGGEGTKKAVPPAVPTDDGWDNQNW

SEQ ID NO: 898800 - protein, 158 aa, Homo sapiens; identical to SEQ ID NO: 898799

SEQ ID NO: 898801 - protein, 406 aa, Homo sapiens; identical to SEQ ID NO: 898793

SEQ ID NO: 898802 - protein, 406 aa, Homo sapiens; identical to SEQ ID NO: 898793

SEQ ID NO: 898803 - protein, 120 aa, Homo sapiens
LQAGRGGCAGVDGARGHRQAPLCSRMPCVSLSGGRSGRRQRVVSGVITCPELDPTSAQDAAVHGAPVAAPRGALVQFPLGPELSRLGFPQNSPLLCCCDSSFPRSQWEKQLFKIAKTIQA

SEQ ID NO: 898804 - protein, 93 aa, Homo sapiens
  misc_feature (23)..(23): Xaa can be any naturally occurring amino acid
QFCPCFPKVEFTPLKRNQKRRPXPGAAALELLDSPGFKELAKQPPAVVGPEVRGGASEAQGAEKPPGKQPAQRAQEASPRELSVGVFECLSPS

SEQ ID NO: 898805 - protein, 406 aa, Homo sapiens; identical to SEQ ID NO: 898793

SEQ ID NO: 898806 - protein, 326 aa, Homo sapiens
DPGSGEAELLSQQLLPMAPASVPSSLQGGLGACLGRKERRCRSAWGGCSRRWPQAQAPQGLFPPARPGRAAWWRVREDPGGGPSCKNWWGPRSPPSRGGGLLPFGCCVQSPVSCSLRLYPAAFPPAGEARAALCWPVLPLPTRVPWWSCRGAHVLPFLQASELGHSLNENVLKPAQEKVKEGKIFDDVSSGVSQLASKVQGVGSKGWRDVTTFFSGKAEGPLDSPSEGHSYQNSGLDHFQNSNIDQSFWETFGSAEPTKTRKSPSSDSWTCADTSTERRSSDSWEVWGSASTNRNSNSDGGEGGEGTKKAVPPAVPTDDGWDNQNW

SEQ ID NO: 898807 - protein, 406 aa, Homo sapiens; identical to SEQ ID NO: 898793

SEQ ID NO: 898808 - protein, 193 aa, Homo sapiens
RTHLAPLQSGRGVCVCTCVRGTPCFWILPGSSQRDGACRLACGGLLKLPVPRQGLPNLSSQSPSRVQGVGSKGWRDVTTFFSGKAEGPLDSPSEGHSYQNSGLDHFQNSNIDQSFWETFGSAEPTKTRKSPSSDSWTCADTSTERRSSDSWEVWGSASTNRNSNSDGGEGGEGTKKAVPPAVPTDDGWDNQNW

SEQ ID NO: 898809 - protein, 406 aa, Homo sapiens; identical to SEQ ID NO: 898793

SEQ ID NO: 898810 - protein, 406 aa, Homo sapiens; identical to SEQ ID NO: 898793

SEQ ID NO: 898811 - protein, 68 aa, Homo sapiens
ALRGDVKALPTWPHGSGGASGVTSDFTQFWPYQPSILGFRVSGQPQSVTASSDKAFEDWLNDDLGSYQ

SEQ ID NO: 898812 - protein, 194 aa, Homo sapiens
MAIRELKVCLLGDTGVGKSSIVCRFVQDHFDHNISPTIGASFMTKTVPCGNELHKFLIWDTAGQERFHSLAPMYYRGSAAAVIVYDITKQDSFYTLKKWVKELKEHGPENIVMAIAGNKCDLSDIREVPLKDAKEYAESIGAIVVETSAKNAINIEELFQGISRQIPPLDPHENGNNGTIKVEKPTMQASRRCC

SEQ ID NO: 898813 - protein, 194 aa, Homo sapiens; identical to SEQ ID NO: 898812

SEQ ID NO: 898814 - protein, 194 aa, Homo sapiens; identical to SEQ ID NO: 898812

SEQ ID NO: 898815 - protein, 194 aa, Homo sapiens; identical to SEQ ID NO: 898812

SEQ ID NO: 898816 - protein, 194 aa, Homo sapiens
MSPCFFDVIVLDDTGVGKSSIVCRFVQDHFDHNISPTIGASFMTKTVPCGNELHKFLIWDTAGQERFHSLAPMYYRGSAAAVIVYDITKQDSFYTLKKWVKELKEHGPENIVMAIAGNKCDLSDIREVPLKDAKEYAESIGAIVVETSAKNAINIEELFQGISRQIPPLDPHENGNNGTIKVEKPTMQASRRCC

SEQ ID NO: 898817 - protein, 194 aa, Homo sapiens; identical to SEQ ID NO: 898812

SEQ ID NO: 898818 - protein, 194 aa, Homo sapiens; identical to SEQ ID NO: 898812

SEQ ID NO: 898819 - protein, 210 aa, Homo sapiens
FFSKNATTSPPCAFHTLKAILWWCGGFSQGFLKSFSGTFPAPPPAGLPGCKASVLTLLKVRCQATERRVLQQCTGCGLWLLQVPWTTALGSTAPAAGLHGWLLNFDCSIVSIFMGDTGVGKSSIVCRFVQDHFDHNISPTIGASFMTKTVPCGNELHKFLIWDTAGQERAARSHPWTPMKMETMEQSKLRSQPCKPAAGAVDPRAVVHGT

SEQ ID NO: 898820 - protein, 126 aa, Homo sapiens
MAIRELKVCLLGDTGVGKSSIVCRFVQDHFDHNISPTIGASFMTKTVPCGNELHKFLIWDTAGQERFHSLAPMYYRGSAAAVIVYDITKQDSFYTLKKWVKELKEHGPENIVMAIAGNKCDLSDIR

SEQ ID NO: 898821 - protein, 194 aa, Homo sapiens; identical to SEQ ID NO: 898812

SEQ ID NO: 898822 - protein, 194 aa, Homo sapiens; identical to SEQ ID NO: 898812

SEQ ID NO: 898823 - protein, 297 aa, Homo sapiens
FFSKNATTSPPCAFHTLKAILWWCGGFSQGFLKSFSGTFPAPPPAGLPGCKASVLTLLKVRCQATERRVLQQCTGCGLWLLQVPWTTALGSTAPAAGLHGWLLNFDCSIVSIFMGDTGVGKSSIVCRFVQDHFDHNISPTIGASFMTKTVPCGNELHKFLIWDTAGQERFHSLAPMYYRGSAAAVIVYDITKQDSFYTLKKWVKELKEHGPENIVMAIAGNKCDLSDIREVPLKDAKEYAESIGAIVVETSAKNAINIEELFQGISRQIPPLDPHENGNNGTIKVEKPTMQASRRCC

SEQ ID NO: 898824 - protein, 194 aa, Homo sapiens; identical to SEQ ID NO: 898812

SEQ ID NO: 898825 - protein, 152 aa, Homo sapiens [sequence omitted]

SEQ ID NO: 898826 - protein, 194 aa, Homo sapiens; identical to SEQ ID NO: 898812

SEQ ID NO: 898827 - protein, 321 aa, Homo sapiens
LHRRLGPSNQAVRLHSSCPCSSGWRTEDRTLKPQVAEKPGVKMTERFDCHHCNESLFGKKYILREESPYCVVCFETLFANTCEECGKPIGCDCKDLSYKDRHWHEACFHCSQCRNSLVDKPFAAKEDQLLCTDCYSNEYSSKCQECKKTIMPGTRKMEYKGSSWHETCFICHRCQQPIGTKSFIPKDNQNFCVPCYEKQHAMQCVQCKKPITTGGVTYREQPWHKECFVCTACRKQLSGQRFTARDDFAYCLNCFCDLYAKKCAGCTNPISGLGGTKYISFEERQWHNDCFNCKKCSLSLVGRGFLTERDDILCPDCGKDI

SEQ ID NO: 898828 - protein, 475 aa, Homo sapiens
HEEGTGRDRRSPGRGHGNREAWGRPPPAPHARCQRAEACISLYGQMNGGVSRGRELRSAPLGRQRSRSHQPPAPSSPVRESPARCGAVSTSNPLRPGGRPRGLATRARKWGPNPVRDPRRGEQSRSWGDWLLKTVSSWRLGWHFDFGVRSLALSPRLECSGTISAHCKLYLLVHAILLPQPPKELGLQVAEKPGVKMTERFDCHHCNESLFGKKYILREESPYCVVCFETLFANTCEECGKPIGCDCKDLSYKDRHWHEACFHCSQCRNSLVDKPFAAKEDQLLCTDCYSNEYSSKCQECKKTIMPGTRKMEYKGSSWHETCFICHRCQQPIGTKSFIPKDNQNFCVPCYEKQHAMQCVQCKKPITTGGVTYREQPWHKECFVCTACRKQLSGQRFTARDDFAYCLNCFCDLYAKKCAGCTNPISGLGGTKYISFEERQWHNDCFNCKKCSLSLVGRGFLTERDDILCPDCGKDI

SEQ ID NO: 898829 - protein, 420 aa, Homo sapiens
HEEGTGRDRRSPGRGHGNREAWGRPPPAPHARCQRAEACISLYGQMTRRGFSRAGAAQRSTRPAAEPQPPAARALQPRPGVPGPLRCREYLQPPAPRREAEGLSHQGSEVGAESGARPKERGAEPELGRLVAENAEKPGVKMTERFDCHHCNESLFGKKYILREESPYCVVCFETLFANTCEECGKPIGCDCKDLSYKDRHWHEACFHCSQCRNSLVDKPFAAKEDQLLCTDCYSNEYSSKCQECKKTIMPGTRKMEYKGSSWHETCFICHRCQQPIGTKSFIPKDNQNFCVPCYEKQHAMQCVQCKKPITTGGVTYREQPWHKECFVCTACRKQLSGQRFTARDDFAYCLNCFCDLYAKKCAGCTNPISGLGGTKYISFEERQWHNDCFNCKKCSLSLVGRGFLTERDDILCPDCGKDI

SEQ ID NO: 898830 - protein, 279 aa, Homo sapiens
MTERFDCHHCNESLFGKKYILREESPYCVVCFETLFANTCEECGKPIGCDCKDLSYKDRHWHEACFHCSQCRNSLVDKPFAAKEDQLLCTDCYSNEYSSKCQECKKTIMPGTRKMEYKGSSWHETCFICHRCQQPIGTKSFIPKDNQNFCVPCYEKQHAMQCVQCKKPITTGGVTYREQPWHKECFVCTACRKQLSGQRFTARDDFAYCLNCFCDLYAKKCAGCTNPISGLGGTKYISFEERQWHNDCFNCKKCSLSLVGRGFLTERDDILCPDCGKDI

SEQ ID NO: 898831 - protein, 279 aa, Homo sapiens; identical to SEQ ID NO: 898830

SEQ ID NO: 898832 - protein, 293 aa, Homo sapiens
MQQEKSSLVLIDFSSEVVLGHECGCARVPRPNFFPCLPCRFARGPYAVGPSPPVLPLTVLCGLAPQDLSYKDRHWHEACFHCSQCRNSLVDKPFAAKEDQLLCTDCYSNEYSSKCQECKKTIMPGTRKMEYKGSSWHETCFICHRCQQPIGTKSFIPKDNQNFCVPCYEKQHAMQCVQCKKPITTGGVTYREQPWHKECFVCTACRKQLSGQRFTARDDFAYCLNCFCDLYAKKCAGCTNPISGLGGTKYISFEERQWHNDCFNCKKCSLSLVGRGFLTERDDILCPDCGKDI

SEQ ID NO: 898833 - protein, 375 aa, Homo sapiens
HEEGTGRDRRSPGRGHGNREAWGRPPPAPHARCQRAEACISLYGQMNGGVSRGRELRSAPLGRQRSRSHQPPAPSSPVRESPARCGAVSTSNPLRPGGRPRGLATRARKWGPNPVRDPRRGEQSRSWGDWLLKTVSSWRLGWHFDFGVAEKPGVKMTERFDCHHCNESLFGKKYILREESPYCVVCFETLFANTCEECGKPIGCDCSTRKMEYKGSSWHETCFICHRCQQPIGTKSFIPKDNQNFCVPCYEKQHAMQCVQCKKPITTGGVTYREQPWHKECFVCTACRKQLSGQRFTARDDFAYCLNCFCDLYAKKCAGCTNPISGLGGTKYISFEERQWHNDCFNCKKCSLSLVGRGFLTERDDILCPDCGKDI

SEQ ID NO: 898834 - protein, 420 aa, Homo sapiens; identical to SEQ ID NO: 898829

SEQ ID NO: 898835 - protein, 420 aa, Homo sapiens; identical to SEQ ID NO: 898829

SEQ ID NO: 898836 - protein, 386 aa, Homo sapiens
HEEGTGRDRRSPGRGHGNREAWGRPPPAPHARCQRAEACISLYGQMTRRGFSRAGAAQRSTRPAAEPQPPAARALQPRPGVPGPLRCREYLQPPAPRREAEGLSHQGSEVGAESGARPKERGAEPELGRLVAENAEKPGVKMTERFDCHHCNESLFGKKYILREESPYCVVCFETLFANTCEECGKPIGCDCKDLSYKDRHWHEACFHCSQCRNSLVDKPFAAKEDQLLCTDCYSNEYSSKCQECKKTIMPGTRKMEYKGSSWHETCFICHRCQQPIGTKSFIPKDNQNFCVPCYEKQHAMQCVQCKKPITTGGVTYREQPWHKECFVCTACRKQLSGQRFTARDDFAYCLNCFCDLYAKKCAGCTNPISDWWHNHFFEEGGYDGS

SEQ ID NO: 898837 - protein, 389 aa, Homo sapiens
HEEGTGRDRRSPGRGHGNREAWGRPPPAPHARCQRAEACISLYGQMTRRGFSEGGSCAALHSAGSGAAATSRPRPPAPSGSPRPAAVPSVSSWRLGWHFDFGVAEKPGVKMTERFDCHHCNESLFGKKYILREESPYCVVCFETLFANTCEECGKPIGCDCKDLSYKDRHWHEACFHCSQCRNSLVDKPFAAKEDQLLCTDCYSNEYSSKCQECKKTIMPGTRKMEYKGSSWHETCFICHRCQQPIGTKSFIPKDNQNFCVPCYEKQHAMQCVQCKKPITTGGVTYREQPWHKECFVCTACRKQLSGQRFTARDDFAYCLNCFCDLYAKKCAGCTNPISGLGGTKYISFEERQWHNDCFNCKKCSLSLVGRGFLTERDDILCPDCGKDI

SEQ ID NO: 898838 - protein, 87 aa, Homo sapiens
AAQKVGAIQPGSPPAQQLSLLIGLEDRRQNPKTTGKGHWFPCALLSPLPSFPACLCSSSVGILLHAEGVSSPGRKLSGTGSSLTPAE

SEQ ID NO: 898839 - protein, 434 aa, Homo sapiens
HEEGTGRDRRSPGRGHGNREAWGRPPPAPHARCQRAEACISLYGQMNGGVSRGRELRSAPLGRQRSRSHQPPAPSSPVRESPARCGAVSTSNPLRPGGRPRGLATRARKWGPNPVRDPRRGEQSRSWGDWLLKTVSSWRLGWHFDFGVAEKPGVKMTERFDCHHCNESLFGKKYILREESPYCVVCFETLFANTCEECGKPIGCDCKDLSYKDRHWHEACFHCSQCRNSLVDKPFAAKEDQLLCTDCYSNEYSSKCQECKKTIMPGTRKMEYKGSSWHETCFICHRCQQPIGTKSFIPKDNQNFCVPCYEKQHAMQCVQCKKPITTGGVTYREQPWHKECFVCTACRKQLSGQRFTARDDFAYCLNCFCDLYAKKCAGCTNPISGLGGTKYISFEERQWHNDCFNCKKCSLSLVGRGFLTERDDILCPDCGKDI

SEQ ID NO: 898840 - protein, 297 aa, Homo sapiens
AAQKVGAIQPGSPPAQQLSLLIGLEDRRQNPKTTGKYILREESPYCVVCFETLFANTCEECGKPIGCDCKDLSYKDRHWHEACFHCSQCRNSLVDKPFAAKEDQLLCTDCYSNEYSSKCQECKKTIMPGTRKMEYKGSSWHETCFICHRCQQPIGTKSFIPKDNQNFCVPCYEKQHAMQCVQCKKPITTGGVTYREQPWHKECFVCTACRKQLSGQRFTARDDFAYCLNCFCDLYAKKCAGCTNPISGLGGTKYISFEERQWHNDCFNCKKCSLSLVGRGFLTERDDILCPDCGKDI

SEQ ID NO: 898841 - protein, 347 aa, Homo sapiens
LHRRLGPSNQAVRLHSSCPCSSGWRTEDRTLKPQVAEKPGVKMTERFDCHHCNESLFGKKYILREESPYCVVCFETLFANTCEECGKPIGCDCKDKHESSATRLPSPAQALCLTCCVALEDLSYKDRHWHEACFHCSQCRNSLVDKPFAAKEDQLLCTDCYSNEYSSKCQECKKTIMPGTRKMEYKGSSWHETCFICHRCQQPIGTKSFIPKDNQNFCVPCYEKQHAMQCVQCKKPITTGGVTYREQPWHKECFVCTACRKQLSGQRFTARDDFAYCLNCFCDLYAKKCAGCTNPISGLGGTKYISFEERQWHNDCFNCKKCSLSLVGRGFLTERDDILCPDCGKDI

SEQ ID NO: 898842 - protein, 420 aa, Homo sapiens; identical to SEQ ID NO: 898829

SEQ ID NO: 898843 - protein, 420 aa, Homo sapiens; identical to SEQ ID NO: 898829

SEQ ID NO: 898844 - protein, 495 aa, Homo sapiens
MRSPVRDLARNDGEESTDRTPLLPGAPRAEAAPVCCSARYNLAILAFFGFFIVYALRVNLSVALVDMVDSNTTLEDNRTSKACPEHSAPIKVHHNQTGKKYQWDAETQGWILGSFFYGYIITQIPGGYVASKIGGKMLLGFGILGTAVLTLFTPIAADLGVGPLIVLRALEGLGEGVTFPAMHAMWSSWAPPLERSKLLSISYAGAQLGTVISLPLSGIICYYMNWTYVFYFFGTIGIFWFLLWIWLVSDTPQKHKRISHYEKEYILSSLRNQLSSQKSVPWVPILKSLPLWAIVVAHFSYNWTFYTLLTLLPTYMKEILRFNVQENGFLSSLPYLGSWLCMILSGQAADNLRAKWNFSTLCVRRIFSLIGMIGPAVFLVAAGFIGCDYSLAVAFLTISTTLGGFCSSGFSINHLDIAPSYAGILLGITNTFATIPGMVGPVIAKSLTPDNTVGEWQTVFYIAAAINVFGAIFFTLFAKGEVQNWALNDHHGHRH

SEQ ID NO: 898845 - protein, 311 aa, Homo sapiens
MRSPVRDLARNDGEESTDRTPLLPGAPRAEAAPVCCSARYNLAILAFFGFFIVYALRVNLSVALVDMVDSNTTLEDNRTSKACPEHSAPIKVHHNQTGKKYQWDAETQGWILGSFFYGYIITQIPGGYVASKIGGKMLLGFGILGTAVLTLFTPIAADLGVGPLIVLRALEGLGEGVTFPAMHAMWSSWAPPLERSKLLSISYAGAQLGTVISLPLSGIICYYMNWTYVFYFFGTIGIFWFLLWIWLVSDTPQKHKRISHYEKEYILSSLRNQVWTLTHFKNNVRNFFSSELRYQFLKIYIPIVHALDKVE

SEQ ID NO: 898846 - protein, 98 aa, Homo sapiens
MARRARTARLFYRAPHGPKPVSGGVVQGLRVGSGTGGGGLWAGMARVPAPCAGGTGAAQARGDIKRGARSECRSVPPASVRRSPSGTPGAATVIAEPS

SEQ ID NO: 898847 - protein, 495 aa, Homo sapiens; identical to SEQ ID NO: 898844

SEQ ID NO: 898848 - protein, 442 aa, Homo sapiens
MRSPVRDLARNDGEESTDRTPLLPGAPRAEAAPVCCSARYNLAILAFFGFFIVYALRVNLSVALVDMVDSNTTLEDNRTSKACPEHSAPIKVHHNQTGKKYQWDAETQGWILGSFFYGYIITQIPGGYVASKIGGKMLLGFGILGTAVLTLFTPIAADLGVGPLIVLRALEGLGEGVTFPAMHAMWSSWAPPLERSKLLSISYAGAQLGTVISLPLSGIICYYMNWTYVFYFFGTIGIFWFLLWIWLVSDTPQKHKRISHYEKEYILSSLRNQNGFLSSLPYLGSWLCMILSGQAADNLRAKWNFSTLCVRRIFSLIGMIGPAVFLVAAGFIGCDYSLAVAFLTISTTLGGFCSSGFSINHLDIAPSYAGILLGITNTFATIPGMVGPVIAKSLTPDNTVGEWQTVFYIAAAINVFGAIFFTLFAKGEVQNWALNDHHGHRH

SEQ ID NO: 898849 - protein, 222 aa, Homo sapiens
GLGTAGLGAGAHSGKRPPPGPRRARRGEGGRGRALREGEAARTGSRTAPAGLQRPRTKAAMGLETEKADVQLFMDDDSYSHHSGLEYADPEKFADSDQDRDPHRLNSHLKLGFEDVIAEPVTTHSFDKVWICSHALFEISKYVMYKFLTVFLAIPLAFIAGILFATLSCLHIWILMPFVKTCLMVLPSVQTIWKSVTDVIIAPLCTSVGRCFSSVSLQLSQD

SEQ ID NO: 898850 - protein, 154 aa, Homo sapiens
MSRSTQGKHSRSHHSGLEYADPEKFADSDQDRDPHRLNSHLKLGFEDVIAEPVTTHSFDKVWICSHALFEISKYVMYKFLTVFLAIPLAFIAGILFATLSCLHIWILMPFVKTCLMVLPSVQTIWKSVTDVIIAPLCTSVGRCFSSVSLQLSQD

SEQ ID NO: 898851 - protein, 172 aa, Homo sapiens
GLGTAGLGAGAHSGKRPPPGPRRARRGEGGRGRALREGEAARTGSRTAPAGLQRPRTKAAMGLETEKADVQLFMDDDSYSHHSGLEYADPEKFADSDQDRDPHRLNSHLKDFNAFCKDLPNGSAFSADNMEECDRCYHCSIVYERRTMLLFCQPATEPGLNTWTPGLEIGIL

SEQ ID NO: 898852 - protein, 222 aa, Homo sapiens; identical to SEQ ID NO: 898849

SEQ ID NO: 898853 - protein, 166 aa, Homo sapiens
QEFLARFLCAHRDPKRRGGRPGTSFPPASPAQSAPGSRGVRWLTVRGPCVLSPQLGFEDVIAEPVTTHSFDKVWICSHALFEISKYVMYKFLTVFLAIPLAFIAGILFATLSCLHIWILMPFVKTCLMVLPSVQTIWKSVTDVIIAPLCTSVGRCFSSVSLQLSQD

SEQ ID NO: 898854 - protein, 222 aa, Homo sapiens; identical to SEQ ID NO: 898849

SEQ ID NO: 898855 - protein, 37 aa, Homo sapiens
GWMLKMTQTQEQDSGLYSCLASNEAGEARRNFSVEVL

SEQ ID NO: 898856 - protein, 239 aa, Homo sapiens
MGGCRKFGERPPPKRLTREAMRNYLKERGDQTVLILHAKVAQKSYGNEKRFFCPPPCVYLMGSGWKKKKEQMERDGCSEQESQPCAFIGIGNSDQEMQQLNLEGKNYCTAKTLYISDSDKRKHFMLSVKMFYGNSDDIGVFLSKRIKVISKPSKKKQSLKNADSLPQGTKVDLLNPLKIQKGSTDTCWEGGHSRAGTGGGSPVSLLGWWTRGKKGARRPYGPRGWQAAGPPCLKGTSGG

SEQ ID NO: 898857 - protein, 486 aa, Homo sapiens
MAWIKRKFGERPPPKRLTREAMRNYLKERGDQTVLILHAKVAQKSYGNEKRFFCPPPCVYLMGSGWKKKKEQMERDGCSEQESQPCAFIGIGNSDQEMQQLNLEGKNYCTAKTLYISDSDKRKHFMLSVKMFYGNSDDIGVFLSKRIKVISKPSKKKQSLKNADLCIASGTKVALFNRLRSQTVSTRYLHVEGGNFHASSQQWGAFFIHLLDDDESEGEEFTVRDGYIHYGQTVKLVCSVTGMALPRLIIRKVDKQTALLDADDPVSQLHKCAFYLKDTERMYLCLSQERIIQFQATPCPKEPNKEMINDGASWTIISTDKAEYTFYEGMGPVLAPVTPVPVVESLQLNGGGDVAMLELTGQNFTPNLRVWFGDVEAETMYRCGESMLCVVPDISAFREGWRWVRQPVQVPVTLVRNDGIIYSTSLTFTYTPEPGPRPHCSAAGAILRANSSQVPPNESNTNSEGSYTNASTNSTSVTSSTATVVS

SEQ ID NO: 898858 - protein, 486 aa, Homo sapiens; identical to SEQ ID NO: 898857

SEQ ID NO: 898859 - protein, 486 aa, Homo sapiens; identical to SEQ ID NO: 898857

SEQ ID NO: 898860 - protein, 487 aa, Homo sapiens
MAPVVTGKFGERPPPKRLTREAMRNYLKERGDQTVLILHAKVAQKSYGNEKRFFCPPPCVYLMGSGWKKKKEQMERDGCSEQESQPCAFIGIGNSDQEMQQLNLEGKNYCTAKTLYISDSDKRKHFMLSVKMFYGNSDDIGVFLSKRIKVISKPSKKKQSLKNADLCIASGTKVALFNRLRSQTVSTRYLHVEGGNFHASSQQWGAFFIHLLDDDESEGEEFTVRDGYIHYGQTVKLVCSVTGMALPRLIIRKVDKQTALLDADDPVSQLHKCAFYLKDTERMYLCLSQERIIQFQATPCPKEPNKEMINDGASWTIISTDKAEYTFYEGMGPVLAPVTPVPVVESLQLNGGGDVAMLELTGQNFTPNLRVWFGDVEAETMYRCGESMLCVVPDISAFREGWRWVRQPVQVPVTLVRNDGIIYSTSLTFTYTPEPGPRPHCSAAGAILRANSSQVPPNESNTNSEGSYTNASTNSTSVTSSTATVVS

SEQ ID NO: 898861 - protein, 465 aa, Homo sapiens
MRNYLKERGDQTVLILHAKVAQKSYGNEKRFFCPPPCVYLMGSGWKKKKEQMERDGCSEQESQPCAFIGIGNSDQEMQQLNLEGKNYCTAKTLYISDSDKRKHFMLSVKMFYGNSDDIGVFLSKRIKVISKPSKKKQSLKNADLCIASGTKVALFNRLRSQTVSTRYLHVEGGNFHASSQQWGAFFIHLLDDDESEGEEFTVRDGYIHYGQTVKLVCSVTGMALPRLIIRKVDKQTALLDADDPVSQLHKCAFYLKDTERMYLCLSQERIIQFQATPCPKEPNKEMINDGASWTIISTDKAEYTFYEGMGPVLAPVTPVPVVESLQLNGGGDVAMLELTGQNFTPNLRVWFGDVEAETMYRCGESMLCVVPDISAFREGWRWVRQPVQVPVTLVRNDGIIYSTSLTFTYTPEPGPRPHCSAAGAILRANSSQVPPNESNTNSEGSYTNASTNSTSVTSSTATVVS

SEQ ID NO: 898862 - protein, 465 aa, Homo sapiens; identical to SEQ ID NO: 898861

SEQ ID NO: 898863 - protein, 504 aa, Homo sapiens
MYICVFLLVLRIVSDSHNGYSFGVKFGERPPPKRLTREAMRNYLKERGDQTVLILHAKVAQKSYGNEKRFFCPPPCVYLMGSGWKKKKEQMERDGCSEQESQPCAFIGIGNSDQEMQQLNLEGKNYCTAKTLYISDSDKRKHFMLSVKMFYGNSDDIGVFLSKRIKVISKPSKKKQSLKNADLCIASGTKVALFNRLRSQTVSTRYLHVEGGNFHASSQQWGAFFIHLLDDDESEGEEFTVRDGYIHYGQTVKLVCSVTGMALPRLIIRKVDKQTALLDADDPVSQLHKCAFYLKDTERMYLCLSQERIIQFQATPCPKEPNKEMINDGASWTIISTDKAEYTFYEGMGPVLAPVTPVPVVESLQLNGGGDVAMLELTGQNFTPNLRVWFGDVEAETMYRCGESMLCVVPDISAFREGWRWVRQPVQVPVTLVRNDGIIYSTSLTFTYTPEPGPRPHCSAAGAILRANSSQVPPNESNTNSEGSYTNASTNSTSVTSSTATVVS

SEQ ID NO: 898864 - protein, 351 aa, Homo sapiens
MAWIKRKFGERPPPKRLTREAMRNYLKERGDQTVLILHAKVAQKSYGNEKRFFCPPPCVYLMGSGWKKKKEQMERDGCSEQESQPCAFIGIGNSDQEMQQLNLEGKNYCTAKTLYISDSDKRKHFMLSVKMFYGNSDDIGVFLSKRIKVISKPSKKKQSLKNADLCIASGTKVALFNRLRSQTVSTRYLHVEGGNFHASSQQWGAFFIHLLDDDESEGEEFTVRDGYIHYGQTVKLVCSVTGMALPRLIIRKVDKQTALLDADDPVSQLHKCAFYLKDTERMYLCLSQERIIQFQATPCPKEPNKEMINDGASWTIISTDKAEYTFYEGMGPVLAPVTPVPVVESLQGENA

SEQ ID NO: 898865 - protein, 425 aa, Homo sapiens
MGSGWKKKKEQMERDGCSEQESQPCAFIGIGNSDQEMQQLNLEGKNYCTAKTLYISDSDKRKHFMLSVKMFYGNSDDIGVFLSKRIKVISKPSKKKQSLKNADLCIASGTKVALFNRLRSQTVSTRYLHVEGGNFHASSQQWGAFFIHLLDDDESEGEEFTVRDGYIHYGQTVKLVCSVTGMALPRLIIRKVDKQTALLDADDPVSQLHKCAFYLKDTERMYLCLSQERIIQFQATPCPKEPNKEMINDGASWTIISTDKAEYTFYEGMGPVLAPVTPVPVVESLQLNGGGDVAMLELTGQNFTPNLRVWFGDVEAETMYRCGESMLCVVPDISAFREGWRWVRQPVQVPVTLVRNDGIIYSTSLTFTYTPEPGPRPHCSAAGAILRANSSQVPPNESNTNSEGSYTNASTNSTSVTSSTATVVS

SEQ ID NO: 898866 - protein, 473 aa, Homo sapiens
DGACCGGKFGERPPPKRLTREAMRNYLKERGDQTVLILHAKVAQKSYGNEKRFFCPPPCVYLMGSGWKKKKEQMERDGCSEQESQPCAFIGIGNSDQEMQQLNLEGKNYCTAKTLYISDSDKRKHFMLSVKMFYGNSDDIGVFLSKRIKVISKPSKKKQSLKNADLRSQTVSTRYLHVEGGNFHASSQQWGAFFIHLLDDDESEGEEFTVRDGYIHYGQTVKLVCSVTGMALPRLIIRKVDKQTALLDADDPVSQLHKCAFYLKDTERMYLCLSQERIIQFQATPCPKEPNKEMINDGASWTIISTDKAEYTFYEGMGPVLAPVTPVPVVESLQLNGGGDVAMLELTGQNFTPNLRVWFGDVEAETMYRCGESMLCVVPDISAFREGWRWVRQPVQVPVTLVRNDGIIYSTSLTFTYTPEPGPRPHCSAAGAILRANSSQVPPNESNTNSEGSYTNASTNSTSVTSSTATVVS

SEQ ID NO: 898867 - protein, 434 aa, Homo sapiens
MAWIKRKFGERPPPKRLTREAMRNYLKERGDQTVLILHAKVAQKSYGNEKRFFCPPPCVYLMGSGWKKKKEQMERDGCSEQESQPCAFIGIGNSDQEMQQLNLEGKNYCTAKTLYISDSDKRKHFMLSVKMFYGNSDDIGVFLSKRIKVISKPSKKKQSLKNADLCIASGTKVALFNRLRSQTVSTRYLHVEGGNFHASSQQWGAFFIHLLDDDESEGEEFTVRDGYIHYGQTVKLVCSVTGMALPRLIIRKVDKQTALLDADDPVSQLHKCAFYLKDTERMYLCLSQERIIQFQLNGGGDVAMLELTGQNFTPNLRVWFGDVEAETMYRCGESMLCVVPDISAFREGWRWVRQPVQVPVTLVRNDGIIYSTSLTFTYTPEPGPRPHCSAAGAILRANSSQVPPNESNTNSEGSYTNASTNSTSVTSSTATVVS

SEQ ID NO: 898868 - protein, 382 aa, Homo sapiens
MAWIKRKFGERPPPKRLTREAMRNYLKERGDQTVLILHAKVAQKSYGNEKRFFCPPPCVYLMGSGWKKKKEQMERDGCSEQESQPCAFIGIGNSDQEMQQLNLEGKNYCTAKTLYISDSDKRKHFMLSVKMFYGNSDDIGVFLSKRIKVISKPSKKKQSLKNADLCIASGTKVALFNRLRSQTVSTRYLHVEGGNFHASSQQWGAFFIHLLDDDESEGEEFTVRDGYIHYGQTVKLVCSVTGMALPRLIIRKVDKQTALLDADDPVSQLHKCAFYLKDTERMYLCLSQERIIQFQATPCPKEPNKEMINDGASWTIISTDKAEYTFYEGMGPVLAPVTPVPVVESLQVWREYALCRPRHFCIPRRLEMGPATSPGSSNFGPK

SEQ ID NO: 898869 - protein, 586 aa, Homo sapiens
SVRLDCPHWVHAQCRSRGPRQSCSAFNRFRAANSSSPGFGAPCGRQCWIWESLGKERAKEGKDGGLQSPRTSLKARPKTRITGALPMDHTEGSPAEEPPAHAPSPGKFGERPPPKRLTREAMRNYLKERGDQTVLILHAKVAQKSYGNEKRFFCPPPCVYLMGSGWKKKKEQMERDGCSEQESQPCAFIGIGNSDQEMQQLNLEGKNYCTAKTLYISDSDKRKHFMLSVKMFYGNSDDIGVFLSKRIKVISKPSKKKQSLKNADLCIASGTKVALFNRLRSQTVSTRYLHVEGGNFHASSQQWGAFFIHLLDDDESEGEEFTVRDGYIHYGQTVKLVCSVTGMALPRLIIRKVDKQTALLDADDPVSQLHKCAFYLKDTERMYLCLSQERIIQFQATPCPKEPNKEMINDGASWTIISTDKAEYTFYEGMGPVLAPVTPVPVVESLQLNGGGDVAMLELTGQNFTPNLRVWFGDVEAETMYRCGESMLCVVPDISAFREGWRWVRQPVQVPVTLVRNDGIIYSTSLTFTYTPEPGPRPHCSAAGAILRANSSQVPPNESNTNSEGSYTNASTNSTSVTSSTATVVS

SEQ ID NO: 898870 - protein, 68 aa, Homo sapiens
DCLSIPLCWLGHIAVQQEQSFEPIQARCPLTNQTQTAREVTQTPAQIQPVSHHLQPQWYPNYRLFART

SEQ ID NO: 898871 - protein, 468 aa, Homo sapiens
MAWIKRKFGERPPPKRLTREAMRNYLKERGDQTVLILHAKVAQKSYGNEKRFFCPPPCVYLMGSGWKKKKEQMERDGCSEQESQPCAFIGIGNSDQEMQQLNLEGKNYCTAKTLYISDSDKRKHFMLSVKMFYGNSDDIGVFLSKRIKVISKPSKKKQSLKNADLCIASGTKVALFNRLRSQTVSTRYLHVEGGNFHASSQQWGAFFIHLLDDDESEGEEFTVRDGYIHYGQTVKLVCSVTGMALPRLIIRKVDKQTALLDADDPVSQLHKCAFYLKDTERMYLCLSQERIIQFQATPCPKEPNKEMINDGASWTIISTDKAEYTFYEGMGPVLAPVTPVPVVESLQLNGGGDVAMLELTGQNFTPNLRVWFGDVEAETMYRCGESMLCVVPDISAFREGWRWVRQPVQVPVTLVRNDGIIYSTSLTFTYTPEPGPRPHCSAAGAILRANSSQVPPNESNTNSEGSYT

SEQ ID NO: 898872 - protein, 94 aa, Homo sapiens
CKKSRRYRTGKPGRFPGKAASRIPYSAGGARRLALRGGGEGKGSAGAGWNRGVRKKGRGGGEGPGKASGGISRGLEFWREFVEDGACCDRSLKL

SEQ ID NO: 898873 - protein, 486 aa, Homo sapiens; identical to SEQ ID NO: 898857

SEQ ID NO: 898874 - protein, 486 aa, Homo sapiens; identical to SEQ ID NO: 898857

SEQ ID NO: 898875 - protein, 586 aa, Homo sapiens; identical to SEQ ID NO: 898869

SEQ ID NO: 898876 - protein, 500 aa, Homo sapiens
MDHTEGSPAEEPPAHAPSPGKFGERPPPKRLTREAMRNYLKERGDQTVLILHAKVAQKSYGNEKRFFCPPPCVYLMGSGWKKKKEQMERDGCSEQESQPCAFIGIGNSDQEMQQLNLEGKNYCTAKTLYISDSDKRKHFMLSVKMFYGNSDDIGVFLSKRIKVISKPSKKKQSLKNADLCIASGTKVALFNRLRSQTVSTRYLHVEGGNFHASSQQWGAFFIHLLDDDESEGEEFTVRDGYIHYGQTVKLVCSVTGMALPRLIIRKVDKQTALLDADDPVSQLHKCAFYLKDTERMYLCLSQERIIQFQATPCPKEPNKEMINDGASWTIISTDKAEYTFYEGMGPVLAPVTPVPVVESLQLNGGGDVAMLELTGQNFTPNLRVWFGDVEAETMYRCGESMLCVVPDISAFREGWRWVRQPVQVPVTLVRNDGIIYSTSLTFTYTPEPGPRPHCSAAGAILRANSSQVPPNESNTNSEGSYTNASTNSTSVTSSTATVVS

SEQ ID NO: 898877 - protein, 465 aa, Homo sapiens; identical to SEQ ID NO: 898861

SEQ ID NO: 898878 - protein, 489 aa, Homo sapiens
MAWIKSTGNLVKRLHLKTNLLREAMRNYLKERGDQTVLILHAKVAQKSYGNEKRFFCPPPCVYLMGSGWKKKKEQMERDGCSEQESQPCAFIGIGNSDQEMQQLNLEGKNYCTAKTLYISDSDKRKHFMLSVKMFYGNSDDIGVFLSKRIKVISKPSKKKQSLKNADLCIASGTKVALFNRLRSQTVSTRYLHVEGGNFHASSQQWGAFFIHLLDDDESEGEEFTVRDGYIHYGQTVKLVCSVTGMALPRLIIRKVDKQTALLDADDPVSQLHKCAFYLKDTERMYLCLSQERIIQFQATPCPKEPNKEMINDGASWTIISTDKAEYTFYEGMGPVLAPVTPVPVVESLQLNGGGDVAMLELTGQNFTPNLRVWFGDVEAETMYRCGESMLCVVPDISAFREGWRWVRQPVQVPVTLVRNDGIIYSTSLTFTYTPEPGPRPHCSAAGAILRANSSQVPPNESNTNSEGSYTNASTNSTSVTSSTATVVS

SEQ ID NO: 898879 - protein, 425 aa, Homo sapiens; identical to SEQ ID NO: 898865

SEQ ID NO: 898880 - protein, 460 aa, Homo sapiens [sequence omitted]

SEQ ID NO: 898881 - protein, 288 aa, Homo sapiens
FLYDAAVVLAMLVYCPDCRAPGDPLWFDCWCASWALWRGHDTGRGLSQTLIIRKVDKQTALLDADDPVSQLHKCAFYLKDTERMYLCLSQERIIQFQATPCPKEPNKEMINDGASWTIISTDKAEYTFYEGMGPVLAPVTPVPVVESLQLNGGGDVAMLELTGQNFTPNLRVWFGDVEAETMYRCGESMLCVVPDISAFREGWRWVRQPVQVPVTLVRNDGIIYSTSLTFTYTPEPGPRPHCSAAGAILRANSSQVPPNESNTNSEGSYTNASTNSTSVTSSTATVVS

SEQ ID NO: 898882 - protein, 586 aa, Homo sapiens; identical to SEQ ID NO: 898869

SEQ ID NO: 898883 - protein, 586 aa, Homo sapiens; identical to SEQ ID NO: 898869

SEQ ID NO: 898884 - protein, 260 aa, Homo sapiens [sequence omitted]

SEQ ID NO: 898885 - protein, 136 aa, Homo sapiens
QRRPRYRSGSEQAGGAIKTPAVCVRPQQPRRSADTQTPPARARTLSAPPFHWSRRAFRCASGGAPSAPPLQAGSVGAATVRPQPNALRCRLRSRAGRPRFWCLASELNNHHVEQKGKDQDHQEAPSACNIQCVCHV

SEQ ID NO: 898886 - protein, 136 aa, Homo sapiens; identical to SEQ ID NO: 898885

SEQ ID NO: 898887 - protein, 136 aa, Homo sapiens; identical to SEQ ID NO: 898885

SEQ ID NO: 898888 - protein, 136 aa, Homo sapiens; identical to SEQ ID NO: 898885

SEQ ID NO: 898889 - protein, 137 aa, Homo sapiens
SVPPRPPPVARLLAGPLPQVWPVRLAGPVRLAEKEARGRRWREEGCWRGPGPDVQGREAPVDGAGLGRRPAGEVAGSRPCVGRPCATWVTSDTWALDGPAARRPTPALPAPRRGPGGGLGPTRACSCGAPALCPTLS

SEQ ID NO: 898890 - protein, 183 aa, Homo sapiens
QRRPRYRSGSEQAGGAIKTPAVCVRPQQPRRSADTQTPPARARTLSAPPFHWSRRAFRCASGGAPSAPPLQAGSVGAATVRPQPNALRCRLRSRAGRPRFWCLASELNNHHVSMFAMFDQSQIQEFKEAFNMIDQNRDGFIDKEDLHDMLASLGKNPTDAYLDAMMNEAPGPIQFHHVPDHVW

SEQ ID NO: 898891 - protein, 136 aa, Homo sapiens; identical to SEQ ID NO: 898885

SEQ ID NO: 898892 - protein, 136 aa, Homo sapiens; identical to SEQ ID NO: 898885

SEQ ID NO: 898893 - protein, 136 aa, Homo sapiens; identical to SEQ ID NO: 898885

SEQ ID NO: 898894 - protein, 105 aa, Homo sapiens
MRPQGPFNFTMFLTMFGEKLNGTDPEDVIRNAFACFDEEATGTIQEDYLRELLTTMGDRFTDEEVDELYREAPIDKKGNFNYIGVHTHPETWSQRQKFRARGYRA

SEQ ID NO: 898895 - protein, 89 aa, Homo sapiens
GDRFTDEEVDELYREAPIDKRGISNYIEFTRILKHGAKDKDELKVTTMGDRFTDEEVDELYREAPIDKKGNFNYIRVHTHPETWSQRQR

SEQ ID NO: 898896 - protein, 136 aa, Homo sapiens; identical to SEQ ID NO: 898885

SEQ ID NO: 898897 - protein, 136 aa, Homo sapiens; identical to SEQ ID NO: 898885

SEQ ID NO: 898898 - protein, 136 aa, Homo sapiens; identical to SEQ ID NO: 898885

SEQ ID NO: 898899 - protein, 110 aa, Homo sapiens
MRPQGPFNFTMFLTMFGEKLNGTDPEDVIRNAFACFDEEATGTIQEDYLRELLTTMGDRFTDEEVDELYREAPIDKKGNFNYIGVHTHPETWSQRQQIPAKRSLLPLWVF

SEQ ID NO: 898900 - protein, 136 aa, Homo sapiens; identical to SEQ ID NO: 898885

SEQ ID NO: 898901 - protein, 137 aa, Homo sapiens; identical to SEQ ID NO: 898889

SEQ ID NO: 898902 - protein, 136 aa, Homo sapiens; identical to SEQ ID NO: 898885

SEQ ID NO: 898903 - protein, 80 aa, Homo sapiens
LWRQILMGQHTMGLPCGSTLQEFKEAFNMIDQNRDGFIDKEDLHDMLASLGKNPTDAYLDAMMNEAPGPIQFHHVPDHVW

SEQ ID NO: 898904 - protein, 136 aa, Homo sapiens; identical to SEQ ID NO: 898885

SEQ ID NO: 898905 - protein, 136 aa, Homo sapiens; identical to SEQ ID NO: 898885

SEQ ID NO: 898906 - protein, 74 aa, Homo sapiens
NGTMNLPQFYITNSILLGKFLPSEAQDIPATRRARRGQGKQVDELYREAPIDKKGNFNYIRVHTHPETWSQRQR

SEQ ID NO: 898907 - protein, 88 aa, Homo sapiens
DLPLPIPNFKGAESIRKHEQHMAFDQFFSGSIHAIVQTLVHFINPETVPKPCCAPTQLNAISVLYFDDSSNVILKKYRNMVVRACGCH

SEQ ID NO: 898908 - protein, 228 aa, Homo sapiens
MESDLFLLDSRTLWASEEGWLVFDITATSNHWVVNPRHNLGLQLSVETLDGQSINPKLAGLIGRHGPQNKQPFMVAFFKATEVHFRSIRSTGSKQRSQNRSKTPKNQEALRMANVAENSSSDQRQACKKHELYVSFRDLGWQDWIIAPEGYAAYYCEGECAFPLNSYMNATNHAIVQTLVHFINPETVPKPCCAPTQLNAISVLYFDDSSNVILKKYRNMVVRACGCH

SEQ ID NO: 898909 - protein, 598 aa, Homo sapiens
RPLVRSRAHKAGRAPRGPCYPRRRLEEGGLPPPEGESARGAGRRSARPPACLLAASPALALWTPRLAGCSSHPRPPPHSPFRSPGLLSKPCGAPGRVRGEGPGASTEQGAGVRAERGRPGRGHVWRGRSGARLQQVTERRGRPPAPSATWGGAGPEPGARVARRAGAMHVRSLRAAAPHSFVALWAPLFLLRSALADFSLDNEVHSSFIHRRLRSQERREMQREILSILGLPHRPRPHLQGKHNSAPMFMLDLYNAMAVEEGGGPGGQGFSYPYKAVFSTQGPPLASLQDSHFLTDADMVMSFVNLVEHDKEFFHPRYHHREFRFDLSKIPEGEAVTAAEFRIYKDYIRERFDNETFRISVYQVLQEHLGRESDLFLLDSRTLWASEEGWLVFDITATSNHWVVNPRHNLGLQLSVETLDGQSINPKLAGLIGRHGPQNKQPFMVAFFKATEVHFRSIRSTGSKQRSQNRSKTPKNQEALRMANVAENSSSDQRQACKKHELYVSFRDLGWQDWIIAPEGYAAYYCEGECAFPLNSYMNATNHAIVQTLVHFINPETVPKPCCAPTQLNAISVLYFDDSSNVILKKYRNMVVRACGCH

SEQ ID NO: 898910 - protein, 598 aa, Homo sapiens; identical to SEQ ID NO: 898909

SEQ ID NO: 898911 - protein, 107 aa, Homo sapiens [sequence omitted]

SEQ ID NO: 898912 - protein, 107 aa, Homo sapiens [sequence omitted]

SEQ ID NO: 898913 - protein, 70 aa, Homo sapiens
EEVNSDHINNSETRHSHGENIRMCSHRDLVIHHILLTCLNNPSHLQLQMPLPLLLTLLLYSLHSIFLSIC

SEQ ID NO: 898914 - protein, 785 aa, Homo sapiens
MLLLLHCLGVFLSCSGHIQDEHPQYHSPPDVVIPVRITGTTRGMTPPGWLSYILPFGGQKHIIHIKVKKLLFSKHLPVFTYTDQGAILEDQPFVQNNCYYHGYVEGDPESLVSLSTCFGGFQGILQINDFAYEIKPLAFSTTFEHLVYKMDSEEKQFSTMRSGFMQNEITCRMEFEEIDNSTQKQSSYVGWWIHFRIVEIVVVIDNYLYIRYERNDSKLLEDLYVIVNIVDSILDVIGVKVLLFGLEIWTNKNLIVVDDVRKSVHLYCKWKSENITPRMQHDTSHLFTTLGLRGLSGIGAFRGMCTPHRSCAIVTFMNKTLGTFSIAVAHHLGHNLGMNHDEDTCRCSQPRCIMHEGNPPITKFSNCSYGDFWEYTVERTKCLLETVHTKDIFNVKRCGNGVVEEGEECDCGPLKHCAKDPCCLSNCTLTDGSTCAFGLCCKDCKFLPSGKVCRKEVNECDLPEWCNGTSHKCPDDFYVEDGIPCKERGYCYEKSCHDRNEQCRRIFGAGANTASETCYKELNTLGDRVGHCGIKNATYIKCNISDVQCGRIQCENVTEIPNMSDHTTVHWARFNDIMCWSTDYHLGMKGPDIGEVKDGTECGIDHICIHRHCVHITILNSNCSPAFCNKRGICNNKHHCHCNYLWDPPNCLIKGYGGSVDSGPPPKRKKKKKFCYLCILLLIVLFILLCCLYRLCKKSKPIKKQQDVQTPSAKEEEKIQRRPHELPPQSQPWVMPSQSQPPVTPSQSHPQVMPSQSQPPQNLFLFSFSISDCVLNFRLLYLQAT

SEQ ID NO: 898915 - protein, 785 aa, Homo sapiens; identical to SEQ ID NO: 898914

SEQ ID NO: 898916 - protein, 785 aa, Homo sapiens; identical to SEQ ID NO: 898914

SEQ ID NO: 898917 - protein, 785 aa, Homo sapiens; identical to SEQ ID NO: 898914

SEQ ID NO: 898918 - protein, 785 aa, Homo sapiens; identical to SEQ ID NO: 898914

SEQ ID NO: 898919 - protein, 785 aa, Homo sapiens; identical to SEQ ID NO: 898914

SEQ ID NO: 898920 - protein, 72 aa, Homo sapiens
IISHGVSLVKIRGSSRSALDFSPIENSPGVNLMRSCTKSRIGVSEVMYVDLFIWLVQGESRISIYAPYLLDF

SEQ ID NO: 898921 - protein, 785 aa, Homo sapiens; identical to SEQ ID NO: 898914

SEQ ID NO: 898922 - protein, 708 aa, Homo sapiens
MTERRRDELSEEINNLREKVMKQSEENNNLQSQVQKLTEENTTLREQVEPTPEDEDDDIELRGAAAAAAPPPPIEEECPEDLPEKFDGNPDMLAPFMAQCQIFMEKSTRDFSVDRVRVCFVTSMMTGRAARWASAKLERSHYLMHNYPAFMMEMKHVFEDPQRREVAKRKIRRLRQGMGSVIDYSNAFQMIAQDLDWNEPALIDQYHEGLSDHIQEELSHLEVAKSLSALIGQCIHIERRLARAAAARKPRSPPRALVLPHIASHHQVDPTEPVGGARMRLTQEEKERRRKLNLCLYCGTGGHYADNCPAKASKSSPAGNSPAPLYEGPSATGPEIIRSPQDDASSPHLQVMLQIHLPGRHTLFVRAMIDSGASGNFIDHEYVAQNGIPLRIKDWPILVEAIDGRPIASGPVVHETHDLIVDLGDHREVLSFDVTQSPFFPVVLGVRWLSTHDPNITWSTRSIVFDSEYCRYHCRMYSPIPPSLPPPAPQPPLYYPVDGYRVYQPVRYYYVQNVYTPVDEHVYPDHRLVDPHIEMIPGAHSIPSGHVYSLSEPEMAALRDFVARNVKDGLITPTIAPNGAQVLQVKRGWKLQVSYDCRAPNNFTIQNQYPRLSIPNLEDQAHLATYTEFVPQIPGYQTYPTYAAYPTYPVGFAWYPVGRDGQGRSLYVPVMITWNPHWYRQPPVPQYPPPQPPPPPPPPPPPPSYSTL

SEQ ID NO: 898923 - protein, 708 aa, Homo sapiens; identical to SEQ ID NO: 898922

SEQ ID NO: 898924 - protein, 785 aa, Homo sapiens; identical to SEQ ID NO: 898914

SEQ ID NO: 898925 - protein, 785 aa, Homo sapiens; identical to SEQ ID NO: 898914

SEQ ID NO: 898926 - protein, 785 aa, Homo sapiens; identical to SEQ ID NO: 898914

SEQ ID NO: 898927 - protein, 510 aa, Homo sapiens
MTERRRDELSEEINNLREKVMKQSEENNNLQSQVQKLTEENTTLREQVEPTPEDEDDDIELRGAAAAAAPPPPIEEECPEDLPEKFDGNPDMLAPFMAQCQIFMEKSTRDFSVDRVRVCFVTSMMTGRAARWASAKLERSHYLMHNYPAFMMEMKHVFEDPQRREVAKRKIRRLRQGMGSVIDYSNAFQMIAQDLDWNEPALIDQYHEGLSDHIQEELSHLEVAKSLSALIGQCIHIERRLARAAAARKPRSPPRALVLPHIASHHQVDPTEPVGGARMRLTQEEKERRRKLNLCLYCGTGGHYADNCPAKASKSSPAGNSPAPLYEGPSATGPEIIRSPQDDASSPHLQVMLQIHLPGRHTLFVRAMIDSGASGNFIDHEYVAQNGIPLRIKDWPILVEAIDGRPIASGPVVHETHDLIVDLGDHREVLSFDVTQSPFFPVVLGVRWLSTHDPNITWSTRSIVFDSEYCRYHCRMYSPIPPSLPPPAPQPPLYYPVDGYRVYQPVRYLS

SEQ ID NO: 898928 - protein, 785 aa, Homo sapiens; identical to SEQ ID NO: 898914

SEQ ID NO: 898929 - protein, 641 aa, Homo sapiens; identical to SEQ ID NO: 882457

SEQ ID NO: 898930 - protein, 623 aa, Homo sapiens
MAKAAAIGIDLGTTYSCVGVFQHGKVEIIANDQGNRTTPSYVAFTDTERLIGDAAKNQVALNPQNTVFDAKRLIGRKFGDPVVQSDMKHWPFQVINDGDKPKVQVSYKGETKAFYPEEISSMVLTKMKEIAEAYLGYPVTNAVITVPAYFNDSQRQATKDAGVIAGLNVLRIINEPTAAAIAYGLDRTGKGERNVLIFDLGGGTFDVSILTIDDGIFEVKATAGDTHLGGEDFDNRLVNHFVEEFKSACERAKRTLSSSTQASLEIDSLFEGIDFYTSITRARFEELCSDLFRSTLEPVEKALRDAKLDKAQIHDLVLVGGSTRIPKVQKLLQDFFNGRDLNKSINPDEAVAYGAAVQAAILMGDKSENVQDLLLLDVAPLSLGLETAGGVMTALIKRNSTIPTKQTQIFTTYSDNQPGVLIQVYEGERAMTKDNNLLGRFELSGIPPAPRGVPQIEVTFDIDANGILNVTATDKSTGKANKITITNDKGRLSKEEIERMVQEAEKYKAEDEVQRERVSAKNALESYAFNMKSAVEDEGLKGKISEADKKKVLDKCQEVISWLDANTLAEKDEFEHKRKELEQVCNPIISGLYQGAGGPGPGGFGAQGPKGGSGSGPTIEEVD

SEQ ID NO: 898931 - protein, 641 aa, Homo sapiens; identical to SEQ ID NO: 882457

SEQ ID NO: 898932 - protein, 622 aa, Homo sapiens
MAKAAAIGIDLGTTYSCVGVFQHGKVEIIANDQGNRTTPSYVAFTDTERLIGDAAKNQVALNPQNTVFDAKRLIGRKFGDPVVQSDMKHWPFQVINDGDKPKVQVSYKGETKAFYPEEISSMVLTKMKEIAEAYLGYPVTNAVITVPAYFNDSQRQATKDAGVIAGLNVLRIINEPTAAAIAYGLDRTGKGERNVLIFDLGGGTFDVSILTIDDGIFEVKATAGDTHLGGEDFDNRLVNHFVEEFKRKHKKDISQNKRAVRRLRTACERAKRTLSSSTQASLEIDSLFEGIDFYTSITRARFEELCSDLFRSTLEPVEKALRDAKLDKAQIHDLVLVGGSTRIPKVQKLLQDFFNGRDLNKSINPDEAVAYGAAVQAAILMGDKSENVQDLLLLDVAPLSLGLETAGGVMTALIKRNSTIPTKQTQIFTTYSDNQPGVLIQVYEGERAMTKDNNLLGRFELSGIPPAPRGVPQIEVTFDIDANGILNVTATDKSTGKANKITITNDKGRLSKEEIERMVQEAEKYKAEDEVQRERVSAKNALESYAFNMKSAVEDEGLKGKISEADKKWPRRTSLSTRGRSWSRCVTPSSADCTRVPVVPGLGASGLRVPREGLGQAPPLRR

SEQ ID NO: 898933 - protein, 641 aa, Homo sapiens; identical to SEQ ID NO: 882457

SEQ ID NO: 898934 - protein, 176 aa, Homo sapiens
MSHTCTGSPTPAPDIDANGILNVTATDKSTGKANKITITNDKGRLSKEEIERMVQEAEKYKAEDEVQRERVSAKNALESYAFNMKSAVEDEGLKGKISEADKKKVLDKCQEVISWLDANTLAEKDEFEHKRKELEQVCNPIISGLYQGAGGPGPGGFGAQGPKGGSGSGPTIEEVD

SEQ ID NO: 898935 - protein, 132 aa, Homo sapiens
CRLLLLKFAAARAEKYKAEDEVQRERVSAKNALESYAFNMKSAVEDEGLKGKISEADKKKVLDKCQEVISWLDANTLAEKDEFEHKRKELEQVCNPIISGLYQGAGGPGPGGFGAQGPKGGSGSGPTIEEVD

SEQ ID NO: 898936 - protein, 409 aa, Homo sapiens
MAKAAAIGIDLGTTYSCVGVFQHGKVEIIANDQGNRTTPSYVAFTDTERLIGDAAKNQVALNPQNTVFDAKRLIGRKFGDPVVQSDMKHWPFQVINDGDKPKVQVSYKGETKAFYPEEISSMVLTKMKEIAEAYLGYPVTNAVITVPAYFNDSQRQATKDAGVIAGLNVLRIINEPTAAAIAYGLDRTGKGERNVLIFDLGGGTFDVSILTIDDGIFEVKATAGDTHLGGEDFDNRLVNHFVEEFKRKHKKDISQNKRAVRRLRTACERAKRTLSSSTQASLEIDSLFEGIDFYTSITRARFEELCSDLFRSTLEPVEKALRDAKLDKAQIHDLVLVGGSTRIPKVQKLLQDFFNGRDLNKSINPDEAVAYGAAVQAAIQRTVPGCRWSRAWGLRGSGSQGRVWVRPHH

SEQ ID NO: 898937 - protein, 388 aa, Homo sapiens
MAKAAAIGIDLGTTYSCVGVFQHGKVEIIANDQGNRTTPSYVAFTDTERLIGDAAKNQVALNPQNTVFDAKRLIGRKFGDPVVQSDMKHWPFQVINDGDKPKVQVSYKGETKAFYPEEISSMVLTKMKEIAEAYLGYPVTNAVITVPAYFNDSQRQATKDAGVIAGLNVLRIINEPTAAAIAYGLDRTGKGERNVLIFDLGGGTFDVSILTIDDGIFEVKATAGDTHLGGEDFDNRLVNHFVEEFKRKHKKDISQNKRAVRRLRTACERAKRTLSSSTQASLEIDSLFEGIDFYTSITRARFEELCSDLFRSTLEPVEKALRDAKLDKAQIHDLVLVGGSTRIPKVQKLLQDFFNGRCFGTGLEHSSSNLVLLMTCRSRRPQTGSRSS

SEQ ID NO: 898938 - protein, 336 aa, Homo sapiens
  misc_feature (327)..(327): Xaa can be any naturally occurring amino acid
  misc_feature (332)..(332): Xaa can be any naturally occurring amino acid
MAKAAAIGIDLGTTYSCVGVFQHGKVEIIANDQGNRTTPSYVAFTDTERLIGDAAKNQVALNPQNTVFDAKRLIGRKFGDPVVQSDMKHWPFQVINDGDKPKVQVSYKGETKAFYPEEISSMVLTKMKEIAEAYLGYPVTNAVITVPAYFNDSQRQATKDAGVIAGLNVLRIINEPTAAAIAYGLDRTGKGERNVLIFDLGGGTFDVSILTIDDGIFEVKATAGDTHLGGEDFDNRLVNHFVEEFKRKHKKDISQNKRAVRRLRTACERAKRTLSSSTQASLEIDSLFEGIDFYTSITRARFEELCSDLFRSTLEPVEKTLTHRGSXRVGLXEGQT

SEQ ID NO: 898939 - protein, 85 aa, Homo sapiens
CRLLLLKFAAARKVLDKCQEVISWLDANTLAEKDEFEHKRKELEQVCNPIISGLYQGAGGPGPGGFGAQGPKGGSGSGPTIEEVD

SEQ ID NO: 898940 - protein, 319 aa, Homo sapiens
MAKAAAIGIDLGTTYSCVGVFQHGKVEIIANDQGNRTTPSYVAFTDTERLIGDAAKNQVALNPQNTVFDAKRLIGRKFGDPVVQSDMKHWPFQVINDGDKPKVQVSYKGETKAFYPEEISSMVLTKMKEIAEAYLGYPVTNAVITVPAYFNDSQRQATKDAGVIAGLNVLRIINEPTAAAIAYGLDRTGKGERNVLIFDLGGGTFDVSILTIDDGIFEVKATAGDTHLGGEDFDNRLVNHFVEEFKRKHKKDISQNKRAVRRLRTACERAKRTLSSSTQASLEIDSLFEGIDFYTSWSGAPPASPRCRSCCRTSSTGAT

SEQ ID NO: 898941 - protein, 555 aa, Homo sapiens
MKHWPFQVINDGDKPKVQVSYKGETKAFYPEEISSMVLTKMKEIAEAYLGYPVTNAVITVPAYFNDSQRQATKDAGVIAGLNVLRIINEPTAAAIAYGLDRTGKGERNVLIFDLGGGTFDVSILTIDDGIFEVKATAGDTHLGGEDFDNRLVNHFVEEFKRKHKKDISQNKRAVRRLRTACERAKRTLSSSTQASLEIDSLFEGIDFYTSITRARFEELCSDLFRSTLEPVEKALRDAKLDKAQIHDLVLVGGSTRIPKVQKLLQDFFNGRDLNKSINPDEAVAYGAAVQAAILMGDKSENVQDLLLLDVAPLSLGLETAGGVMTALIKRNSTIPTKQTQIFTTYSDNQPGVLIQVYEGERAMTKDNNLLGRFELSGIPPAPRGVPQIEVTFDIDANGILNVTATDKSTGKANKITITNDKGRLSKEEIERMVQEAEKYKAEDEVQRERVSAKNALESYAFNMKSAVEDEGLKGKISEADKKKVLDKCQEVISWLDANTLAEKDEFEHKRKELEQVCNPIISGLYQGAGGPGPGGFGAQGPKGGSGSGPTIEEVD

SEQ ID NO: 898942 - protein, 641 aa, Homo sapiens; identical to SEQ ID NO: 882457

SEQ ID NO: 898943 - protein, 607 aa, Homo sapiens
MAKAAAIGIDLGTTYSCVGVFQHGKVEIIANDQGNRTTPSYVAFTDTERLIGDAAKNQVALNPQNTVFDAKRLIGRKFGDPVVQSDMKHWPFQVINDGDKPKVQVSYKGETKAFYPEEISSMVLTKMKEIAEAYLGYPVTNAVITVPAYFNDSQRQATKDAGVIAGLNVLRIINEPTAAAIAYGLDRTGKGERNVLIFDLGGGTFDVSILTIDDGIFEVKATAGDTHLGGEDFDNRLVNHFVEEFKRKHKKDISQNKRAVRRLRTACERAKRTLSSSTQASLEIDSLFEGIDFYTSITRARFEELCSDLFRSTLEPVEKALRDAKLDKAQIHDLVLVGGSTRIPKVQKLLQDFFNGRDLNKSINPDEAVAYGAAVQAAILMGDKSENVQDLLLLDVAPLSLGLETAGGVMTALIKRNSTIPTKQTQIFTTYSDNQPGVLIQVYEGERAMTKDNNLLGRFELSGIPPAPRGVPQIEVTFDIDANGILNVTATDKSTGKANKITITNDKGRLSKEEIERMVQEAEKYKAEDEVQRERVSAKNALESYAFNMKSAVEDEGLKGKISEADKKKVLDKCQEVISWLDANTLAEKDEFEHKRWEERPSSPPTS

SEQ ID NO: 898944 - protein, 122 aa, Homo sapiens
DLEDPISGQDEVQRERVSAKNALESYAFNMKSAVEDEGLKGKISEADKKKVLDKCQEVISWLDANTLAEKDEFEHKRKELEQVCNPIISGLYQGAGGPGPGGFGAQGPKGGSGSGPTIEEVD

SEQ ID NO: 898945 - protein, 411 aa, Homo sapiens
MAKAAAIGIDLGTTYSCVGVFQHGKVEIIANDQGNRTTPSYVAFTDTERLIGDAAKNQVALNPQNTVFDAKRLIGRKFGDPVVQSDMKHWPFQVINDGDKPKVQVSYKGETKAFYPEEISSMVLTKMKEIAEAYLGYPVTNAVITVPAYFNDSQRQATKDAGVIAGLNVLRIINEPTAAAIAYGLDRTGKGERNVLIFDLGGGTFDVSILTIDDGIFEVKATAGDTHLGGEDFDNRLVNHFVEEFKRKHKKDISQNKRAVRRLRTACERAKRTLSSSTQASLEIDSLFEGIDFYTSITRARFEELCSDLFRSTLEPVEKALRDAKLDKAQIHDLVLVGGSTRIPKVQKLLQDFFNGRDLNKSINPDEAVAYGAAVQAAILMGDKSENVQDLLLLDVAPLSLGAWKDGPEGP

SEQ ID NO: 898946 - protein, 193 aa, Homo sapiens
MHAADLEKPMVEKQDQSPSLRTGEEKRDVSISRLREAFSLRHTTENKPHSPKTPEPRRSPLGQKRGMSSSSTSDAISDKGVLRPQKEAVSSSQGPSDPTDRAEVEKDSGHGSTSVDSEGFSIPDTGSHCSSECVASTPGDRGSQEHVDSQEKAPETDDSFSDVDCHSNQEDTGCKFQVLPQPTNLTSPNTKVF

SEQ ID NO: 898947 - protein, 193 aa, Homo sapiens; identical to SEQ ID NO: 898946

SEQ ID NO: 898948 - protein, 193 aa, Homo sapiens; identical to SEQ ID NO: 898946

SEQ ID NO: 898949 - protein, 193 aa, Homo sapiens; identical to SEQ ID NO: 898946

SEQ ID NO: 898950 - protein, 193 aa, Homo sapiens; identical to SEQ ID NO: 898946

SEQ ID NO: 898951 - protein, 193 aa, Homo sapiens; identical to SEQ ID NO: 898946

SEQ ID NO: 898952 - protein, 193 aa, Homo sapiens; identical to SEQ ID NO: 898946

SEQ ID NO: 898953 - protein, 193 aa, Homo sapiens; identical to SEQ ID NO: 898946

SEQ ID NO: 898954 - protein, 138 aa, Homo sapiens
MREENKGMPSGGGSDEGLASAAARGLVEKVRQLLEAGADPNGVNRFGRRAIQVMMMGSARVAELLLLHGAEPNCADPATLTRPVHDAAREGFLDTLVVLHRAGARLDVRDAWGRLPVDLAEERGHRDVAGYLRTATGD

SEQ ID NO: 898955 - protein, 138 aa, Homo sapiens; identical to SEQ ID NO: 898954

SEQ ID NO: 898956 - protein, 138 aa, Homo sapiens; identical to SEQ ID NO: 898954

SEQ ID NO: 898957 - protein, 179 aa, Homo sapiens
MREENKGMPSGGGSDEGLASAAARGLVEKVRQLLEAGADPNGVNRFGRRAIQVAGAPGPRRQGARERGARPRRIGAGTYIADVDLYRSLRWPEVMMMGSARVAELLLLHGAEPNCADPATLTRPVHDAAREGFLDTLVVLHRAGARLDVRDAWGRLPVDLAEERGHRDVAGYLRTATGD

SEQ ID NO: 898958 - protein, 726 aa, Homo sapiens
MSEETVPEAASPPPPQGQPYFDRFSEDDPEYMRLRNRAADLRQDFNLMEQKKRVTMILQSPSFREELEGLIQEQMKKGNNSSNIWALRQIADFMASTSHAVFPTSSMNVSMMTPINDLHTADSLNLAKGERLMRCKISSVYRLLDLYGWAQLSDTYVTLRVSKEQDHFLISPKGVSCSEVTASSLIKVNILGEVVEKGSSCFPVDTTGFCLHSAIYAARPDVRCIIHLHTPATAAVSAMKWGLLPVSHNALLVGDMAYYDFNGEMEQEADRINLQKCLGPTCKILVLRNHGVVALGDTVEEAFYKIFHLQAACEIQVSALSSAGGVENLILLEQEKHRPHEVGSVQWAGSTFGPMQKSRLGEHEFEALMRMLDNLGYRTGYTYRHPFVQEKTKHKSEVEIPATVTAFVFEEDGAPVPALRQHAQKQQKEKTRWLNTPNTYLRVNVADEVQRSMGSPRPKTTWMKADEVEKSSSGMPIRIENPNQFVPLYTDPQEVLEMRNKIREQNRQDVKSAGPQSQLLASVIAEKSRSPSTESQLMSKGDEDTKDDSEETVPNPFSQLTDQELEEYKKEVERKKLELDGEKETAPEEPGSPAKSAPASPVQSPAKEAETKSPLVSPSKSLEEGTKKTETSKAATTEPETTQPEGVVVNGREEEQTAEEILSKGLSQMTTSADTDVDTSKDKTESVTSGPMSPEGSPSKSPSKKKKKFRTPSFLKKSKKKEKVES

SEQ ID NO: 898959 - protein, 643 aa, Homo sapiens
MSEETVPEAASPPPPQGQPYFDRFSEDDPEYMRLRNRAADLRQDFNLMEQKKRVTMILQSPSFREELEGLIQEQMKKGNNSSNIWALRQIADFMASTSHAVFPTSSMNVSMMTPINDLHTADSLNLAKGERLMRCKISSVYRLLDLYGWAQLSDTYVTLRVSKEQDHFLISPKGVSCSEVTASSLIKVNILGEVVEKGSSCFPVDTTGFCLHSAIYAARPDVRCIIHLHTPATAAVSAMKWGLLPVSHNALLVGDMAYYDFNGEMEQEADRINLQKCLGPTCKILVLRNHGVVALGDTVEEAFYKIFHLQAACEIQVSALSSAGGVENLILLEQEKHRPHEVGSVQWAGSTFGPMQKSRLGEHEFEALMRMLDNLGYRTGYTYRHPFVQEKTKHKSEVEIPATVTAFVFEEDGAPVPALRQHAQKQQKEKTRWLNTPNTYLRVNVADEVQRSMGSPRPKTTWMKADEVEKSSSGMPIRIENPNQFVPLYTDPQEVLEMRNKIREQNRQDVKSAGPQSQLLASVIAEKSRSPSTESQLMSKGDEDTKDDSEETVPNPFSQLTDQELEEYKKEVERKKLELDETGQEREPGSGPAVCEFFSVALHIWSNILERKKLPQKSLAHLQSLHLLLQCRAQRRRQRQRAL

SEQ ID NO: 898960 - protein, 412 aa, Homo sapiens
MSEETVPEAASPPPPQGQPYFDRFSEDDPEYMRLRNRAADLRQDFNLMEQKKRVTMILQSPGYRTGYTYRHPFVQEKTKHKSEVEIPATVTAFVFEEDGAPVPALRQHAQKQQKEKTRWLNTPNTYLRVNVADEVQRSMGSPRPKTTWMKADEVEKSSSGMPIRIENPNQFVPLYTDPQEVLEMRNKIREQNRQDVKSAGPQSQLLASVIAEKSRSPSTESQLMSKGDEDTKDDSEETVPNPFSQLTDQELEEYKKEVERKKLELDGEKETAPEEPGSPAKSAPASPVQSPAKEAETKSPLVSPSKSLEEGTKKTETSKAATTEPETTQPEGVVVNGREEEQTAEEILSKGLSQMTTSADTDVDTSKDKTESVTSGPMSPEGSPSKSPSKKKKKFRTPSFLKKSKKKEKVES

SEQ ID NO: 898961 - protein, 560 aa, Homo sapiens
MSEETVPEAASPPPPQGQPYFDRFSEDDPEYMRLRNRAADLRQDFNLMEQKKRVTMILQSPSFREELEGLIQEQMKKGNNSSNIWALRQIADFMASTSHAVFPTSSMNVSMMTPINDLHTADSLNLAKGERLMRCKISSVYRLLDLYGWAQLSDTYVTLRVSKEQDHFLISPKGVSCSEVTASSLIKVNILGEVVEKGSSCFPVDTTGFCLHSAIYAARPDVRCIIHLHTPATAAVSAMKWGLLPVSHNALLVGDMAYYDFNGEMEQEADRINLQKCLGPTCKILVLRNHGVVALGDTVEEAFYKIFHLQAACEIQVSALSSAGGVENLILLEQEKHRPHEVGSVQWAGSTFGPMQKSRLGEHEFEALMRMLDNLGYRTGYTYRHPFVQEKTKHKSEVEIPATVTAFVFEEDGAPVPALRQHAQKQQKEKTRWLNTPNTYLRVNVADEVQRSMGSPRPKTTWMKADEVEKSSSGMPIRIENPNQFVPLYTDPQEVLEMRNKIREQNRQDVKSAGPQSQLLASVIAEKSRSPVEQRLPLTGGETCLPCLRGLVPGAGLQDP

SEQ ID NO: 898962 - protein, 246 aa, Homo sapiens
MSEETVPEAASPPPPQGQPYFDRFSEDDPEYMRLRNRAADLRQDFNLMEQKKRVTMILQSPGYRTGYTYRHPFVQEKTKHKSEVEIPATVTAFVFEEDGAPVPALRQHAQKQQKEKTRWLNTPNTYLRVNVADEVQRSMGSPRPKTTWMKADEVEKSSSGMPIRIENPNQFVPLYTDPQEVLEMRNKIREQNRQDVKSAGPQSQLLASVIAEKSRSPVEQRLPLTGGETCLPCLRGLVPGAGLQDP

SEQ ID NO: 898963 - protein, 111 aa, Homo sapiens
MSEETVPEAASPPPPQGQPYFDRFSEDDPEYMRLRNRAADLRQDFNLMEQKKRVTMILQSPSFREELEGLIQEQMKKGNNSSNIWALRQIADFMASTSHAVFPTSSMNGFH

SEQ ID NO: 898964 - protein, 726 aa, Homo sapiens; identical to SEQ ID NO: 898958

SEQ ID NO: 898965 - protein, 206 aa, Homo sapiens
  misc_feature (6)..(6): Xaa can be any naturally occurring amino acid
  misc_feature (9)..(9): Xaa can be any naturally occurring amino acid
  misc_feature (16)..(16): Xaa can be any naturally occurring amino acid
PTLKPXHCXDLRSPRXGERKTRLDAPGWFSSETGQEREPGSGPAVCEFFSVALHIWSNIIGEKETAPEEPGSPAKSAPASPVQSPAKEAETKSPLVSPSKSLEEGTKKTETSKAATTEPETTQPEGVVVNGREEEQTAEEILSKGLSQMTTSADTDVDTSKDKTESVTSGPMSPEGSPSKSPSKKKKKFRTPSFLKKSKKKEKVES

SEQ ID NO: 898966 - protein, 504 aa, Homo sapiens
MSEETVPEAASPPPPQGQPYFDRFSEDDPEYMRLRNRAADLRQDFNLMEQKKRVTMILQSPILVLRNHGVVALGDTVEEAFYKIFHLQAACEIQVSALSSAGGVENLILLEQEKHRPHEVGSVQWAGSTFGPMQKSRLGEHEFEALMRMLDNLGYRTGYTYRHPFVQEKTKHKSEVEIPATVTAFVFEEDGAPVPALRQHAQKQQKEKTRWLNTPNTYLRVNVADEVQRSMGSPRPKTTWMKADEVEKSSSGMPIRIENPNQFVPLYTDPQEVLEMRNKIREQNRQDVKSAGPQSQLLASVIAEKSRSPSTESQLMSKGDEDTKDDSEETVPNPFSQLTDQELEEYKKEVERKKLELDGEKETAPEEPGSPAKSAPASPVQSPAKEAETKSPLVSPSKSLEEGTKKTETSKAATTEPETTQPEGVVVNGREEEQTAEEILSKGLSQMTTSADTDVDTSKDKTESVTSGPMSPEGSPSKSPSKKKKKFRTPSFLKKSKKKEKVES

SEQ ID NO: 898967 - protein, 420 aa, Homo sapiens
MSEETVPEAASPPPPQGQPYFDRFSEDDPEYMRLRNRAADLRQDFNLMEQKKRVTMILQSPSFREELEGLIQEQMKKGNNSSNIWALRQIADFMASTSHAVFPTSSMNVSMMTPINDLHTADSLNLAKGERLMRCKISSVYRLLDLYGWAQLSDTYVTLRVSKEQDHFLISPKGVSCSEVTASSLPQEVLEMRNKIREQNRQDVKSAGPQSQLLASVIAEKSRSPSTESQLMSKGDEDTKDDSEETVPNPFSQLTDQELEEYKKEVERKKLELDGEKETAPEEPGSPAKSAPASPVQSPAKEAETKSPLVSPSKSLEEGTKKTETSKAATTEPETTQPEGVVVNGREEEQTAEEILSKGLSQMTTSADTDVDTSKDKTESVTSGPMSPEGSPSKSPSKKKKKFRTPSFLKKSKKKEKVES

SEQ ID NO: 898968 - protein, 254 aa, Homo sapiens
MSEETVPEAASPPPPQGQPYFDRFSEDDPEYMRLRNRAADLRQDFNLMEQKKRVTMILQSPSFREELEGLIQEQMKKGNNSSNIWALRQIADFMASTSHAVFPTSSMNVSMMTPINDLHTADSLNLAKGERLMRCKISSVYRLLDLYGWAQLSDTYVTLRVSKEQDHFLISPKGVSCSEVTASSLPQEVLEMRNKIREQNRQDVKSAGPQSQLLASVIAEKSRSPVEQRLPLTGGETCLPCLRGLVPGAGLQDP

SEQ ID NO: 898969 - protein, 726 aa, Homo sapiens; identical to SEQ ID NO: 898958

SEQ ID NO: 898970 - protein, 726 aa, Homo sapiens; identical to SEQ ID NO: 898958

SEQ ID NO: 898971 - protein, 67 aa, Homo sapiens
KKGNNSSNIWALRQIADFMASTSHAVFPTSSMSMWCLGSCQEQRWRGGWGGEEREEQQEASGCQAME

SEQ ID NO: 898972 - protein, 102 aa, Homo sapiens
MESRSVAQAGVQWRVLSSLQAPSPGFTPFSCLSLPIAGITGPHHHAQLIFLFFVEMGFHHVGQAGLELLTSGDPPTSASQSAGITGVSHCTRPYLSKSFVPL

SEQ ID NO: 898973 - protein, 102 aa, Homo sapiens; identical to SEQ ID NO: 898972

SEQ ID NO: 898974 - protein, 102 aa, Homo sapiens; identical to SEQ ID NO: 898972

SEQ ID NO: 898975 - protein, 101 aa, Homo sapiens
VDRSLTLLPRPGCSSSILDRCSLHLLGSGNSPASASSAAGTTGAHHHARLIFVFLVEMGFHHVGQADLKLLTSMILPPQPPILVYLIRLCVTQCCKALTSV

SEQ ID NO: 898976 - protein, 516 aa, Homo sapiens
HRKPLPCEAADREQRPQVRAPWLRSGPGRCKALAVRACLVAVNPARGPGPRGARSGKFFHNLMERKDFETWLDNISVTFLSLTDLQKNETLDHLISLSGAVQLRHLSNNLETLLKRDFLKLLPLELSFYLLKWLDPQTLLTCCLVSKQWNKVISACTEVWQTACKNLGWQIDDSVQDALHWKKVYLKAILRMKQLEDHEAFETSSLIGHSARVYALYYKDGLLCTGSDDLSAKLWDVSTGQCVYGIQTHTCAAVKFDEQKLVTGSFDNTVACWEWSSGARTQHFRGHTGAVFSVDYNDELDILVSGSADFTVKVWALSAGTCLNTLTGHTEWVTKVVLQKCKVKSLLHSPGDYILLSADKYEIKIWPIGREINCKCLKTLSVSEDRSICLQPRLHFDGKYIVCSSALGLYQWDFASYDILRVIKTPEIANLALLGFGDIFALLFDNRYLYIMDLRTESLISRWPLPEYRKSKRGSSFLAGEASWLNGLDGHNDTGLVFATSMPDHSIHLVLWKEHG

SEQ ID NO: 898977 - protein, 516 aa, Homo sapiens; identical to SEQ ID NO: 898976

SEQ ID NO: 898978 - protein, 944 aa, Homo sapiens
MSGEDCAVPWKVDLIGQLFSSVLSLGEASPGLAGLHIVSGGARNPDFYLKSWIFKTLQLIKENLKEGEPNKTCPWVARLCPPPSLKLGNFVIQQLEMLVVTIRERVEGASSRKISAALQLSPLVLQGWWGGMYFIHRPKEGSLKMNIRIGTSVTAYVWEHELFLLADSSIKHIHFTGEKKGAGRAENDVNSRVGTFSCRICISIEPDSGPLSAVKLIEINGEFQGQISLISMLKLCGVKQKNNIFPHPTKSGFNLSHIEFCASALLSTLEIEPESQLNLFCRSPRRLWALMMVNDFLLYYYFFFFETEFRSYCAGWSAMARSWLTATSASWVQVILLPQPPEVAGITSICHDTQLIFIFLVETGFHHVGQAGLESPDLRSSTCLGLPKCWDYRREPPRLAEFLLFIEPEQITITDLMTIPTLPHFQIYPIASKGSNYNHLWEKFYEKVTNLKLYIVCSISVFSGEYRSHQGGTWCRWNFFFFLGSLALSYRLEYSGIIMQLDFDSRTSGSNWSPNVSFFLMEAFIWPEILFNYFIDAGFIHTIASFYKNGKLLILFAKESKVGSQNEKWIGDNLNYSLLSFHCLGELALAHTDFGFLQRIGKGIAFPSFVNILISEKFYSHEKISPILSYKDWISWVHCGVVEASGFFQVHKGHHNNFRLHGVDRDPGELSGCVKFLIDSVIIPKECSFLQLNAFEVIHIAKSDCNLTFETYWRNRKKAPPVEGLDLEEVLQEGACNWIAVHEVKRGEHCYEIVRLHFIFRSLKIALFWLLKTLGVRFEGGLYNHSSIHRKMITALYLYNKRNNFRKQYFRHEEIVCIRHFDLTESAKDEWILALHISLTKPSWQLEVVTVWLPDCLEVNPTNITVFFVLFCFFCMFLRQVLLYPQAGVQWRDLGLLQPQPPGFKRFSCLSLLSELRLQARATTPSYFCIFSRDEVSLCWPGWS

SEQ ID NO: 898979 - protein, 902 aa, Homo sapiens
MPDFYLKSWIFKTLQLIKENLKEGEPNKTCPWVARLCPPPSLKLGNFVIQQLEMLVVTIRERVEGASSRKISAALQLSPLVLQGWWGGMYFIHRPKEGSLKMNIRIGTSVTAYVWEHELFLLADSSIKHIHFTGGEKGLLAELRMMGTLEWGPISCRICISIEPDSGPLSAVKLIEINGEFQGQISLISMLKLCGVKQKNNIFPHPTKSGFNLSHIEFCASALLSTLEIEPESQLNLFCRSPRRLWALMMVNDFLLYYYFFFFETEFRSYCAGWSAMARSWLTATSASWVQVILLPQPPEVAGITSICHDTQLIFIFLVETGFHHVGQAGLEPPDLRSSTCLGLPKCWDYRREPPRLAEFLLFIEPEQITITDLMTIPTLPHFQIYPIASKGKYYNHLWEKFYEKVTNLKLYIVCSISVFSGEYRSHQGGTWCRWNFFFFLGSLALSYRLEYSGIIMQLDFDSRTSGSNWSPNVKFFLMEAFIWPEILFNYFIDAGFIHTIASFYKNGKLLILFAKESKVGSQNEKWIGDNLNYSLLSFHCLGELALAHTDFGFLSSIGKGIAFPSFVNILISEKFYSHEKISPILSYKDWISWVHCGVVEASGFFQVHKGHHNNFRLHGVDRDPGELSGCVKFLIDSVIIPKECSFLQLNAFEVIHIAKSDCNLTFETYWRNRKKAPPVEGLDLEEVLQEGACNWIAVHEVKRGEHCYEIVRFALHFSYLKIALFWLLKTLGVRFECGLYNHSSIHRKMITALYLYNKRNNFRKQYFRHEEIVCIRHFDLTESAKDEWILALHISLTKPSWQLEVVTVWLPDCLEVNPTNITVFFVLFCFFCMFLRQVLLYPQAGVQWRDLGLLQPQPPGFKRFSCLSLLSMLRLQARATTPSYFCIFSRDEVSLCWPGWS

SEQ ID NO: 898980 - protein, 902 aa, Homo sapiens; identical to SEQ ID NO: 898979

SEQ ID NO: 898981 - protein, 873 aa, Homo sapiens
MSLGCQIVSSSLSKVREFCDSAVEMLVVTIRERVEGASSRKISAALQLSPLVLQGWWGGMYFIHRPKEGSLKMNIRIGTSVTAYVWEHELFLLADSSIKHIHFTGGEKGLLAELRMMGTLEWGPISCRICISIEPDSGPLSAVKLIEINGEFQGQISLISMLKLCGVKQKNNIFPHPTKSGFNLSHIEFCASALLSTLEIEPESQLNLFCRSPRRLWALMMVNDFLLYYYFFFFETEFRSYCAGWSAMARSWLTATSASWVQVILLPQPPEVAGITSICHDTQLIFIFLVETGFHHVGQAGLESPDLRSSTCLGLPKCWDYRREPPRLAEFLLFIEPEQITITDLMTIPTLPHFQIYPIASKGSNYNHLWEKFYYKVTNLKLYIVCSISVFSGEYRSHQGGTWCRWNFFFFLGSLALSYRLEYSGIIMQLDFDSRTSGSNWSPNVKFFLMEAFIWPEILFNYFIDAGFIHTIASFYKNGKQLILFAKESKVGSQNEKWIGDNLNYSLLSFHCLGELALAHTDFGFLSSIGKGIAFPSFVNILISEKFYSHEKISPILSYKDWISWVHCGVVEASGFFQVHKGHHNNFRLHGVDRDPGELSGCVKFLIDSVIIPKECSFLQLNAFEVIHIAKSDCNLTFETYWRNRKKAPPVEGLDLEEVLQEGACNWIAVHEVKRGEHCYEIVRLHFIFRSLKIALFWLLKTLGVRFEGGLYNHSSIHRKMITALYLKNKRNNFRKQYFRHEEIVCIRHFDLTESAKDEWILALHISLTKPSWQLEVVTVWLPDCLEVNPTNITVFFVLFCFFCMFLRQVLLYPQAGVQWRDLGLLQPQPPGFKRFSCLSLLSELRLQARATTPSYFCIFSRDEVSLCWPGWS

SEQ ID NO: 898982 - protein, 726 aa, Homo sapiens
MLVVTIRERVEGASSRKISAALQLSPLVLQGWWGGMYFIHRPKEGSLKMNIRIGTSVTAYVWEHELFLLADSSIKHIHFTGEKKGAGRAENDVNSRVGTFSCRICISIEPDSGPLSAVKLIEINGEFQGQISLISMLKLCGVKQKNNIFPHPTKSGFNLSHIEFCASALLSTLEIEPESQLNLFCRSPRRLWALMMVNDFLLYYYFFFFETEFRSYCAGWSAMARSWLTATSASWVQVILLPQPPEVAGITSICHDTQLIFIFLVETGFHHVGQAGLESPDLRSSTCLGLPKCWDYRREPPRLAEFLLFIEPEQITITDLMTIPTLPHFQIYPIASKGSNYNHLWEKFYEKVTNLKLYIVCSISVFSGEYRSHQGGTWCRWNFFFFLGSLALSYRLEYSGIIMQLDFDSRTSGSNWSPNVKFFLMEAFIWPEILFNYFIDAGFIHTIASFYKNGKLLILFAKESKVGSQNEKWIGDNLNYSLLSFHCLGELALAHTDFGFLSSIGKGIAFPSFVNILISEKFYSHEKISPILSYKDWISWVTLGVVEASGFFQVHKGHHNNFRLHGVDRDPGELSGCVKFLIDSVIIPKECSFLQLNAFEVIHIAKSDCNLTFETYWRNRKKAPPVEGLDLEEVLQEGACNWIAVHEVKRGEHCYEIVRLHFIFRSLKIALFWLLKTLGVRFEGGLYNHSSIHRKMITVSICKTKEITFGNSILDMRKLFVLGILI

SEQ ID NO: 898983 - protein, 628 aa, Homo sapiens
MARSWLTATSASWVQVILLPQPPEVAGITSICHDTQLIFIFLVETGFHHVGQAGLESPDLRSSTCLGLPKCWDYRREPPRLAEFLLFIEPEQITITDLMTIPTLPHFQIYPIASKGKIIIIICGKSFIKKVTNLKLYIVCSISVFSGEYRSHQGGTWCRWNFFFFLGSLALSYRLEYSGIIMQLDFDSRTSGSNWSPNVSSSFMEAFIWPEILFNYFIDAGFIHTIASFYKNGKLAHPFCKRKQSGESDMRSGLGITKTILYSPFIAFESSALAHTDFGFLSSIGKGIAFPSFVNILISEKFYSHEKISPILSYKDWISWVTLWCGGSSGFFQVHKGHHNNFRLHGVDRDPGELSGCVKFLIDSVIIPKECSFLQLNAFEVIHIAKSDCNLTFETYWRNRKKAPPVEGLDLEEVLQEGACNWIAVHEVKRGEHCYEIVRLHFIFRSLKIALFWLLKTLGVRFEGGLYNHSSIHRKMITALYLYNKRNNFRKQYFRHEEIVCIRHFDLTESAKDEWILALHISLTKPSWQLEVVTVWLPDCLEVNPTNITVFFVLFCFFCMFLRQVLLYPQAGVQWRDLGLLQPQPPGFKRFSCLSLLSELRLQARATTPSYFCIFSRDEVSLCWPGWS

SEQ ID NO: 898984 - protein, 578 aa, Homo sapiens
MLARLVLNSCLRSSTCLGLPKCWDYRREPPRLAEFLLFIEPEQITITDLMTIPTLPHFQIYPIASKGSNYNHLWEKFYEKVTNLKLYIVCSISVFSGEYRSHQGGTWCRWNFFFFLGSLALSYRLEYSGIIMQLDFDSRTSGSNWSPNVKFFLMEAFIWPEILFNYFIDAGFIHTIASFYKNGKLAHPFCKKKAKWGVRMRSGLGITKTILYSPFIAFESSALAHTDFGFLQRIGKGIAFPSFVNILISEKFYSHEKISPILSYKDWISWVHCGVVEASGFFQVHKGHHNNFRLHGVDRDPGELSGCVKFLIDSVIIPKECSFLQLNAFEVIHIAKSDCNLTFETYWRNRKKAPPVEGLDLEEVLQEGACNWIAVHEVKRGEHCYEIVRLHFIFRSLKIALFWLLKTLGVRFEGGLYNHSSIHRKMITALYLYNKRNNFRKQYFRHEEIVCIRHFDLTESAKDEWILALHISLTKPSWQLEVVTVWLPDCLEVNPTNITVFFVLFCFFCMFLRQVLLYPQAGVQWRDLGLLQPQPPGFKRFSCLSLLSELRLQARATTPSYFCIFSRDEVSLCWPGWS

SEQ ID NO: 898985 - protein, 516 aa, Homo sapiens; identical to SEQ ID NO: 898976

SEQ ID NO: 898986 - protein, 516 aa, Homo sapiens; identical to SEQ ID NO: 898976

SEQ ID NO: 898987 - protein, 356 aa, Homo sapiens
HRKPLPCEAADREQRPQVRAPWLRSGPGRCKALAVRACLVAVNPARGPGPRGARSGKFFHNLMERKDFETWLDNISVTFLSLTDLQKNETLDHLISLSGAVQLRHLSNNLETLLKRDFLKLLPLELSFYLLKWLDPQTLLTCCLVSKQWNKVISACTEVWQTACKNLGWQIDDSVQDALHWKKVYLKAILRMKQLEDHEAFETSSLIGHSARVYALYYKDGLLCTGSDDLSAKLWDVSTGQCVYGIQTHTCAAVKFDEQKLVTGSFDNTVACWEWSSGARTQHFRGHTGAVFSVDYNDELDILVSGSADFTVKVWALSAGTCLNTLTGHTEWVTKVGRLGRSLLLIRLFEGGRGGW

SEQ ID NO: 898988 - protein, 902 aa, Homo sapiens; identical to SEQ ID NO: 898979

SEQ ID NO: 898989 - protein, 1011 aa, Homo sapiens
MTRRIPEPNLTSSFASNLICSLRQVNFLFYDHHFLHLLSEGIVLDEGSQTQMPKGAVQDNINEYKHSGEDCAVPWKVDLIGQLFSSVLSLGEASPGLAGLHIVSGGARNPDFYLKSWIFKTLQLIKENLKEGEPNKTCPWVARLCPPPSLKLGNFVIQQLEMLVVTIRERVEGASSRKISAALQLSPLVLQGWWGGMYFIHRPKEGSLKMNIRIGTSVTAYVWEHELFLLADSSIKHIHFTGGEKGLLAELRMMGTLEWGPISCRICISIEPDSGPLSAVKLIEINGEFQGQISLISMLKLCGVKQKNNIFPHPTKSGFNLSHIEFCASALLSTLEIEPESQLNLFCRSPRRLWALMMVNDFLLYYYFFFFETEFRSYCAGWSAMARSWLTATSASWVQVILLPQPPEVAGITSICHDTQLIFIFLVETGFHHVGQAGLESPDLRSSTCLGLPKCWDYRREPPRLAEFLLFIEPEQITITDLMTIPTLPHFQIYPIASKGSNYNHLWEKFYEKVTNLKLYIVCSISVFSGEYRSHQGGTWCRWNFFFFLGSLALSYRLEYSGIIMQLDFDSRTSGSNWSPNVKFFLMEAFIWPEILFNYFIDAGFIHTIASFYKNGKLAHPFCKKKAKWGVRMRSGLGITKTILYSPFIAFESSALAHTDFGFLQRIGKGIAFPSFVNILISEKFYSHEKISPILSYKDWISWVTLGVVEASGFFQVHKGHHNNFRLHGVDRDPGELSGCVKFLIDSVIIPKECSFLQLNAFEVIHIAKSDCNLTFETYWRNRKKAPPVEGLDLEEVLQEGACNWIAVHEVKRGEHCYEIVRLHFIFRSLKIALFWLLKTLGVRFEGGLYNHSSIHRKMITALYLYNKRNNFRKQYFRHEEIVCIRHFDLTESAKDEWILALHISLTKPSWQLEVVTVWLPDCLEVNPTNITVFFVLFCFFCMFLRQVLLYPQAGVQWRDLGLLQPQPPGFKRFSCLSLLSELRLQARATTPSYFCIFSRDEVSLCWPGWS

SEQ ID NO: 898990 - protein, 902 aa, Homo sapiens; identical to SEQ ID NO: 898979

SEQ ID NO: 898991 - protein, 902 aa, Homo sapiens; identical to SEQ ID NO: 898979

SEQ ID NO: 898992 - protein, 628 aa, Homo sapiens; identical to SEQ ID NO: 898983

SEQ ID NO: 898993 - protein, 578 aa, Homo sapiens
MLARLVLNSCLRSSTCLGLPKCWDYRREPPRLAEFLLFIEPEQITITDLMTIPTLPHFQIYPIASKGSNYNHLWEKFYEKVTNLKLYIVCSISVFSGEYRSHQGGTWCRWNFFFFLGSLALSYRLEYSGIIMQLDFDSRTSGSNWSPNVKFFLMEAFIWPEILFNYFIDAGFIHTIASFYKNGKLAHPFCKKKAKWGVRMRSGLGITKTILYSPFIAFESSALAHTDFGFLQRIGKGIAFPSFVNILISEKFYSHEKISPILSYKDWISWVHCGVVEASGFFQVHKGHHNNFRLHGVDRDPGELSGCVKFLIDSVIIPKECSFLQLNAFEVIHIAKSDCNLTFETYWRNRKKAPPVEGLDLEEVLQEGACNWIAVHEVKRGEHCYEIVRFALHFSSLKIALFWLLKTLGVRFEGGLYNHSSIHRKMITALYLYNKRNNFRKQYFRHEEIVCIRHFDLTESAKDEWILALHISLTKPSWQLEVVTVWLPDCLEVNPTNITVFFVLFCFFCMFLRQVLLYPQAGVQWRDLGLLQPQPPGFKRFSCLSLLSELRLQARATTPSYFCIFSRDEVSLCWPGWS

SEQ ID NO: 898994 - protein, 516 aa, Homo sapiens; identical to SEQ ID NO: 898976

SEQ ID NO: 898995 - protein, 516 aa, Homo sapiens; identical to SEQ ID NO: 898976

SEQ ID NO: 898996 - protein, 167 aa, Homo sapiens
MERKDFETWLDNISVTFLSLTDLQKNETLDHLISLSGAVQLRHLSNNLETLLKRDFLKLLPLELSFYLLKWLDPQTLLTCCLVSKQWNKVISACTEVWQTACKNLGWQIDDSVQDALHWKKVYLKAILRMKQLEDHEAFETSSLIGHSARVYALYYKDGLLCTGKRC

SEQ ID NO: 898997 - protein, 655 aa, Homo sapiens
LYWSGILGSAGTMEPVPLQDFVRALDPASLPRVLRVCSGVYFEGSIYEISGNECCLSTGDLIKVTQVRLQKVVCENPKTSQTMELAPNFQGYFTPLNTPQSYETLEELVSATTQSSKQLPTCFMSTHRIVTEGRVVTEDQLLMLEAVVMHLGIRSARCVLGMEGQQVILHLPLSQKGPFWTWEPSAPRTLLQVLQDPALKDLVLTCPTLPWHSLILRPQYEIQAIMHMRRTIVKIPSTLEVDVEDVTASSRHVHFIKPLLLSEVLAWEGPFPLSMEILEVPEGRPIFLSPWVGSLQKGQRLCVYGLASPPWRVLASSKGRKVPRHFLVSGGYQGKLRRRPREFPTAYDLLGAFQPGRPLRVVATKDCEGEREENPEFTSLAVGDRLEVLGPGQAHGAQGSDVDVLVCQRLSDQAGEDEEEECKEEAESPERVLLPFHFPGSFVEEMSDSRRYSLADLTAQFSLPCEVKVVAKDTSHPTDPLTSFLGLRLEEKITEPFLVVSLDSEPGMCFEIPPRWLDLTVVEAKGQPDLPEGSLPIATVEELTDTFYYRLRKLPACEIQAPPPRPPKNQGLSKQRRHSSEGGVKSSQVLGLQQHARLPKPKAKTLPEFIKDGSSTYSKIPAHRKGHRPAKPQRQDLDDDEHDYEEILEQFQKTI

SEQ ID NO: 898998 - protein, 676 aa, Homo sapiens
CQEGQGQLRTTEPVGMRQERQSRACQAAGTMCKGMAEQSLLGTRAQAAQHLALVQWGNGVLVSAGSIYEISGNECCLSTGDLIKVTQVRLQKVVCENPKTSQTMELAPNFQGYFTPLNTPQSYETLEELVSATTQSSKQLPTCFMSTHRIVTEGRVVTEDQLLMLEAVVMHLGIRSARCVLGMEGQQVILHLPLSQKGPFWTWEPSAPRTLLQVLQDPALKDLVLTCPTLPWHSLILRPQYEIQAIMHMRRTIVKIPSTLEVDVEDVTASSRHVHFIKPLLLSEVLAWEGPFPLSMEILEVPEGRPIFLSPWVGSLQKGQRLCVYGLASPPWRVLASSKGRKVPRHFLVSGGYQGKLRRRPREFPTAYDLLGAFQPGRPLRVVATKDCEGEREENPEFTSLAVGDRLEVLGPGQAHGAQGSDVDVLVCQRLSDQAGEDEEEECKEEAESPERVLLPFHFPGSFVEEMSDSRRYSLADLTAQFSLPCEVKVVAKDTSHPTDPLTSFLGLRLEEKITEPFLVVSLDSEPGMCFEIPPRWLDLTVVEAKGQPDLPEGSLPIATVEELTDTFYYRLRKLPACEIQAPPPRPPKNQGLSKQRRHSSEGGVKSSQVLGLQQHARLPKPKAKTLPEFIKDGSSTYSKIPAHRKGHRPAKPQRQDLDDDEHDYEEILEQFQKTI

SEQ ID NO: 898999 - protein, 510 aa, Homo sapiens
LYWSGILGSAGTMEPVPLQDFVRALDPASLPRVLRVCSGVYFEGSIYEISGNECCLSTGDLIKVTQVRLQKVVCENPKTSQTMELAPNFQGYFTPLNTPQSYETLEELVSATTQSSKQLPTCFMSTHRIVTEGRVVTEDQLLMLEAVVMHLGIRSARCVLGMEGQQVILHLPLSQKGPFWTWEPSAPRTLLQVLQDPALKDLVLTCPTLPWHSLILRPQYEIQAIMHMRRTIVKIPSTLEVDVEDVTASSRHVHFIKPLLLSERLSDQAGEDEEEECKEEAESPERVLLPFHFPGSFVEEMSDSRRYSLADLTAQFSLPCEVKVVAKDTSHPTDPLTSFLGLRLEEKITEPFLVVSLDSEPGMCFEIPPRWLDLTVVEAKGQPDLPEGSLPIATVEELTDTFYYRLRKLPACEIQAPPPRPPKNQGLSKQRRHSSEGGVKSSQVLGLQQHARLPKPKAKTLPEFIKDGSSTYSKIPAHRKGHRPAKPQRQDLDDDEHDYEEILEQFQKTI

SEQ ID NO: 899000 - protein, 135 aa, Homo sapiens
LYWSGILGSAGTMEPVPLQDFVRALDPASLPRVLRVCSGVYFEGSIYEISGNECCLSTGDLIKVTQVRLQKVVCENPKTSQTMELAPNFQVFSSLRIAATRSAAQTQGEDLARVHQGWLQYVQQDSCPQEGPQAR

SEQ ID NO: 899001 - protein, 518 aa, Homo sapiens
LYWSGILGSAGTMEPVPLQDFVRALDPASLPRVLRVCSGVYFEGSIYEISGNECCLSTGDLIKVTQVRLQKVVCENPKTSQTMELAPNFQVRRTIVKIPSTLEVDVEDVTASSRHVHFIKPLLLSEVLAWEGPFPLSMEILEVPEGRPIFLSPWVGSLQKGQRLCVYGLASPPWRVLASSKGRKVPRHFLVSGGYQGKLRRRPREFPTAYDLLGAFQPGRPLRVVATKDCEGEREENPEFTSLAVGDRLEVLGPGQAHGAQGSDVDVLVCQRLSDQAGEDEEEECKEEAESPERVLLPFHFPGSFVEEMSDSRRYSLADLTAQFSLPCEVKVVAKDTSHPTDPLTSFLGLRLEEKITEPFLVVSLDSEPGMCFEIPPRWLDLTVVEAKGQPDLPEGSLPIATVEELTDTFYYRLRKLPACEIQAPPPRPPKNQGLSKQRRHSSEGGVKSSQVLGLQQHARLPKPKAKTLPEFIKDGSSTYSKIPAHRKGHRPAKPQRQDLDDDEHDYEEILEQFQKTI

SEQ ID NO: 899002 - protein, 655 aa, Homo sapiens; identical to SEQ ID NO: 898997

SEQ ID NO: 899003 - protein, 291 aa, Homo sapiens
GCTGPGFWDPRGPWSRCRCRTSCAPWTPPPSRACCGSARGSTSRRLSDQAGEDEEEECKEEAESPERVLLPFHFPGSFVEEMSDSRRYSLADLTAQFSLPCEVKVVAKDTSHPTDPLTSFLGLRLEEKITEPFLVVSLDSEPGMCFEIPPRWLDLTVVEAKGQPDLPEGSLPIATVEELTDTFYYRLRKLPACEIQAPPPRPPKNQGLSKQRRHSSEGGVKSSQVLGLQQHARLPKPKAKTLPEFIKDGSSTYSKIPAHRKGHRPAKPQRQDLDDDEHDYEEILEQFQKTI

SEQ ID NO: 899004 - protein, 272 aa, Homo sapiens
LYWSGILGSAGTMEPVPLQDFVRALDPASLPRVLRVCSGVYFEGSIYEISGNECCLSTGDLIKVTQVRLQKVVCENPKTSQTMELAPNFQGYFTPLNTPQSYETLEELVSATTQSSKQLPTCFMSTHRIVTEGRVVTEDQLLMLEAVVMHLGIRSARCVLGMEGQQVILHLPLSQKGPFWTWEPSAPRTLLQVLQDPALKDLVLTCPTLPWHSLILRPQYEIQAIMHIFSSLRIAATRSAAQTQGEDLARVHQGWLQYVQQDSCPQEGPQAR

SEQ ID NO: 899005 - protein, 190 aa, Homo sapiens
CQEGQGQLRTTEPVGMRQERQSRACQAAGTMCKGMAEQSLLGTRAQAAQHLALVQWGNGVLVSAGSIYEISGNECCLSTGDLIKVTQVRLQKVVCENPKTSQTMELAPNFQGKVGTSASPCALALSWHTRRLLVGLPRPAVTPSPRGLLPRPSHSPQPSLKGGDVLRGSAMPWTQRGCTLSLSVSGHTCL

SEQ ID NO: 899006 - protein, 608 aa, Homo sapiens
LYWSGILGSAGTMEPVPLQDFVRALDPASLPRVLRVCSGVYFEGYFTPLNTPQSYETLEELVSATTQSSKQLPTCFMSTHRIVTEGRVVTEDQLLMLEAVVMHLGIRSARCVLGMEGQQVILHLPLSQKGPFWTWEPSAPRTLLQVLQDPALKDLVLTCPTLPWHSLILRPQYEIQAIMHMRRTIVKIPSTLEVDVEDVTASSRHVHFIKPLLLSEVLAWEGPFPLSMEILEVPEGRPIFLSPWVGSLQKGQRLCVYGLASPPWRVLASSKGRKVPRHFLVSGGYQGKLRRRPREFPTAYDLLGAFQPGRPLRVVATKDCEGEREENPEFTSLAVGDRLEVLGPGQAHGAQGSDVDVLVCQRLSDQAGEDEEEECKEEAESPERVLLPFHFPGSFVEEMSDSRRYSLADLTAQFSLPCEVKVVAKDTSHPTDPLTSFLGLRLEEKITEPFLVVSLDSEPGMCFEIPPRWLDLTVVEAKGQPDLPEGSLPIATVEELTDTFYYRLRKLPACEIQAPPPRPPKNQGLSKQRRHSSEGGVKSSQVLGLQQHARLPKPKAKTLPEFIKDGSSTYSKIPAHRKGHRPAKPQRQDLDDDEHDYEEILEQFQKTI

SEQ ID NO: 899007 - protein, 272 aa, Homo sapiens; identical to SEQ ID NO: 899004

SEQ ID NO: 899008 - protein, 255 aa, Homo sapiens
MRSKPSCTRLSDQAGEDEEEECKEEAESPERVLLPFHFPGSFVEEMSDSRRYSLADLTAQFSLPCEVKVVAKDTSHPTDPLTSFLGLRLEEKITEPFLVVSLDSEPGMCFEIPPRWLDLTVVEAKGQPDLPEGSLPIATVEELTDTFYYRLRKLPACEIQAPPPRPPKNQGLSKQRRHSSEGGVKSSQVLGLQQHARLPKPKAKTLPEFIKDGSSTYSKIPAHRKGHRPAKPQRQDLDDDEHDYEEILEQFQKTI

SEQ ID NO: 899009 - protein, 210 aa, Homo sapiens
MSDSRRYSLADLTAQFSLPCEVKVVAKDTSHPTDPLTSFLGLRLEEKITEPFLVVSLDSEPGMCFEIPPRWLDLTVVEAKGQPDLPEGSLPIATVEELTDTFYYRLRKLPACEIQAPPPRPPKNQGLSKQRRHSSEGGVKSSQVLGLQQHARLPKPKAKTLPEFIKDGSSTYSKIPAHRKGHRPAKPQRQDLDDDEHDYEEILEQFQKTI

SEQ ID NO: 899010 - protein, 296 aa, Homo sapiens
AHSIGSPALTVLCGHHPEWPAWLESTYEVLGPGQAHGAQGSDVDVLVCQRLSDQAGEDEEEECKEEAESPERVLLPFHFPGSFVEEMSDSRRYSLADLTAQFSLPCEVKVVAKDTSHPTDPLTSFLGLRLEEKITEPFLVVSLDSEPGMCFEIPPRWLDLTVVEAKGQPDLPEGSLPIATVEELTDTFYYRLRKLPACEIQAPPPRPPKNQGLSKQRRHSSEGGVKSSQVLGLQQHARLPKPKAKTLPEFIKDGSSTYSKIPAHRKGHRPAKPQRQDLDDDEHDYEEILEQFQKTI

SEQ ID NO: 899011 - protein, 655 aa, Homo sapiens; identical to SEQ ID NO: 898997

SEQ ID NO: 899012 - protein, 770 aa, Homo sapiens
MRGVWPPPVSALLSALGMSTYKRATLDEEDLVDSLSEGDAYPNGLQVNFHSPRSGQRCWAARTQVEKRLVVLVVLLAAGLVACLAALGIQYQTRSPSVCLSEACVSVTSSILSSMDPTVDPCHDFFSYACGGWIKANPVPDGHSRWGTFSNLWEHNQAIIKHLLENSTASVSEAERKAQVYYRACMNETRIEELRAKPLMELIERLGGWNITGPWAKDNFQDTLQVVTAHYRTSPFFSVYVSADSKNSNSNVIQVDQSGLGLPSRDYYLNKTENEKVLTGYLNYMVQLGKLLGGGDEEAIRPQMQQILDFETALANITIPQEKRRDEELIYHKVTAAELQTLAPAINWLPFLNTIFYPVEINESEPIVVYDKEYLEQISTLINTTDRCLLNNYMIWNLVRKTSSFLDQRFQDADEKFMEVMYGTKKTCLPRWKFCVSDTENNLGFALGPMFVKATFAEDSKSIATEIILEIKKAFEESLSTLKWMDEETRKSAKEKADAIYNMIGYPNFIMDPKELDKVFNDYTAVPDLYFENAMRFFNFSWRVTADQLRKAPNRDQWSMTPPMVNAYYSPTKNEIVFPAGILQAPFYTRSSPKALNFGGIGVVVGHELTHAFDDQGREYDKDGNLRPWWKNSSVEAFKRQTECMVEQYSNYSVNGEPVNGRHTLGENIADNGGLKAAYRAYQNWVKKNGAEHSLPTLGLTNNQLFFLGFAQVWCSVRTPESSHEGLITDPHSPSRFRVIGSLSNSKEFSEHFRCPPGSPMNPPHKCEVW

SEQ ID NO: 899013 - protein, 777 aa, Homo sapiens
WIRAESVGTRPPLRQEAALMPLQGLGLQRNPFLQGKRGPGLTSSPPLLPPSLQVNFHSPRSGQRCWAARTQVEKRLVVLVVLLAAGLVACLAALGIQYQTRSPSVCLSEACVSVTSSILSSMDPTVDPCHDFFSYACGGWIKANPVPDGHSRWGTFSNLWEHNQAIIKHLLENSTASVSEAERKAQVYYRACMNETRIEELRAKPLMELIERLGGWNITGPWAKDNFQDTLQVVTAHYRTSPFFSVYVSADSKNSNSNVIQVDQSGLGLPSRDYYLNKTENEKVLTGYLNYMVQLGKLLGGGDEEAIRPQMQQILDFETALANITIPQEKRRDEELIYHKVTAAELQTLAPAINWLPFLNTIFYPVEINESEPIVVYDKEYLEQISTLINTTDRCLLNNYMIWNLVRKTSSFLDQRFQDADEKFMEVMYGTKKTCLPRWKFCVSDTENNLGFALGPMFVKATFAEDSKSIATEIILEIKKAFEESLSTLKWMDEETRKSAKEKADAIYNMIGYPNFIMDPKELDKVFNDYTAVPDLYFENAMRFFNFSWRVTADQLRKAPNRDQWSMTPPMVNAYYSPTKNEIVFPAGILQAPFYTRSSPKALNFGGIGVVVGHELTHAFDDQGREYDKDGNLRPWWKNSSVEAFKRQTECMVEQYSNYSVNGEPVNGRHTLGENIADNGGLKAAYRAYQNWVKKNGAEHSLPTLGLTNNQLFFLGFAQVWCSVRTPESSHEGLITDPHSPSRFRVIGSLSNSKEFSEHFRCPPGSPMNPPHKCEVW

SEQ ID NO: 899014 - protein, 754 aa, Homo sapiens
MMSTYKRATLDEEDLVDSLSEGDAYPNGLQVNFHSPRSGQRCWAARTQVEKRLVVLVVLLAAGLVACLAALGIQYQTRSPSVCLSEACVSVTSSILSSMDPTVDPCHDFFSYACGGWIKANPVPDGHSRWGTFSNLWEHNQAIIKHLLENSTASVSEAERKAQVYYRACMNETRIEELRAKPLMELIERLGGWNITGPWAKDNFQDTLQVVTAHYRTSPFFSVYVSADSKNSNSNVIQVDQSGLGLPSRDYYLNKTENEKVLTGYLNYMVQLGKLLGGGDEEAIRPQMQQILDFETALANITIPQEKRRDEELIYHKVTAAELQTLAPAINWLPFLNTIFYPVEINESEPIVVYDKEYLEQISTLINTTDRCLLNNYMIWNLVRKTSSFLDQRFQDADEKFMEVMYGTKKTCLPRWKFCVSDTENNLGFALGPMFVKATFAEDSKSIATEIILEIKKAFEESLSTLKWMDEETRKSAKEKADAIYNMIGYPNFIMDPKELDKVFNDYTAVPDLYFENAMRFFNFSWRVTADQLRKAPNRDQWSMTPPMVNAYYSPTKNEIVFPAGILQAPFYTRSSPKALNFGGIGVVVGHELTHAFDDQGREYDKDGNLRPWWKNSSVEAFKRQTECMVEQYSNYSVNGEPVNGRHTLGENIADNGGLKAAYRAYQNWVKKNGAEHSLPTLGLTNNQLFFLGFAQVWCSVRTPESSHEGLITDPHSPSRFRVIGSLSNSKEFSEHFRCPPGSPMNPPHKCEVW

SEQ ID NO: 899015 - protein, 767 aa, Homo sapiens
MEALRESVLHLALQMSTYKRATLDEEDLVDSLSEGDAYPNGLQVNFHSPRSGQRCWAARTQVEKRLVVLVVLLAAGLVACLAALGIQYQTRSPSVCLSEACVSVTSSILSSMDPTVDPCHDFFSYACGGWIKANPVPDGHSRWGTFSNLWEHNQAIIKHLLENSTASVSEAERKAQVYYRACMNETRIEELRAKPLMELIERLGGWNITGPWAKDNFQDTLQVVTAHYRTSPFFSVYVSADSKNSNSNVIQVDQSGLGLPSRDYYLNKTENEKVLTGYLNYMVQLGKLLGGGDEEAIRPQMQQILDFETALANITIPQEKRRDEELIYHKVTAAELQTLAPAINWLPFLNTIFYPVEINESEPIVVYDKEYLEQISTLINTTDRCLLNNYMIWNLVRKTSSFLDQRFQDADEKFMEVMYGTKKTCLPRWKFCVSDTENNLGFALGPMFVKATFAEDSKSIATEIILEIKKAFEESLSTLKWMDEETRKSAKEKADAIYNMIGYPNFIMDPKELDKVFNDYTAVPDLYFENAMRFFNFSWRVTADQLRKAPNRDQWSMTPPMVNAYYSPTKNEIVFPAGILQAPFYTRSSPKALNFGGIGVVVGHELTHAFDDQGREYDKDGNLRPWWKNSSVEAFKRQTECMVEQYSNYSVNGEPVNGRHTLGENIADNGGLKAAYRAYQNWVKKNGAEHSLPTLGLTNNQLFFLGFAQVWCSVRTPESSHEGLITDPHSPSRFRVIGSLSNSKEFSEHFRCPPGSPMNPPHKCEVW
